United States Patent Application Publication US 2008/0229439 A1 - sequence listing, part 9

SEQ ID NO: 18114 - protein, 357 aa, Oryza sativa
  Clone ID: TF_OSC401367j.C1.p31.fg
MKVLCSACEAAEARVLCCADDAALCARCDLHVHAANRLAGKHHRLPLLSSSSSSSSPSPPTCDICQDAHAYFFCVEDRALLCRACDVAVHTANALVSAHRRFLLTGVHVGLDAAADDDDKHPPHPLSSSLPRNTAPPPQPPPKRSPSPIYSDDDVIDWATGGHDIGITGNLPDWSLVDEQFNTPALPPVVTKTPPKRASRGPVTAGTAAAVFGNLAGGSPDWPLNEFFGFADFSSGFGFAENGTSKADSGKIGSMDGSPNGGRSSSSSSSSSAAAAGGGGGGQDFFGQVPEVHWAVPELPSPPTASGLHWQRDPRYGGGATDASAVFVPDISSPENPFRCFAAAAAGDHTMKRRRRC

SEQ ID NO: 18115 - protein, 276 aa, Oryza sativa
  Clone ID: TF_OSC419638j.C1.p6.fg
MASDGSASPASCGGAACGVCGGAATVYCAADAAALCVPCDAAVHAANPLASRHDRVPLAVAMAAASSGVGRGRGAPTTARRASPTTAPAAAAAAAPKGASLTCSPTSTSCPAAAAASRRRSTAPPRRRWGLHPGQLAALTPWSPADSVVVPTSAAGAVAAAAAAREERVRRYREKRKNRKFQKTIRYASRKAYAEARPRIKGRFVKRATTAAASSSSDDDSTAAAGVSGAGGAGAAATKEAKFWLSFSDDGRADGVGFYMDSTTAATAAYGVVPTF

SEQ ID NO: 18116 - protein, 332 aa, Oryza sativa
  Clone ID: TF_OSC401179j.C1.p19.fg
MEAVEDKAMVGVGGAVAAGYSSSSWGLGTRACDSCGGEAARLYCRADGAFLCARCDARAHGAGSRHARVWLCEVCEHAPAAVTCRADAAALCAACDADIHSANPLARRHERLPVAPFFGPLADAPQPFPFSQAAADAAAAREEDADDDRSNEAEAASWLLPEPDDNSHEDSAAAADAFFADTGAYLGVDLDFARSMDGIKAIGVPVAPPELDLTAGSLFYPEHSMAHSLSSSEVAIVPDALSAGSAAPPMVVVVASKGKEREARLMRYREKRKNRRFDKTIRYASRKAYAETRPRIKGRFAKRTADADDDDEAPCSPAFSALAASDGVVPSF

SEQ ID NO: 18117 - protein, 380 aa, Oryza sativa
  Clone ID: TF_OSC411062j.C1.p12.fg
MARDDDPAKKLAVDGGVAAAARCCDFCGGLPAVVYCRADSARLCLPCDRHVHAANTVSTRHARAPLCSACRAAPAAAFHRGDGFLCSSCDFDERLRRGSIGGGGDELPLDDRAAVEGYTGCPSIGELAAILGVVGGDSDKPADDGWWSASWEEEAPQVLSLDDIIVPTTSCHGLRPLLTPPSPENQSSPDNGELDGEVVRQLGELARSEAAAQATFVAGDQLASWASPEFTSGHGDFGIEAASTTVPSCENETWIMSTDCTDPTDASKTDIAREEAPASSSAEPCLSSLVEISEICRSMSYSGSGIDNGGHDPSTLAIMPTQALPKKGVYDIAYPDRGTVISRYKEKRKNRRFDKQIRYESRKARADGRLRIKGRFAKSN

SEQ ID NO: 18118 - protein, 360 aa, Oryza sativa
  Clone ID: TF_OSC415950j.C1.p4.fg
MKIQCNACGAAEARVLCCADEAALCTACDEEVHAANKLAGKHQRVPLLSDDGGAAPAAAAPAVPKCDICQEASGYFFCLEDRALLCRDCDVSIHTVNSFVSVHQRFLLTGVQVGLDPADPVPPVADKHVKSAGGSVDSATKHLQRNPTDLSGENSASLPSQNVINGNYSRQSSVTMAKTGQVNWTMSNNTIRSIDPPPKYSSEESPALLLASHTSTMAAYSSQISKDSDRIYNLPFTGGNGSDSLHDWHVDEFFSNSEFGFAEHGSSKGDNAKPGSAGGSPQCRLAEGLFVEGLLGQVPDNPWTVPEVPSPPTASGLYWQNNLLCPSYDSTMFVPEISSLENSQNNFTVSAGLKRRRRQF

SEQ ID NO: 18119 - protein, 505 aa, Oryza sativa
  Clone ID: TF_OSC400903j.C1.p13.np
MDSSRDSEEERPQRKDNGEETENGEDGGNALSLKDVANELLGCVVHRQKMEAEWHIPSSPPNPKSASRLLPSLSITTPRPTPNQTPCGRDLAALAMPPPLSFLHLAANPTPLHASPLRRARLRHRLSLRTDHPSRRAVASASASAGENPSTPGGPIADVEMVRGKDGVWTARPPTVVVLWDLDNKPPRGPPFPAATALRDAASLLGRVVSVSAFANRHAFSHVPAWVADERRERRAMDRAERAGAASPPVPYSCAVCGRRFPTRPDLTRHFRQLHQRERNKKLSRLRSLKGKKRQKFRERFISGNTKYDDAARELLTPKVGYGLAAELRRAGVHVRTVSDKPQAADHALKRQVKHSVACGVDWLVLVSDDSDFTDTVRKARAADLRTVVVGDGCRALGSVADIWLPWDRVENGEVDEDMLRNGTHMGFRDEEEDEQDDDEFIVDWDTSDLDGVVDDIVATRTKLFGATTMSAFADEEIMDGILGVGINGGDMLWSSDDEDEDGYF

SEQ ID NO: 18120 - protein, 224 aa, Oryza sativa
  Clone ID: TF_OSC402699j.C1.p3.fg
MAMAFLGQSRLYDGISWNSHLSMAFLVPPVSVATSAPSLSLPPPLPSSSLSLSLFSASRPVAGAKAARVRRRRQVANGETEALHAAVLKEEEQQHEVEEAAVVTSSSATSGEEGGHLPQGWAKRKRSRRQRSEEENLALCLLMLALGGHHRVQAPPPLSAPVGAEFKCSVCGRSFSSYQALGGHKTSHRFKLPTPPASPVLAPASSEVQSPLAFSPRNSAAARI

SEQ ID NO: 18121 - protein, 713 aa, Oryza sativa
  Clone ID: TF_OSC100644j.C1.p16.gm
MSRYHLDAAAGGAFFSKMVQGAVELIEKMVSNMGWNEERLQMRQRGMHTVKESELLAAKLDLLMKCLDDHEKRPQGTVKALDSHVTCEVCGNTGHSGNDYPETREEAMYMGNNNGYRSQGGTNGISKQAPSSDSADKEVQPEKTVPQEYCDTRLLPFPQRCRKPSVDEQFARFVEVIQKIHINVSLLDAMQVPTYTRYLKDIVNNKRPLPTTEVVKQCSNVILHKLPEKKKNQGIMPKDVFDRLNFTVLAPTPMRLQLADSSVRYPAGIAEDVSVKTRDFFIPVDFVVLDMDTGKETPLILGRPFHVNGKEEKFEFQPRTEQYSMNFMEKETTMPKNRYWKMPVEPPILAKKLEQPAQKKPPSAPKPKKVWRKKPKTPTPSPPETDVLMEDAEAPRRLLNDTDLDLVSDRKRQAYYMLSDREYAHTREYSPELLKKIGGTYRETRNMIRNEQESSSSSTPVQMYEAARYWILARRKLGDQKAPLFPTPHITIGAGGSSTSYYESWEERAFAEDSAGHLGGCIWPPRSYSCSFCGREFRSAQALGGHMNVHRRDRARLKLSGVVEDGTGGESHGMPPNQNYMIQPCPPQIGTLQHAYSPNPRSGSILAADTNPNSICDVVAYPARSLLQVAAARTALGKQVLNAPLVSSKSPSAGREHGKRETLFLGAVRLAQDHDTQDGGDDQHHEKILKLYRSSSVEELDLELRLGEAPKEQ

SEQ ID NO: 18122 - protein, 314 aa, Oryza sativa
  Clone ID: TF_OSC102397j.C1.p1.fg
RYWILARRKLGDQKAPLFPTPHITIGAGGSSTSYYESWEERAFAEDSAGHLGGCIWPPRSYSCSFCGREFRSAQALGGHMNVHRRDRARLKLSGVVEDGTGGESHGMPPNQKYMIQPCPPQIGTLQHAYSPNPRSGSILAADTNPNSICDVVAYPARSLLQVAAARTALGKQVLNAPLVSSKSPSAGREHGKRETLFLGAVRLAQDHDTVSSNLDLRVGKNELKITTVLGCRSRRDFMYDNDRADDEKTVEASHKKRRIDLEVNPLILTSSTSNHQQQDGGDDQHHEKILKLYRSSSVEELDLELRLGEAPKEQ

SEQ ID NO: 18123 - protein, 103 aa, Oryza sativa
  Clone ID: TF_OSC416211j.C1.p3.fg
MDGEGAPARRAPAASYYECTFCKRGFTNAQALGGHMNIHRKDRSAGGKSQGGGQHHEGGGSGSGGGGGQQHGRDVHLGLTLGRNEEERDGVDLELRLGHAHYP

SEQ ID NO: 18124 - protein, 129 aa, Oryza sativa
  Clone ID: TF_OSC900062j.C1.p12.fg
MDRYNGGGGGGEEGDEQLDLNLSLQPSQANEPPGYFTCTYCDKKFYSSQALGGHQNAHKFERSVAKRTRELAAARRQQAADEEARRGAGTTTTREPTGNASSSYQRASPPAEARRRDLLTDDIDLSLKL

SEQ ID NO: 18125 - protein, 416 aa, Oryza sativa
  Clone ID: TF_OSC400899j.C1.p35.fg
MAPSRISSSESERPVGSYRFHIPRQPPRIQAEGGKRHMIIGDRRHGGTALWRRGSMLPPSLPRWGVEDGHGHVDGSSRQHPSELGFSSALSVPIGGWIWRLAAAQAHGEVIDGGRCEDEAGDHMQPPPASSASMAMLSEERISASGIVVRERQLHGYGERPFQPCLATMAAKGTAREISTKKIAKKDHGEVGDLTMAVLMPSWTSTGNHSSRNPTRCLEQLPEPSKRAHSEAYGNMQLATGDLIVGLHKQATITVPPPNISEIGGHLTAHKNNEMTMGKGVQHTIDVSVAKEATRSLVSSARQSRRGPYECRKCGTMFSSGQALGWHMKSHNSDERWGDKRVPSAFVGSFLSLITPIDVSNVSVPSSRNPHTSSIPNKEEGRVLVMGAAPLNGVPKGSFRLFGENIAEAPKEEPME

SEQ ID NO: 18126 - protein, 97 aa, Oryza sativa
  Clone ID: TF_OSC20529j.C1.p3.np
WVMWGSAGRRRIIRQSASWEEQAFARDAAANANLGGCVWPPRFYTCSFCQREFRSAQALGGHMNVHRRDRARLRQADLLLLLPQPPSSPGYEVYAGG

SEQ ID NO: 18127 - protein, 245 aa, Oryza sativa
  Clone ID: TF_OSC900003j.C1.p8.fg
MEEQRGEEEWVMWGSAGRRRIIRQSASWEEQAFARDAAANANLGGCVWPPRFYTCSFCQREFRSAQALGGHMNVHRRDRARLRQRQTSSSSSPSHQEEEAEAPQDQQAGPYYTSFSKPSTTSTDNTTCSNDILLLARDQETIKKRVPRQQVQVVADQDEDEPAGRRYKRRRLGLVDQLPSSCEGGDHHHQVLIITPTTAAASPSSIIASASALVVGDQQHQQAGSVLDLELRLGTSTPPKAVVHA

SEQ ID NO: 18128 - protein, 449 aa, Oryza sativa
  Clone ID: TF_OSC33060j.C1.p2.gm
MRSKAIRSGVPLTSGRLDLRFLGQRTMLRSRARMQRHWCSTTVVEMTLARLLGIKESTPVITNVLKNTLITDEYLIRDGDVWPPATKRPRTGGRRGVGHGGGGGEGRRGGGRGGGAVEAGSSTVELDSEPRPALAPHPPFLSVGSVVVVVGRLASKAGSDLALACGVGVVFILRSELPGDEAAHHPEALGVAATRLLITLSAHMGHTIAERLCKTQGQPRSAGLSPRAGDESQRQRRRRTRGGGPRCCGRWSWARHVKGFFSSPLRNKRAALTVVTRVATSMAPTSSSTPAGSRALAAEGVFECKTCNKSFPSLQGLGGHRTSHTRLQAKLLSDPAAAAAERDRARIHECAACAGGETGTTTVVLTAADVDDSGGATVPQPPEAMLDLNYPPPVAVPPSPAAARARRSAAPICSLPAACASAAALPACLLNRVAPPPPPGFTKPTEHTD

SEQ ID NO: 18129 - protein, 317 aa, Oryza sativa
  Clone ID: TF_OSC400622j.C1.p29.fg
MSLASTSSTEIEMDEKKEMTKKTEQEKTLTSYVLRENPKRSYKVSAGEFSGGGGGGGGGGESSVVQDGESDTESSPPRGGAGSFFAVSRRRSKRARRRRRAPDPEPASSVSDATTEEDVAMSLLMLSRDSWTRSRSEHETHHRGASSEAEQNNNNVVNVFDEEDEDARDVAGEDHDEELSYGGGEAAAARHRTSRFQCGACRKVFRSYQALGGHRASLKRGKGGGCVPPPRPAPASSAAAPAIHECPFCFRVFDSGQALGGHKRAHMPSGGARPSPSPSPAKCGESSGSIDLNMPATMEDDFELSAVYDAEFASTRQ

SEQ ID NO: 18130 - protein, 857 aa, Oryza sativa
  Clone ID: TF_OSC400502j.C1.p32.fg
MGKKKKRVEKVFCYYCDREFDDEKILVQHQKAKHFKCHVCHKKLSTAGGMAIHVLQVHKESVTKVPNAKPERESTEIEIFGMQGIPPDVLAAHYGEEEDPSSKVAKVEVPSLRPPVMPNPAGMVYPPRPAYGVAPPMYNPALNPLMARPPIWPAPPPQPWFTQPVVSVPQMASGLAPQQPLFPIQNMPAPMTSAPANLLQTSFPMAHVGVPSPVTPQVSQPLFPVSTSAGNGAVSSPYVASVAPGSIPTSSPSVAPAGVGYAATNQGTGGPAAVPPPASNNKAPATQPGANEVYLVWDDEAMSMEERRLSLPKYQVHDETSQEFQVGIYIVLPARARVLRPDELLLDHYYYHSSSSDPYYSTPILPPYGDAFSPPNPPPPPPPMSPSCLLPPIIPAPTFTYSSPPPPPLYYPPPPDISPSPPPSVTPLPPVVYPSPPEVTPSPPEIAPYPSPPEIVPSPPEITPYPSPPEIVPSPPEITPYPSPPEVVPGPPEINPYPSPPEIVPSPPEITPYPSPPEIVPSPPEITPYPSPPEIVPSPPEIAPSPPIVTPMPPIIYPSPPEVTPSPPEITPYPSPPEVTPGPPEITPYPSPPEITPSPPEITPYPSPPEVVPSPPKITPYPSPPEVTPSPPEITPYPSPPDIVPSPPSYEPSPPSYEPSPPEYAPEPPVYAPYPPGIFPSPPEYSPEPPAYVPSPPQYAPQPPSYVPSPPEYAPEPPVYAPYPPGITPSPPEYAPEPPPGPPGGGGGYLPPVVFPPPYASRGPPGRRAVWCVAKPSVPEGIIQPAMDYACGSGADCDSIQPSGPCFRPDTMIAHASYAFNSYWQRAKSNGATCDFGGTAMLITKDPSYGGCHYSTM

SEQ ID NO: 18131 - protein, 153 aa, Oryza sativa
  Clone ID: TF_OSC401614j.C1.p1.fg
MASSSQTTVSMEVAMKVEGSGGGGGDGEEGEVVAKKEEEVAAAAAAMELDLLGALRAEEVMPAEKGKAAVVMVGEAVAPSVEERASAVAAAAANGGGGGGEARRRLFKCNYCQRKFYTSQALGGHQNAHKRERSPRQARRRRGGRGGGRRARP

SEQ ID NO: 18132 - protein, 478 aa, Oryza sativa
  Clone ID: TF_OSC401275j.C1.p67.gm
MESRSAREHGHGHLHQQHQRPWSCSFGFSWPPLQRSPPPSSSSSSYTCGYCRREFRSAQALGGHMNVHRRERARLRQFPNPRPHPLPNLNLSPPPPPPPPPPPPQQQQQCYCPGDRPAIVYSFFSTAAAAMAATKGLEVDLELGVGGDPLDGCAHDADELWHEAFSQGARAAANVQLRGGPIPSGSQAQDSRTCMAGRSRLQRRRRRPPWQWRAQLPSPLQPVLPAAAWEYGEENVRGGEGRADAIDYVLYIDARYFPRVPSTSQRLLPLRGASSAPTPSNFNLRSILEKEKLTGTNFMDWYRNLRIVLRQEHKEFVLTQPFPVDLPNNAIAAQCREHERRCNEYHDISCLMLATMSPKIQRQYEALDAHTIITGLRNMFEDQARAERFNTSKSLFACRLAEELHGMLKTAEESIKKNSNHVMVMHKRKPNNKKSGQKRKLNSDEIMSTSNSKTKVQKTGPAKNAECFFCKETGAEKK

SEQ ID NO: 18133 - protein, 620 aa, Oryza sativa
  Clone ID: TF_OSC32420j.C1.p2.np
MHEASEVKIPARPRSNTICNPRLDVIVAANHSVFIKGVLSLAICMQVSTAVGSCDYASTVPAAIVSSGSGVVNHTSYCTCRSIDIMLQLPLPWPLALHLNCKWSGVVVLCSSNIQSIRKQQAKKQHHSLHELAKRIAMVEPGRARETKVTASASSSAGSDAAVMKKKKKKKKKLVVASRKVDEKDKKQVDYKCSRSSGRDECCKVESRHQQCTEPESPSYRNSSSSSHAGHHHHRAADNSSSSSHAGHHHHRAADGKKLGCNSASICKVKQDNPMQQHMRRAEELKVKDKPPVAEPYCKRRASVSACNISSERSVKKSVKQQQQEASSSLQSSASISASSCSSTAGGGGSFRGMQQLSLRRLSGCYECHMVVDPISGVFRDSSSMRATICSCPDCGEIFVRPDSLHLHQSIRHAVSELGAEDTSRNIISIIFQSSWLKKQSPVCAIDRILKVHNAARTLARFDDYRAAVKAKAMAHRHPRCTADGNELLRFHCATLSCDLGLHGATHLCDHLSCAACAIIRHGFRPPAPGAGIRTMATSGRAHDAVVSSGSEGDRRAMLVCRVIAGRVRREEAAAAAAEEEEEEYDSVAGTTPGLYSNLDELDVFNPTAILPCFVVVYRA

SEQ ID NO: 18134 - protein, 621 aa, Oryza sativa
  Clone ID: TF_OSC401200j.C1.p51.np
MHEASEVKIPARPRSNTICNPRLDVIVAANHSVFIKGVLSLAICMQVSTAVGSCDYASTVPAAIVSSGSGVVNHTSYCTCRSIDIMLQLPLPWPLALHLNCKWSGVVVLCSSNIQSIRKQQAKKQHHSLHELAKRIAMVEPGRARETKVTASASSSAGSDAAVMKKKKKKKKKLVVASRKVDEKDKKQVDYKCSRSSGRDECCKVESRHQQCTEPESPSYRNSSSSSHAGHHHHRAADNSSSSSHAGHHHHRAADGKKLGCNSASICKVKQDNPMQQHMRRAEDELKVKDKPPVAEPYCKRRASVSACNISSERSVKKSVKQQQQEASSSLQSSASISASSCSSTAGGGGSFRGMQQLSLRRLSGCYECHMVVDPISGVFRDSSSMRATICSCPDCGEIFVRPDSLHLHQSIRHAVSELGAEDTSRNIISIIFQSSWLKKQSPVCAIDRILKVHNAARTLARFDDYRAAVKAKAMAHRHPRCTADGNELLRFHCATLSCDLGLHGATHLCDHLSCAACAIIRHGFRPPAPGAGIRTMATSGRAHDAVVSSGSEGDRRAMLVCRVIAGRVRREEAAAAAAEEEEEEYDSVAGTTPGLYSNLDELDVFNPTAILPCFVVVYRA

SEQ ID NO: 18135 - protein, 125 aa, Oryza sativa
  Clone ID: TF_OSC407914j.C1.p1.fg
MEYAAPAGAGAGGYYYYPPSQQHKPRRPPRPAARWVKHWIPQDLATSSGKCALYKWVREDVYKNLKDGKAVPEPEAVKPEPTTEILFLCSYENCGKTFVDVAALRKHAHVHNERQYICQEPGCGK

SEQ ID NO: 18136 - protein, 511 aa, Oryza sativa
  Clone ID: TF_OSC400103j.C1.p2.fg
MALSTLLLPSSSSSSSKTATATDTSDRRRHHHHHNHTKRKKKPPPPPLSPTPRTPPPAGSGSHRAMAASSKKSTKQVVVAAKTTTGHRPKKAAAAPTTPSRGAPSASAAPVSSSWEQLKSLLSCRSATAAARVHDPAAPSSALSRLRSHGAGACGASLCAIRDVVDAASSASAASTAAASLDRDTTPLTRSSRRAHRAATSSSGGGGGHHASLRGLSGCYECRAINVEPMSRRYPRPRELCACSQCGEVFNKADSLEHHQAIRHAVKIGWQKYIKRYLCLAIFCMLAVASASPFVEVSELGPEDSGRNIVEIIFKSSWQKRDRPICQIDRILKVHNAARTVARFEAYRDAVRTRCRATAARAAADGNELLRFHPAALACPLGLNGATSLCDDDDACGVCAAIRHGFAPWAGAHPLGVRTTASSGRAHDCGAAAAAAQQAGGCRAMLVCRVIAGRVRRNDDDGGAEEEEGAFDSVAGDEAASSVYGNLEELFVANPRAILPCFVVIYRVVPE

SEQ ID NO: 18137 - protein, 404 aa, Oryza sativa
  Clone ID: TF_OSC409369j.C1.p1.fg
AAPVSSSWEQLKSLLSCRSATAAARVHDPAAPSSALSRLRSHGAGACGASLCAIRDVVDAASSASAASTAAASLDRDTTPLTRSSRRAHRAATSSSGGGGGHHASLRGLSGCYECRAINVEPMSRRYPRPRELCACSQCGEVFNKADSLEHHQAIRHAVKIGWQKYIKRYLCLAIFCMLAVASASPFVEVSELGPEDSGRNIVEIIFKSSWQKRDRPICQIDRILKVHNAARTVARFEAYRDAVRTRCRATAARAAADGNELLRFHPAALACPLGLNGATSLCDDDDACGVCAAIRHGFAPWAGAHPLGVRTTASSGRAHDCGAAAAAAQQAGGCRAMLVCRVIAGRVRRNDDDGGAEEEEGAFDSVAGDEAASSVYGNLEELFVANPRAILPCFVVIYRVVPE

SEQ ID NO: 18138 - protein, 261 aa, Oryza sativa
  Clone ID: TF_OSC400700j.C1.p5.fg
MAAPHGMHGVAAAAPDATIRLFGRDVVSNDDAVVVVVDGQLPKEEAEEEAGGGAAAAAGETRRFECHYCRRNFPTSQALGGHQNAHKRERQHARRAHLEASLAAAHYLGQSAHLVYGGAALFGYGGHAAAVSPQYGPVWASSAVAPPGLYATSMGMARPAAYGAGVDVSALWRASSSSSSSPPMMGSGGGGAFGTVAGGGRHGEAAAAALVGCRAGKDENVVMSVVTSLPSLPSWQLPAPEKMGRSELGQEAGVVSLELRL

SEQ ID NO: 18139 - protein, 225 aa, Oryza sativa
  Clone ID: TF_OSC400939j.C1.p50.hg
MAPTSSTEEVKHLTLHHLLKRQHRLKPAAVVWRWPTSVVPGGGAGRPPVPDEQLAADDVDGLGGTWPPRSYTCAFCRREFRSAQALGGHMNVHRRDRAKMRGHGLHGAAGQQLGAAEAPAAAAAARTEYAVALYPILNSGAGGAAVRIPHGDVLLSAPVALAAARRGHDHRCIDVGDDENDKKIDLELRLGILMTIKMRDDRQAVKQTSEAVAGTSRKRSSRRGV

SEQ ID NO: 18140 - protein, 195 aa, Oryza sativa
  Clone ID: TF_OSC101556j.C1.p17.fg
MSQKTSKDEVIGGRSPSGDGDKAEEELREARSGDDDDDDEAGTRQPYNCTFCRRGFPTAQALGGHMNVHRKDRVGRATPSSSSSTTAAAARRSVSYDTLVRLFRPPASGGSEDAAASTAAGGGASLRSRTAEPAPQELRLFGRGAGRREEGGGRDRRDRYGCCSKDGDGNGGHDHGEEEELDLELRLGGSGSAGS

SEQ ID NO: 18141 - protein, 339 aa, Oryza sativa
  Clone ID: TF_OSC400464j.C1.p1.fg
MEASAAKEKDKDGKKMSRVGSWGSMAFYSSSSSSRSQPVSAAEGKNGGKKEKRRSSISRSITCAGSICSTKESSVSSRGRGRRRRSGGGGGGDGGGGGSTSSRSLMGPGYHGDSAAAVSASSSFNAVMTAATSATATTTTTTTSSSATSPPSALSSPLSSIGGSFRAMQIRKLSGCYLHCHSVLDPRTLAAVVFSCPDCDEVFVKPDSLELHRSTRHAVSELGADDTSRNIVEIIFQSSWLKKNAPVCRIERILKVQSSDKTIKRFEQHKEAVKEKARSAGDEAGRNPRCVADGNELLRFHCTTFACSLGLAGGTALCCASSSPPPLHCKLCSIIKDGF

SEQ ID NO: 18142 - protein, 412 aa, Oryza sativa
  Clone ID: TF_OSC900002j.C1.p28.hg
MAFYSSSSSSRSQPVSAAEGKNGGKKEKRRSSISRSITCAGSICSTKESSVSSRGRGRRRRSGGGGGGDGGGGGSTSSRSLMGPGYHGDSAAAVSASSSFNSVMTAATSATATTTTTTTSSSATSPPSALSSPLSSIGGSFRAMQIRKLSGCYLHCHSVLDPRTLAAVVFSCPDCDEVFVKPDSLELHRSTRHAVSELGADDTSRNIVEIIFQSSWLKKNAPVCRIERILKVQSSDKTIKRFEQHKEAVKEKARSAGDEAGRNPRCVADGNELLRFHCTTFACSLGLAGGTALCCASSSPPPLHCKLCSIIKDGFRVDGNGRITTMATSGRAHDTAEVSPDGEKRAMLVCRVVAGRVKKLHSSNSSEDHDCDSATLDTSGIKTEGQKDRNTKMSATLNDDEASKILLSPEPD

SEQ ID NO: 18143 - protein, 198 aa, Oryza sativa
  Clone ID: TF_OSC400555j.C1.p31.fg
MAPVMSSPGQQEAVASPTAAPTAARPYYGCVFCKRGFTTAQALGGHMNIHRRHRHRAMPSRRPTATGTTSMVSRDDVDCYNQHRYLEYSPPPPTPAPPPVTSPPMSSSFAATSYAGGTATVAGVDGEAMRAAGSSDSHIRELSLLGGADSSTDRDHDLHLRLGRHGRGGDGSPRTPEGSPERKPDLDLELRLGRRPRH

SEQ ID NO: 18144 - protein, 267 aa, Oryza sativa
  Clone ID: TF_OSC400851j.C1.p59.fg
MSMTSPRLKLFGFDVSEEETAEHEEQYSAEPESAPVCGGNGGGGGGGSDSSSSSTTTTTTATAGGDGRRYECQYCCREFANSQALGGHQNAHKKERQQLKRAQLQAAAAAAGRVAGGAAALYPRANPMVSAFAPTPHLLGGGEAGPTSWVYFSPRAAAVAGGAQGQQFHVSHGCVFPARGAGPAAVAAASPAVFSYTPATSAAAVAAASAPYVTTDEHHGRRIHASSAASLARYPGPAMVVAEPVATVPEDTCLGLDLQLSLAPAGL

SEQ ID NO: 18145 - protein, 167 aa, Oryza sativa
  Clone ID: TF_OSC900255j.C1.p9.fg
MDPSSASWPAPASPPVELSLSLPAAAARNRDEAAPTAIVDGKQVRLFPCLFCAKTFRKSQALGGHQNAHRKERVAGGSWNPNVYGDGGGSASMPIASHGVTAAGSSTAADGRWCGGAASDDDTTAAPMPSLGSGSAALGAGAGFASTERGSSGGGVAGEELVLELGL

SEQ ID NO: 18146 - protein, 240 aa, Oryza sativa
  Clone ID: TF_OSC401400j.C1.p15.fg
MKSSSQEAGEEVSEISSQAASNNNETCNSSSGKVSLDLSLTVAAAAAAAASATESSTTDSGGTRPAATATATAREPARVFTCNYCQRKFFSSQALGGHQNAHRRERTLARRAVRLDAFPYGYADVASLPLYGAGLYPIGIQAHASVHHHHPGVAAPAGRAELRSARALLGPMPFFVQAAGDEDASFGWPGSFRPPPTAATTIPAAAAAPVAVNSGSSNSNHGGSVVVQAAADEPDLTLRL

SEQ ID NO: 18147 - protein, 242 aa, Oryza sativa
  Clone ID: TF_OSC400758j.C1.p29.fg
MAGVVQTVQCDQPSKQQLTEAAEAAAAAAAAASLRIFGYEVGGGGGGGGVAAAAGARREAADVVVGAGRRFECQYCCREFANSQALGGHQNAHKKERQQLKRARLQLAVAAAGTPAGMGFAAAQAPAPPPGHVIAVGHHAGSVASYALPRWVYLAAHHLQPPAVGLPFHATVQAAAGACHGGGDVETRLLSVAAAGRGSSTAGSSAHSYEVCAPAAPADDSDEEASAMGLDLHLSLAPASSA

SEQ ID NO: 18148 - protein, 125 aa, Oryza sativa
  Clone ID: TF_OSC401716j.C1.p200.gp
LITWLIKLAIAMSKRSRSMWDMQEFVGSVDTARVLMLLAQQSQHGLLGGGGFAAGAQPVVVRGGAHDRVFECKTCNRQFPTFQALGGHRASHKRPRQQQQHALGGGAGADDAGLCLGRQPTPPRP

SEQ ID NO: 18149 - protein, 188 aa, Oryza sativa
  Clone ID: TF_OSC409799j.C1.p26.gm
MGEGRWPAATEAVGAKEVAAGVGDLVAAPNMARRCPSADEDDDAGEVKTPNDGLPEKVVVDMSSPASGGGGRRLFPCLFCEKKFVKSQALGGHQNAHRKERGAAAAAGCLNPYVFYGAGAGAAPAPATLSLLLQVDNSYTTTSYIDEHGRAAAPPPPNSDHFFWTTAGAASRGGAGAGGEVDLELRLF

SEQ ID NO: 18150 - protein, 454 aa, Oryza sativa
  Clone ID: TF_OSC100047j.C1.p3.fg
MAGGGRCSSLLRGFVSLFFLLFIHIGHAGCCFSTGSSTQTLEEDDTGHGADGRGGGGGGSKRRKISPLAFSPSVSSSTVADERSRARRRQVSSLATSVRFYLHRIFSYSSGAKNGAGAPAAEEEDEAVTTTVSSPLAQSSSCLPQRQASSSVVLSTPSSPCASPFLSPLSPQSLSITPAVPSSPHNRQIPQATTRQSSFRSFAARGDVFPCKVCGEVLSKPQQLELHQAMKHSLSELSSLDSSMNIIRMIFLAGWKPAVMPGAGEPPSVRRILRIHHNPRVLTRFEEYRDLVRARAARRCAGAGAAAVEERCVADGNERLRFYCSTMLCTLGAGVCGSPYCCTCSILRHGFAGKQADVDGIATYSSGRAAHASLPDDVEREFAFLQVRRAMLVCRVVAGRVGRGAADDKVAYDSMVPLLPTSSFAAATRGDDDVELLVFNPRAVLPCFVIIYSC

SEQ ID NO: 18151 - protein, 316 aa, Oryza sativa
  Clone ID: TF_OSC25771j.C1.p3.fg
MASEWDSPCQFCGKNFKRRGDLLNHELTCKYISDVHPQTESSGDAQARKDILGFHIPRQKRTVPAFPASDYAQGGINGATNDEPAASNNPDQVLKMCSDKGSSPVECYGGDERRVGACAIAGVEEDDLSPNVGCRGVTDCVDESNVIQKQKRQPDLSVADLRDLVEMKQQNMKADTNIHDQGHPSVMQMQKNELSLDLLPHKNSSDHEVPTLSVSSMDDPDGLVSTDTNSDKETETVNVGIDINIPEQRESSVTRMQNEKLGLNLLPRNDSSGHEVPILSVSSTDDLNSLIPTDTSSDKDTNSNVADRLGHCPAQE

SEQ ID NO: 18152 - protein, 360 aa, Oryza sativa
  Clone ID: TF_OSC900043j.C1.p16.fg
MASEWDSPCQFCGKNFKRRGDLLNHELTCKYISDVHPQTESSGDAQARKDILGFHIPRQKRTVPAFPASDYAQGGINGATSEVKVDWDPEEETDVLEALLLLREQPAYPGEETFSDDEPGAGNVDDEPAASNNPDQVLKMCSDKGSSPVECYGGDERRVGACAIAGVEEDDLSPNVGCRGVTDCVDESDVIQKQKRKPDLSVADLRDLVEMKQQNMKADTNIHDQGHPSVMQMQKNELSLDLLPHKNSSDHEVPTLSVSSMDDPDGLVSTDTNSDKETETVNVGIDINIPEQRESSVTRMQNEKLGLNLLPRNDSSGHEVPILSVSSTDDLNSLIPTDTSSDKDTNSNVADRLGHCPAQE

SEQ ID NO: 18153 - protein, 175 aa, Oryza sativa
  Clone ID: TF_OSC413151j.C1.p3.fg
MEFGMVEDAAAAAGEEGLTLSLSLQPSPPRFQALFSCCYCPRKFRSSQALGGHQNAHKLQRNLARRGREAAASLAAAAAAAAAAAASSGDQQQQGRTTAAAAAVLAGGESAPPAAARAAADLDGAGVWGGAGMRGRPAHHHRLMQGGYSSGGSSAAGGRGNGELADEMIDLSLKL

SEQ ID NO: 18154 - protein, 134 aa, Oryza sativa
  Clone ID: TF_OSC101188j.C1.p1.gm
MASRHVYPRLPSPANREASSLWDPPRRASEMDSPSPMAAQAADLSLTLAPSGGGGGGGGGGGGGGSSSACIDGKDVRLFPCLFCNKKFLKSQALGGHQNAHKKERSIGWNPYFYMPPTPHPAGNAAAAAAAATP

SEQ ID NO: 18155 - protein, 210 aa, Oryza sativa
  Clone ID: TF_OSC22205j.C1.p1.fg
MEAPPSLSIVDEDGFVIDLSLTLGLTSPPPSPGGASPSIPPGRGGGGGTSGGDNNRGSRGGGNGGGGGGVRLFPCLFCNKKFLKSQALGGHQNAHKKERSVGWNTHLYLPAGVAAATTTTTTTTAMAVPDMVGMPTHQMSSMALHSCRPHQGSHVTAADIATLAAPPHYTVDHGVAGIASGGGDSSVGWRQRQREAGGEKQRQVDLNLKL

SEQ ID NO: 18156 - protein, 300 aa, Oryza sativa
  Clone ID: TF_OSC409246j.C1.p4.fg
MSVERDGRDQPNIDSFSQLPFIRQAAREKPPSSSSGGSVVVPPAPIRLFGFDVPPDASTTADVLGENKESAAAVVAAEGSKQTASGLDAIGGGGGSRKFECHYCCRNFPTSQALGGHQNAHKRERQRAKHAQFQTAMAMHHGHGQYYPLPDPYAAAFAAYPGHHHHHRFAATAAAAMPPPPHYPSWAAGSRYYSGPGSISQPINGSPVAPAGMWRLPAAASCVGLATTTTTAAPLPARRQERPAATIPSLLGGGEEPVVLGGAGSTSFSPSTSSSSSSASPHERRAQPARKENVSLDLSL

SEQ ID NO: 18157 - protein, 279 aa, Oryza sativa
  Clone ID: TF_OSC900375j.C1.p18.fg
MAKPQDMRSVDSFSQLPFIRPAPPPQQQARDTIRLFGCEFSNDLQLRPTEAGAGSPDAANGSTVTSEGSNGGDGGTKNGGAATAAAERKFECHYCCRNFPTSQALGGHQNAHKRERQHAKRAHLQASLAMHRYMPGHMYGLFNYHHHIGGRFDHHPPPPPPPPPPAHYPMWTSAAPGAFAGPGSMAQPINGSPVQAGLWSVPPPTENFGSTAGRQGADKLATTVAGTPAAGEVACKDEMVPMSLLSSSPSLSSCSSTSPEMLGRCELGQKEGVSLDLHL

SEQ ID NO: 18158 - protein, 135 aa, Oryza sativa
  Clone ID: TF_OSC900062j.C1.p13.fg
MEVNRGEEEDVNLELTLCYTSASSPEPIGFFLCMYCDRKFYSSQALGGHQNAHKYERSLAKRRREIAAALRAHGAPPPPPAPGGAGAAAAQKAVGVEAQQKHQHAPVVGGFARGGGKSSPPAAEYGDGLDLSLRL

SEQ ID NO: 18159 - protein, 665 aa, Oryza sativa
  Clone ID: TF_OSC400992j.C1.p60.gm
MEEFELQQQPYYSKLLLGSPLEIANVDDSDLQLVAGVPSDPPPAPPTAVKKKKKRSLPGTPDPSAEVVALSPRTLLATNRFVCEICGKGFQRDQNLQLHRRGHNLPWKLRQRGGAGGGGGGEPPRKRVYVCPEASCVHHSPSRALGDLTGIKKHFCRKHGEKKWKCDRCGKRYAVHSDWKAHSKVCGTREYKCDCGTVFSRRDSFVTHRAFCDALAQENNKLAQPMNMAAVTSALQGQQQAHHPVADDDDAAGVKSPHLKMFPDVDNIVAAATAGNPLLPPPLSMAGCMLSSLAAPLSSPFLPGCKLGVDAARDAAMVFPPPPPPAGSAAAIMSATALLQKAAELGATTSTGCYGGVAFPAMGIAGGLDRLPAIGHHLAPYDDVVVPAALQGQTATQLVGFDLGGLLPGQLYGGGGGAMTRAIGSLMHGGDQHAALDHRACSKIPRFRMEDGGKHFVFVHGLGHGAWCWYRVVAALRAAGHRATALDMAAAGAHPARADEVGSLEEYSRPLLDAVAAAAPGERLVLVGHSLGGLSLALAMERFPDKVAAAVFLAACMPAAGKHMGITLEEDLTLATMLVRPGTNYIDDPIMKDETLLTEGNYGSVKRVFLVAMDDASSDEEMQRWTIDLSPGVEVEELAGADHMAMCSKPRELCDLLLRIAAKYD

SEQ ID NO: 18160 - protein, 459 aa, Oryza sativa
  Clone ID: TF_OSC401656j.C1.p8.fg
MSVGADPEAEVIALSPRTLMATNRFVCEICGKGFQRDQNLQLHRRGHNLPWKLRQRSGKEPRKRVYVCPEKSCVHHNPSRALGDLTGIKKHFCRKHGEKKWKCDKCSKRYAVQSDWKAHSKTCGTREYRCDCGTLFSRRDSFITHRAFCDALAEETARLNAASGAAAAAAAATATSLCGQSYLFAGSGGPGMAGMRPNMMMPPAAAAAGGQLRAGQMLGPAAGGVGGDLCDGGVARHGGLSLWGGEALPSMGHIGVLASGGAATVPPQLYVDLFAPSSGAPPPQFDAAQLSWLYGNGKLSSSNASELTSATAAAKEAESVPSVFSNQQHAKPAAPTDMSATALLQKAAQIGAVTSTAAMPLVSPFEPTKPGGATASPADECGKFDGAALFAAASHHNANLGGAMSELTGAAGNVPYDVLSAVRHHAGLKDAGGVGREETRDFLGVGVQALCSSSIHGWI

SEQ ID NO: 18161 - protein, 206 aa, Oryza sativa
  Clone ID: TF_OSC420432j.C1.p6.fg
MSKRQFGEMDGGIDTARVLMLLSRRRRQHGDVGHARAARVFECRTCGRRFPTFQALGGHRASHKRPRHGAERAPRPAGDDDVGAGAGAALRLVGAASSLSTDEARAGGGGRRTRGAGAAHGCPVCGLEFAVGQALGGHMRRHRAAAGDVAAPRVKTDDVVVGDECTGGICLDLNLTPSENCDKCRHAQLGVAVNSVQRTILLDRPL

SEQ ID NO: 18162 - protein, 586 aa, Oryza sativa
  Clone ID: TF_OSC414116j.C1.p1.fg
MTYIPVRDGLSVTGVSSVTELERLARLEEEGEFLVVREEVGVVTGGARAEADIMLSSCAPTAVPPQDASGAATEPFRSLQIATAGAAAKKKRRPAGTPDPDAEVVSLSPRTLLESDRYVCEICNQGFQRDQNLQMHRRRHKVPWKLLKREAGEAARKRVFVCPEPTCLHHDPSHALGDLVGIKKHFRRKHSGHRQWACSRCSKAYAVHSDYKAHLKTCGTRGHTCDCGRVFSRVESFIEHQDACNAGRPRAAEASSSPGRGGGVVVGAPAAASSSQQQQLFAVPASLSRTASSASPSSDLVVSPVAWPATGGGGPAMVSPRAAAPAPAGGSIAAFHHRFTDPALSPPTPCGGRRGGCHTTHSLELQLMPPRTTTTCAGGSLGGTPVATAVGYYASSSPHSPAAALPSRQPVADAMRLQLSIGFGGARDDGNNNSSSSSGEVSASATRLKEAAHEQLRLAMAEKAAADEARAQAKRQAELADQELATARRMRYQAQVELSRAHVLRDHAIRQVDATQLQITCYSCSHKFRARAAAMISSDVASYVSSVVTEGGDAEVDNDGNLHRRRLNADDGMPRGHSRTMAMDLN

SEQ ID NO: 18163 - protein, 304 aa, Oryza sativa
  Clone ID: TF_OSC101118j.C1.p4.fg
MAQQHSPPPPPAPPSPPPALPCDPMPPPPRHDDTTLTLSLAPPAAARPLQAMVARAKCSSPTGDAPPCTECGRQFLSWKALFGHMRCHPERHWRGITPPGGGGAGAASSTAASQFTLREREVAASLLMLSGAHPARSGAGKGKGKKRLLAPAAAAAPHHSPATCADHKCAVCHRGFATGQALGGHKRCHWPDRSCADQAISMLAVSTAGSSSTTTTSASPPPAPATAATALDLNLNLPPPLALWCILLLLDLCLLNSIRGISGSLEWKSLQVLSFGYVCLVQIRAFLIVLNTEIGVLIDQKSAF

SEQ ID NO: 18164 - protein, 531 aa, Oryza sativa
  Clone ID: TF_OSC401442j.C1.p12.fg
MAAASSAHYFGLGEPQMQQQQQQPPLQNNAAAPVAATPPPKKKRNQPGNPSKFVCEVCNKGFQREQNLQLHRRGHNLPWKLKQKNPKETRRRVYLCPEPSCVHHDPSRALGDLTGIKKHYSRKHGEKKWKCDKCNKRYAVQSDWKAHSKTCGTREYRCDCGTLFSRRDSFITHRAFCDALAQESGRIMPPMGAALYAAAGAGMAIGGLTGMAASHQLQPFQDHSSAITTAANAAAQFDHLMATSSAAAGSPAFRAAQPTSSSSSPFYLGGGGDDGQAHTSLLHGKPAFHGLMQLPEQQGSNGGGLLNLSYFSGGNGGHHHHHQEGRLVFPDQFNGVAAGNGARAGSGEHGNSGNNADSGSIFSGNMMGGGGGFSSLYSSSDQTVPPPQMSATALLQKAAQMGATTSSGGAGSVNSLLRGLGSGGGGGALNGKPAGAAGFIMSGESSSRSTASQTAENESQLRELMMNTLSATGGGTGAGTVFVGGGFPGVDDGKLSTRDFLGVSGGAPGLQLRHGGAAGMGMAGSLDQEMK

SEQ ID NO: 18165 - protein, 1349 aa, Oryza sativa
  Clone ID: TF_OSC422884j.C1.p2.fg
MSLQPPAVEPPEWLRTLPVAPEYHPTLAEFADPIAYILRIEPEASRYGICKIVPPLPRPPEDDTFRRLQAAFAAAASSNGDPSPTFPTRLQQVGLSARNRRAASRRVWESGERYTLEAFRAKAAEFEPPRHAAPPRNPTHLQLEALFWAACASRPFSVEYGNDMPGSGFASPDELPDAANATDVGETEWNMRVAPRARGSLLRAMARDVAGVTTPMLYVAMLYSWFAWHVEDHELHSLNFLHFGKAKTWYGVPRDAMLAFEETVRVHGYADDLNAIRVAFQTLNEKTTVLSPEVLLSAGVPCCRLVQKAGEFVITFPGAYHSGFSHGFNCGEASNIATPHWLQVAKEAAIRRASTNCGPMVSHYQLLYELALSLRPREPKNFYSVPRSSRLRDKNKNEGDIMVKENFVGSVTENNNLLSALLDKNSCIIVPNADFFVPSFPVALESEVTVKQRFTAGPCSISQQGAENMAADHVAVDKVTEIQDMSGSLYPCETSLVGCSNRKLYETKYGQRDAAALCLSTSEIQSRGIDTARSHPAGGILDQGRLPCVQCGILSFACVAIIQPREAAVQFIMSKECISSSAKQGGIGASDDTSNWIDQSHEISPPPGPASGTDDNVKHAVSLAHVSDRCRELYASNTDGCTSALGLLASAYDSSDSDDETTEDVSKHSKKNDSVNQSTDPQILETSASCSSTVQCQKTNSHLHEEECEARATSLMKPVSHNSRPISQSNRDTDIDHFIELGKSGTQCSGYLDLVDDLTTSVLKSSSDTCVSAAKASMDPDVLTMLREKKTCVYNYMSNYTKGINCKYPRAESAAKVIAEELGIKHDWKDITFKEATEEDVKKIQLALQDEDAEPTGSDWAVKMGINIYYSAKQSKSPLYSKQIPYNSIIYKAFGQENPDSLTDYGCQKSGSTKKKVAGWWCGKVWMSNQVHPLLAREREEQNSSVVYGKAMFTTISHGKVQDEASTRCNTSNRTPSRRTSRRKKGVSAEKSKPKNKRSTASDEASMLCSGLGMNSGVIHDQTENSDDYDKHGNGDEIEEGTNPQKYQQRKLQNVTRKSSSKKRKDEKRTDSFHELYDEDNGVDYWLNMGSGDDATLGNSRQQSPDPVKVKSGGKLQGKRKSSKYKSNDDLLNEENKLQKMNKKSSSKKQKNDKINRQLQEDQTEDDHMDHLVDVAVADEVTLDNEDKITEDKIDDVKVKSRGKSQNGKRKGSKHQATDGLRAGNKVAKFPCDIEGCDMSFSTQQDLLLHKRDICPVKGCKKKFFCHKYLLQHRKVHIDERPLKCTWKGCKKAFKWPWARTEHMRVHTGVRPYECQEPGCGQTFRFVSDFSRHKRKTGHSSDKRRKNST

SEQ ID NO: 18166 - protein, 471 aa, Oryza sativa
  Clone ID: TF_OSC900043j.C1.p14.fg
MRFLVLWCSRLCSWLVGLVLFVANFSVLLPVSVEFCFLSSEDLSVLQAEETIAEFMFALSYNVHRISSLATVETIESSSFPEQPGVPHLFCFLFSTRIVETRSKKHPDMAPRGKPWKHCCNKCDKSFRSGNALGGHMSCHRSVGNQPKSTSSPPTVVDLHMPLLSSCDDNLLLLPPETQCQMCSKVFSTSGSLREHMMMHGGEKVVVKAEEEAAGLIEALGIADSMQDVMVFSSVKRKRSFRSKRQTPALSLEEIEAADALLLLSGCFDKTSAYEDCYLGDIEDSSLRSIVLTEVNMNAVDRCSVRSVGSKEPINDNNSGYKDCYGQSDKENCLIVPKEEMDPNDFDHELVRDAALRKPRTDNSDEEMKFGDLPAAAMKDNSHRCNTCGKSFGSGQALGGHMRRHYVRKCNRQRGVADHAGSVLMKVQKLKLRLDPILFDVTLPALTDGDCCISVGVKPEPQLWCVTSNLQ

SEQ ID NO: 18167 - protein, 232 aa, Oryza sativa
  Clone ID: TF_OSC100181j.C1.p3.fg
MKCSGIFQGGHHLSNTTATAKNYALDHMMVSSVSDATSEEDVALSLMMLSRDTWPATPPPPPPYRLRGAGYDDGSDGGDAPPAPAAAAAQKRTRFQCPACKKVFRSYQALGGHRASHMRGGRGGCCAPPPNPPPSPATPLQPLPECDGGEEEGAKPHPHECPYCFRVFASGQALGGHKRSQLCSAAAAAASGDDIPAMIKSNGFIDLNLPAPFDDVELSAVSDPFLSSKPGS

SEQ ID NO: 18168 - protein, 246 aa, Oryza sativa
  Clone ID: TF_OSC400958j.C1.p2.np
EATSQTLTLEESEPQASPRPVPPCNCPKSLGGGARSAAARRGRRRGRRRRQIRRHRLSAAELAPERGGEQPVSSPPPDPPAAPEELRFRCTVCGKAFASYQALGGHKSSHRKPPSPGDHYGAAAAAQQLASAGDSKEDSASSAAGSTGHRCTICRRSFATGQALGGHKRCHYWDGTSVSVSVSASASAASSAVTASASGSGSSSVRNFDLNLKPVPETVAAGVRRWGEEEEVQSPLPFKKRRLSSP

SEQ ID NO: 18169 - protein, 558 aa, Oryza sativa
  Clone ID: TF_OSC101382j.C1.p4.fg
MQPSPSSPRAPPPTAAQASGYKHFCRVCNKGFTCGSALGGHMRAHGVGDGDGLGADDDDDDDDDSLGDEAVRRARGGADDPWNAGGPSSSGAATHVYELRTNPNRVTRSRQVCKNCGKEFTSWEHFLEHGKCSSGEDDDDEDDVDHSLQPWSPSPEADGEEDSAPAAGWLKGKRSRRCKGTGVDLSPTPSACAAGEEEDLANCLVMLSSSKVDQAGVTEAEQRSSSSASKEHKRLITFMEPTTYVLDTVMALPPPAPAPQYVSTVPRGMFECKACKKVFSSHQALGGHRASHKKVKGCFAAKLESNAAEVAEPSHHAEVADRSEDNPAKATSDARRNVHASIDGDGNAGTSDAAAELSMAIVPIEPPVAALAAAPLKKKGKMHECSVCHRLFTSGQALGGHKRCHWLTSSSADHTASVPPLADDLVPLSFRPMLDAPEPALDLSIAANPPLLASAATVRPKVGGSSFHLDAPPPVYIPSSPAIPSQRNKATATTGSQNANDAVGLSTAAAEDEADSTTVKRARLSDLKDVSMAGETTPWLQVGIGSSSRGGADDNDKE

SEQ ID NO: 18170 - protein, 726 aa, Oryza sativa
  Clone ID: TF_OSC400149j.C1.p10.gm
MAMVVAGSHRPPPPPQSLRLVPPPPPQPPPPPLTYRHHCKVCKKGFMCGRALGGHMRAHGIGDDNDTMDDDDGRDDDHSLSPCDGGGEPSEAAGSPTTTTTKRMYALRTNPGRPRNCRTCENCGKEFTSWKTLLDHGRCGLDEEDGRLDVSLRSPPLHDGGDENDGEEEEEGDDLTLAAGGWSKGKRSRRAKVMAVGTGSVSELQLPAPSTEEEDLANFLVMLSSSSSSSSRVAQPAIVVDDADQESCASGSKDEERNRFLVPQPISMAAPMMAQMTVIAPQVVPQHISTVPRGMFECKACKKVFTSHQALGGHRASHKKVKGCFAAKLESSRNETSQTQTQQQHVSAAPHDNTRATTSHVITSDISMDANTIGASADADGKAAASGVGAGEIVLAGASSTDMAMMMSVEDFAPTPLAPSAVSPFKKKGKVHECSICHRVFTSGQALGGHKRCHWLTSGATDPLTKLQPVAQDHAMMAAMCHQLTLGRPIFDPTDQRILDLNVPTNPLAEAVAARQQQQQQVAALNDGALCLNAAASVYLQSWTGHSNGSHVNKTTATSSRINDAAGGVTTEDDEADSTSAKRAKIGDLKDMKVAGESLPWLQDQTDWHARISSIFVPAQELSRSPRPEQTDWHARISSIFGPAQELSRSPRPRYWMTDLLQKRGIDSHPVCSFCAQELEMTNHILLDCVFAWQVWLRVLSSSGWAALSPPCGVLESSSQKAIYGR

SEQ ID NO: 18171 - protein, 600 aa, Oryza sativa
  Clone ID: TF_OSC4083j.C1.p1.fg
MAMVVAGSHRPPPPPQSLRLVPPPPPQPPPPPLTYRHHCKVCKKGFMCGRALGGHMRAHGIGDDNDTMDDDDGRDDDHSLSPCDGGGEPSEAAGSPTTTTTKRMYALRTNPGRPRNCRTCENCGKEFTSWKTLLDHGRCGLDEEDGRLDVSLRSPPLHDGGDENDGEEEEEGDDLTLAAGGWSKGKRSRRAKVMAVGTGSVSELQLPAPSTEEEDLANFLVMLSSSSSSSSRVAQPAIVVDDADQESCASAPMMAQMTVIAPQVVPQHISTVPRGMFECKACKKVFTSHQALGGHRASHKKVKGCFAAKLESSRNETSQTQTQQQHVSAAPHDNTRATTSHVITSDISMDANTIGASADADGKAAASGVGAGEIVLAGASSTDMAMMMSVEDFAPTPLAPSAVSPFKKKGKVHECSICHRVFTSGQALGGHKRCHWLTSGATDPLTKLQPVAQDHAMMAAMCHQLTLGRPIFDPTDQRILDLNVPTNPLAEAVAARQQQQQQVAALNDGALCLNAAASVYLQSWTGHSNGSHVNKTTATSSRINDAAGGVTTEDDEADSTSAKRAKIGDLKDMKVAGESLPWLQVGIGISSESKEKNTQE

SEQ ID NO: 18172 - protein, 341 aa, Oryza sativa
  Clone ID: TF_OSC408704j.C1.p4.gm
MTKHPRDGEVISLSLSLTLGAAADSGERKKPRRGSSPAASGSGDFVCKTCSRAFPSFQALGGHRTSHLRGRHGLALGLAAATAKETTKKVQEKPAAAATHECHICGQGFEMGQALGGHMRRHREEAAAAAAAIEILPLSGGGHRAGPNLEVFELGHVRSGIGATTLAVTKESDTRGLGINGASSCQALEGGRANATSGVAVSEECKARFQELRAGRAHRFVVFKIDDAMRQVVVDRVGPRDAGFDELTASLPADGCRYAVYDHDFTVSDATATAAAGEGGEAPRSKIFFVSWSPAAADVRSKMVYASSNEGFKKELDGVQIDLQATDPSELTLDVLKDHTS

SEQ ID NO: 18173 - protein, 135 aa, Oryza sativa
  Clone ID: TF_OSC408704j.C1.p4.gp
MTKHPRDGEVISLSLSLTLGAAADSGERKKPRRGSSPAASGSGDFVCKTCSRAFPSFQALGGHRTSHLRGRHGLALGLAAATAKETTKKVQEKPAAAATHECHICGQGFEMGQALGGHMRRHREEAAAAAAAVHA

SEQ ID NO: 18174 - protein, 423 aa, Oryza sativa
  Clone ID: TF_OSC400255j.C1.p23.fg
MDAGGVELSGVMHRCRVCGKGFSCGRSLGGHMRSHISFGEAAAELGANGGVVGYGLRENPKKTRRLSEFDGDGDGEEVEVEEGGDGGELRACRECGKLFSSWRSLFGHMRRHASGGGGRNHDDDDDDDVDVEDEFGGGEEEEIVAPAPAAVTVIAAPPRRRRRSMRVAAPAPAPAPPRPVLLGGFEKEQEDVALGLLMLSRDTGVWRSPVKAETFEKPEQKKKKATAKQPPPLPLPRNGYGYGYNSDEDSALLQYGGDVAKSRKRRASYHSPNSISSKKKQQPRAAAPAKRTRYECPGCGKVFASYQALGGHRASHKRINTSCSAPKVSPATAAAAAPAPEPSSETYASLSTLSPSASPGSAAAGIGDRKANNKSSAEEEKFGGACSSDELYAELELEQRSPAAAAGFLDLNFPPASSEVGVN

SEQ ID NO: 18175 - protein, 838 aa, Oryza sativa
  Clone ID: TF_OSC401731j.C1.p37.gm
MNRSVCHHLLTQCKTIRELQRIHAQALTHGLHPNQQSISCKIFRSYAEFGRPADAGRLFDEIPHPDIISFTSLMSLHLKLDHHWKAISVFSHAIASGHRPDGFAAVGALSASGGLGDQRIGSVVHGLIFRCGLDSELVVCNALVDMYCRCGKFEPARTVFDRMLVKDEVTWGSMLYGYMKCVGVDSALSFFYQMPMKSTVSWTALITGHVQDKQPIQALELFGKMLLEGHRPNHITIVGVLSACADIGALDLGRAIHGYGSKSNATTNIIVTNALMDMYAKSGSIASAFSVFEEVQMKDAFTWTTMISSFTVQGNGRKAVELFWDMLRSGILPNSVTFVSVLSACSHAGLIQEGRELFDKMREVYHIDPRLEHYGCMVDLLGRGGLLEEAEALIDHMDVEPDIVIWRSLLSACLAHGNDRLAEIAGMEIIKREPGDDGVYVLLWNMKFSIKANMQRHVKEIHEDETATKSNRQFVCKEEGCNKVFKYASKMKKHEESHVKLDYVEVVCCEPGCMKTFTNVECLRAHNQACHQYVQCDICGEKHLKKNIKRHLRAHEEVPSTERIKCSFEGCECSFSNASHDQVKPFACRFTGCEKVFPYKHVRDNHEKSSAHVYTQANFTEMDEQLLSCPRGGRKRKAVTVETLTRKRVTMHGDASSLDNGTEYLRWLLSGESGSRIGRRRAHPNSITPTLAWMRRLEESYTTSPAVAHAGLWADVSTGESGADMRGPPVSGSGEGGRGAGTRGPPVSDSRGRAVHRGPGPRGWSTAGPRNRRPRSPSGPIGRAAMEAAAGLGSASKPTGRPGLAVTARGRRRRRPAAWEAVAAAEGDGARLEAAARH

SEQ ID NO: 18176 - protein, 186 aa, Oryza sativa
  Clone ID: TF_OSC408704j.C1.p7.fg
MKRLTFGAEPEMVDSASIAQEVMLLLARSGGGGAGYVVGHGGEAPRVFECKTCRRRFPSFQALGGHRASHKRPRGGGGGGAAAAVAAAAGEGEAGVALSLAAGTPAVKASRAHGCAVCGVEFALGQALGGHMRRHRIAGAEADEAVSARGGEPAPERNPREARGVVGLDLNAAPADDTGLLLVDCL

SEQ ID NO: 18177 - protein, 217 aa, Oryza sativa
  Clone ID: TF_OSC5483j.C1.p4.fg
MSKRSRSMWDMQEFVGSVDTARVLMLLAQQSQHGLLGGGGFAAGAQPVVVRGGAHDRVFECKTCNRQFPTFQALGGHRASHKRPRQQQQHALGGGAGADDAGLCLGRQPTPPRPQPAKPRVHECPVCGLEFPIGQALGGHMRRHRAEAEAAATTTTTTTKNGDVGKAAAVKACDGGGVCLDLNLTPSENRAKCRNVVGLGAGGQGVHKALAMLDCFL

SEQ ID NO: 18178 - protein, 439 aa, Oryza sativa
  Clone ID: TF_OSC900369j.C1.p21.fg
MASAERRIRMWWRTAGRPKHLWGRRSMLYMGHSRIYMDRYYDPIELHGQPPPLLMIPGGGGGGGGGGISPYLVQSQHGHGGGVDGMEMEEGGGFMGEQPQCHPLLYNLSVLKDRVQQLHPLVGLAVAHNAHAHGPLDVSAADAIIQEIVAAASSMMYAFQLLCDLGTAPTTAPSQETAAASAVVVKNNDHAADAGQMEDDHLMQQQWQQNGSRQHDYSSHAHAPPVFHSETAAPAGATSATDTIIELDAAELLAKYTHYCQVCGKGFKRDANLRMHMRAHGDEYKSKAALSNPTKLLAKGGDETMAAAARKYSCPQEGCRWNRRHAKFQPLKSVICAKNHYKRSHCPKMYVCNRCGRKHFSVLSDLRTHEKHCGDHRWLCSCGTSFSRKDKLIGHVSLFAGHQPVMPLDAPRAGKRQRSSSASVAGNIDDTTGIGMGAA

SEQ ID NO: 18179 - protein, 537 aa, Oryza sativa
  Clone ID: TF_OSC29140j.C1.p1.fg
MAAASSAPFFGLGDTQMPPPQNPTNPALHHHPNPFPAPVDAAAPAPKKKRNQPGNPSKYPDAKVIALSPRTLMATNRFVCEVCNKGFQREQNLQLHRGGHNLPWKLKQKNPKEARRRVYLCPKPSCVHHDPSRALGDLTGIKKHYCRKHGEKKWRCDKCSKRYAVQSDWKAHSKTCGTREYRCDCGTLFSRRDSFITHRAFCDALAQENARMPPIGAGVYGGAGNMTLGLTGMAAPQLPAGFPDQAGQPSASAGDVLRLGGGSNGASQFDHLMASSSGSSMFRSQGSSSSSFYLANGAAHHAPAQDFGPEDGQSQAGQGSLLHGKPAAFHDLMQLPVQHQQSGNGNLLNLGFFSGSNGGVDQFNGGAGNGGQGSIVTSSGLAGNHGGGGGGFPSLYNSSEPAGTLPQMSATALLQKAAQMGATTSSYNAGGAGGASSLLRGASSHGISVGEGPANERSSYQNLIMGSMASGGGGAGFAGSFSGASGFGGAVDDGKLSTRDFLGVGVVQGISGSAAMGPPRHGAAGLHVGSLDPANMN

SEQ ID NO: 18180 - protein, 310 aa, Oryza sativa
  Clone ID: TF_OSC402101j.C1.p5.fg
MSVEDKHAGVVKRKRTKRPRHHAAPASSSESTTTEEEDMAHCLILLAQGAAVPPVLAAPAPAPPPPQPPVVVVKSERYTSRKYTEAATTADGVRAGFYVYECKTCNKCFPTFQALGGHRASHKKPRLPGADDDNVNNVTNTNAIVVKSKPPLTTTTTPSAPSPPPPQADAVVVPDVTTVLSLNNVAAAGSIINKLRVHECSICGAEFGSGQALGGHMRRHRPLHAPPERAATTAATTAATATAPDTKKEGSTSINLELDLNLPAPSDEESVSPPPPPPPPVLLALGGQFNDGKKPILQLTASAALVGCHY

SEQ ID NO: 18181 - protein, 1471 aa, Oryza sativa
  Clone ID: TF_OSC19412j.C1.p20.fg
MPPQPPPAASASASAPDPAVPAWLRGLPRAPEYRPTESEFADPIAFLSRVEREAAAYGICKVIPPHPRPSRRFVFAHLNRSLVSSCDAPAPSPAAASDSSIPPSSSSPPPVSAAVFTTRHQELGNPRRGRPTPQVLKQVWQSGERYTLDQFESKSRAFSKTHLAGLHEPTALAVESLFWKASADRPIYIEYANDVPGSGFAAPVQLQRKKKQKRETAPMDEWEKSSGWRLSNSPWNLQAIARAPGSLTRFMPDDVPGVTSPMVYIGMLFSWFAWHVEDHDLHSLNFLHTGAPKTWYAVPGDRAVELEEVIRVHGYGGNTDRIASLAVLGEKTTLMSPEVLIDNGVPCCRLVQYPGEFVVTFPRAYHVGFSHGFNCGEAANFATPQWLKFAKEAAVRRAVMNYLPMLSHQQLLYLLAVSFISRNPRELLSGIRTSRLRDRKKEDRELLVKQEFLQDMISENELICSFLGKKSVDNVVLWEPDLLPSLTALHPCSSCSKAPEKKGEDGPRIGSTQSSSKDDSSSDGTACMTGTQSKGLSMDSKQAPEGEKLDTDDGDDLPFDLSIDSGSLTCVACGILGYPFMAILQPSRKALEEISLVDKERYKLSCEKEICSNVLPCSPNDGSSGCPLIANRSSSPVENANLSHQDVKPIRSDISLMGKEFNGTLGKHIGTSCSCSSENTIHPYGDTETPEKKIPSDCPGSELSKQSGRGDVNVPDVEGSEETISWNTGCAFARPRIFCLQHALEIEELLASKGGVHALIICHADYVKLKALAISIAEEIEFQFDYKDVALANASKSNLHLINISIDDEGYEEEGTDWTSRMGLNLKHSSKIRKETPESQEQPPLSFWGLFSKPSPISVVSNLKWLCRKARTPYKVIGYASSPDVVATPDKVKPAVTKTQIDTSGNAHENIGSEQTLQQDCVLQESNDVADMCKRPKVNDQDGHSLINIPIAVAEYPMMHQVCERPDSPTTVAVSAGKPTREQCGAESTELSTVKQFLDNGLIAEGGSMNFISNHEHLESDNATSVCKDEQLQVQQDQLAMVLCNNPNTELVAGELHGGAASSTLENEDSCGNTSYCSDTVLKNSEPDTDDQPETCDRSVVLVTPKSSCDQMISSSDRSCSLTLDCPVSTDAAFSSEKLSMAHDLMGSELQAVHNSKAEVVASLTDVKGAKLNSIHTTQLPHESPSSDFIISEGAQSASTTAIPRKNGTSMHTESNSIDILLGVLADESKVSSGKDEVGKASLTLMTLAGNDQSADDVTQDEVAEITDPSHGFCSSDIVSRSIGSSNRTNIICYARRKHKRKSGSEFNINSPQSLGSFVRSPCESLRPRTRPAIVEDMTNETKTAEASTANKRKKAKVEAFQCDIEFCDMTFETKAELRAHQRNICTDESCGKRFSSHKYLKRHQCVHRDERPFKCPWDGCPMTFKWLWAQTEHIRVHTGERPYKCSAPDCGQSFRYVSDYSRHRKKFNHY

SEQ ID NO: 18182 - protein, 538 aa, Oryza sativa
  Clone ID: TF_OSC400277j.C1.p23.fg
MANARVMRDGEMIDGDGDRSSVRSRGGADPDAEVIALSPKTLLATNRFVCEICNKGFQRDQNLQLHRRGHNLPWKLRQRSGKEVRKRVYVCPEPTCVHHDPSRALGDLTGIKKHFCRKHGEKKWKCDKCSKKYAVQSDWKAHTKTCGSREYRCDCGTLFSRRDSFITHRAFCDALAEESAKARAAPPPPADEDGTSASAGAPPPQAPLPPPAPVPAPAPPPPPAAAPAPAAQPEQRDRDAALDQFATPAPAPAPPPVTAPPPPPVAAPNDCVSSSSSGVAPTSQSLLSSMFAPPSVAQAPQYADPIGVGAGGHQERAVPAKPPALCLAPNASSSLFTAPVPADRQQFAPPPPPSPSPHMSATALLQKAAQMGATSSSSSFLRCLGLDMSSSSSAPPSSSGQQQQHHHHHHQETMQVPLPASSLPEWPPRLQPEPSPMLSSGLGLGLPYDATGGPVSLPELMMGQSTLFSAKPATLDFLGLGVSPTGASTSRGFPTFIQPIGGAVSLAGSATVAAETFGAAHGGQANPWERNPSSSPIL

SEQ ID NO: 18183 - protein, 1205 aa, Oryza sativa
  Clone ID: TF_OSC400964j.C1.p10.fg
MRPSPPPAAPAAEPVPPWLRSLPVAPEFRPTAAEFADPVSYILKIEPAAAPYGICKVVPPLPPPPKKATFSNLSRSFAALHPDDRSPSFPTRHQQVGLCPRRTRPGLKPVWRSSHRYTLPQFESKAGATRKSLLAGLNFPASRQLTPLDHEVLFWRASADRPIVVEYGSDMSGSGFSPCAAQPQPPPQQQPTARAAAHLGETAWNMRGVARSPGSLLRFMPEDVPGVTTPMLYVGMMFSWFAWHVEDHDLHSLNYMHLGAAKTWYGVPRDAALAFEDVVREHGYGGEIGAECRGICGHFSRILSLRFQSWEPSNGEMETRSSRIKEKKKCEGEQLVKKMFIQNVIEDNELLSHLLNDGSSCIILPANAHDGPGLSTLRSTDQSNMNSRISHNLCSREEAPEASGCLSPNRNGDTRNCISSDTHNMEGDKGDIMSATGLLDQGLLSCVTCGILSFSCVAVLKPRDSTARYLMSADSNSINNQLSISGGSILADAPTNERNGVISRPYSEHCCNEIMADDAEIDKNSALDLLAFAHGGQPDPEEDPLEKILKIAHGINKSQPNSSNNVGCVGTKLSSSSTERQERPSSQNAHCNGSSVISNGPKGVRTRNKYQLKMVLSEGFQAKDIYSAKEKKVQSEPSSSKGDVKETIDVSGTENDVGCKSTTISVSEHRGSTKNMYSVKEKKVQSKPSSLKGTVKETVDVSGTENDARCKSITISVSEHRGSTPMTNSLAASIVKPDKDSSRMHVFCLEHAIEVEKQLHAIGGSNIMLICRPEYPKIEAEARLLGEEMGLVYDWKGIHFKEANMEDRQKIQEVLRDEEAIPTSSDWAVKLGINLYYSANLAKSPLYNKQMPYNRVIYRAFGCDSPNDSPVMFNTCERKQSHQKKIVVAGRWCGKVWMSKQVHPYLAHRVESQEAEEADRICSYHFDEKHKAEPVGNSSRVEASKRKSSSLTDVTESSNRRGEIPGEETNTKRPKHSQENNLRALETAAEVVVPSPAGTGLRVSSRIANRANKLKSKMEKEDVPSSRPKSNIKEKSSHASGQKSNVQEANANSASHLRAMPPKQKAEAEAKKQIRTPKPPKQAVEYSCDIEGCSMSFRTKRDLSLHKSDICPVKGCGKKFFSHKYLLQHRKVHTDDRPLTCPWKGCNMAFKWPWARTEHLRVHTGDRPYVCHEPGCAQTFRFVSDFSRHKRKTGHSVKKKKKAKS

SEQ ID NO: 18184 - protein, 504 aa, Oryza sativa
  Clone ID: TF_OSC400258j.C1.p6.fg
MASNATRNTDPDQQGVRFSSMDQPPCFARPGQSFPAFPPLFGVQSSSLYLPDDIEAKIGNQFESNPSPNNPTMDWDPQAMLSNLSFLEQKIKQVKDIVQSMSNRESQVAGGSSEAQAKQQLVTADLTCIIIQLISTAGSLLPSMKNPISSNPALRHLSNTLCAPMILGTNCNLRPSANDEATIPDISKTHDYEELMNSLNTTQAESDEMMNCQNPCGGEGSEPIPMEDHDVKESDDGGERENLPPGSYVVLQLEKEEILAPHTHFCLICGKGFKRDANLRMHMRGHGDEYKTAAALAKPSKDSSLESAPVTRYSCPYVGCKRNKEHKKFQPLKTILCVKNHYKRSHCDKSYTCSRCNTKKFSVIADLKTHEKHCGRDKWLCSCGTTFSRKDKLFGHVALFQGHTPALPMDDIKVTGASEQPQGSEAMNTMVGSAGYNFPGSSSDDIPNLDMKMADDPRYFSPLSFDPCFGGLDDFTRPGFDISENPFSFLPSGSCSFGQQNGDS

SEQ ID NO: 18185 - protein, 184 aa, Oryza sativa
  Clone ID: TF_OSC400311j.C1.p6.fg
MAGQVFVHHLGGGSGGDDPTHPWLSLKSSHEMDDAVASWREKLADMAAADERAGRYPCPLCDRHFPTEKAVHGHMRSHPGRGWRGMEPPREPSPGDLALAADGKRYRYVCDRCKAPFETRQALGGHRASHSTKKGCSWHAKQLAMAKPPKNDFDLNHLSLEAIQAAAQEEQAAQEGNKDEEPKN

SEQ ID NO: 18186 - protein, 220 aa, Oryza sativa
  Clone ID: TF_OSC12817j.C1.p4.fg
MALDGKPPVPPPSTPPMDSWACGGRRSKRRGGGGGSSGSSGSSGGGGGGESKKEYLAACLLMLAHGVRDEAEVVGVAAATAKPQHGYECSVCGKVYGSYQALGGHKTSHRKPPSPAAEPAAGEEPSSGGVAGEAKVHRCSICLRTFPSGQALGGHKRLHYEGGAVGDAVKEKNSLKTKAAVATAVLKDFDLNLPAAATTAGDEAESSPPEAKRARLLLLV

SEQ ID NO: 18187 - protein, 378 aa, Oryza sativa
  Clone ID: TF_OSC400553j.C1.p13.fg
MALDGKPPVPPPSTPPMDSWACGGRRSKRRGGGGGSSGSSGSSGGGGGGESEEEYLAACLLMLAHGVRDEAEVVGVAAATAKPQHGYECSVCGKVYGSYQALGGHKTSHRKPPSPAAEPAAGEEPSSGGVAGEAKVHRCSICLRTFPSGQALGGHKRLHYEGGAVGDAVKEKNSLKTKAAVATAVLKDFDLNLPAAATTAGDEAESSPPEAKRALHFWLGDGDGWHDKHAVFRWLASSSGGNNIMGPHDSPARCVEYSYSPTCRYGTFATGGCDSFMAFGMALAKVPQPSNTHVTSLLVFQQGWPSASLSHPGARSISLTFLLRYQSYETHWVSTGYTIPNGYGHGYEFLPANSIGYQSGGQKRVRHKPDAIFICNVN

SEQ ID NO: 18188 - protein, 226 aa, Oryza sativa
  Clone ID: TF_OSC400553j.C1.p12.fg
MGLNEKPLVPPLSPTPVDFRAHQVFPSKHHDFDTSKSRNISGSVAIGSDSEEEYLATSLLMLAHGIRDETKDIRGMGDVKGVGVDTLELVKPSQRAYECSVCGKVYWCYQALGGHMTCHRNLFAQVVAGDELSSDRTMVVKGHKCSICRLEFPSGQALGGHMRVHYVGGVEGGSVKEKNVVKTKVTGALKLVLKDFDLNVPVVATMVGDEAESSHSEAKARMMTLP

SEQ ID NO: 18189 - protein, 487 aa, Oryza sativa
  Clone ID: TF_OSC400431j.C1.p50.fg
MMLKDLAEIQQQQLLAAAEENMSNLTSASGDQASVSSHPAPPPAKKKRSLPGNPDPEAEVIALSPRTLMATNRYVCEICGKGFQRDQNLQLHRRGHNLPWKLKQRNPKEVVRKKVYVCPEAGCVHHDPARALGDLTGIKKHFSRKHGEKKWKCDKCSKRYAVHSDWKAHSKVCGTREYRCDCGTLFSRRDSFITHRAFCDALAEESARAVTAAAAVAGQQQHGGGMLFSQVADVLDHQAAMAMGGHGLMQELCLKREQQQQQQQFAPSWLTAQQQQQQLEAMAGAGNPAAMYGSARLDQEFIGSSTPESGGAQQAGLSFGFSSTSSAPPHPAASSAHMSATALLQKAAQMGATLSRPSSHAHMAAAAAASTHNSSSSAATTNAPPPPPTSNVSSTCVGAGGYGLAFEASHFIAADESSRGARSDRDTGNGVAGAGNDGLTRDFLGLRAFSHGNIMSMAGFDPCMSTTSASSAAPYDHHHHSNKPWHS

SEQ ID NO: 18190 - protein, 214 aa, Oryza sativa
  Clone ID: TF_OSC403427j.C1.p1.fg
MWNLTSASGDQASVSSHPAPPPAKKKRSLPGNPDPEAEVIALSPRTLMATNRYVCEICGKGFQRDQNLQLHRRGHNLPWKLKQRNPKEVVRKKVYVCPEAGCVHHDPARALGDLTGIKKHFSRQHGEKKWKCDKCSKRYAVHSDWKAHSKVCGTREYRCDCGTLFSRRDSFITHRAFCDALAEESARAVTAAAAVAGPPAAGRRDALLAGGGCA

SEQ ID NO: 18191 - protein, 247 aa, Oryza sativa
  Clone ID: TF_OSC423167j.C1.p3.fg
MAVEAVLEASRSSSEEEAEVIVTHGGGGGGGGGGGQVEGWGKRKRSRRRRPQLPPSEEEYLALCLLMLARGRRDGDDVAASASAAAAAVEHRCSVCGKAFASYQALGGHKASHRKPPPPAMVDDDEVVVETKPAAIATPSSSASGVSGGGGGRAHECNVCGKAFPTGQALGGHKRCHYDGTIGSAAGAGASKPAAKTTVAVAASRGFDLNLPALPDVAAAADQRCAAEDDEVLSPLAFKKPRLMIPA

SEQ ID NO: 18192 - protein, 170 aa, Oryza sativa
  Clone ID: TF_OSC408704j.C1.p5.fg
MKHPRQEEEVSLALALSTDCSSTASDSSAAAAGGAARRKRARRRSVVATSGEGEFVCKTCSRAFPTFQALGGHRTSHLRGRSNGLDLGAIGDKAIRLHRAADKEHRDKHECHICGLGFEMGQALGGHMRRHREEMAAAGGGSSADDWVWRCDARPEGIAAEPPVLLELFA

SEQ ID NO: 18193 - protein, 534 aa, Oryza sativa
  Clone ID: TF_OSC401275j.C1.p27.gm
MPTSSPVVATVTCASSPRSSLASLRLPLHDHAVTLVCRVHPSVSLKATLRIHGVGRGGAGLGRSYIPRRERGEVERWGKRREGRRKKVELVSSLASLLFSSSTIDHRSLLIVDLSLPLPLSPLEFQFFQGVEQEMLLLSHGGGGAAAAASDDVLAYHVGVLRDKVQQLEPLVGIVVVSPAAPHGQLRRDAAAMAASSACSVLQEITAAGSAVAHRLEQANAASSASFRRGVAFADDAHAAGGVQMFAAGAHGGGQGGDDEAGASLFHHHGPPAVGAPTVFRAGATTTAAASSSGGGDDDGDGDGEVDVVELEASYLLARYTHYCQVCGKGFKRDANLRMHMRAHGDEYKTAAALTSTGAGMRAAARRCSYSCPAEGCRWNRRHPRFQALKSVVCAKNHYRRSHCPKMYVCGRCGGKQFAVLSDLRTHEKHCGELRWLCSCGTFFSRKDKLMGHVALFAAGHAPVPVAPEASPSTTTTGTTTDRSPVAGFAGSTTSCGAAADEKAERAGTRRGGSLSSSTAFLPSRSGRRSTPHA

SEQ ID NO: 18194 - protein, 339 aa, Oryza sativa
  Clone ID: TF_OSC20545j.C1.p8.gm
MGERPLAIAAGRDPMFVTAYAVHPDGHDSDFLDFLLELMAVGKMKERVNVLISLPTMEVATNTATRSPVKLMLVLTLSPASKVIAKGGGGVKRVHLDGGAFQCRTCGRRFSTFQALGGHRTSHKRPRVRADGLDLLLGARPGKLGAGGASTPVVHRCDMCGKVFATGQALGGHMRRHRPLVSRNGTMSTTWTAAAAAAATMSGSSSEERDDDDDDDVHNYNFIHFFDVFVVVTAMDQQEDYTSDLQLELEEEEDDNQLSQLAELDVQLSLSLACGSTTAMSSSGDEEDAEPRRRRRDEEAAAAAFECRTCGRRFPSHQALGGHRTNGPGPRWPHEEASA

SEQ ID NO: 18195 - protein, 181 aa, Oryza sativa
  Clone ID: TF_OSC100641j.C1.p1.fg
MALAAAARGESTALALALAPPPPELHFRCSLCGKAFASYQALGGHKASHRKPSAAAAAPPAHRDVVVAAAPASSGRVAADADAASEADGRRRRHVCSLCRRGFATGQALGGHKRFHYLHGPSVSATVSSAATAASVGAAFDLNVAPIKEIAGEQRRCGEEADDDDEAESPSPAKKPRRRPG

SEQ ID NO: 18196 - protein, 327 aa, Oryza sativa
  Clone ID: TF_OSC400255j.C1.p6.fg
MEGKSSSRHADPLEEVEMNSASATEDDDGCRYVFQSRRDSDNDNDDEEGVLPATACKRRRRLDDILALLPSPPTPSTSSGSEGTISDRDHGGDVIGAGDDDAAPVAARREASFPCHLCNKEFGSRKAVHGHMRVHHAENEKEPMSLPPQVAAPVHPQARLPTRGASRSGGPYKCKYEGCIMEYESHQGLGGHVAGHINRDKMATASGSGGAGKPKGKHPCNVCGKEYPTGVALGGHKRKHYRKDLDLTLSLAPPGQLAAPPTPTPAPAPAAIAAVEAEAEVAEDGDGGELVPTTPPTGARRNVVVRIWGVDLEKPVDDVEEQDSGSN

SEQ ID NO: 18197 - protein, 198 aa, Oryza sativa
  Clone ID: TF_OSC416144j.C1.p5.fg
MKRFAFEDSDMARVLMLMSSHGQQEQALALPVPVQLPLAAARGDRAPERAFVCKTCNRVFPSFQALGGHRASHKKPRLDGDGDLSLSKPKLHGCSICGLEFAIGQALGGHMRRHRAMTGGMPRAIVVDKKPDVVDVHVHGHDDDGGIKRGGLWLDLNHPPCDDAGDDDAECGHNAAGAGITFHQFLDTGAMAVDCVGY

SEQ ID NO: 18198 - protein, 181 aa, Oryza sativa
  Clone ID: TF_OSC420432j.C1.p4.fg
MASGQRAVGEGSGGLRPTTHVAGGGGSARGEYFRCKTCSKTFTSFQALGGHRTGHTRMAARQRQEHGAAGAAVVGATNNQRRVVSAHQWHLCAVCGVEFRMGQALGGHMRRHRGEAAAATPPPAAAAASAGAVSSMEPPEMIDLNSPPAVEEAGEGDQRLSVRNRSPICLICSCRVVFSVW

SEQ ID NO: 18199 - protein, 311 aa, Oryza sativa
  Clone ID: TF_OSC101382j.C1.p3.fg
MAKNTCKLCYRRFGNPRALAGHMRSHSVAASRSQISSTSSASTSVAVGDDDGGGDAKRPIQGYVLREKPKRRVRLAESDFSDRESETEYYSSPPHGKRANTGSGDVEQVSSVSDATSEEDVALSLMMLSRDTWPATPPPPPPYRLRGAGYDDGSDGGDAPPAPAAAAAQKRTRFQCPACKKVFRSYQALGGHRASHMRGGRGGCCAPPPNPPPSPATPLQPLPECDGGEEEGAKPHPHECPYCFRVFASGQALGGHKRSQLCSAAAAAASGDDIPAMIKSNGFIDLNLPAPFDDVELSAVSDPFLSSKPGS

SEQ ID NO: 18200 - protein, 473 aa, Oryza sativa
  Clone ID: TF_OSC14402j.C1.p1.gm
NSRAAQPESTCREMAVNSGDRARARGHHGDDDEEGVAVVGEDYPYCSDSDSDDDDDVDRYVFLARQPAPPVDRDDAEADAGAEGTGCCKRKRRVVDDDDHDDGFSPRQPALLDGSGGQAAEEEEDAEGSSDDDDAMAPRGEAGGGGRGRGVGKVSRKKARLVDLIRSPLLPAELDGSDKAAPPPPRGVCPKKIAVVVQAKNRKRRRFVDGGEEQEPQPQPPVRGKRSRGPDLEASEGLQTASAAAAAAAAEAAERASKRFVCSICGRCFGSHQALGGHVLGHKKKAKNAAIAAAARDATTTAVTEAVAPASQRQSFFAADINGQDERGCDGAEGSRYDDDEEKSPVVVDDVAACHDADVDESRGHGKAESASAIDAGGDAGNNKVAHGDGEENDKIAGVVVASSHDGDSDVGKMKIVQHKCDECGKVCLTGQALGGHMIKHRRTRPAANGGEGPATATVADGGAQTVRLIGDD

SEQ ID NO: 18201 - protein, 246 aa, Oryza sativa
  Clone ID: TF_OSC407916j.C1.p1.fg
AFSLDFNLRSHLKTHALENYHVCPFPACGKRFTSDSKLKSHVKGHEKTGTPITAQYVPSSDKPQSSSKPATPATTKPTTPAATKTTTPASTKPTTPAPTSFAERPYVCPYDGCGKAYIHSYKLNLHLKTQHPEHGQEENGRIAAHASEHAVNDRANQYNYAEIVDLAPNPKRSKTNSGHKTPSSNKAYNVKISSVLPADISGVKNQWPGKYEDDSEETEEDQGNNIEDGWRYGNQNADDEETEYED

SEQ ID NO: 18202 - protein, 744 aa, Oryza sativa
  Clone ID: TF_OSC410041j.C1.p2.fg
MAQAEKQRWCKLCNKSFPSYCSLGGHMNLHSTRRRKKKPPPSPRKAPPITGASGSRYDFRERCRQRPVAPQSQPDHASSDDEPWTLAPKAECQLCFKAFHSCDALSMHMKAHGHHGRKMVMVEQRASRKTSSANFCGVDDGDHGFAAVSYAHCKRARSKRIRMDVFPAPVVVVTHGTQVEDAACILVMLSKDAYKGSDSLDEDPQMDGSLECGPQKTEMEPSSYRLGVTGDTELIKPENSSSYEEIKFGSLSNVLKATAIHECRLCGKVLASGSALGGHMKSHSVPAHKKVATFPKTSVTPSRKQLLEVQNELHELNLPALSNRDCSSTRTESELNPWWVASSIQILLLQYLNVMRSIKMKHDKLWDLTNFPVKLPKDHRETPPSSMPHGSDGARWRPVPHEAPPLPLPRLRREDGQEKRRRWPFRSIARGVKLIVPAPAPALALARGNVLADGGEPGGGRARDVARVAAWQLAVWQPLPPPCRRVGHAVVDQHEAVAVVGDVDRGHVAVGQGGPAPRVVDVAGDGAAAAAGWRGGGAGEELRGVEEVVEVEEDAGEGEREEVLAEAVVDGRAPRRADAAACGEAAQWDRGSRRRTSAIMSSVGMQETRDIHSRDEITFAEDPISWKPKLVIAAVARRRQVETREGGLRVGTAGRGGAGEGLKLPGSGCSAMKMLFAEWSRRHHRWRGLRDRRQWQSHTRGRLCGCCAVSRLRARLSGMRRGRRELQASRQWQHRRGEAGHETG

SEQ ID NO: 18203 - protein, 633 aa, Oryza sativa
  Clone ID: TF_OSC400615j.C1.p24.fg
MPPNPTGTEGEPGPAVEPAPAGAGAAPVVKKKRNLPGTPDPDAEVIALSPGTLLATNRFVCEVCGKGFQRDQNLQLHRRGHNLPWRLRQRGPGAAPPRRRVYVCPEPGCVHHNPTRALGDLTGIKKHFCRKHGEKRWTCQRCGKRYAVQADLKAHTKTCGTREYRCDCGTLFTRRDSFVTHRAFCGALVEETGRVLAVPAPPSPRPPDLEAEENVDKDKDKEEEVKEKEKEKELEENEDSPVAEVDEPQPSQAVAEVPQQCAPSPPPPPPILQEHPQPVVAVVPNVDEQEVVAKPAVIAKIEVEDERDEEVCFQEVDRYKDAELEDSNLLDNDTPMLPCFLPSPSEAIGTDGSSTSCGTGSSVTNAIAPATTTSTFAGLFASVTTSSTPQSRSLRDLIGVDPTFLCLAIGAPSSLFPQTNASDPCSFAPPPAPHMSATALLQKAAEVGASQSSSSFLKEFGLAASTSSSPPSKLSQGRFTTGNTPTTSHPHPHPHPHPHPPQGRFMDNVPQPPPPAKLPHRMFTDNSVQQWHHRSNQQMEMEPGPMLPGGLGLGLTYDTGNSGLPDLMMGPSALYGPKPATLDFLGLGIGGTMGGSTANGGLPALMVGGELDMGSAQAPWEEAKRKTNGRTIL

SEQ ID NO: 18204 - protein, 713 aa, Oryza sativa
  Clone ID: TF_OSC401140j.C1.p27.fg
MAASGQVQCLLPLRVALSPPLPPWPPATMVMPPLLAAAAAMAASGQVRRLLSLRAALPSPWPLATMAPSSSRHRHHGCRCPGFQYAFVREKAAGDHLSLGYMQHGDNNNKKKKGDLSNNLDLSSSPLLMDSRGQAYYHRAAAAAAAVAAGDATDGEEPAAAELAPKAVRSKKKLAVEAQGGAAVRDDLTCPECGKVFMSDKAMYGHLRSHPLRKHKGAARLAAVAAAAADDASVAAGVKPRPWKVPRTKEEAELGDDRHPGRSPVTGKRGRPASSASSSGSAPAPAPPASSRLQLVITEEEEAAMTLLDIASGCSLDHQPTQPAHVADAALLAPASDQMPSVDVEQGVLAVAEHRTWEAEKPALVEHVFGIVKEHVAAVAADAEPQSPEAKTPVKLGPVTDQAVPVLGDKNDDGHADMPVSPGGGTTKKPLKRRLQDVETKHPTAPPPPPVKRIPSPASKRKYECSECHKTFSTHQALGGHVAAHKRQKKSCAEQQQEAVAAAAQVARHNFLAHQRPAGVVVAVDATVVAAAGGGIAIGPLGEEGLVGPPPPPPPPPPPPAPAPALAPAPQQHQCLRCPMVFPTGQALGGHMRKHFLEAKEQEQLLAIDIANANANANANAAPGPPPMMANAAPVPPPSMANGAGPVPPPIAVAPPPAPPIAGAAPPPPMANGAAAAAPPGGNPAPPAGPQPGVNMFDLNELPNEDAGENQQP

SEQ ID NO: 18205 - protein, 322 aa, Oryza sativa
  Clone ID: TF_OSC101916j.C1.p4.fg
MEDYAQTNLISRGHGHHHQPELMKEFPFLSLISSTSSCISSSGQQQQQQQDDDGHGGHDRHQLLRYGCCSCNKQQEEEEEEVTVALRIGLPAVSSASASPSPAMANHGASASSTGVAGDDGGGGAMAGVGVEVESVRRSGGGGGGGQYWIPTAAQILAGATQFSCPVCRKTFNRYNNLQMHMWGHGSQYRRGGTAALRGAQPTAMLRLPCYCCAAGCRNHIDHPRARPLKDFRTLQTHYRRRHGARDFACRRCAKRFAVRGDWRTHEKNCGRLWRCACGAHFRHKRSLNDHARAFGAAHAHAGAGAGAEDDGRAAAAAAVWV

SEQ ID NO: 18206 - protein, 323 aa, Oryza sativa
  Clone ID: TF_OSC101916j.C1.p6.gm
MEDYAQTNLISRGHGHHHQPELMKEFPFLSLISSTSSCISSSGQQQQQQQDDDGHGGHDRHQLLRYGCCSCNKQQEEEEEEVTVALRIGLPAVSSASASPSPAMANHGASASSTGVAGDDGGGGAMAGVGVEVESVRRSGGGGGGGQYWIPTAAQILAGATQFSCPVCRKTFNRYNNLQMHMWGHGSQYRRGGTAALRGAQPTAMLRLPCYCCAAGCRNHIDHPRARPLKDFRTLQTHYRRRHGARDFACRRCAKRFAVRGDWRTHEKNCGRLWRCACGAHFRHKRSLNDHARAFGAAHAHAGAGAGAEDDGRAAAAAADIGS

SEQ ID NO: 18207 - protein, 342 aa, Oryza sativa
  Clone ID: TF_OSC401275j.C1.p2.fg
MGVQEEAALAAAVVKGKRSKRQRAHAAVVPIAASATAEEEESMESSLSLSGGAAAEGSSTTSPLLTTTAARGDEAVSGCVTEEEEDMALCLMLLASGGHGERAPDAEAVAAKEAKFRSRRPADGAGAGEFVYECKTCSKCFPSFQALGGHRTSHKKPRLVAPPAAMEPAADDKIKPTIPETAAAAAEEKPPKPSPPRPPASRPIATDPTVLAIPVIPKQEVLDATNSAAIASVSKQPRVHECSICGAEFASGQALGGHMRRHRPLIPASASSAVVSVLDAVDAPRQKEKSLLELDLNMPAPCDDATAETTTTSSAATSPAFAFAVSDRSPLLVPAALVGCHY

SEQ ID NO: 18208 - protein, 306 aa, Oryza sativa
  Clone ID: TF_OSC401513j.C1.p15.fg
MANPSKDHIFPNQRSLISQSSSPHNSLPKKEEIPLLSLLPSIHDHNKIHGCYKQEKEEEVMEDVDISLQIGLPSPDPNSSVIDFAKSNPLGATATTSQELDGDDDDDHKVEVEREEEEEAASDDLCLDYFSMGKLTKGKYWIPTPTQILIGPTHFACPVCCKTFSRYNNLQMHMWGHGSQYRRGPESLRGTQPAAMLRLPCFCCAAGCRNNVDHPRARPLKDFRTLQTHYKRKHCAKPFACRKCGKPLAVRGDWRTHEKNCGRRWHCACGSDFKHKRSLKDHIRAFGRDHRERPPPPPPHPLLPLP

SEQ ID NO: 18209 - protein, 269 aa, Oryza sativa
  Clone ID: TF_OSC400284j.C1.p4.fg
MSSASSMEALHAAVLKEEQQQHEVEEATVVTSSSATSGEEGGHLPQGWAKRKRSRRQRSEEENLALCLLMLARGGHHRVQAPPPLSASAPPPAGAEFKCSVCGKSFSSYQALGGHKTSHRVKLPTPPAAPVLAPAPVAALLPSAEDREPATSSTAASSDGMTNRVHRCSICQKEFPTGQALGGHKRKHYDGGVGAGAGASSTELLATVAAESEVGSSGNGQSATRAFDLNLPAVPEFVWRPCSKGKKMWDEEEEVQSPLAFKKPRLLTA

SEQ ID NO: 18210 - protein, 270 aa, Oryza sativa
  unsure (1)..(270): unsure at all Xaa locations
  Clone ID: TF_OSC400284j.C1.p5.gp
MSSASSMEALHAAVLKEEQQQHEVEEATVVTSSSATSGEEGGHLPQGWAKRKRSRRQRSEEENLALCLLMLARGGHHRVQAPPPLSASAPPPAGAEFKCSVCGKSFSSYQALGGHKTSHRVKLPTPPAAPVLAPAPVAALLPSAEDREPATSSTAASSDGMTNRVHRCSICQKEFPTGQALGGHKRKHYDGGVGAGAGASSTELLATVAAESEVGSSGNGQSATRAFDLNLPAVPEFVWRPCSKGKKMWDEEEEVQSPLAFKKPRLLTAX

SEQ ID NO: 18211 - protein, 494 aa, Oryza sativa
  Clone ID: TF_OSC400090j.C1.p31.fg
MPMPIGPGIRGYPDPWVKLPSPGTREGTVVGENEGTHAGLRWYPNPAPAFSNPNPLRLAYSTTASTAWFESRVSPSPKMGSVELGAEEREVAGGEGGSKGAAPPARDIRRYKCDFCSVVRSKKGLIRAHVLEHHKDEVDDLDDYLGRGGGETCKEMDHDCKHWIPENSKMREGLEWTSTRMGRPFWEAPSRMPLSRSSSGWGDSPEKLHQECLVHTLFQRPFSCHVDGCPFSYSRKDHLNRHLLTHQGKLFACPMEGCNRKFTIKGNIQRHVQEMHKDGSPCESKKEFICPEENCGKTFKYASKLQKHEESHVKLDYSEVICCEPGCMKAFTNLECLKAHNKSCHRHVVCDVCGTKQLKKNFKRHQRMHEGSCVTERVRCHLKDCKLSFSKKSNLDKHVKAVHEQKRPFVCGFSGCGKSFSYKHVRDNHEKSSAHVYVQANFEEIDGERPRQAGGRKRKAIPVESLMRKRVAAPDDDAPACDDGTEYLRWLLSG

SEQ ID NO: 18212 - protein, 420 aa, Oryza sativa
  Clone ID: TF_OSC900033j.C1.p12.fg
MVFDHGARVYVDPDAEVVALSPRTLLESDRYVCEICGQGFQREQNLQMHRRRHKVPWRLVKRPAAATAAEDGGAAGGGGGAGGGAGGGGARKRVFVCPEPSCLHHDPAHALGDLVGIKKHFRRKHGGRRQWVCARCAKGYAVQSDYKAHLKTCGTRGHSCDCGRVFSRKITRSLNLYSDIANYLRMKYIISLSNIAIKVESFIEHQDACNSGRVRGEVVPVATTLPVIRPAALRHHHHHPPPPPPELQLLPASTTAPLAAAFSSNSTTTGSSSHEQHATTMTTTKLQLSIGPAAVVAAASGGGGACAAAAGGEEEQQREEVRRALEEKTAADAARERAREEAAAAERALEDARRARHRARGELEKALALRDHAARLIAQVTCHACRQRSLAVMSMAAIDGHGASAVAREHLRGGGVGAGI

SEQ ID NO: 18213 - protein, 355 aa, Oryza sativa
  Clone ID: TF_OSC900135j.C1.p12.fg
MEVGDPSGALVGGAGGAGAGGGDGDARDALLRLVALGDRMAAVRRRIAASISGESGPLSSSDIHSVSSEISSAAHLVVLNAASLLSSTVASLPAPPPPPATTVQELPPVVVSVPQEPPQEAAKGDGDYDVVELDASELLAEHVHFCDICGKGFRRDANLRMHMRAHGDRFKTLDALSRPGQPKPPAGREVRFSCPYAGCNRNRAHRRFRPLKSAVCARNHFRRSHCPKLYACERCGGKKRFAVLADLRSHLRHCGEEAQWRCSCGTTFSRKDKLFGHLALFEGHTPAIAEPNKGVATAAAEASISMMEEGGVEANCDREEDEEGGFDPKFFQEWMEELRGGAVAPNWSAPSEAGH

SEQ ID NO: 18214 - protein, 757 aa, Oryza sativa
  Clone ID: TF_OSC401824j.C1.p22.np
MVAPRKALQVVALERPNLEQSKPIDEELMKRLKVNLITWKNTQCLFDRHMTLFVYFLWRKKKPFHITRAVPLDAIPGFLYDDEDDDFLYDDEDDDDDDDDEGDNNVELEEIRPSSTECESSIHPAEELNLLLPKSLPLPRISAAVERNGKARDKEVKEGSNLKELPQGYLGKMVVYKSGKIKMKLGDVMFDVNPGEECRMAQHVAAINTKEKHCCLLGEIESRHVVVTPDVDSLLLNDNRAYNALHQGIRFLGMKMVGIDSIFETITVDLKMVKIDSIYRWNDYRAARIIAHAAIPARENAYGRAERIRIGDRAQIEQNPSSIPLASPARSIMVEDQEKSSSSPPVPPPPEEEEMEEGEIHPGGGGGGGYYDSGSETEDDDDRYVFQSRRDDEEEEEGVNPASKRRRLEDILAETRGALPLPSPTPSSSGSEGTISDDHGDGIAGAAAAADAPVARVAFPCHVCSKEFGSRKAVHGHMRVHQADKDKEKEPSLHLALGWTSTGKRGANGNARAVTVAFAPMEQAVGDDDGDARAIVLAPAAQPQPQPMVVAEAANPPNQVADDNHRLPVPAAVPYVGAAAAPARRRARPKRNAGQGGPYRCSYPGCKGEYRTHQGLGGHVAGHINREKQAAAAAQGGSGARPEGNHPCKTCGKEFSTGVALGGHMRKHYDPKKKKKHAGLVLTLSVAPPTPAPAPSIAGAALPPAEVKADVDEHEAEQVPMAPVSPPAEARGNIVRIFGVDIEKPADEEEQEGGSDV

SEQ ID NO: 18215 - protein, 170 aa, Oryza sativa
  Clone ID: TF_OSC900016j.C1.p19.fg
MEVATNTATRSPVKLMLVLTLSPASKVIAKGGGGVKRVHLDGGAFQCRTCGRRFSTFQALGGHRTSHKRPRVRADGLDLLLGARPGKLGAGGASTPVVHRCDMCGKVFATGQALGGHMRRHRPLVSRNGTMSTTWTAAAAAAATMSGSSSEERDDDDDDDVHNYNFIHFL

SEQ ID NO: 18216 - protein, 442 aa, Oryza sativa
  Clone ID: TF_OSC400923j.C1.p5.fg
MENPYYASFLKNHHRRYCFSTPPSPSPSPAGAYSSSSFPFFPTAGVTSTTAATPPTTTAPPSPPLREALPLLSLTPASRGGTTAAQERARQRGEEDCTDDDDGAEEEGADEEDVPGSTPGGGGGGGGDRHHQLRRRRAGRLFADLNTKAAAGDPMDVEGSGSGCCAAEAAAAGDDDADVTVALHIGLPSPTAAADLISGLSSAAGRRSSTARRDEEEDEAEEAGGASRDDGDGGDAADAAAPLGFASTPIGRLNKGQYWIPTPSQILIGPTQFSCPVCFKTFNRYNNMQMHMWGHGSQYRKGPESLRGIQPTAMLRLPCYCCAAGCRNNIDHPRAKPLKDFRTLQTHYKRKHGLKPFLCRKCGKAFAVKGDWRTHEKNCGKLWYCLCGSEFKHKRSLKDHARAFGHGHGALGGAAALDDDDDGAVSDLDHDSSSTAPAARSL

SEQ ID NO: 18217 - protein, 438 aa, Oryza sativa
  Clone ID: TF_OSC401886j.C1.p3.fg
MEDPYTSFFKNPYYYYCTSASSFPTAPAAAAAAAHLPPPLPPPYAALYPTAGGVGVGVGAHHHHQYPPAAFFHPPPVHQQHQAPPSPPLREALPLLSLSPTPARRGGVVDAAADSDSDDDDDGDCCYHHLQDQEGAAAGSTATPAAAAARAPLFADLNCIPTCCGDDNDGGDPMDVEVAGTTADIDAAVALRIGLPAGGTEADLLSGLTGAGVEHEEEEEDCKVDGGGSGGDDEVVPLGFSSTPIGKLNKGQYWIPTPSQILIGPTQFSCPVCFKTFNRYNNMQMHMWGHGSQYRKGPESLRGVQPTAMLRLPCYCCAAGCRNNIDHPRARPLKDFRTLQTHYKRKHGLKPFLCRKCGKAFAVKGDWRTHEKNCGKLWYCLCGSEFKHKRSLKDHARAFGHAHTALDADDDDGAVSDADAVVRPSSSMAASSLQPPPR

SEQ ID NO: 18218 - protein, 366 aa, Oryza sativa
  Clone ID: TF_OSC400259j.C1.p45.fg
MEGEVVAASPFFEWLKPPPRPASSSSWSSSFSSSSSMASRDQETVVPGEDGGGEIQEDHKSGMTCLPLLSMLEEGNSKRHEHPVKEEIMSSAHAAGVVEPGVELNIGLPVTGSSAQEVTMEEDDEEEDDDDVGEEEMDEWKPMHGGCKVEGDEEQYGEAVASVEGSSSITAVGDMFGGVGAESGVAMSSRYWIPTPAQILVGPVQFICHVCNKTFNRYNNMQMHMWGHGREYRKGPESLKGTQTLAMLKLPCYCCAAGCKNNVAHPRARPLKDFRTLQTHYKRKHGAKPFRCRRCAKPFAVKGDWRTHEKNCGKRWFCACGSDFKHKRSLNDHVRSFGAHHLPVAESAAAAATTPADKDRIISFQR

SEQ ID NO: 18219 - protein, 476 aa, Oryza sativa
  Clone ID: TF_OSC401482j.C1.p12.fg
MAVNSGDRARARGHHGDDDEEGVAVVGEDYPYCSDSDSDDDDDVDRYVFLARQPAPPVDRDDAEADAGAEGTGCCKRKRRVVDDDDDDDGFSPRQPALLDGSGGQAAEEEEDDEGSSDDDDAMAPRGEAGGGGRGRGVGKVSRKKARLVDLIRSPLLPAELDGSDKAAPPPPRGVCPKKIAVVVQAKNRKRRRFVDGGEEQEPQPQPPVRGKRSRGPDLEASEGLQTASAAAAAAAAEAAERASKRFVCSICGRCFGSHQALGGHVLGHKKKAKNAAIAAAARDATTTAVTEAVAPASQRQSFFAADINGQDERGCDGAEGSRYDDDEEKSPVVVDDVAACHDADVDESRGHGKAESASAIDAGGDAGNNKVAHGDGEENDKIAGVVVASSHDGDSDVGKMKIVQHKCDECGKVCLTGQALGGHMSKHRRTRPAANGGEGPATATVADGGAQTVRLIGDDVCLQRAVAIAGFHSAQ

SEQ ID NO: 18220 - protein, 324 aa, Oryza sativa
  Clone ID: TF_OSC101063j.C1.p11.fg
MGSLAVAGCLNSMGEDRLSALKSRDKEQEAELAKPEPTTEVLFLCSYEGCGKTFVDAGALRKHAHVHGERQYVCHYAGCDKKFLDSSKLKRHFLIHTGEKNFVCPHEGCGKVLAFSLDFNLKAHMKTHSVDNYHVCKYPECARRFTQESKLRAHIKQQHEKGGLQNPGGSATNRSGLADHSHNSHTPKPSAAPPTPSADRPYVCPYDGCAKAYIHEYKLNLHLKKEHPNHYQDAGAQAASSKMSKRRSKPSLTAKMPLPKVPKRRGYTEPYQPPVSVVEEHQWPRNVLYEDDSEETEEEGDNVGDGARYRAASSDDDEETEDEE

SEQ ID NO: 18221 - protein, 163 aa, Oryza sativa
  Clone ID: TF_OSC900016j.C1.p20.fg
MDQQEDYTSDLQLELEEEEDDNQLSQLAELDVQLSLSLACGSTTAMSSSGDEEDAEPRRRRRDEEAAAAAFECRTCGRRFPSHQALGGHRTSHLRPTTNKRRPGPSKPLIHACEVCGLGFQMGQALGGHMRRHRPRNIDLGHKQIVMPEIRPSSSLQLLDLFV

SEQ ID NO: 18222 - protein, 151 aa, Oryza sativa
  unsure (1)..(151): unsure at all Xaa locations
  Clone ID: TF_OSC407916j.C1.p1.gp
APTSFAERPYVCPYDGCGKAYIHSYKLNLHLKTQHPEHGQEENGRIAAHASEHAVNDRANQYNYAEIVDLAPNPKRSKTNSGHKTPSSNKAYNVKISSVLPADISGVKNQWPGKYEDDSEETEEDQGNNIEDGWRYGNQNADDEETEYEDX

SEQ ID NO: 18223 - protein, 639 aa, Oryza sativa
  Clone ID: TF_OSC100626j.C1.p10.gm
MASNSSAAAVAALFGIRDGDHEDQIKPLFAQQQQHHHHQPPMAPSNAAAAASAAGSAAGQAAVAAPPAKKKRTLPDPDAEVIALSPKTLLATNRFVCEVCNKGFQREQNLQLHRRGHNLPWKLKQKNPLQAQRRRVYLCPEPTCVHHDPSRALGDLTGIKKHFCRKHGEKKWKCDKCSKRYAVQSDWKAHSKICGTREYRCDCGTLFSRFIYDIQLMQLKFGCRWCQEGLPMKRDSFITHRAFCDALAQESARLPPAAAGHLYGSAGAANMALSLSQVGSHLASTLQDHGHHHHHHGASPDLLRFGGSGGGAMAARLEHLLSSSSASAFRPLPPPQQQPPAPFLLGAAPQGFGDGGDGSGPHGFLQGKPFHGLMQLPDLQGNGTGGPSPSGPGLYNLGYIANSANSSGTSSHGHASQGQMTNTDQFSEGGGGGGGGGGSETSAAALFGAGGNFSGGDHHQVSPAGMYANDQAMMLPQMSATALLQKAAQMGSSTSSANGAGASVFGGGFAGSSAPSSIPHGRGTTMVDQGQMHLQSLMNSLAGGGNADHQGMFGSGSMIDPRLYDMDQHEVKFSLQRGGGGGGDGDVTRDFLGVGGGGFMRGMSMARGEHHGGGGSDMHGTLEAEMKSASSSFNGGRMQ

SEQ ID NO: 18224 - protein, 134 aa, Oryza sativa
  Clone ID: TF_OSC100626j.C1.p20.gp
ADPDAEVIALSPKTLLATNRFVCEVCNKGFQREQNLQLHRRGHNLPWKLKQKNPLQAQRRRVYLCPEPTCVHHDPSRALGDLTGIKKHFCRKHGEKKWKCDKCSKRYAVQSDWKAHSKICGTREYRCDCGTLFS

SEQ ID NO: 18225 - protein, 651 aa, Oryza sativa
  Clone ID: TF_OSC400555j.C1.p30.fg
MRIRRYAARLLASSTATAPSSLPPPPAASAAWCHAAADDCAICDLTRSASPQVVAPDAIKQKGHIAGRALEPELRSDPRVGLAERTPVPEDQGRDIDDGPPAKRSLTFTDAAARLEGSGNVGAGVATEPAARLGAPVANGAVSGQEDRAATCLADESAAELIATGVTSLVTGATAEPEVLKGASFANTNVTEPRVSERVPLVREAATEPEAEVSMREVTEGALPDGEGAAKLEITGGLSRESADKMEVTKGISLVTEASADSELAQRVPTEPGVELSLPEVTERVPVVTEDFTELGDTFSGLHITGFASLDNEGSVEQEVTGSGSLVNEATEMEVKEGTCIFTRVATELGDTGRVSACSGDGDIALDEPRPPDCVSEVANVNVGNAGEAVASKVQPFRDNAESVGGSINSTGNGHVSSKSPTADEAAPPGGCTDTPSVSCLSDIVARSIGKSGRTDIICYVRRRGKRKLEMVEVKEENVEMDDSAICDQYDDKVASERTGPCESVTSTAVSVEIKIADIKRELEDNSTASKGKKKRAKRFQCEIDYCRMTFKNRAELSVHKKNTCTVKSCGRHFRSHKYLRRHQSIHNDDMPYKCPWEGCSMAFKWSWDRGEHFQVHAGKRPYKCTTPGCSKIYKFVSDFTRHKRRCKPQR

SEQ ID NO: 18226 - protein, 651 aa, Oryza sativa
  Clone ID: TF_OSC100181j.C1.p2.fg
MVGGDLTGAFPLRPCLQGHHGSCGRGALPHYDPQVRRLEVDSAGFLLHLLSLCYFQRPNKTWVGKRRGERGKFGSPRFRQVGYSEGEWMYWRADLVGARGWVGRIKLPHKRHVNVTWDKDLVKGATFRRTRGIAAIMQPSPSSPRAPPPTAAQASGYKHFCRVCNKGFTCGSALGGHMRAHGVGDGDGLGADDDDDDDDDSLGDEAVRRARGGADDPWNAGGPSSSGAATHVYELRTNPNRVTRSRQVCKNCGKEFTSWEHFLEHGKCSSGEDDDDEDDVDHSLQPWSPSPEADGEEDSAPAAGWLKGKRSRRCKGTGVDLSPTPSACAAGEEEDLANCLVMLSSSKVDQAGVTEAEQRSSSSASKEHKRLITFMEPTTYVLDTVMALPPPAPAPQYVSTVPRGMFECKACKKPQEGEGLLRCQAGEQPPEVAEPSHHAEVADRSEDNPAKATSDARRNVHASIDGDGNAGTSDAAAELSMAIVPIEPPVAALAAAPLKKKGKMHECSVCHRLFTSGQALGGHKRCHWLTSSSADHTASVPPLADDLVPLSFRPMLDAPEPALDLSIAANPPLLASAATVRPKVGGSSFHLDAPPPVYIPSSPAIPSQRNKATATTGSQNANDAVGLSTAAAEDEADSTTVKRARLAISRT

SEQ ID NO: 18227 - protein, 504 aa, Oryza sativa
  Clone ID: TF_OSC419155j.C1.p1.fg
MLGSCAPTTAGPPPDEATTPEPFRSLQIATASAGSAKKKRRPAGTPDPDAEVVSLSPRTLLESDRYVCEICNQGFQRDQNLQMHRRRHKVPWKLLKREAGEAARKRVFVCPEPTCLHHDPSHALGDLVGIKKHFRRKHSGHRQWACARCSKAYAVHSDYKAHLKTCGTRGHSCDCGRVFSRVESFIEHQDTCNASRGQAAAVAEGGNVSTAACGGVAVLEQEKQLDLQAPAAASLSRTASSTSPSSDVVASPVAWPGAGAPSMPSPKAAAFRGRFDMAPSPPPPSYDHYRGGAGAHNLELQLMPPFNAGGAAAAPGGMGACFYAAAHQHHPTGVSQCNDASTQLQLSIGRDEVMGAAGTSDEASAAATAKEQAREQLRQAMAEKEAAGEARAQARRQVELAEQELATARRMRHQAQVELSRAHALRDHAVRQVNATLLQITCFSCRHKFRAAAAGAPLPAAMSSDVACSYVSSVVTEGGDADDPLDVVDATRRRLQHANSMGIM

SEQ ID NO: 18228 - protein, 385 aa, Oryza sativa
  Clone ID: TF_OSC404176j.C1.p2.fg
MMMSSSADHFSNNNNNQAMYLEQDEDFSQMIMELCDFDASSTTQARHGGEAAAAAAGNARAVLTYLTFLEQKIGHLRGIISSTPNPPPQIVAAELSCIVVQLVSISKNLAAARRGGDDADADAKHDGSSDADEGADGDGERAPPRGSYEVVQIEKEEILAPHVHFCGVCGKGFKRDANLRMHMRGHGEEYKSAAALAKPGGSPSRSPAAADAAARRRFYSCPYVGCKRNREHKSFQPLKTPTCVKNHYRRSHCDKSFTCRRCNVKRFSVVADLRTHEKHCGRDRWVCSCGTSFSRKDKLFAHVAIFDGHSPALPPEDYDDDAASGQLPHAAGEAVGRTVDTNRFFSDGLMIKGSMEDERGSLSPMGLDYCEFDGIDLFAAAAFDF

SEQ ID NO: 18229 - protein, 341 aa, Oryza sativa
  Clone ID: TF_OSC400149j.C1.p5.fg
MAKNACKLCYRRFASPRALAGHMRSHSVAAANAAAAAAAAAAAKLQISSASSASTSFTAADEEEEEEEEEEDVGFKKPLSIYALRENPKRSLRVSEYAFSDRESEAESTPTPAAKGLRAGGGGGGGDGEPMSSLSYAGTPEEEVALALMMLSRDTWPSVERGGGGGEYSDDGSDDGYALPPPSPAPAPAPVPEKRTRFQCPACKKVFRSYQALGGHRASHVRGGRGGCCAPPVAPPPQPHPQPPLPEHDAGEEDMDGKAPPHECPYCYRVFASGQALGGHKKSHVCSAAAAAAHAQTPGGGAPPPQPKILGMIDLNFAPPVDEVELSAVSDPHFPSNPPGP

SEQ ID NO: 18230 - protein, 449 aa, Oryza sativa
  Clone ID: TF_OSC400591j.C1.p18.fg
MATNRFVCEICGKGFQRDQNLQLHRRGHNLPWKLKQRGSKEAVRKKVYICPEASCVHHDPSRALGDLTGIKKHFFRKHGEKKWKCDKCSKKYAVHSDWKAHSKICGTREYKCDCGTIFSRRDSFITHRAFCDALTEESAKAIGGIPAAMAAPGHHHHHHHHHHQLLFSPPPVMAHHQELAALQEQQQQQHHQDVMQSPHQHQQQQQQRQQLVQQNCGYAVKPEMAPWPTTMPYDHHHPLLQPLCNANAAATAQSSATSAPPTTPQLPAAAAAAHLSATALLQKAAQMGATIGGAGTGAAGAHYAHMASPAGAGAPAGGSATFGLGLSCLNTHQDGGGGGGNGLIPAGMMGHLARTASHGRSGEDVAGAGGGGGDGMTRDFLGLRAFSHRDILLAGFDSSCMGHVNAAAGMAGYEPPPPHHGQPQHQHQQQQQQQQGGSNEPWHGMGSHS

SEQ ID NO: 18231 - protein, 395 aa, Oryza sativa
  Clone ID: TF_OSC33902j.C1.p3.fg
MGDPYTNFLRGYHHHHRSHHPLHFPPPPPPPPPPYAASFSGLYSSYLHPPPPPSSPPIREALPLLSLTPSTTHDDDHHHRRHDQDHHHHHKQGQEKNSHGGGGAASCSNNDDKRESPSAAAAADDQAAEVTVALHIGLPSPSPSDAAAAAGNQAAAAAAAEASAAGGGSSRMQVEEEGGEEEDEDEAAAAAATATLPLGCASIGIGKLTKGQYWIPTPSQILIGPTQFSCPVCYKTFNRYNNMQMHMWGHGSQYRKGPESLRGTQPTAMLRLPCYCCAAGCRNNIDHPRARPLKDFRTLQTHYKRKHGIKPFMCRKCGKAFAVRGDWRTHEKNCGKLWYCACGSDFKHKRSLKDHIRAFGRGHAACGIDSFDDLDADDDPSSDLDHASASASRVG

SEQ ID NO: 18232 - protein, 845 aa, Oryza sativa
  Clone ID: TF_OSC31520j.C1.p2.fg
MVCSTNILYQRNNPRKWNGGQMEPENKHGCELIDTSFAISEGLIHSETRVPSSNRPIVSRITIHWPSFYNVVTGKTLALPNLIALQHIPLSPAGVIAKRRRGEAHFSQEDDANLNTLSEDPNKSNLPSISIIHEAVGPLESRDQNKTAAFPSTSGVQDTGEPNSALHNVRHELDSFKSSRQCSAYIEAKGRQCGRWANDGDIYCCVHQSMHFADHSSREDKSLTVETPLCGGMTNLGRKCKHRAQHGFIFCKKHRFQTNPDAMSSDSLLSSSEGRKWEESQKSVEKMSSSNATCSVGSEQANNFQVAVHMKVTPTMAVETTSDKVNVSENADLCYPMSTSMENSNLDASICIGIRSHDNIAECQDYAVRHTLYCERHIPKFLKRARNGKSRLISKDVFINLLKCCTSRKEKLCLHQACEFLYWFLRNNLSHQRPGLGSDHMPQILAEVSKNPDVGEFLLKLISSEREKLSHVWGFGTDSSNQMHSENQDGSVMVLREDGTHPSPGLKCKICSQEFSDDQGLGLHWTEVHKKEVRWLFRGYSCAVCMDSFTNRRVLERHVQEKHGAQYLQYSTLLRCISCNSNFLNTDLLWQHIVSDHSRDFSLLDHVPRRPRGQSIKRTERASDELLYDNHNLGKDDGLQKFTCRLCGMMFDLLPDLGHHHQVAHTNSGTVSDIPSGREKYQFNRGRHYYSAFKKSLRPSGSLKKRTSSGVEKHFKAQSLDLSMDTSHIVESETTTLGRLLDFQCSDVALTLFSKIQKTRPHPSNLDILSIARSVCCKTSLRAALKAKYGILPDNIFVKAAKLCSDVGIQIDWHQEEFFCPKGCKSRSSSNSLLPLQPLIIIFDF

SEQ ID NO: 18233 - protein, 355 aa, Oryza sativa
  Clone ID: TF_OSC900182j.C1.p1.fg
MGGSSSTSRRRRDEYYAARPPPPPHHYYTYPPPPPPPPHHHHHPPPPPPPPHHHHQHPYRPPPPPHHATSSSSYYYHHPPPPHAYHGPWHPAPRPPHPEQPALTGPPPEFVDHQQARKVKNDVNLHKDTIRLVPDVTDPDRRLVAFTFDAVTDGSITIYYFGKEGKNCTFSSVYPELQTPTKIPFQKGLAQKFVQTSGSGVDLGFFSLDELSNPSGEVFPLVVYAEACPPPEESHQPNSTRAQITLAVIEKHHNDLRVKVVKQMLWSDGEKYELQEIYGIVNSTEADVPDADDSDMGKECVICLTEPRDTAVFPCRHLCMCSECAKTLRFQTDKCPICRQPVEKLMEIKVRSPEP

SEQ ID NO: 18234 - protein, 73 aa, Oryza sativa
  unsure (1)..(73): unsure at all Xaa locations
  Clone ID: TF_OSC415309j.C1.p6.gp
AKPAESDANASNSGNTPPGTCVICLDAPVEGACIPCGHMAGCMSCLKDIESKKWGCPICRAKINQIIRLYAVX

SEQ ID NO: 18235 - protein, 557 aa, Oryza sativa
  Clone ID: TF_OSC400302j.C1.p7.fg
MASRPRGRRLPPPHPPLIQEILDDDLFDVEVNYSDEEEEEEEEESDEEESESEDNEPEEVVPGQESIGEGCGPAIQARVSGAAAEKNACPVCMEAWASQGAHRICCIPCGHIYGRSCLERWLRHKGNTSATCPQCGKRFRPKDITNLYAPEVAVPNNDLEKEVLYLRGKAESLGETVMKHEKLIEEMNERLVELTSAQKRQILSEQRLMNVGSSKRQKEFFMDGLRVMAIDAFNQTILASGKAPGIGQEHVLYKFSMVSHHEARNIQLPLDTKTVRDICILPSGSAIFTSLGRKLSSFSMTADRVVLQCDLPCPGWSCSADESSRQICAGLQNGNLIIFDIRQTSRPLHSMVGLSTHPVHTLHTVIDNNGSRKFLSASSIGPCMWDTDGIQGRPKLLLGTDNQRVCISLACAPSSSDLLVASFRPKVETSEDATASQVYLSQTPTPSGGGKLGYHSFIRRAGNSSSFTEDRTCSTLVSEIRMSKSAIIPYGNNQHLFAYGDESLRGVRTWRLPSFEMHSDLSSLQQPVLDLRYAESSSGGRYLGYLSTEKLQVFRIR

SEQ ID NO: 18236 - protein, 231 aa, Oryza sativa
  Clone ID: TF_OSC8663j.C1.p1.fg
MAGEEPWSSEASDDVPDTSHMSDEQFQQFIDQYWAEQGFNIWSWIRASRTSSSSTPGPTRRTAASWQAVTFDGDGVARFSGNSDRSGGLDDQATSGFSIVDLLDGILQADDDGNGGGATPASSMAIVNLPEITVGDEKGEAKDCPVCLQGFEEGDKLRKMPCADSHCFHEQCIFSWLLINRHCPLCRFPLPAETEEDEEVVQAENDDDDDDEETILCLHRLFADAADEYTS

SEQ ID NO: 18237 - protein, 874 aa, Oryza sativa
  Clone ID: TF_OSC20843j.C1.p1.fg
MTREHTCFTLVKATSLCSCSTYFREAQLDRVYYARLSIIQKARIITECLHRFCRDCIEKSMRLGNDECPACRTPASSHSLKVDPNFDALILTLYPDLHKDEEEELAFTEEKTCHKKIQASTDEAPHRRKEALGKKSSAAKAIGSSRSQGNMLARKRGHIDFPDIVPTKVRDFHNFEEGRSCKKFECGQIWALYSEVDKFPKLYGWIRKVKLQPFTVLLTWLEPCPQQEQEKRWLEQDIPISCGEIWSIYMNWTFDWTPSSKATCEFTIEERGGELCGFLELDPGSVPDIFLNREENNNDGCKGLSSVGDHSEGPKTKKARKFHVSQSSPAGHKVTSKVDSHEERMANRVAIRLKNIMKIFLCKKRADRQYNPPPMTRKVDIQGKGKTSDTDDKDNANAEATNTVRQNEHSCSLELPSPYPDFYDFEKLRDINMFSLGQIWALYDDLDGMPRFYARIEHFDASSFKAHLTWLEYNAASEEEKKWADEEQPVACGFSVNDGITVIPLVRIKGFVSLFAAAKDKSAVVIASSELLRFSHNIPCYRTTGNEKVIFRATHWLWFWAQLQSDVDKFPKFYGWISKVERQPFIVHLIWLEASPEYEQEKRWLEQDLPVSCGKFKIRDWKARAVFMPDKRNTVVEIPTRDRLRFSHRIPSFLLTEERGGRLRGFYELDPASVPDVFLYRNTVMGWSGMRGTDALNFIFFTYWNATEKRLAIGHSQCLPLNEPSFHSWLYDSHKKMVKEHRRGFDTIATLVAWTIWKERNNWVFNQKSRTWAEIARVMTGEAELWRLAKAAIPVVSGLNNPVIAYHYPDLCDFGKFRDVNWIEVDQIWALYDDHDFMPRVYARIDHIDTSSLKVQFTWLAGAQSYECARGEMD

SEQ ID NO: 18238 - protein, 334 aa, Oryza sativa
  Clone ID: TF_OSC408838j.C1.p17.gm
MPPYTTSVPLHAQQSQPSCSPSTTPSSSALHVRRAAPRSPALPFRQWPPCRRGSAFAACVGRAVHGATPLISLNAFGHARPRLPVTLHHRRSSSNGDSRLLPTVIAAIVHASTAVFRRGYNMGICVSVCAFSCAFEMSDIRGFHRAVPSDAADGTAGGAPISAGAIAGTVCAVVVVVGLLAPLVYWLYRRKLKAAASPPLRPPAAAATPLVRAQEAGAAVGGQGDYTRRRAQVAVPARDGGDLCCGMCGSAYDIVRGGGELPETLECGHHFHRRCVRRWLRVNLACPTCNATHIQLCGDDDDGQATTPRHRLTASDYSGWDELSTGVGSSSCRF

SEQ ID NO: 18239 - protein, 826 aa, Oryza sativa
  Clone ID: TF_OSC401368j.C1.p14.fg
MATSSVAAMPHDSTPWRDPSRASSRQPARGFFNILVPPPQSPRPRCPDHQHHHHHHHHHDAAGGAAAAAAAAAAEPTPRRRKQILDRWAAAAAAASATASAEAPAPQEQRRRARDAELSALASATRPVTARAAVFREPSPAPSDASSGAGAGCGGGARCGAELPPAAPRASSLIQRWREIEAVGPATPRPCDLASDSDGGSPRGRVGCIVKKLSGTSSIPDDELDAANKEVAMSQSAPPSPAPMRAGVEPPTNIAGINGSRPTQLVVRTVRGRRAMEELVAMMAHCRRCELAAVADRHVVSRFSHKGRIQSPKDGAIWLFGRSCSQLALLIIVMCKSHYHVSFCRLYLCEHKYFLSLFVPYVASANIVMLFDTLQSMLRLRLLRQGFKVKDEVWTLPKPVRPRLPKHEHEAYTTSQCLTQAFLSKCIAGNQHKGGQVLAEKSTGSVERLVSSDGLGNEQNDGQNSNSENQCQEGCKNMVKLCTQNQEYSEPSSFVRYDEHSTVDDVSPSTISTLHELCTPSSRGDNLREEDNQSLNGSWEERALWISSLGWPAPVEAMSPDSWNQDEIGDIENHTQNEFNDRPWIDSPNSWRSLCVATQADSGALSGNADICNLLESKNVSKSLESDFSNKMNNMLLTILRKQRQQHMIDDFEGYYDERLYWRQNDEQQNADQRVSAQCSLAPVSHLHQQEGWQHSSFEHQHHENQNFLEMEVRVRSEMAQVHHEIYELRKLVESCIASQVKIQHSIKEEMCSALREAGLMPSQPDTPAKRGSCCICHQTQVDSLLYRCGHMCTCFNCADQLKSSNRSCPICQSPIEDVVRAHMNF

SEQ ID NO: 18240 - protein, 1193 aa, Oryza sativa
  Clone ID: TF_OSC401616j.C1.p63.fg
MSSPGRSGFSPGLAQLLSSRDEAKVSSQKSHLVSYHDEIGHQDIERTLEHIFDLPHKSVVRPPGPIDVGFVRSVLRNQARKFDLGGKDSRKYDDGVLIVDKGAGQTKVVLDDSSICGKFKSIWGPLLVESSASFSSARANTCVWNGKWMYEVTLETSGVQQLGWATLSCPFTDQKGVGDSDDSYAFDGRRVTKWNNDPEQYGQMWAVGDVIGCCINLDAGEISFYRNGNFLGVAFDGIRKVGPRKGYYPAISLSEGERCHLNFGSHPFRYPVDGFNPIEAPPHFCMFAAYLLRCLFRLLEVQNLEKSESAYFEKLRRVKKFAPLRELFRPISEGICAEFFGAAEGSQGCSEYITWGSFITLLTDVFRVREPHDFLCLDQVLELFLQFPGCSSLLQELIVALSCMCKAAPLVLTECPFSGPYPFLALACHILRHKDVMHLWWKSEDFAFSFEGFLTMKIPNKQDLQYLVPSVWWPGSSEDEVSMTLSMTTLSDAIKKIEDKHRELCSLVICFVPPTSPPLLPGSVFRSFVQSSILKVRGGDHRMASSGTFNDTVLVSLYTVILHLLSEGFSMDSSGPASSSRINYGTGVGFLHKGGKRRFPTQLLLRNDAYYNVIPRLGGSLNHLLMFHQIDANEDEVQWDEGCMNDEETRITHTTAQKPCCCSITDVTVGLRFKENAKYIPSTSKGPCKSMHEKSAHIASECSAFYFVSQQSQSISLLEETDRQIREKSCMEQVRRLKEARNSYHEELVDCVRHCVWYRATVFSSWKQRGMYATCMWVVELLLVLSDSSSIFHYIPEFYVESLVDCFHALRRSDPPFVSPAVFLKHGLASFVTLVVKHFDDPRIYKEFMFVFENNREAINRMPRSLLSAFDNRSWIPVTNILFQLCKGFGFASSKNVEPSSSAIFQVLLRETCIHEEELFLSFLNRLFNTLSWTMTESSMSIREMQEKRQVADLQQRKCSVIFDISCSLARILEFFTREIPHAFLMGPDMNLRRLAELVVFILNHIILAADAEFFDMTLRRPGQHQEKTNCTMILAPLVGIILNLMESSSTSGHRELNDVITVFTSMDCPATIHFGLQYLLSYNWSNVLRGDASLAKLAQLEEFSHYFMHITMSADGNEEQGFSTASNEEDNCCICYNSDSDTTFEPCHHRSCYGCITRHLLNSQRCFFCNAVVTSVTRIADSRIESRSPLAP

SEQ ID NO: 18241 - protein, 494 aa, Oryza sativa
  Clone ID: TF_OSC405796j.C1.p6.fg
MEPPAGGSSDHRRGAGTGAGAGGAASPSGLRRYGFRFSASSLLQAPLAALLEYSGVVPSGPGAPQAGPPSALSSSPSSSSSSSEADGLLSAAAAGDGEVSIRIQGGPGEADAAGVAGAASSGEDSIEATAAGDVDPASAAAGRGGGADAEASGGGADGASGNGGGDRAYQRYDVHHVARWIEQILPFSLLLLVVFIRQHLQGLILILLCSCHCVIISGFFVTIWIAAVMFKSNDILRKQTALKGERKIAVLVGITVIFMIHVFGVYWWYRNDDLLRPLFMLPPKEIPPFWHAIFIIMLAFLTKCHLQIQWFARQQWPLSACYLCTIRIAEVVTTGQMLTLVEYLLLLYRALLPTPVWYRFFLNKEYGSLFSSLTTGLYLTFKLTSVVEKVQSFLAAVKALSRKDVHYGSYATAEQDTPLNSHSILFKELVFCWNLVQEKMHVPVLLRCKHIFCEDCVSEWFERERTCPLCRALVKPADIRSFGDGSTSLFFQLF

SEQ ID NO: 18242 - protein, 129 aa, Oryza sativa
  Clone ID: TF_OSC402932j.C1.p2.gm
MDPTTTTTDSECDFIKKIPSWMIRNSPMHCMEAGHFGKDAAAAAAAATADAMEHALPCSDLHHLRVGKTAEQSCSVCLKNFEEGDYIWSMPCSHTFHQLCILGDRSCRVCHPAAPPSTEEKPEAPRTVN

SEQ ID NO: 18243 - protein, 66 aa, Oryza sativa
  unsure (1)..(66): unsure at all Xaa locations
  Clone ID: TF_OSC400545j.C1.p59.gp
GHAFHPPCITRWLFKGTTCPICRDDLTGLAAAPWESGVMSCPGCIMPSTPCVEDCPSLKALSLNSX

SEQ ID NO: 18244 - protein, 68 aa, Oryza sativa
  unsure (1)..(68): unsure at all Xaa locations
  Clone ID: TF_OSC900230j.C1.p3.gp
YVDNDDLRELPCAHFFHKDCVDKWLKINALCPLCKAEIDGVSTSAPAIGFGRRHSDNRVGNDIESQLX

SEQ ID NO: 18245 - protein, 365 aa, Oryza sativa
  Clone ID: TF_OSC401380j.C1.p24.fg
MSSLCPFAKLASAGATCPVKSDNKTTSCPVTANNHTDDDDNEKTGNANTDPRVVPAKCPFGYDSNNTFKLGPLSCVVCHALLHQSSKCTPCSHKFCKACILRFKDCPLCGADIQGIEPDDELQGLVDRFIDGHARIKRSHAAGDGEAASDKTKVIYEHVSMERGAFLVQQAMRAFRAQNIESAKSRLSMCAEDIREELKSKEDNQELCSQLGAVLGMLGDCCRTLGDAPSAITYYEESAEFLSKLPKKDLELVHTLSVSLNKIGDLCYYDGDLHSARSYYARSLDVRRSAVKEHSAVASQVIDVATSLAKVADVDRNLGNESMAVEGFEEAIKCLENLKLESGEASLEQRRLSVLDFLQKQLDDK

SEQ ID NO: 18246 - protein, 683 aa, Oryza sativa
  Clone ID: TF_OSC401045j.C1.p15.hg
MGSDVIQAKLVLLGDLGAGKTSIVESTIGAAFFSQVLIMDEATVKLDIWDTAGQERYHSLAPMYYRGAAAAVVVYDISSTDSYIRARKWVDELQRQGNPHLVMALVGNKVDLEEKRQVGTQEAMEYAERNGLFFIETSAKTSQNVTELFYELGKHYRNNSAGQSATSPPFRDGSPRRPAPPRRRRRLAMAALLLRLMRLYRLPKYAILNRKRLLLNPPWTLNVPASRCGPPGRHSESDTTHHIAFASPSSSRTRTPTDRPSPSPTNLAPPPLLCFLLPTYFPFPPLLSPRTLRAAAAAAAAAHVEQPAMENACEAGLPLSVAVSVPPVMVDGETVPKEVEECEDEEEEEEYAGDAPPPWKVMGSDDEGETEAGEEEEIAEADGEEEAADVEEVEYEFYDSDGSEDEGDGEEVDPAVASAAQFVPEGQFLGSAQFAAYGCAAGFMRVAAVEADPADGQEILVLYRYTLLKRAWSDPAGVELSMWAKVSKIHRLRFIVPASGDPASSLPFAGLSLSPLIYHNDYVEELETLWSKLAAQVRVPPVATRVQVIVDVGILRAGDNTPERREYMRAELEAKKEMPWPGKLLGMELHVPEPVVAAAASCKRDSSEEVFDDAPAPPAKRRKVFDAGEECPVCLDELEDGVVAWPGCSVAHVFHGQCLETTLKGSQMCPICRRDLGLKTLQE

SEQ ID NO: 18247 - protein, 124 aa, Oryza sativa
  Clone ID: TF_OSC402929j.C1.p3.gm
MDPTAGTGSSTKKIPSWMVTELPMLSTEANRLPQIPSWMIRKPLMLCMEAGRSGKAAAAATADAMEQSCSVCLKNFEKDDCIWSMPCSHTFHQLCILGDRSCRVCHPAAPPSTDEKPEAPRTMH

SEQ ID NO: 18248 - protein, 339 aa, Oryza sativa
  Clone ID: TF_OSC900356j.C1.p18.fg
MADSRGAAAPPATSPAPTRAPPRIRPRQLPPWPSPLRPRTPEGTTTWPRPREARRPVHGAQPGRRRPRPGPRAPGAGICGGDLAERAYMMLRMGGGVGEGSDYGSSDAGSYEYDDEAEEDYEEELEHHLRVHHHEHAVGEGRGEGERDGEGAEGSEFEEEGFDEEYDEEEVEPELDPAEYEDDEAYARALQDAEEREVAARLMALAGISDWRPVEPVEEHANDPQELVALGEAVGTGHRGLSAATLASLPSVTYKAEGVQDGNTEQCVICRVEFEDGESLIALPCKHSYHPECINQWLQINKRALFDCQAAYVAKFCVKVWQPKIVSKFIRHISGKSFL

SEQ ID NO: 18249 - protein, 368 aa, Oryza sativa
  Clone ID: TF_OSC100622j.C1.p1.fg
MAAAAEAEEEVRQEVEAVASVYGDDCRVVRGFPPHLVVHVRPRTADDSSQQFVELFLGIKASSQYPKAPPHVYAVESKGLDENRQVYLISSIQNKARELSCYPMLVTLCEEAVEMLSNMNHPAGDCPLCLYPLVKENDGSALPFMKLMSCYHCFHSDCIMRWWEWLQNDDTDSKKSSTAATTEGLDLSSSAKHHNVSQHKGLCPVCRKVFDEKDIEHVRDLLGANTSQLASLSIDLDEDEKEVLHSESEKIRQEKFASLFNLQQERNGLIEPKKDLSIQPGMYIPRPPSAPTASEGDTVDDSCEDTTTSTSGTEPLNQTNSTGGTTKHNSSSGHRRRHRSHASRRQPHGQGQPARQQWQRKGGDTSHQ

SEQ ID NO: 18250 - protein, 119 aa, Oryza sativa
  Clone ID: TF_OSC401783j.C1.p18.gm
MAPTCVGCGLCCATATARQHDNGTKWWRRRRAVAGRKLQHQLAAQEERRAVWGVVCGGGIKKRALRSIPVEVRVLPRCNHGFHVRCVDAWLVSHGSCPTCRSATGVVGGNGAEVAPEER

SEQ ID NO: 18251 - protein, 281 aa, Oryza sativa
  Clone ID: TF_OSC411039j.C1.p2.fg
VSRKHLPHVYSRAKVRALMRIDQEAVEMLSNMNHPAGDCPLCLYPLVKENDGSALPFMKLMSCYHCFHSDCIMRWWEWLQNDDTDSKKSSTAATTEGLDLSSSAKHHNVSQHKGLCPVCRKVFDEKDIEHVRDLLGANTSQLASLSIDLDEDEKEVLHSESEKIRQEKFASLFNLQQERNGLIEPKKDLSIQPGMYIPRPPSAPTASEGDTVDDSCEDTTTSTSGTEPLNQTNSTGGTTKHNSSSGHRRRHRSHASRRQPHGQGQPARQQWQRKGGDTSHQ

SEQ ID NO: 18252 - protein, 642 aa, Oryza sativa
  Clone ID: TF_OSC419789j.C1.p16.fg
MASYVPCSSSSTHRSRNFCDLVLVYAIIGSMHSSMTLFSVCKILSLYVDMCFVDYSKEVHSYLKYCKDVVFTGMTFSLEEEHLIDIFWDMYKGKEDENAKLCQEKLRTTNGVNKRCRDGSSNYSLQNKGILIFHIIPDYHPENPWNVLHPSNKRFEERKSCTDAGMLPGPLLPLPPPPPPELVVYPSVPSLPPSATPPSSSSSIGSSIAIVVLVVITTAIVTVAIVVIRRSYRRGRRLSCSSFSPRRSLSPRALSSSPSAMSQMWRAAVAAVGSSPRASAASARSWPEMAAPSSAPGDPGRGPPVALSSSAQGAVQGTAGLMASSATSAAAMAPPPSAPSLPEVERVILELLSLPPSPLQPAMSGSTATCFICNKLLLPTDLHLVLPVCSHMFHQRCLVAWLRSRVTPLLCCPECHAPITTRCRTDKRSLVPTFCSGEYDIESQILAVPAPPAEKVAEAVGGSRGWLRSSLDRLSGSWRACSGSRAVAAVAAPGCSSSRRTTGSWSPGTGSTSGRHLHLGADSRGVQTEVQLQLQLPVLPLADEEVAAADDDAGGSRGWLRSSLATLSGSWAVFPTTSRSTAMELPVSSSRRTAAGSTDSWSGSWDPEALRVSEPQPRERPSVLDYARWVFRNSGKYTKHRH

SEQ ID NO: 18253 - protein, 127 aa, Oryza sativa
  Clone ID: TF_OSC35114j.C1.p1.np
MNELVEPSSTICGHIFCKQCIKASIQAQKKCPTCRRKLTMNNFHRVYLPSADPKQGASTTRAAAATTQCIIHPTAPFNTHVSIPLTPTTITRGQAGEQEARKKKKTWWCRGGHTDVDAVPSVALSTN

SEQ ID NO: 18254 - protein, 531 aa, Oryza sativa
  Clone ID: TF_OSC400964j.C1.p128.np
MNELVEPSSTICGHIFCKQCIKASIQAQKKCPTCRRKLTMNNFHRVYLPSADPKQGASTTRAAAATTQCIIHPTAPFNTHVSIPLTPTTITRGQAGEQEARKKKKTWWCRGGHTDVDAQGPAAPNDSPRKRFSGVAPPAALIFFVLVFAGGAIVTLDHKELRPREMVVSETETRAPTSEVQETETRAPTSEVQEAGTGAAAGGVQRAELAGSSICENQCRPSGSEPLPKGIVQDKSNFEMEPLGGNPERRAAVARPAKSLLAIPVGIKQKAVVDKLVSKFPGDRFTVMLFHYDGEMDGWRELGWSDRAIHVAAKDQTKWWFGKRFLHPDMVAEYEYIFLWDEDIEVDGFDPIRYLRVVRRERLEISQPALDHRSQIHHRLTLRARKGQVHRRFYKTRGGGRCDDNSTGPPCTGWVEMMVPVFSRAAWRCAWHMIQNDLIYAWGLDFKLGYCAGGDRRLAVGIVDSEYVLHRGIPTLGDGGGKPAAKRSSTATKAATDRLAVRQRSYTELQIFNRRWKAAAEGDVCWTDPYP

SEQ ID NO: 18255 - protein, 430 aa, Oryza sativa
  Clone ID: TF_OSC401327j.C1.p18.fg
MGANCCIAAKERPQPCVTPIEVSAFRNVRHSPSWSFRWDNRTHIEDIMEMPALFSNHSSGSIRPETKSGSIAPTDGFSNGGSPSDMFNKLKCHKSDRKRESSKIARSDLRGRSTTSNSSPEAKLSRKSLDTVSVASDSKMSISVPSTPPAISRADPSSSSRGHSLPTDADSMRKARRSPGYQLYRQVSDSKIPSLRSLNEGASPEGRPSSSMLSVCSNDLSAVGSHGESSDGWSMRTFSEMVASSQRERWSVDSELLGSVSSKMTRSNASNNPTTHSPDQEVCKLCLKLLKERSTWNAQELAVVAVLLCGHVYHADCLDSLTAEADKYDPPCPVCTHGEKCTVKLFGKLESKTKNKIPKNVIVDVNLDGSSKHQKESRREPRLGTSSSLKGSFSRPFLRRHFSIGSRPSQSISESESARKKGFWARHWRE

SEQ ID NO: 18256 - protein, 995 aa, Oryza sativa
  Clone ID: TF_OSC900236j.C1.p5.fg
MADTGSLEKMGRELKNLVLGSLSLLSSAVSISCNHVFCNDCLTESMKSTSSCPVCKVPFRRREMRPAPHMDNLVSIFKSMEAAAGTNVVSTQEAPVVKLADGSDCVNSGKNSKRSQKSLTRKRKVTSEMEKNTAKDATASASQPTTKPSFSTNKRIQVKPFPESETPIRAEKIMKPEEPKNNLNNDVEGKNKAVASGQPGSPSLSPFFWLREQEEQEGCTAETLSETQSLDTPLRHNAPSFSDIKDSDDEIPLNTTPNSKAAATELFDSEIFEWTQRPCSPELYSTPLKKQSKAKSKLDQIEEKGDEEDVHIGGSFDKLGNASNAAQLVNTKATKQKRKKTSPSNKNSAKLSNRAEPCIKKSDANQQGSNRRKSAALKSCQKSSSAVGRNTSGRRNKASSNSKPIHGSSDNSPESYLPKEGLDVEAPDKPLSERIQNLEKTSRRKGSARKLEMAGKTISDTTEKNSEPRSKRVRRMSDHAIAKPVEVPSGSGNETEIPQLHTLTKGSIQRKSSNARRHSKVCGEQEGKNKLENTTMTPIILHGKCQNKEAVCTAPSVRTASVKYKQAKFSEQPDCFGTENFGNLQACPARNVLLKKCEVSTLKVSCAFCQTDVITEESGEMVHYQNGKQVPAEFNGGANVVHSHKNCLEWAPDVYFEDDSAFNLTTELARSRRIKCACCGIKGAALGCFEMSCRRSFHFTCAKLIPECRWDNENFVMLCPLHRSTKLPNENSEQQKQPKRKTTLKGITGFSRSSQIGSNQDCGNNWKWPSGSPQKWVLCCSSLSSSEKELVSEFAKLAGVPISATWSPNVTHVIASTDLSGACKRTLKFLMAILNGRWIVSIDWVKTCMECMEPIDEHKFEVATDVHGITDGPRLGRCRVIDRQPKLFDSMRFYLHGDYTKSYRGYLQDLVVAAGGIVLQRKPVSRDQQKLLDDSSDLLIVYSFENQDRAKSKAETKAADRRQADAQALACASGGRVVSSAWVIDSIAACNLQPL

SEQ ID NO: 18257 - protein, 121 aa, Oryza sativa
  Clone ID: TF_OSC401518j.C1.p5.gp
RIGDAEGAPHPPPPDLGFRGPGGVALRPRSSASPPPPRVRVRFLRITSSVLNLLVRSKMKCNACWRELEGQAVSTTCGHLLCTEDAKKILSNDAACPICDQVLSKSHMRPVDTNPNDDWTN

SEQ ID NO: 18258 - protein, 260 aa, Oryza sativa
  Clone ID: TF_OSC416339j.C1.p6.gm
MAASVFSVGRKSPARERHGPGNVAETSGWAEWKIVTGIKQKMSNRATHWCYVCRRPVRIRGGSQDVTCPSCDDGFVQEMSEMGRRTASSTLGFVGPDAGDEFLLRRSPVMEAMSTLMRHAATVGGDEREVDVHDEHGGGDGVPAHARLGVLFRGGPRVGVERRGGYYRAGLEALFEQLQNQLGSSRQGPPPAPPSAIDAMPVVTISRRHLRAEPRCPVCQDEFQLGAEAREMPCAHLYHADCIVPWLARLALVPLAVWAD

SEQ ID NO: 18259 - protein, 704 aa, Oryza sativa
  Clone ID: TF_OSC401282j.C1.p8.fg
MASAGGRCDGCHGDFGLWEPPLTAECSHRFHLHCVVSGADVCPACNARWTNAPSNPPPQPAGGSTTPFGQTTGFPMRVRPWSSCDKCRGVIDHSQPTVTSECSHTFHLRCFSGSVICPACNARWRDTVAVPNPSPAPPSTFFPAGVPAPPPTFSPFWVSQEYDDDEPVEPPVAAHGGGVAPASNGALVVRTHCEHTAVARSVIRDNFVVLVHAKAPSIAVAEATAAARAPVDLVTVLDVSGSMEGYKLTLLKRAMGFVIDKLGPGDRLAVVSFSYNAQRVIRLTRMSDDGKASAKSAMESLAAGGGTNILKGLVEAAKVFDGRRYRNAVASVILLSDGQDTYNVNGGWGASNSKNYSVLVPPSFKRSGDRRLSVHTFGFGTDHDAVAMNAIAEETGGTFSFIENQAVVQDAFAQCIGGLLSVTVQEARIAITCPHPGVRVRSVKSGRYESLVNGDGRAASVDVGELYADEERRFLVFVDVPAAGAGEDVTELIKVSCTYRDTASRQQMVVAGEHAVVQRPVEVATNTEPSIEVERERFRVEATEDIAAAQEAAERGAHAAAKAILDRRQEALARSAPGLAGDARCAALLSELRELSARVASRREYEQTGRACMLAGMSSHAQQRATSVQLFGAAAPTWSMPMCGSAAPPSLSFGGFGGFATPAMRSMVESSRKRRKGGDGSLSFLDLVRTEEEAGSSDDEKENL

SEQ ID NO: 18260 - protein, 60 aa, Oryza sativa
  Clone ID: TF_OSC400621j.C1.p35.gp
ILCRICFERDICIVLLPCRHYVLCEACSDKCRSCPICRVSIENKLPVCDAMSSADSISDT

SEQ ID NO: 18261 - protein, 957 aa, Oryza sativa
  Clone ID: TF_OSC400302j.C1.p1.fg
MEHPVSNTMEPDLRAKDHRACSASATDTSSRIIAQWAARRRQLACDDQVIDRRDRDSELLALARLHAVSMLDASFLRAHDDAGGGGGRRARSPERALVRRIAREWTASSRTSPRGGGAGGEELLGETERQRVRAVRERVRMASQGQGHGGAHTPRLMRGRGRHGQDVVTRMAMERQRELQGLSDHRAVSAFAHRARIQSFLRGRSFHSGSPMHDERPLSMAARELGQLRQSHPVSRFREEVRSRTEVTTNGPATNHTGPMDTIVDLHLHENDHRQENATHNEIQTHQSMENESVDIQRSITTSNDDVVQSDFGQEQLHRYEDYPDSGSSEEASEQSDSSSPSDNSNQQEEETYEQQTNLLWSRETSSSEDGDHEWNVMNSQEAEAQWRSGPSFSSNRNINRFSPPDDDVYGVELRELLSRRSVSNLLRSGFRESLDQLIQSYVRRQEEHDDPLDWDYQRQGTATGLHSDDQGEDRIDEATNQTVSDTRDHQPSILPQQRHWQMELPHHHHNWSQQAMRHSELDWDAIHVLRDDLTGLQRGMTSMQQMLEACMEMQMELQRSIKQEVSAALNRSLAVPAGEEGMLEDGSEWKLARKGTCCICCDRQIDSLLYRCGHMCTCSKCASELLHGVGKCPLCRAPIVEGLLTWASPSRFRLLDAPGLLAAVEEMELQGSLFCLCGLGVYSFGCNSVQRYSATKTDKNKSSDLIIQPQINDVTEESNQRPTDSSEINPTVGVFGEHYLFWTQHICQLSSHRDGTIYNNQLYWKNNYDIDVTNREETRDHVDSMLNYVFNRSRDDPIAVNQGSLIEMTGPKRGIALIPECLFEFDMRIKTGEKEEDDLQLIDGMIELDEMRMPETPYTTRINGDSGSVDLCLANVSNGVEATVEVVISELMVNGFDLSISCVVSSSRYEYDESKEFQIFGGSIGEACGLRRFVLAVYLDTDAAEVEVLVACSLYP

SEQ ID NO: 18262 - protein, 643 aa, Oryza sativa
  Clone ID: TF_OSC400054j.C1.p20.fg
MPHQTKATVQQQRPPAAASVVRAGAQEEDASAAGSLRAILAQIPLQIRPPQGLHPAQQVTMRVRSRMEPMKLTVKSRCGVCSHGVKTGAAAVFTAECSHSFHFPCIAAHAHALAAATALSCPVCAAPWRQAPFINKRTTTTDDHKRKSYDDDEPLLAPKAAAGAFNPIPEDDEDDATEFRGFFPARPRSGLAVTLAPDAALVSAGRRHGKYVVAVRVKAPALRSSPSTRAPIDLVTVLDVSQGMMGDKLHMLKRGMRLVIASLGPADRLAIVAFSGAAKRLLPLRRMTRQGQRSARQIVDRLVVCAAAQGQEQPQAVCVGDALRKATKVLEDRRDRNPVATVMLLSDTQQQQQQQQDAIRRPPAAPPATRFTHVEIPIGPGEEPARSALVAEEDDDQFSEHAFAKCLGGLVSVVMQEVQLELAFPTGEITAVYSCGHGQQAVALGGGGGGAAVSVSLGEMYAEEERELLVELRAPLSQSHPHSLSVRCSYREPASQETVRGAEQQLVVPALHGGSSSRRLHDLFVATRAVAESRRLAELNDYATAIHLLSSARAVVVQSAEQGLVGSLDTELSDMRWRRGQSAGRRRGGESEETPVGTPRARGGEPLTPTSAWRAAEQLAKVAIMRKSMNRVSDLHGFENARF

SEQ ID NO: 18263 - protein, 258 aa, Oryza sativa
  Clone ID: TF_OSC8178j.C1.p6.fg
MPHQTKATVQQQRPPAAASVVRAGAQEEDASAAGSLRAILAQIPLQIRPPQGLHPAQQVTMRVRSRMEPMKLTVKSRCGVCSHGVKTGAAAVFTAECSHSFHFPCIAAHAHALAAATALSCPVCAAPWRQAPFINKRTTTTDDHKRKSYDDDEPLLAPKAAAGAFNPIPEDDEDDATEFRGFFPARPRSGLAVTLAPDAALVSAGRRHGKYVVAVRVKAPALRSSPSTRAPIDLVTVLDVSQGMMGDKLHMLKRGMRL

SEQ ID NO: 18264 - protein, 429 aa, Oryza sativa
  Clone ID: TF_OSC410095j.C1.p20.fg
MSARDRETAVALARLAAALDGAVLGLGTAALAVASWVKYLAASGQLRRIASAPAAAIPDLRSLLAEYGGGGGDGDQPILAVVRGHVRAAPRGKYLVPPGSGEHCVVAKHTQLWHRRLGLMFWIASGFLWKQYPEAKFQLLILFCRGCGCTAANRNIPCLFNEWRGIFGWTFDLHALFFKSIKEQIITSFRWVYHLYFVPFVLVDPENMTGMVHVKLDRAMQPLPLTTVYHKLTPVDSTPYTLFQTIIGNGYPIALLDEEKILPVGKEITAIGYIRPHKASVEISSCSEIPFFLSDLTKDEMEAELSSRAKTLFWASVVLGTMSVCLLGFATYRSWKKIKERREARQAQEVFRQTTDEVTDDQSSDEEAGEMGDGQLCVICLRKRRKAAFIPCGHLVCCCKCALIVERQFDPLCPMCRQDIRYMIRIYDN

SEQ ID NO: 18265 - protein, 62 aa, Oryza sativa
  Clone ID: TF_OSC400139j.C1.p1.gm
ALVAGEKVKALPPCGHCFHPDCVDAWLRSQPSCPLCRSLLLAAAATAAKPDVNGGDDDDSAV

SEQ ID NO: 18266 - protein, 260 aa, Oryza sativa
  Clone ID: TF_OSC400645j.C1.p14.fg
MWSFASNAIAGSIRKKAQPSKCSQSNPDCSDDDVSSCASREEGLECPICWESFNLVENVPYVLWCGHTMCKNCILGLQWAVVKFPTLPIQLPLFISCPWCNLLSFRLVYKGNLKFPRKNYFLLWMVESMNGERAKFHSPSHEERHSLCPSGGGPSSSQHHRRPAPRTESASGRERSVAGNVFNTYSISASLQKIMLSFVQMTAKFPLVIIFLLIVLYAVPASVAVLVLYVLVTVLFALPSFLILYFAYPSLDWLVREIFN

SEQ ID NO: 18267 - protein, 163 aa, Oryza sativa
  unsure (1)..(163): unsure at all Xaa locations
  Clone ID: TF_OSC417199j.C1.p2.gp
MKLRSPAFLRTDKDFFSQSIMQVRGLPCAHNFHVECIDQWLRLNVKCPRCRCSVFPNLDLSALNNLRPSSEPDRPSASEVTAATMARYVRSSQPAGQSYLLRLQGLLLRQVVVRHGGGDDMASAENGASHVAAAVTAPATTGGVESELPSIVVDGGHQLPDRX

SEQ ID NO: 18268 - protein, 263 aa, Oryza sativa
  Clone ID: TF_OSC18350j.C1.p5.fg
MEPVTAASAAAAASEEQVTRRVASRIIRALQHQLRLLHRAGPEFFVLGATGNVYTVTLAAAPACTCPDPSVPCKHILFVLLRVLGLSLDEACVWRQSLRPCQVARLVAAPTCAEADVVAGPRARERFHQLWSARAAAKAEESRRRRRRDDQAAAAGASGRLDGAACPVCLEEMSPPGAAAAAAMLLTCAMCRNSVHGECFARWKRSRGRRAATCVVCRARWRQPSREQEKEPYINLSAYMNDAGGGDVNMVAADGDDGGLCAG

SEQ ID NO: 18269 - protein, 358 aa, Oryza sativa
  Clone ID: TF_OSC413657j.C1.p14.fg
MGAFCSKQNPSGQQPHCCNHSSSSNAAPKGNNRFAKFGDDYHTLEQVTDALAHAGLESSNLIVGIDFTKSNEWTGRVSFNNQSLHSLGHISNPYEQAISIIGQTLSRFDEDNLIPCYGFGDGPTSFAPMIETAIGIVDSSGGQYHVLLIIADGQVTRSVDTGNGQLSPQERETIDAIVKASDYPLSIVLVGVGDGPWDMMRQFDDNIPSRAFDNFQFVNFTEIMSRPVPASKKEAEFALSALMEIPEQFKAAINLQLLGKRRGFPHRTVLPPPVRDFQQYYGCSTVKETQSTSYGSLQKKTSAPKQDSDIGDQTCPICWLEAKNLAFGCGHQTCSDCGKDLKVCPICQREISTRIRLY

SEQ ID NO: 18270 - protein, 48 aa, Oryza sativa
  Clone ID: TF_OSC9137j.C1.p1.gp
LQEAQVSEARESDCAVCFEGFDQGEKLTRMPCSHCFHATCILDWLSLS

SEQ ID NO: 18271 - protein, 681 aa, Oryza sativa
  Clone ID: TF_OSC101892j.C1.p22.fg
MVDINPDHIFEVPDTPDRIQQSTCPVSSPAARRGIAKAAGTPLPSRRIKFKITNNSIQGQSSRGNASSVSPAPLDAGDIFKQAELARLLPVAEDPEARSSLLKSGRTIETSVENEKVPKKSGLDQSMNISNNINCRGSGERDRSCQIRKGDISARDANSCNADFLCLGSGLPTTTVGKPRNRMGTITFKKPKEVVGANVCSVSSPREGKGEEITDKGTTGISSSTPSIVPQRHVGQRKLVRNGCISPSNIAKRSLKVDEKREICSTSGLLHYPDTQVDASGKGNVIDLTDSSPIIRRQGNTATDMEKRSGRKSAIGRAGETVIPLAANQVNSIFSEGNKNKGKEISHDVVGAKQSGEAYMRRVCPRSMGDSSSVANNDHTGIGSEQGKMTNSCGRESGSSEQSNLDRASAAGDSNNSIEGGDNNNSIGGAKTLQTASFVNRTIRISSRKRKRIASSYHPGESSSSVDVDQPRVASSDSTAARNHTTHRHHIPVVDIDDICSPEVRPSLSGIGSSNRTSVDPNIREQLESDELLARQLQEQLYNETPHVVPTEEIDAIIAMSLQHEDNAQPTSRTARRFQSTTRGPRVLRSTVPQHANRVRYDSNNRRIIYQRALSRYPAAHIQPNIDLNDYDALLALDENNHQHAGASESQINNLPQSVIQCIDEWLRRKKLCPVCKSGIT

SEQ ID NO: 18272 - protein, 218 aa, Oryza sativa
  Clone ID: TF_OSC411348j.C1.p1.fg
MAMSPHDQHEHEPDHAHRSPSNGTAATSTIATNRWGPYSGAGDFASNMAVILAALLAALALALALNAAVRYLLRRHRRARQQPAAAAAAAEDPEKPPVQEADPPPPPPALVYSAAGTKLAGAAECAICLAEFVDGDTVRVMPCWCQEIPLESGLRFAQIKVYQTGPFNVEAANLLPTPGICTTCRFVYRGVVKHLHFLYGDWRDILACFVKGKKNTNS

SEQ ID NO: 18273 - protein, 115 aa, Oryza sativa
  Clone ID: TF_OSC401961j.C1.p21.fg
MQVGGTAAAAAEVSMSYRETRREEEKRRGTKMKVKILQWHGVASWTWNAQDETCGICRMAFDGCCPDCKFPGDDCPLIWGSCNHAFHLHCILKWVNSQTSTPLCPMCRREWQFKG

SEQ ID NO: 18274 - protein, 61 aa, Oryza sativa
  Clone ID: TF_OSC402359j.C1.p1.gm
PLARYGPLGNCAHAFHKACIDKWVDKGQATCPLCRAALLPSADDADAAAIAATTRHHLPSF

SEQ ID NO: 18275 - protein, 373 aa, Oryza sativa
  Clone ID: TF_OSC404332j.C1.p15.fg
MASGTDEKAKMEGLTSAAAFVEGGIQDACDDACSICLEAFCESDPSTLTGCKHEFHLQCILECQELLEAVERERNVRTNQTRNTTIFHHPALGDFEVQHLPVVGNDAELEERILQHLAAAAAMGRSHHLGRREGHRGRSGSHGRPQFLVFSSHPNMPSAGSVSSSSVQGEVDNESSPVHTTGELSLHANTHEEAGNQSPGMLTYDADQDAVVSSGNSTPVSSPRFFNRRHSTGQSTPVNNDRAGPSDLQSFSDSLKSRLNAVSMKYKESITKSTRGWKERLFSRHSSVADLGSEVRREVNAGIASVSRMMERLETRGSNGRTSDGPAISTSEVIPSTESSNERVTENNPTTAATSSGNTSASSAPCVTTTGSN

SEQ ID NO: 18276 - protein, 711 aa, Oryza sativa
  Clone ID: TF_OSC10241j.C1.p6.gm
MDEKVKMESKLSSAAAFVEGGVQDACDDACSICLEAFCDNDPSTVTSCKHEYHLQCILECQELLEAVEQERNIRANRLNTAAVFHHPVLGDFEVPVGADDAELEERIIQHLAAAAAMRRNEAIPGGSLHASSGQDEDHEQSSDLGSAHPFAALAAVDQGHMSGGSQLYVGHSDQGASNPSLHDERAMSRKPNNASSSSCGKLGAPKGSLADEGAVAAAQAIRAGEKWPQAAAMGAPVCGALVCFFVLLVARAAAETAPVERPTLPSADVAIDGNGNGARAGAGKAAGAGAVGGGIVSNSVLVALLDSRYTEMAELVEKALLLQALEDAVAEHNVTILAPRNEALERDIDPEFKRFLLEPRNLNSLQSLLLFHVLPARLPSGSWPAAATHPTLAGEDVELAAADGGGGMRVAHAAVSRPDAVVRTDGVIHGIDRLLVPRSVQDEFNRRRSLADISAMPPTAAPEVDPRTDRLKKPAPPGDSPVLPISDATVPDPSVALASEPSDHYDGDSQVKDFIQTLLKYGGYNELADIFVNLTSLATELAQLVSEGYALTVLAPNDEAMARLTADQLSEPGSPENILYYHMIPEYQTEESMYNAVRRFGKVRYDTLRLPHKVVAREADGSVKFGHGEGSAYLFDPDIFADGRISVQGIDAVLFPPAETKTKTKPATARIRTAPAITGVSKIKHRRGKLLEAACQMVGILGQRSQFTRCQ

SEQ ID NO: 18277 - protein, 164 aa, Oryza sativa
  Clone ID: TF_OSC34110j.C1.p1.fg
LVTCVRSNIYHVKQPPNTMSTKAVCHVVVDIELQDVARGGTAATTTNCCAVCVEPLEWVAIGPCGHRCVCARCIVQVRFVSEDRRCHVCRAPCPLVVVIKGHCINGADILAELPSSPSMITRQGRVDNFWFNVDTAAYFADEQQFKVARIACVKKSFYKPKEKP

SEQ ID NO: 18278 - protein, 292 aa, Oryza sativa
  Clone ID: TF_OSC408853j.C1.p1.fg
MAEVANVGTKSSINNNEDTSRRRRRRSTVKAKMPTNGGIIGQPCKRKHQSTAAKVSQRLSFPLTDLDQVREEELEEVVDGKEVKTPKAKAKSATHEIDSIALVDRKLDATPTWRANCRNMNSAIIKGDLVTCVRSNIYHVKQPPNTMSTKAVCHVVVDIELQDVARGGTAATTTNCCAVCVEPLEWVAIGPCGHRCVCARCIVQVRFVSEDRRCHVCRAPCPLVVVIKGHCINGADILAELPSSPSMITRQGRVDNFWFNVDTAAYFADEQQFKVARIACVKKSFYKPKEKP

SEQ ID NO: 18279 - protein, 665 aa, Oryza sativa
  Clone ID: TF_OSC420483j.C1.p21.gm
MDEKVKMESKLSSAAAFVEGGVQDACDDACSICLEAFCDNDPSTVTSCKHEYHLQCILECQELLEAVEQERNIRANRLNTAAVFHHPVLGDFEVPVGADDAELEERIIQHLAAAAAMRQDEDHEQSSDLGSAHPFAALAAVDQGHMSGGSQLYVGHSDQEGSLADEGAVAAAQAIRAGEKWPQAAAMGAPVCGALVCFFVLLVARAAAETAPVERPTLPSADVAIDGNGNGARAGAGKAAGAGAVGGGIVSNSVLVALLDSRYTEMAELVEKALLLQALEDAVAEHNVTILAPRNEALERDIDPEFKRFLLEPRNLNSLQSLLLFHVLPARLPSGSWPAAATHPTLAGEDVELAAADGGGGMRVAHAAVSRPDAVVRTDGVIHGIDRLLVPRSVQDEFNRRRSLADISAMPPTAAPEVDPRTDRLKKPAPPGDSPVLPISDATVPDPSVALASEPSDHYDGDSQVKDFIQTLLKYGGYNELADIFVNLTSLATELAQLVSEGYALTVLAPNDEAMARLTADQLSEPGSPENILYYHMIPEYQTEESMYNAVRRFGKVRYDTLRLPHKVVAREADGSVKFGHGEGSAYLFDPDIFADGRISVQGIDAVLFPPAETKTKTKPATARIRTAPAITGVSKIKHRRGKLLEAACQMVGILGQRSQFTRCQ

SEQ ID NO: 18280 - protein, 103 aa, Oryza sativa
  Clone ID: TF_OSC8672j.C1.p3.gm
MDPTAGTGSSTKKIPSWMVTELPMLSTEANRLPQIPSWMIRKPLMLCMEAGRSGKAAAAATADAMEQSCSVCLKNFEKDDCIWSMPCSHTFHQLCILGDRSCR

SEQ ID NO: 18281 - protein, 85 aa, Oryza sativa
  unsure (1)..(85): unsure at all Xaa locations
  Clone ID: TF_OSC18110j.C1.p1.gp
GEKTTTEAWVETPCAHRFHSRCLESWARVKLGTCPMCRRELTAAAAAATTTAGEDVHVLVADPMVADPLQARWNLFVQRSTDGFX

SEQ ID NO: 18282 - protein, 247 aa, Oryza sativa
  Clone ID: TF_OSC400014j.C1.p1.fg
MASWPTSCTKVYEIIQFSRCKEEASATSSIIDHRTAKVGRRDDGPNMSKVLRATIPENSVSGSSVRGKLREMEMDLAVEQYGSIGASSILSTLSVPEYSNLAWDETYPKTMLSALSATKNRMYNRIAPIVGHAWVNISAQNATFMMTMQVVLNMHSCDGVMKYEPFLINLTITFYRTGGAENFFHCDKCGCCYSYVLKDSHHCVERAMHHNCPVCFEYLFDSTKDISALHCGHTIHLECLYEMRSHQ

SEQ ID NO: 18283 - protein, 139 aa, Oryza sativa
  Clone ID: TF_OSC900071j.C1.p7.gm
MDPTAGTGSSTKKIPSWMVTELPMLSTEANRLPQIPSWMIRKPLMLCMEAGRSGKDAAAATATADAMEQSCSVCLKSFEKDDCIWSMPCSHTFHQLCILGDRSCRDMNANEECKELSLVEDEASTAREASELGRTRGSF

SEQ ID NO: 18284 - protein, 319 aa, Oryza sativa
  Clone ID: TF_OSC900389j.C1.p9.fg
MAVDAHHLHRLPPPIQPAESMFSPRQPCFGAAAGEVVVGGAGGAVMAGLCQEEQLVQGYRQVFVGGGGVRQPAAAEVMRQYSQVCAAAADAAESGVTFGGGQEAAAPRKRKRAEVPVVLGAAGDVAVAAQARQQLVDVDRLVLHHAAKMWAELAEQRGRHARQMVATVEAAAARRLRAKDEEIERIGRLNWALEERLKGMYVEAQVWRDLAQSNEATANALRGELEHVLDAHARRGADHGDGDDAESCCYGENDVLARAAGDGEAASAERRCKGCGEAAAVVLLLPCRHLCACAPCAAAAAACPACGCAKNGSVSVNFS

SEQ ID NO: 18285 - protein, 187 aa, Oryza sativa
  unsure (1)..(187): unsure at all Xaa locations
  Clone ID: TF_OSC404797j.C1.p7.np
GRRSCAVCMETLEWAAIGPCGHGEVCAGCALHIRVFQNNRLCCICRSPCRVVVVTNPDAIAAAGGGGWPAVSSRLPSEGRVGEYWYHTGMGAFFDDERQYAAAKAAARLGPPPCGDANENPPPPPPPHCVRSRHSVHLKSYLKVSQMCTMCFTCLSXRNIFVFQKRLYFRRLLSCPVSRVVSEPEDL

SEQ ID NO: 18286 - protein, 326 aa, Oryza sativa
  Clone ID: TF_OSC414535j.C1.p8.fg
MRRRFQDSVKALEADIEHANELASEFLRDYDGAVIQMRMAYSAVAHFLVQWIDCKLAGALGLLKIMIYKVYADGTTALPEWEREASIRQFYGVIFPSLLQLPSGITELDDRKQRRLCLQKFRKVEERVSEVDLERELECGICLEVNAKIVLPDCAHSLCMRCFEDWRQNFVYLNVVFKKERKRLPLPYIGWLCSSGCKVSCKSPALLIEYHNALSTESLTIFMHQDVVHPIKPASRMTLFITAANILLNYVLLLSRNTKSKSCPFCRACLKKVNPSSLWLYTDDRDVVDMDTLTRENIRRLFMFISKLPLVVLHVVDLDIYEYRIK

SEQ ID NO: 18287 - protein, 70 aa, Oryza sativa
  unsure (1)..(70): unsure at all Xaa locations
  Clone ID: TF_OSC401965j.C1.p30.gp
EVRRLPCGHAFHRDCVDRWLALYCRRRTCPLCRLHVGGAVVAAAVAGLDELQLGDDLVIWFSSLFVAGFX

SEQ ID NO: 18288 - protein, 154 aa, Oryza sativa
  unsure (1)..(154): unsure at all Xaa locations
  Clone ID: TF_OSC826j.C1.p13.gp
AKQLPCMHLYHSSCILPWLSSRNTCPVCRYELPTDDAEYERSKQATTNVRDIQVVEEISDEQEVQVTRQMAAGVIEETNTSEHNVRVDEQPNSARRRSGWLFIAAAPVVSLIGFALVLCFTNPARSGRRQLYCRSPSATEVHVDTKKSWWSMFX

SEQ ID NO: 18289 - protein, 384 aa, Oryza sativa
  Clone ID: TF_OSC401130j.C1.p66.fg
MACGIGRWSRAAAVGVNRQAAAGELDLRPGVLLSLSRFRPKRQRVKQRGGGHGRCGAASSRALTGTENGKGEWRGTKTTSSSGSRLASSLVSSAGSRSFTILLLLFFPDQTAICQQTRSTKESKPVRRCSAPPAPPTTAASSPTASTTRLLDDDSSSSAGAGNSHVVIDIDDDDGGVGDSDDSACSSSSAEGPCCAVCMEPLEWVAVGPCGHAGVCSVCAARIRSSRSWQPDLRCCICRAHCPFVVVTRAAAAAAPAAMPAVNSYQEWRARGYYWYCTTMLAYFDDVEQYRATRAIARGEVKGGAAVDVDGNDGGGGGRRTLSSCVDVFRFLLIVAIFALFGVLFGSVFSSLTAGGRATPGDNLAFISACAAVSMLGSILFYFA

SEQ ID NO: 18290 - protein, 535 aa, Oryza sativa
  Clone ID: TF_OSC8604j.C1.p3.fg
MAVVLTHGVVDEGGGERRWIWLVAEEAGKEAARRGRGECGKRKTRRWSSSPRPSRPPYPPMPPPPRHRRNLPTPHVPWKSHAADLARAEHDRRDAQACRAYHARAAASVRVAAHDALFARDLAAIPEDRWAHDGDYFERPLPLEGGGALFRVLFKGMASREVVGPRDRDPGVGVLAVAICGPRGEVVLRIHKPVQAQAQQGRMMLEAMALVEGLNAALALGIRTLNVLTDNKPLHNHMSGIWRPRQKRLVDLINEAFSTKQKFEQCEILCVARTQVNYVTKLATDSLHTQIAKAAAVSAGKEKKENCTICLEDTDVSKIHAVEGCAHRFCFSCMKERVKVKLLHGMLPACPQDGCTTKLNCGGFKDVPISTVISDHGAAYQGSTNSSNSQDLLPISQVFSLDVHERTDTSNASIILKMTCYDYKRRYPHARLEDAYLQNLARQRCGYEFCYTCGKEWKEKKATCSCPLWDERNIIRDDPQGNAAIHDDPEDEYDDYYDEDENNYYVGEGLQYNVDYHRQYDGGDRHHGHFYQYNR

SEQ ID NO: 18291 - protein, 326 aa, Oryza sativa
  Clone ID: TF_OSC401130j.C1.p102.gm
MAQLHGGSVGHSQAIDDIPQFYASSCSATAYHSHAMEMSRLDASGRGSSRTAADDKGGHVVIDIDAADDIPIPFCVVCMEPLEWVAVGPCGHRVVCSACAARVRSAPYSDHRCCTCRTPCPTVFVTKAAAAAADGELNYLLQLQGDAGSLQDGRVGEYWYLAPMSAYFDDERQYEAAAASSLMMKHQRPPPDADGEFQPRHGGDRGDGALPGDEFGAPELSFLALFFAACGAVVGLGFTGFGTGWGQKVAIVLGSAVANGVRGASKLLRFCWRHDMRAFDQPCRNHLFDEGSNQRRRLRPRRRYMAKAMWRSVWAKTKDSVPSLAV

SEQ ID NO: 18292 - protein, 1066 aa, Oryza sativa
  Clone ID: TF_OSC400049j.C1.p37.fg
MTKTQPQLVESEPVKKLQRLPPVFSRVLELPFPRDTNVRKLFTTNADLFFVPHGVGGEPDVVKVHIVRLERWDMTRVVVHIGPGEPDLRNDLVYDKWRFPLAETSILSMVMAGMDASGDGGNEGIPMWPNIDKRGGGGGGGGGFGLLAGASYIPTKFSRPRNSQKVEKCVLDKVKASKFKSARDYDSIPIEGQFISVANLKERIFESKHLGRGTDFDLMISNAQTDEEYADEATMIPKNTSVLIRRIPGRPRKPIVTEPEETKAMEGRVEETMPSGSAFLADASMKYPEESEWDDEFGNDLYVSDSVPSQLGSQAVDASENKVDEDSKIKALIDTSALDYSQIPDGYGGGRGYGRGMGGRMMGGRGFGHFIQHCPTNGDARFDMKRMKPPTGIPKSMLMATPDGSYALPSGAGAVLKPNEAAFEKEIEGLPTTRSLGDLPPELRCPLCKEVMKDAVLTSKCCFRSFCDKCIRDYIINKSMCVCGATSILADDLLPNKTLRETISRILEAPPTSSTENVGSMVQVQDMESAIPVQPKVRSPAVSAASKEEPKRTPAPVEESPDVESHSEVKTTNVDMSSSDKKVPALPDVVEGTMESKILKEKTPEATPVVKESQEKMPVVGEQVVKKKKKKKVRAPGNAEDWKPYQDFGAENFAGMPMGPAGGFNPYWGGGMPLPMDYMGAPFPGPMPYMGYPPGPFDPFGGGVLPQDPFMPPGYMMPAVPRDLSELAVNSMGMNMGPPVVSRDEFELRKPDNRRRREMERFNERERERGHSRERERERERERERERERERERERERDRDQNRDRDRDQERDRDRERDRERESRREARESSGANNDSTTSMRPKARSRSSQPADRSAPPPPASPDRHSRRSPHRSSGSGKKRSSSDRYDDLPLPPPPPPASRHEAAEHAHAKNTAAAADARSKAKGSVFSRISFPGGDGNPSDAKRSRRSSSDKPPASSSSSSKKARAAVAEDNDGRHHRRHHREAAAAAEERRRPAAGDYYGEEEEDDESEEEQHFKRRPSSSSRREREHQEAQEEPRRSRERRGGGSDGNHHHNHGGGGGHKRR

SEQ ID NO: 18293 - protein, 306 aa, Oryza sativa
  Clone ID: TF_OSC401130j.C1.p74.fg
MAHLDPNSGSGATVAAASHSHVVVDMPQLDASSHSTASYDDKSGHVVIDIESEGRSGTTGSDIILSCVVCTEPLEWVAVGPCGHRAVCSMCVARVRAGPDADKRSCICRTRCYTVAVTKAATAADTLHAFPKTVPVTSRDWRIGKFWYYAAMSAYFDDRNHYKETKRAVRDFLEKQRAAPSPPPPCPDDDVTDENLEAQPPAPHHPRVSWCGILFVLVAFAFVCGPPALRAGVHRVETCATAATRTHQDEVLRISKAPKSQPSATHQDGSLPIAMEKLDGEDREEEEEEEEEEKKQAASISVMLTH

SEQ ID NO: 18294 - protein, 868 aa, Oryza sativa
  Clone ID: TF_OSC22501j.C1.p1.fg
MSTLAAHPPLGPAAAAQEKAASRNKRKYRAEPPSAELGSFGLEYPLTADCVGFEFMSPEKAAIAAAAAAAAVAAEGVNLDLIPGSCDCKDIHPTAEELLECQRYVNWNDPNEALLEEILLKGLDATFDNAVGVIIAMGYSEPTARAAVLRAATQYNWRESLAGFGEAAVEVLKTEGDMLSEGASEEDMRKIEQAVLGGMIALVNQAQPFYTTGDVMFCLLMSDMNVANACAMDYNPASLPAVDTQVIAQPVVGNYEPNNPSSDLSVSITNPQTGVTFRGKLTPVPPNSYNTAKADSSATPANLNVPSSKPSVSGKAQSEIPNLKPKENSNPVPDHSEEQPFVAAATQPVKDDKPIPSKRGSSKRDSLHRQKLMSFDKSSRALGSKGSLRSSKHSSLGSAVLDRKCRSFSDSTTSSLKASSKVGKGFSASMKGPEVPPDLSFTGAALPSNPSFDAKLSSNLNPLPAASTDLSLSLPLPSSNDSPAPSSNHDANTEGMDSSSKINLSYDEDQKVWIPQDKKDEMVLILVQRQKELQAHMRDWTDWAQQKVMQVTRRLAKEKEELHSLRKEKEEADRLQEERHNLEESTRKKLLEMESAISRANTQLEKAESSARRREAENEQLRIQMEAAKRHALVSATNILELSKKDENSHKRSQHWESERALLQEDLAAQRNKLSQVHQQLHHAKEQKDQIQARWRQEEAGKIEAIARVSLEKKERDQIETSLRSEENFLHLKAENDTQRYKSQIRALEQQISQLKVSLDSLRVGAPPKWGADNRTNALRLSEGRKNGSAQILANIAAVPQDFDFDDIQRDRECVMCLSEEMSVVFLPCAHQVVCAKCNDLHDKQGMKECPSCRTPIQRRVCARLAGC

SEQ ID NO: 18295 - protein, 65 aa, Oryza sativa
  unsure (1)..(65): unsure at all Xaa locations
  Clone ID: TF_OSC22501j.C1.p2.gp
FDDIQRDRECVMCLSEEMSVVFLPCAHQVVCAKCNDLHDKQGMKECPSCRTPIQRRVCARLAGCX

SEQ ID NO: 18296 - protein, 539 aa, Oryza sativa
  Clone ID: TF_OSC900169j.C1.p23.gm
MGTSGRQWALCGGEGNKKVGMWCKEWQLQRTFVELFLGIKASSQYPKAPPHVYAVESKGLDENRQVYLISSIQNKARELSCYPMLVTLCEEAVEMLSNMNHPAGDCPLCLYPLVKENDGSALPFMKLMSCYHCFHSDCIMRWWEWLQNDDTDSKKSSTAATTEVCRKVFDEKDIEHVRDLLGANTSQLTPQLQPQERSHSTRQTALVVPPSTTAVQVIEGDIDLMLQEDNHMGKGNLLGNNGRGKAETLHTNSRKGKKLLSSLLVVVSTTLTLKHTAASTSSLAFAALPGCPDKCGNVSMPYPFGTIDGCFRGPPFRVYCEDDHAVYLQEHKKLKVLRFELAQGEVLIQKRIATSCGVNLTGKAVGIPWVVHDGGLADDYPYLTISTKNQFAVVGCGITAIIVGQGENQPDYTVGCRSFCDDVDSNIVEDNSTQCNGNTGCCQASIPGNLKAFQPSFLKISGVNYSGVPCVYAFVVEQNWFKFKTSYAKSMELYSKYRNKGTGVPLVLDLVVDLAAQGTFATALKVMKEIPTYMEAAKV

SEQ ID NO: 18297 - protein, 498 aa, Oryza sativa
  Clone ID: TF_OSC400138j.C1.p14.fg
MATLPIFSHRNPRREGEATGCFPTSSLLAIVDKEDEQQSGGERGVVVGRCLEVFVLAREFCEQAYGSSITYGYERPHGASTASREWSSIGRSDPLWRTNAGFSPPLSRRWEYRINSEGLSYGSQGDSGAAAHYGSSLSSNSKEPSRSWERSDVPPDHHRYSTSEGAISYFNSPDVTFQNHHIMLPMLQDSGIDEYMRVSVAEPIGALLLSEGISGQQNSGGSTSSRSDGSEYDIVPKSYSSTPRNFPSRRSFLSKPIHPLSFPEHALEGQETDSPVANASTSSPMPSEFKAIGEIRPSGLMDYAYASGSHGESANWSAASSMDLTDLSERHDAERSGPLRSNNIMDRTRCDLCERLLSKRSPWGSRRIVRTGDLPVAGVLPCCHVYHAECLERTTPKGQKHDPPCPACDRLSGKDTEQWSICRLRNGFPRLRSLGEGPSRVWSCAQAGDCVAGAVQIPRASSISLLSRSGHKRHHAASKGESGKDWAETSSSSRTACM

SEQ ID NO: 18298 - protein, 223 aa, Oryza sativa
  Clone ID: TF_OSC401130j.C1.p67.fg
MVQLDADDANSGSAASATHSHAIGDMPQPDASSRTSADEDDHGHNVGIDDIDDAGDNGSIGSDSDVPSCAVCTEPLEWAAVGPCGHRAVCSACAARVRSAPNPDNRCCICRTICPFVVVTKAAAGVVSFSTLPAVASHDDGRVGEYWYCAAVSAYFDDEQQYEAAKAVASRRHGDQPAMVHRAVHGVGSPKAPTMQIALRVYKTHSHIEIGPDFTEPGFPVME

SEQ ID NO: 18299 - protein, 574 aa, Oryza sativa
  Clone ID: TF_OSC408625j.C1.p6.fg
MLRRPLAGAPPALAVGTSLSDEGQVSSGSLVAAVEITMMTPGSSSTSVPGDEADAGNWDAGVETAARLEAMVHAEDELSEEQIQANNQTQEDELLALQAIYGDDLVIFDNKDGLRFFQISLHYQLAGDIRVYLNVCPNGRTETGAENDDDDDSDRLLYACSLQHLPPVVLACLLPRLYPSHRAPYFVVAAKWLDEPEVSSFCSVLDEIWAEQPAGQEVVYKWVDWLSTSSWFCIASDDQIVFGPDADSAGGDDRAIGRSCSLDSMIPLIQRYSKERSHEIFARRIHECGVCLSENTGRNFIQLPCSHSFCVKCMETQCRIHVKEGSVARLTCPDTSCRRPLPPALLRGLLGDGEYARCSAACVAAGDDAQCSRCFFTFCAVCRERRHVGDTCVSPNQMLDIMLERQKEKRPLAAPSPDSQAVSSKRKMEELLSLREVMRTSRQCPSCKMAVSKTAGCNKMVCSNCGRPFCYRCSRAITGYEHFAGECKLFESVGKGWFPGQAMWMNLEYDYDEIAEIGTPSWIRAIRYPCPTCGAKRTKSGNNDLLTCRGCRTHYCALCSKKVWSIAEHYGPAE

SEQ ID NO: 18300 - protein, 343 aa, Oryza sativa
  Clone ID: TF_OSC401405j.C1.p1.fg
MDGEMFGSGHWGGSFPYASIPKESQFVFDAKASPLQLQLFGSAAVPAVGSTGYYNYIANNHLSAMNQERNTNNDVGHEKQLNLQMSLNYFPVENLDRLARIGNPSAVSTGLRLSYENNEHTSITSGSGNMSSLPIMASFVDEVMAELDKENKEFNCYFGLQVEQLVKCMKDVKQRQMVEFLASLERGVGKKLKEKELEVEAMNRKSKELNEQIRQVALEVQSWQSVALHNQSVANSMKSKLMQMVAHSSNLTREGSGDSEVDNTASSQNVNAVPGVFFQSGLLGINSMADGGLGACRLCRMKEAAVLVMPCRHLCLCADCEKNADVCPVCRFPKSCSVEINMS

SEQ ID NO: 18301 - protein, 1362 aa, Oryza sativa
  Clone ID: TF_OSC400522j.C1.p7.fg
MKSNASPEPDGMNVAFFKAAWGWIKDDVMKLVEDFYNTGNLPKELNKTNIVLIPKKNRPANPADFKSISLCNVMYKIIAKSIANIIKGFLLKIDLSKAFDRLEWDFIASAMKKKGFHSNFINLVQGCISSSSFYVTFNGQSYDAFNANRGVRQGCPLSPYLFVLALNELSDQLNEDLLNNQMKGIKLSPQGPAIHSLLYADDLIITGEATEIEARKIKEIIEDFCNKSGQTPNWSKSAILFSKSTPLYIQNSIKTIFHVASVDSNTKHLGHPLFVTNRTKIFVYQFIVDKFKAKLTNLKANKLSHAGRLTLIKTVFASLPVYYMATTLLPKKIIAKLTSIIRIFWWTGVREGQDKKPLCLKSWSDICKPVQDGGLGIRDIQMANRSLILNAAWRLVSKLDEPVSQILKAGMYQWRKFEFFEEKAAGRGVPGEIASRVSCCSGGRGRVAVGCDDGTVGLLDRGFRLSYGFQAYASSVLFLQQLKQRNVLITVGDDDQPSSLSSAICLKVFDLDKVQEEGSSTTSPFCVQILRIFTKQFPQAKITSFVVLEEAPPILLIAIGLDNGSIYCIKGDIARERITRFMLQVEDGTSLPITGLGFRVEGQAHQLFAVTPSSITLFSLHDHPPRRQTLDQIGCETNAVAMSDRMDLIIGRPEAVYFYEIDGRGPCWAFDGEKKFVGWFRGYLLCIIEDQRSRKNTLNVYDLKNRLIAHSMPVGDVSHLVSEWGYIILIMSDKKILCIGEKDMESKLDMLFKKNLYTVAINLVQSQQADPASTAEVLRKYGDHLYGKQEYDEAMSQYIHTIGHLEPSYVIQKFLDAKRIYNLTNYLEKLHDRGLASKDHTTLLLNCYTKLKDVEKLNHFIKDEDGVGEIKFDVETAIRVCRAAGYHEHAMFVAKKAGRHELYLKILLEDLGRYDEALQYISSLEANQAGLTVKEYGKILVEHRPAETVEILLRLCTDGGDPMTRRGSNSMHLLMIPSPMDFVNIFVHSPKHLMEFLENYTKAVKDSPAQTEIHNTLLELYISKDLSFPSMSQENGFEEQNSKERKGKEVANGYKSGPREKGNLGKEDMNVAKDIVDRQRKGLALLKSAWTSEMDDPLYDVDLALIICNANAFKDGLLFLYEKLKLFKEVISCYKQAHDHEGLIACCKKLGDSSQGGDPSLWGDLLKYFSELGEDCSKEVKEVLTYIEKEDVLPPIVVLETLSKNPCLTLSVVKDYIARKLEQESKLIEEDRKSIDKYQDETELMKREIEDLKTNAKVFQLSKCTTCTFTLDLPAVHFMCMHSFHLRCLGDNEKECPECAPEYRSVMEAKQKLEHNARDHDLFFRQLRGSKDGFSVVADYFSKGIVTMVMVFLLAVLAIIRN

SEQ ID NO: 18302 - protein, 816 aa, Oryza sativa
  Clone ID: TF_OSC406019j.C1.p5.gm
MPGTVFVVSRESCFSAAIQMVTEITGAAGWKGTDLSLCVEKNPASLQGQDLAALGSSSGLDVVDVPFSAPTGGSFDMESSEVVATAFSLPVNDGPVETGTVESDYWRRDNSLKGIPNFNVNKCGHFFHAGCIDRWLRKYRRCPLCRGGLSSLPLLPKPDFVASYLLFIETYYVFLQSGGGGAFQAVVYKSAGQQDRCYLAMVRAPSKIRYGSGHVIRSQNPAGKNGTPGGGGDMESREWMYHWPRFLSPYRNEVAKFIGIAKVRAEKNNMRKIICPCADCKNEIAWDFDDAFKVKEHLVTRGFMDKYEIWTRHGEEQVDEPENVVPTQVEDMVHDDGSVEDKIDLEEMLRHAEPEVLMGSARGLNNFEALQKAAKEVLYDKSKGCDSDFTTLRKCYRGLTHYHPAHIKQRNSYAPFHLGPRQPGIDIDVFLEPLLEDMADLWKEGLKVWDEYLGEYFTVKAIIFVTINDYPAMFSVSGQIKGKTGCVICLNGTYYRYLPGSNKLMYMRHRQFLRTNHKYHKMKAEFDGTEETDPAPKPTSGENVCAMTEKIVCEFGKMTKKPSKGTKYKKPEKNTKGGESKKQDDSSKPDDKLPPPFKKHSIFFKYLPYWKDLEVRHAIDVMHLEKNVFDNIVGTLLDMPKKTKDGLQSRMDLVEMGIREELHPQEGEKNGKMVALGPLYLHQMWSYERYMVVLKGYVRNRAHPEGSMVEGYSTEEVVDGVCVEAIDEAEEKQSYFGFIEEIWEIDYEHTMQFPICKCQWVKYPNGVNVDKFGLTVVDLARVGHKDDPWKIKNVETSTQKTVKPYMRTDGVGKNVK

SEQ ID NO: 18303 - protein, 777 aa, Oryza sativa
  Clone ID: TF_OSC900035j.C1.p3.gm
MAPDVLGQCTDLSLCVEKNPASLQGQDLAALGSSSGLDVVDVPFSAPTGGSFDMESSEVVATAFSLPVNDGPVETGTVESDYWRRDNSLKGIPNFNVNKCGHFFHAGCIDRWLRKYRRCPLCRGGLSSLPLLPKPDFVASYLLFIETYYVFLQSGGGGAFQAVVYKSAGQQDRCYLAMVRAPSKIRYGSNICEQVTSCACKDQSSQATLIWPACEDMESREWMYHWPRFLSPYRNEVAKFIGIAKVRAEKNNMRKIICPCADCKNEIAWDFDDAFKVKEHLVTRGFMDKYEIWTRHGEEQVDEPENVVPTQVEDMVHDDGSVEDKIDLEEMLRHAEPEVLMGSARGLNNFEALQKAAKEVLYDKSKGCDSDFTTLRKCYRGLTHYHPAHIKQRNSYAPFHLGPRQPGIDIDVFLEPLLEDMADLWKEGLKVWDEYLGEYFTVKAIIFVTINDYPAMFSVSGQIKGKTGCVICLNGTYYRYLPGSNKLMYMRHRQFLRTNHKYHKMKAEFDGTEETDPAPKPTSGENVCAMTEKIVCEFGKMTKKPSKGTKYKKPEKNTKGGESKKQDDSSKPDDKLPPPFKKHSIFFKYLPYWKDLEVRHAIDVMHLEKNVFDNIVGTLLDMPKKTKDGLQSRMDLVEMGIREELHPQEGEKNGKMVALGPLYLHQMWSYERYMVVLKGYVRNRAHPEGSMVEGYSTEEVVDGVCVEAIDEAEEKQSYFGFIEEIWEIDYEHTMQFPICKCQWVKYPNGKIKNVETSTQKTVKPYMRTDGVGKNVKG

SEQ ID NO: 18304 - protein, 50 aa, Oryza sativa
  unsure (1)..(50): unsure at all Xaa locations
  Clone ID: TF_OSC900254j.C1.p3.gp
NRLPCGHIFHRACLETWLDYDHATCPLCRSRLLADSSSPPAAAAALARTX

SEQ ID NO: 18305 - protein, 604 aa, Oryza sativa
  Clone ID: TF_OSC401130j.C1.p106.gm
MAKSGRRAWWGRAWQERGVAAEGVALDAEGVLAGAEGGAKKAATAVRAKKAAASAVVRAAVCDEDAAVEALGAGAADPGEVEPNYEDKVAALVEVNTGGAVVGVPVVQVPLGQSLPPPPDSQATEASSASAASHAGDLRLRNRTSGRAPPPPPVDTNWSAAEHDHIAIDIGDSTAGSDSDDVPSCVVCTEPIEWVAVGPCGHRVVCSPCAARLRSGPNPDHRCCVCRTLCSTVVITKAATAAHSVFTFSDQSSMPVAAAQDDGRPVGAYWCSAAMSAYFDDKKHYDQVTKQVVVAAADRCFLRTPPRRPDVDASPLRRLCVRMSWRGHVLALLVVVLVTALVGGWVGYLTSGDEMMSDRIGIVAGIAALWGALAAVVYVYTVTPISTGPVTIGNENGTVTTSRNDIPPTIPPTQVENGCHFLISNNHEFNLSVLPRNETEQQPQIGSGQNAHPATTSARHNIERKPFRAAAGTRACGSGAGPWRRHDWGSGTRWRGVALTDRVMSRARPCGGGTRVADAVVADEGWPCGGGMALRGLGGRVRLQRRTAAYKRSQLNNEYGRRGVAADGSAAGQPRQVRRGATGIDVVQPGHSDCRGAAVRRRRH

SEQ ID NO: 18306 - protein, 308 aa, Oryza sativa
  Clone ID: TF_OSC411383j.C1.p3.fg
MAPGSSIVTDIPESDCVSDGLSEALTGIRLDGDSTCKPWSTSLVTVELSSLTGLNDLLECPVCTNSMRPPILQCPNGHTICSNCKHRVENHCPTCRQELGNIRCLALEKVAESLQLPCKYQSLGCAEIHPYQNKLKHEELCRFRPYSCPYAGSECLIAGDVPMLVSHLINDHKVDLHEGCTFNHRYVKSNPYEVENATWMLTVFKCFGQHFCLHFEAFLLGMAPVYMAFLRFMGEDSEARNFCYSLEVGGNGRKLTWQGIPRSIRDSHKKVRDSFDGLIIHRNMALFFSGGNRQELKLRVTGRIWKEQ

SEQ ID NO: 18307 - protein, 401 aa, Oryza sativa
  Clone ID: TF_OSC400186j.C1.p9.fg
MAVQAQYVAHASRSSSSAAYAIRPALENAAPSSGASALFLDEAVSAALLQQQLVVAAAAVGGGGNNNNTAVFSDLRSELTCSQRRFDDFGGGFVPRKRARVGGEGEAAAGLLMSSSVMEGGGHRALLPPPPPQVTPQAFGDVHKSSSRVVGSGAASTSGRPVCGGGLLLSHLYRQSVEVDALVRFEVRATDRAFIYRHGRWSSVSFCLLSSLEWAFDSICTYLQNERLRAGLEEARRRHLRAVVSAVDRAAARRLHAAEAELERALGRNAELDERLRQMGAEGQAWLGIAKSHEAAAAGLRATLDQLLQSPCAAAAAAAEGEGDAEDAQSCCFVQAPDGGAAEVSGGGNGRRACRACGEADACVLLLPCRHLCLCRGCEAAADACPVCAATKNASLHVLLP

SEQ ID NO: 18308 - protein, 272 aa, Oryza sativa
  Clone ID: TF_OSC900178j.C1.p15.fg
MTSASELFTARRARAARLSDPDPDPDPPADALHDPHGLADRRGRRRGCRPRRQLDAAGDVRQHLHTGAPPSRRRASYTDRVLSYIDNSNIGDSATRRNRLDRLMFRTNERLPGAVLQAQARVLERLRGISIGSSVSRPSITLDEFSATDVFRIIDFGNRDAPYEANRSSSSLAHPSSESDEERSPIDTSSLKRSRGLSKAAFLRLQIEIFEASKDDNREASPECSICLDGFYDGDELIKLRCGHRFHSNCLEPWVRKCADCPYCRTNIQSRS

SEQ ID NO: 18309 - protein, 154 aa, Oryza sativa
  Clone ID: TF_OSC423123j.C1.p8.fg
MESQELWALYVGVASLAIGMLGVLGVWLCYLFQAVARGPPPDPPPPPTPPCTPETEEDDKNGLSEEELRMLGGICVAVAGDGEEEEEEQLCPICLDGMEAGRAVRVLPGCSRAFHQDCVDRWLTISPRCPVCNAWVTTQSPGTSPPRTKPALNS

SEQ ID NO: 18310 - protein, 147 aa, Oryza sativa
  Clone ID: TF_OSC491j.C1.p4.fg
MPFSLLLFTGAVAGVAMLVLPWWCAVGEDDDTYIDGVVDDSYDSDSWYTDYSDEDDDDVGGDNKDGLTPDQLRRLPWFAYCGGGGRSCSICLEEMRDGERCRRPGRCRHAFHAACVDEWLTTRRTCPCCRELVLVPPAARLAAPTYR

SEQ ID NO: 18311 - protein, 612 aa, Oryza sativa
  Clone ID: TF_OSC16830j.C1.p4.fg
MTSPGASSFAAALVVEDFPWVKREEEMGMDPDKYREVFDLAQRGARAFRDGHFDEAVSFYSKAQTLRPGDPIILSNRSSAFCMISQVLRERSAADSEYQPLNGLDPTTHAEVALKDAEKVLAIGSNSPRPYLLKAYALILLMLTVGCLLLPPLGAMHDLYMIFSPLIRKLILKQHFRKPENCPISSAILFSIRVTIEVLTEAITQRRRRCIELSMDWMRRLGMGTNDEDEVMGASLLGFTFTSLNGLLSIGDLTSHVSLASSCTYANVLQVLEQYHEAREAILSGLQVDPLSHVLQSWLSDLHRNTSIAARARRPTLDRPDDFECTLCFKLLFEPVTTPCGHSFCRSCLHQSMDHGNKCPMCRTVLFIGPKTYPISVTLSNIIQKNFPEEYAERKSEHETMTYAGVDLMPLFVMDVVLPCQKMALNIFEPRYRLMVRRIMEGNHRMGMVGIDSATGTVADCGCEVEILECEPLPDGRFYLEVEGSRRFRILRSWDQDGYRVAEIEWLQDISLPDGSQERKDLMERANAASELARTYIRRAREISRPARRARQTDLESMPGPQDPEKFSFWLVNLINLRPSDRLDLLRLSDTRERISRSLRLLGDAEQICRVQ

SEQ ID NO: 18312 - protein, 993 aa, Oryza sativa
  Clone ID: TF_OSC401429j.C1.p3.fg
MADTGSLEKMGRELKCPICLSLLSSAVSISCNHVFCNDCLTESMKSTSSCPVCKVPFRRREMRPAPHMDNLVSIFKSMEAAAGTNVVSTQEAPVVKLADGSDCVNSGKNSKRSQKSLTRKRKVTSEMEKNTAKDATASASQPTTKPSFSTNKRIQVKPFPESETPIRAEKIMKPEEPKNNLNNDVEGKNKAVASGQPGSPSLSPFFWLREQEEQEGCTAETLSETQSLDTPLRHNAPSFSDIKDSDDEIPLNTTPNSKAAATELFDSEIFEWTQRPCSPELYSTPLKKQSKAKSKLDQIEEKGDEEDVHIGGSFDKLGNASNAAQLVNTKATKQKRKKTSPSNKNSAKLSNRAEPCIKKSDANQQGSNRRKSAALKSCQKSSSAVGRNTSGRRNKASSNSKPIHGSSDNSPESYLPKEGLDVEAPDKPLSERIQNLEKTSRRKGSARKLEMAGKTISDTTEKNSEPRSKRVRRMSDHAIAKPVEVPSGSGNETEIPQLHTLTKGSIQRKSSNARRHSKVCGEQEGKNKLENTTMTPIILHGKCQNKEAVCTAPSVRTASVKYKQAKFSEQPDCFGTENFGNLQACPARNVLLKKCEVSTLKVSCAFCQTDVITEESGEMVHYQNGKQVPAEFNGGANVVHSHKNCLEWAPDVYFEDDSAFNLTTELARSRRIKCACCGIKGAALGCFEMSCRRSFHFTCAKLIPECRWDNENFVMLCPLHRSTKLPNENSEQQKQPKRKTTLKGITGFSRSSQIGSNQDCGNNWKWPSGSPQKWVLCCSSLSSSEKELVSEFAKLAGVPISATWSPNVTHVIASTDLSGACKRTLKFLMAILNGRWIVSIDWVKTCMECMEPIDEHKFEVATDVHGITDGPRLGRCRVIDRQPKLFDSMRFYLHGDYTKSYRGYLQDLVVAAGGIVLQRKPVSRDQQKLLDDSSDLLIVYSFENQDRAKSKAETKAADRRQADAQALACASGGRVVSSAWVIDSIAACNLQPL

SEQ ID NO: 18313 - protein, 955 aa, Oryza sativa
  Clone ID: TF_OSC900234j.C1.p22.fg
MADTGSLEKMGRELKCPICLSLLSSAVSISCNHVFCNDCLTESMKSTSSCPVCKVPFRRRDGSDCVNSGKNSKRSQKSLTRKRKVTSEMEKNTAKDATASASQPTTKPSFSTNKRIQVKPFPESETPIRAEKIMKPEEPKNNLNNDVEGKNKAVASGQPGSPSLSPFFWLREQEEQEGCTAETLSETQSLDTPLRHNAPSFSDIKDSDDEIPLNTTPNSKAAATELFDSEIFEWTQRPCSPELYSTPLKKQSKAKSKLDQIEEKGDEEDVHIGGSFDKLGNASNAAQLVNTKATKQKRKKTSPSNKNSAKLSNRAEPCIKKSDANQQGSNRRKSAALKSCQKSSSAVGRNTSGRRNKASSNSKPIHGSSDNSPESYLPKEGLDVEAPDKPLSERIQNLEKTSRRKGSARKLEMAGKTISDTTEKNSEPRSKRVRRMSDHAIAKPVEVPSGSGNETEIPQLHTLTKGSIQRKSSNARRHSKVCGEQEGKNKLENTTMTPIILHGKCQNKEAVCTAPSVRTASVKYKQAKFSEQPDCFGTENFGNLQACPARNVLLKKCEVSTLKVSCAFCQTDVITEESGEMVHYQNGKQVPAEFNGGANVVHSHKNCLEWAPDVYFEDDSAFNLTTELARSRRIKCACCGIKGAALGCFEMSCRRSFHFTCAKLIPECRWDNENFVMLCPLHRSTKLPNENSEQQKQPKRKTTLKGITGFSRSSQIGSNQDCGNNWKWPSGSPQKWVLCCSSLSSSEKELVSEFAKLAGVPISATWSPNVTHVIASTDLSGACKRTLKFLMAILNGRWIVSIDWVKTCMECMEPIDEHKFEVATDVHGITDGPRLGRCRVIDRQPKLFDSMRFYLHGDYTKSYRGYLQDLVVAAGGIVLQRKPVSRDQQKLLDDSSDLLIVYSFENQDRAKSKAETKAADRRQADAQALACASGGRVVSSAWVIDSIAACNLQPL

SEQ ID NO: 18314 - protein, 235 aa, Oryza sativa
  Clone ID: TF_OSC29125j.C1.p6.gm
MARRVRGRARWGHEVVRVLGRGEHVLAPVSPSPTMRHLLQSSEHLTAATATAAASGGRGVHTDTFLILAAVLCFLLCVVGLALVARCSRLCNPSSFAVEAEEAMPPAPCKGLKRKALLSLPTVSFAEAAAAEEEEERPECAICLAEFARGDEVRVLPPCGHGFHAACVDVWLVSTSTCPSCRRAIVVLAAPSPAVTAAATDPPPPCCAADAAQASSQPPQPTGASDRGGCRTSVP

SEQ ID NO: 18315 - protein, 232 aa, Oryza sativa
  Clone ID: TF_OSC407333j.C1.p3.fg
MDPSGAFFHAAPRSGSNVSLASLARTAGGRRMMHRVFRGVITFIFAIAGLFLGAVTGGLIGLATESGLFRGTGIGAITGALVSIEVVDSSIRVWRSRRSGISSICYVLNVIYSLLTGRLVREKVDPAVQRVVRSQMNAVDSSPFRESPDLFEIEGTNGMPRASIDKLPEVRITEEYRRNAIGDLSGCSVCLQDFQTGEKVRSLPDCWHVFHVPCIDGWLIKHGSCPLCRRKL

SEQ ID NO: 18316 - protein, 266 aa, Oryza sativa
  Clone ID: TF_OSC422826j.C1.p4.fg
CLVHVGLVCSDSRRRPAHARSSDVESADGDAAGAGTDSSDSDDDDDEGREQRSSFAKRCESINTMVSFLWWIIGFYWVVSGGDVLEQDAPRLYWYCGPKPVPITDYFMIVQSNVHMLSVVFLAFDVFFAVFCVAMACFIGIALCCCLPCVIAILYALAGQEGASDADIGFLPRYRYSDPSEDGQKGTDEGVMIPVLNNSGTSTSERILLHEDAECCICLSSYEDGAELSALPCNHHFHWTCITKWLRMHATCPLCKYNILKGSESA

SEQ ID NO: 18317 - protein, 189 aa, Oryza sativa
  Clone ID: TF_OSC102233j.C1.p1.fg
MARMLLEAAASGSVEDSLNSDLVVILAGLLCALICVLGLGLVARCACTRRWARAAGGGTAAGGGGGGAAAANKGVKKEVLRSLPTVTYVSDGGGGEAEECAICLVEFEDGQAVRVLPQCDHRFHAACIDTWLRAHSSCPSCRRVLVAAEMPPGERCGRCGARSGGRGIGALLLNYWKAPACDAEGPELA

SEQ ID NO: 18318 - protein, 217 aa, Oryza sativa
  Clone ID: TF_OSC400945j.C1.p17.gm
MDRRRLQARAGIDDHRLESLHRPRLGETREEACAVCLQDFGEKDEELRMMPCSHSFHQRCIFGWLAIRDNCPVCRSAMSSYNDVLEELHAELEQWIQGTYGERLRRVLLPQIDGGGCLRGSRTLLTQEEAHEIIRERLRSDIRRGRIELDADFLQQLVDQVRDHILQRQRRGTATAIAMDGVLEEDAYRNGGFGAVPASSKAMVELQEAMASDARER

SEQ ID NO: 18319 - protein, 117 aa, Oryza sativa
  Clone ID: TF_OSC8676j.C1.p2.gm
MDRRRLQARAGIDDHRLESLHRPRLGETREEACAVCLQDFGEKDEELRMMPCSHSFHQRCIFGWLAIRDNCPVCRSAMSSYNDVLEELHAELEQWIQERRTVSTKLVGAQAAGQKLG

SEQ ID NO: 18320 - protein, 134 aa, Oryza sativa
  Clone ID: TF_OSC964j.C1.p2.fg
MDAEDFMDSWLMWGNIFFFFLALAITVEVDLIRLRRNDDGNNKSAHQYDMLIERLLLLRPKDDQDNEQCVICLSENEDDVDGGGGERGRGRMLPGCAHAFHKDCVVKWLRNRTTCPLCRSDVAVAAAAAADNMV

SEQ ID NO: 18321 - protein, 283 aa, Oryza sativa
  Clone ID: TF_OSC23981j.C1.p3.fg
MSGGRQSYWCYQCRQRVRPRGQDMECPYCDSGFVSEMDDVDALMRHFVGMDPDFHRDPRFGIMEAISAVMRHGMAGTNREVDVRGRPNIFSDLEMEFGSGPWLLFRGQLPGHLSEDNGFDVFINGRRGVGMRRANIADYFVGPGLDDLIEQLTQNDRRGPPPATQSSIDAMPTVKITQRHLSGDSHCPVCKDKFELGSEAREMPCKHLYHSDCIVPWLEQHNSCPVCRYELPPQSSTGASCSRTRSTNQSQSSSSNGRTNGRQRRRNPFSFLWPFRSSSSSSR

SEQ ID NO: 18322 - protein, 516 aa, Oryza sativa
  Clone ID: TF_OSC423203j.C1.p5.fg
MPIASKLVYFQRRRPSPAPPEPEPEPPDPRRSLPSRSRSLRRTPPQAAISRSFSFDGSFAVELGYQVRRCQHVRILGGRLFGLEVSSRRSRSLAMAFVQRPWLTGGATDRGGCLAGRLSRWRRRRHRRSAAERVRGGDNGVGTGLVIRGWAPQVAIPRHRAVGWSLMHCGTNTMLEATSAGVAMLTWPMVADHFVNKILLVEAGVAMHLAEGADAVPDSGQMAKAIAAVVGDKGKPFRERAVALARMAAAAVAEGGTSYRDLERGRKWGIREKRRRANESNDIFLHFDLTPLPHNVTEVLRVEGKTGQEHVPGSKRDTSKGVASAGNITGQAGSTGSSSRLNRSVSDHGRLPDSVQQARERLLQRLNSVDLSGRRQNTSLSSETIHGGVAPGVSTTADSIFSSLTSCFHTDVSIAPCKLQESTAETFNTADKHTFIAHCSEPAPTQEVASCRVTDDDELAGPSTECSICLERCGDADGLLELRCKHIFHSACLERWLRSRSDCPYCRASVLLTAEG

SEQ ID NO: 18323 - protein, 193 aa, Oryza sativa
  Clone ID: TF_OSC900293j.C1.p3.fg
MGSVKKKATAMAQRSAHHGNRTSSLKTVQSTSASAMANAAAGAGGEDAGRPQAQVQVAAVEVRSYFPFPYAAGPFRPSAGGGGGGVSLGTHQADQPPAPEVVAAQQQLPHFPYAPRGGGSASASLSVECAICLERLRRGELCSELPECRHVFHRDCVALWIKSKSTCPLCRARISPWFSGSIGAPPPPLADMV

SEQ ID NO: 18324 - protein, 357 aa, Oryza sativa
  Clone ID: TF_OSC400184j.C1.p5.fg
MGSRSGSSTTTSTPPVAPDENRPPVVKGPAIFSYTCAGLVTGVALVAVVVFYCNRHVRRRAHVVVAGGGGREDDDVRSVAGVAAKIPEFAYTGSASGGEGAAQCSVCLGAVRGGEMVRRLPACKHLYHVECIDMWLASHATCPLCRTEVEPPPGDDGGRPAPAADETPGNGDLEARIGGGVEAGTQAEIGGGEGAEEIGEEGVDSDAGGRDRRGLVDDLARDESGRCCHGMDVAKSHIATLYIVWQRRFARAAARERLERRPAAVAADEAMRLRGEEATQGGGRRCRINPMRGGGAEEIGEGGGDRGSGEEADGRGGGDAAAGRGGDAAAGRGGDAAAWGGDQSERGDERSRDGGGD

SEQ ID NO: 18325 - protein, 262 aa, Oryza sativa
  Clone ID: TF_OSC900112j.C1.p5.fg
MPGDSASSTLQYTGIGAFVAIVGIVVLAVIFYTRSSARHAAPGAAPDAVTALQGQQQQRGLGLGPDDVSVLPTFTYHAAATASPGRCGLIGRGDAKAAADCCAVCLDELGEGAVVRMLPSCKHYFHATCVDVWLLSRATCPVCRGSPGQEKVRLGLASLSPPLPQLRRCAPSPPKEAAAAAAADTSRANDDDSSAAASRSPSPIRSSTRFDLAAAAIDAAARSPAMSPSPTRPWTPERVARVSRSPSPVTTTATTDLHVVEV

SEQ ID NO: 18326 - protein, 208 aa, Oryza sativa
  Clone ID: TF_OSC34548j.C1.p2.fg
MSSSPAPVESPWLTMRAMRRVGGADGGGGQRSALMVASYPVLLLLVVLAAFVKYVWIALALYSALLLLFSCASRRLALAERLPSPLGGGGGGGGVAAVTAAEELQGAAARGGVSGETLASIPAFAYDASAHGGGGEAAAQCAVCLEALRGGETARRLPSCAHTFHVACIDMWLGSHATCPVCRRRVERKHKGGVLPPMPPEPETEPPV

SEQ ID NO: 18327 - protein, 234 aa, Oryza sativa
  Clone ID: TF_OSC401411j.C1.p7.fg
MAANVGESTSGSSSGGADSGGSFECNICFELPQEPIVTLCGHLFCWPCLYKWLHIHSHSPECPVCKAVVEEDKLVPLYGRGKDRVDPRSKNVPGADIPNRPAGQRPATAPQANPNTHFPNANPNPWFMGGGIPLANARWGNYTFSAAFGGLFPLLSFQVHGFPDATAYGQPAGFPYGYGHGHGHGHGHAFHGGHAHAAAAPRHGPPGQQQQADVYLKALLILVGFLVIASLITF

SEQ ID NO: 18328 - protein, 195 aa, Oryza sativa
  unsure (1)..(195): unsure at all Xaa locations
  Clone ID: TF_OSC404615j.C1.p8.np
MSCTSPDPPDYCSAASPELKLYQAFIFSVPVFFTFVLLLFFYLFYLRRRRANWQSLRMRTNNLIRGDNPRLECGIKKEMREMLPVVVFKESFLIRETQCSVCLADYQPDERLQRIPPCGHTFHIDCIDHWLSTNTTCPLCRVSLLPSKTASIDPVDLEAQTVEENSSLDEKRXVNYRMKGTQKRNFPSCHGGNQK

SEQ ID NO: 18329 - protein, 208 aa, Oryza sativa
  Clone ID: TF_OSC900112j.C1.p22.fg
MSSSPAPVESPWLTMRAMRRVGGADGGGGQRSALMVASYPVLLLLVVLAAFVKYVWIALALYSALLLLFSCASRRLALAERLPSPLGGGGGGGGVPAVTAAEELQGAAARGGVSGETLASIPAFAYDASAHGGGGEAAAQCAVCLEALRGGETARRLPSCAHTFHVACIDMWLGSHATCPVCRRRVERKHKGGVLPPMPPEPETEPPV

SEQ ID NO: 18330 - protein, 384 aa, Oryza sativa
  Clone ID: TF_OSC419415j.C1.p1.fg
MAGRFLLGGREIVRTGDDGPLDDGPAVAPAAGSSAPATSAAAARVTPAVLFITVVLAVVLLASGLLHVLRRLFLKSHRANASAEAVERQLQQLFSLHEDGAGGAGPGLDQAAIDALPAFTYAELLAGAAAPNGGGGNGKRQFDCAVCLCEFDGGDRLRLLPLCGHAFHAACIDTWLRSSSTCPLCRAALSARALAALAAAAADTPAAAQHRQPDVEDQKLDHHHPPPPSDEPATSFVLSVRLGRFKNTQRSDGDADASGGGSRCIDARRCYSMGSYQYVLADDNLLISVHWRPGDGISAATAAAAAGANVATARTGIKQGGGGGGGKKVFGRGDSFSMSKIWQWRGGDRRLPVLHSDASPPADDGLPWATAAAASTRTRQESDT

SEQ ID NO: 18331 - protein, 335 aa, Oryza sativa
  Clone ID: TF_OSC401520j.C1.p14.fg
MSSTMPAQGGVRHHRTCRMYWCYQCGRAIRIISYPSTDVFCPRCFGRFLHEIDPPPRPAPPPPHFFPQPYHPHYDGHPRRWLIYGGEAPPVAAPGRAFRQPAPAVPGRAFRQPGPAPAPSPAPAPPRRRMPSPPPVARRPSTPPAIDPGNYFNGPNLNNLIEELTQNDRPGPAPAPSSAIDSLPTVQITGAHLSDGSQCPVCKEDFELGEAARQMPCKHVYHSDCIVPWLRLHNSCPVCRYQLLSSAAAGSNANSRARRGSANNGGGGGGGDGRDREQTIVRWGPFSWMWPPRGLEDPDDGWEYGRRGRPEAGDAGGRMCNDHGNFRKLVTMMDG

SEQ ID NO: 18332 - protein, 124 aa, Oryza sativa
  unsure (1)..(124): unsure at all Xaa locations
  Clone ID: TF_OSC401716j.C1.p23.gp
GVEGAGAGGGLKKRALRSIPIEVYGGGGGGSPAAAAEVCAICLGEFADGEKVRVLPRCGHGFHVRCVDTWLVSHDSCPTCRGSVLHGATTKHKPTAAAAAAGSRRPGSEVDAPAAAAVTVVIAX

SEQ ID NO: 18333 - protein, 208 aa, Oryza sativa
  Clone ID: TF_OSC401716j.C1.p25.fg
MGVHTKSMSWYMGTPASPSPGSAGEAQHALSSGGGGGSDASFDTNMVIILAALLFALLFALGLNSLARLIIRWARRAATGEGAGGGVEGAGAGGGLKKRALRSIPIEVYGGGGGGSPAAAAEVCAICLGEFADGEKVRVLPRCGHGFHVRCVDTWLVSHDSCPTCRGSVLHGATTKHKPTAAAAAAGSRRPGSEVDAPAAAAVTVVIA

SEQ ID NO: 18334 - protein, 174 aa, Oryza sativa
  Clone ID: TF_OSC422293j.C1.p7.fg
MVAVPVVADDGGGGHGAKGEESVSGSVAGISPSILIIAVIVVVMLLASVSIHYFIRHLCRRSSASAAASSSAPVLPVVVRPASSAAVGEQVVGKASAERAAEMERLISRLPLFTLASSLAALPKSSRDCAVCQSAFRDDDELRLLPACRHAFHSRCVDPWLRANPSCRPKKKAT

SEQ ID NO: 18335 - protein, 243 aa, Oryza sativa
  Clone ID: TF_OSC403264j.C1.p6.fg
MAAAEEQLATTPEMEMEMEYIPLDGYNSHYVRDDDPYRRYRELRMLAPPANEISGRLLEAADEDAAMSSSLWDDEFELTGGADADRFTPPGPRLPRPPTHHLNIFSSRLQRLASTRAPPPMPPPIDDGDFGVVFLTGGARRHVAVAAARVAPADTSCLGKSKYEEPRGGGETAMGGADSTGCVICIAEFEVGDELSTIPCAHRHRFHDKCLAEWLKRSRSCPLCRHLLPAVVPANTRPNIHFL

SEQ ID NO: 18336 - protein, 289 aa, Oryza sativa
  Clone ID: TF_OSC400555j.C1.p38.fg
MDAPPAFRSSSPSSSNASVPMVVITVVGILAAFALLASYYAFVTKCQALRGLWSRGAMPWRGHGGGGARRRAAREASVIRTVATEERGLGMPFIRMLPVVRFTAAACGGAGGEGGGGGVGARISVSECAVCLSEFVERERVRLLPNCSHAFHIDCIDTWLQGNARCPFWGRGEKMGGRKGRGDSHHHHHNHNHRPDDELINSIVIEVRGEHESWVSHRGGAAAAPPATKRTPQRRRKPESVGDEAIDTRKKYDEEFAVQPMRRSLSMDDSCHKQLYVSVQEFLTQQRQV

SEQ ID NO: 18337 - protein, 179 aa, Oryza sativa
  Clone ID: TF_OSC402160j.C1.p16.fg
MAEVGGGGLPPSRAVLASRFRSNSDHLMRLHSTWINSAATPAAAPYSRESLAMLAARLLSVSDDHLQRQQQQHVSMIISTSLPGCTTGGVAPAFKEAIEALRDVVVDQLAPAAECAICLHGQDAATAAAGRWKEMPCGHRFHGVCLVKWLRVHGTCPMCRHQMPAKEAAAAAAAEGRRS

SEQ ID NO: 18338 - protein, 441 aa, Oryza sativa
  Clone ID: TF_OSC900249j.C1.p21.fg
MGGAHFPGEGEVVAGEGDAVVPLRDVGKMEHGCEHYRRRCKIVAPCCGEVFACRHCHNDATASGDRHTICRQDVEKVVCLLCDTEQPVSQVCINCGVNMGEYFCDVCKFYDDDTEKGQFHCYDCGICRVGGKENYFHCAKCGSCYAVALRDNHQCVENSMRQNCPICYEYLFDSLKGTRVLDCGHTMHMECFSEMVEHNKYTCPICSKTALDMTHHWALLDQEIEATIMPPVYRYKICLRFTQPREPAHWEGIQGVRRFAQEGIGCRDFIPFHMIFGLAMGEYCSSSSNQSKVPIILLFSASTIVQSSIVNWFSVHSSSGTILMIMTCMHPFVSAMRLKIEKCLLSFEQIVVLKYHGSFSENITRLGRTKVRSCVAHVKESWVQCWNAITSTVLKCILTQPQARNTMEDNENTKVRAVNADIKDKDIILLSCWMFASCTKI

SEQ ID NO: 18339 - protein, 150 aa, Oryza sativa
  Clone ID: TF_OSC400945j.C1.p1.gm
MGNFSSEEEPPPSPSPPPADEDVLPFEEYPPPSSDEEEEEEINHPTPQTSNEAADRRPGLLPASRKAIQGLREVTAAGAGEDECAVCLQDFEAGDKLRMMPCCHTFHQRCIFDWLRLSCICPLCRHTLPTQNVEDDRLGRAAHTVAGSTG

SEQ ID NO: 18340 - protein, 814 aa, Oryza sativa
  Clone ID: TF_OSC418226j.C1.p1.fg
LPIRLTINLLFSDGTCAPIERDTLRSLVESGATESSGCLPGCHLGSDAPPLHLSTANALGDIFFPSSDLLQANEECALAALTKLPENDRSKQLQSTSSNLLSSLNNVVQALSNLQLKHKQLAEDYQNQRDSSARKRAEHRRLKEELASAASELEETNYKLAALKAQRDNTQGARIPYPTLGNKNMPEDKELISKRLVEIKRLHEERIEILNKIATFQNILMDFKSIRSSKAFQLVNDRLQKSQAELDHYQTLLEKLQVDKDKFVWQERQFNLKVDLAEIPERVSTYCESSIADLKKDIQKLCDEKNMLILKLEEASREPGAVVTIHFTKSNFQTCLAKAALVSSIPREMGAMQSEMTKHKEASLELNSLRAEVHSLSRILSRKERDNEEASCRSARAGSDITQLQSVISDLKQTNKELKLFADMYKRESTDSREIMESRDREFLEWAHVHALKSSLDESKLEQRVKAANEAEAITQQRLATAEAEIAESGQKLGTSRKYRIMLLNIVSLRTVEVGVTSLLGDLVSLSHMLKSKQEECEAYRVEVECIGQAYEDIQAQNQQLLQQIIERDDDNTKDVRFGYIVNLIVPETQYFIEKLFTCVKLIFMEGVKAKQTQDALHLETYSLRRNLQQESSLMDLYNQKIVSLEDQLKMWSDRVGKLQEDGWQQSVSLSNYQRKLVDVHRDAQKLMQSLDGIQANVGSSRLEVADLLIELEKERFSKKRIEDDLEVMSRKASSLRAKARESAVLEKLRHEVKEYRGILKCGICHDRQKEVVITKCYHLFCNQCIQKSLGNRQRRCPSCSLSFGANDVKPIYI

SEQ ID NO: 18341 - protein, 253 aa, Oryza sativa
  Clone ID: TF_OSC400220j.C1.p16.fg
MDQIYMAAVNNKTSLPDDEPMKKISGDMPVTAGNACFDCNICLDFAAEPVVTLCGHLYCWPCIYEWLCPGVGSTASNNSSLARRQCPVCKATLSPDMLVPLYGRGGSLKKSLNGVPIPRRPTVQREAVEHQNTHNNIDDRHHENMEPSPPPQPLRHSSHHSSATEFDFIYPPSPIGRGLIHSTAGGVLGGMAVAVLPWAFRGQVPPSMFMSPHYVTAHNMSSRARRHQMEVERSLHQIWFFLFVFVVLCLLLF

SEQ ID NO: 18342 - protein, 165 aa, Oryza sativa
  Clone ID: TF_OSC405087j.C1.p5.gm
EEKERFRNIKKPPVPPPRPRSPSFVWRAPLLPPRFRSHRVPATTVKPSARPVVADDVALLAYAYEKKKKKRRGSDGDSGGGDDGDGGGEECSVCLGEMRQGEAAKRLPVCLHVFHEECIDMWLGSHATCPICRSPVDAGAVAARVQRFSRCVFICIYFELDPFVD

SEQ ID NO: 18343 - protein, 320 aa, Oryza sativa
  Clone ID: TF_OSC900068j.C1.p18.fg
MAAAGVSRSMVLTLLGFCVSVLFIVFVCSRLACALLRRRRGRARLRRASPLAVSGVLSIYVDRHGHHQPSSAAGAASGTGGLDPAAVAAFPTRAFSPAASSSASASTQCVVCLAEYEEKDVLRVLPYCGHGFHVACIDIWLMHHSTCPVCRISLCDYPDSKHTMSPVPSAVIIPLPPCSPEASRSDQCNCLFVGTGHSPRTSQVLRNEPDQVKLPVILETSTQGDPWIAVIGSDGDMISLLKPGASSGRRTAYMFVHAWMSAGPIMAHTIDLNFVCSKHQQQQWFFFPAATGKSRVEPRDADAGLHSCLLPDLRELALKI

SEQ ID NO: 18344 - protein, 292 aa, Oryza sativa
  Clone ID: TF_OSC900298j.C1.p20.fg
MRGALAAGGGIPSYAHRDGDGDVECAVCLRRGGAGGGGAAAAGVPARVFHAACIDRWLRACARAPPARFAGGGKERKVFCRVPIVLKLLLAVVPLAVIAGVLVYVAGVPWAISIVVLVVVFVVVHRARRGRSPAAGGGGGMVRDDQEPTVARPAAPSAVVVVVAPPLPPPFPIHRVPATTVQPSAPPVVAEDVALLAYAYEKKKKKRRGSDGDSGGGDDGDGGGEECSVCLGEMRQGEAAKRLPVCLHVFHEECIDMWLGSHATCPICRSPVDAGAVAARVQVQVQVQVLSC

SEQ ID NO: 18345 - protein, 213 aa, Oryza sativa
  Clone ID: TF_OSC400259j.C1.p108.fg
MDVEQLQQHARRLLSNGRVVSAAAAAGASPGPAGRVLEGGAAAAARRPAPFSSLDATVITVLSLLLCVLVVGLVLHAIARCAFRVTRRMCYGQEPPGDHGDEAAAERCARVARKKPGRAIAEKIPAIVCPAGGLDRLAGCGSTECAICLSEFAQGHRVRVLPRCGHGFHARCIDRWLAARQTCPTCRREPFAAAAAVQLQVYPDAAGGQHETP

SEQ ID NO: 18346 - protein, 181 aa, Oryza sativa
  Clone ID: TF_OSC407812j.C1.p3.fg
MEVSHMANCSNVSSPEQQPMPPSSAAASSPSPPQLDYDVVVILAAMLCALVCALGLNSMLQCVVRCTRRAVADPVGWVEHRRAGAGLKREDVVALPVATYVASPAPSVAGCAICLSDFADGERVRLLPACGHRFHVVCIDRWLLAHCSCPTCRRRPSPEADGHGAVVGEDHHHRLQVLTAA

SEQ ID NO: 18347 - protein, 386 aa, Oryza sativa
  Clone ID: TF_OSC408022j.C1.p9.fg
MASSPPTTPNLGSQPTWVPYEPTRDCSQGLCSMYCPQWCYFIFPPPPPAFDITGSSSDDSSGPTFSPLVIAIIGVLASAFLLVSYYTIISKYCGTFSSLRNRLLGSSAHRGSGGGADGGDNSRSQEPWSVALSDGMDETLINKITVCKYRRGDGFVDSTDCSVCLGEFREGESLRLLPKCSHAFHVPCIDTWLKSHSNCPLCRCNIAFVTVGMVSPEPEARVPREDRRDNHELVLTIDNPEHVREEPQNVVTGVAVGNGGRNHEAKDGPGRSEDANGTAEIREDGALMPPTRAPSSLSDTHREGRMSIADVLQASLEDELMVARESGLLAGSSGSSRRCHGEHSKDGGGRSGRALPDGANMKRLAPAGRSCFSSRSGRGKDSVLPM

SEQ ID NO: 18348 - protein, 1155 aa, Oryza sativa
  Clone ID: TF_OSC401134j.C1.p46.fg
MATPTPMAGEGTLAAVMPRSPSPTASAAAGSAAEAPMLIFLYFHKAIRAELEGLHAAAVRLATERAGDVGALAERCRFFVNIYKHHCDAEDAVIFPALDIRVKNVAGTYSLEHKGENDLFSQLFALLQLDIQNDDSLRRELASCTGAIQTCLSQHMSKEEEQVFPLLTKKFSYEEQADLVWQFLCNIPVNMMAEFLPWLSSSVSSDEHEDIRSCLCKIVPEEKLLQQVVFAWIEGKTTRKVTENSTKSNSEATCDCKDASSIDHADNHISSHEDSKAGNKKYAESIDGQVERHPIDEILYWHNAIRKELIDIAEETRRMQQSGNFSDISSFNARLQFIADVCIFHSIAEDQVVFPAVDSELSFVHEHAEEERRFNNFRCLIQQIQIAGAKSTALDFYSELCSHADQIMETIEKHFCDEETKVLPQARMLFSPEKQRQLLYKSLCVMPLKLLERVLPWLVSKLSDEEASSFLENMRLAAPSSETALVTLFSGWACKARSEDKSNSGEYLCLTSGEMRCLLDEVDGLEKCRPFCPCASRSNTDASLHPQTENGSRPGKRGNDAESVPGTNGSDLSQTDDTEARPCSKKPCCIPGLRVETGNLAISSSLASAKSFRSLSYNSSAPSLYSSLFSWETDASLSCSDGISRPIDTIFKFHKAIRKDLEYLDVESGKLIDGDESCLRQFIGRFRLLWGLYRAHSNAEDEIVFPALESRETLHNVSHSYTLDHKQEEQLFGDISDALAELSQLHERLTHPHIEVSEAEKNDFNSSDEIDWTRKYNELATKLQGMCKSIRAALTNHVHREELELWPLFDEHFSVEEQDKLVGRIIGSTGAEVLQSMLPWVTSALTQEEQNMMLDTWKQATKNTMFGEWLNEWWKGAPTSSDSSEEASSAPEDSHLQDKIDQNDQMFKPGWKDIFRMNQSELEAEVRKVSRDPTLDPRRKAYLIQNLMTSRWIAAQQKLPEPKSEECSEGAGIPGCAPSYRDQEKQIFGCEHYKRNCKLVAACCNKLFTCRFCHDKISDHTMERILMLPDHTRESDTGDDVHGLGVDFFHCMKCNCCLGMKLTEHKCREKGLETNCPICCDFLFTSSAAVRALPCGHFMHSACFQAYTCSHYTCPICCKSLGDMAVYFGMLDALLAAEELPEEYRDRCQGCSLAS

SEQ ID NO: 18349 - protein, 150 aa, Oryza sativa
  Clone ID: TF_OSC8662j.C1.p1.fg
MADEQIRDLNLSETHTLLLINLYLSHVQGPSYVPHGVESAYIHINRDIEEDDDTYSDDGFCAVPASSDAIAALPVPETTVSETETREEEACAVCLEGFKEGDRVKKMPCSHDFHANCISEWLRVSRLCPHCRFALPAERDSEQKNPEGEA

SEQ ID NO: 18350 - protein, 111 aa, Oryza sativa
  Clone ID: TF_OSC8664j.C1.p2.gm
MATTGRLLLPHDINGRFGSVPACSEAIAALEETSAGEAKEKDCSVCLEAFEEESDKLMRKMPCCHAFHESCIFEWLQVSHLCPLCRFALPTQAEAEAGLWPLLTPGSGSGT

SEQ ID NO: 18351 - protein, 263 aa, Oryza sativa
  Clone ID: TF_OSC23746j.C1.p8.fg
MEGRVLRRSVTLADQLAAVGPAGTAAATAAAGSCNLRDLLKLRDEDDLAAGRRAAVTLASAMAAERLTVAPASSAAAAAAAARTLLDIIRDDQLPSSSGGGGEGGDPLVRRAVSLPAPVTATPPPPPPPPETPPRQLPSVSPPTVGEEEEEEQGERVSLMALLEQTERQWSAGSGATVQQHLASPSAAASASVSAAAEDEAEAEAGKGAAGGGCCCVCMARAKGAAFIPCGHTFCRTCARELLAGRGRCPLCNAAILDVLDIF

SEQ ID NO: 18352 - protein, 334 aa, Oryza sativa
  Clone ID: TF_OSC401719j.C1.p43.fg
MDDDASSYTYCCHSCDSFVHPHPHLDAAVLCPHCNAAGFLHDHEMPPAADHSPFNPPVIVLRRSASPDDATTFDLLYDDGASSALRPLFDRLLLRIPSASDNPNPPASKAAVDSMPTILIGACHLAADSHCAVCKEPFHLAAEAREMPCAHIYHHNCILPWLALHNSCPVCRHRMPTDDHDSTNAAAAQAAAGSSDEDATTVGTLTIWRLPGGGYAVGRFAAAGGTRAGERELPVLYTQMDDGGFNGGGGSGSPTMIGWSSRGSRSSQRQRSIIPRLFRNMFACFRHHDATADSGDYSSRAGRRSSSSVFTRSLRSQITSWRSEDGHPDAIATR

SEQ ID NO: 18353 - protein, 300 aa, Oryza sativa
  Clone ID: TF_OSC405090j.C1.p1.fg
MAALVLSVVGCFAPKSVWKASVLAGMVLLAFGVADYLAPASWCRRRGGTNTRAAEREAQPGASSSSTFGLEKAAVDALPTFAYASGGAGAAQGGGDLEAGNGEPCSVCLEELHAGEIVREMPACKHLFHVECIDMWLHSHRTCPMCRCDLSPPREVAAKEATAAETAAPPGDDALPPDRIAQRGIFPLDDGWINPADLPGYSRPSARASGASDEVGHVTPLTMREQRRREGGSGMQARLPASGCECGGGSGKKGGSEPEGWRRRQRKEGVAASPKARDGGNGKKGRWRARRRMNHRRRLG

SEQ ID NO: 18354 - protein, 335 aa, Oryza sativa
  Clone ID: TF_OSC900298j.C1.p27.fg
MSNVFARISAATLRGGGEEERGGGRGRRACYGIAASFAAVLLFCVLAVVGSVWKASVLAGMVLLAFGVADYLAPASWCRRRGGTNTRAAEREAQPGASSSSTFGLEKAAVDALPTFAYASGGAGAAQGGGDLEAGNGEPCSVCLEELHAGEIVREMPACKHLFHVECIDMWLHSHRTCPMCRCDLSPPREVAAKEATAAETAAPPGDDALPPDRIAQRGIFPLDDGWINPADLPGYSRPSARASGASDEVGHVTPLTMREQRRREGGSGMQARLPASGCECGGGSGKKGGSEPEGWRRRQRKEGVAASPKARDGGNGKKGRWRARRRMNHRRRLG

SEQ ID NO: 18355 - protein, 428 aa, Oryza sativa
  Clone ID: TF_OSC100279j.C1.p12.fg
MSNSTWQPSPPQTPAAAASSASGIDGVENKISPSIVFIVAVLAIVFFVCGLLHLLVRHLLRLHRQRRAREDAESATAFEGQLQQLFHLHDAGVDQAFIDALPVFLYRNVVGVGGEDGKDPFDCAVCLCEFAADDQLRLLPKCSHAFHLECIDTWLLSHSTCPLCRRSLLAELSPTCTPVVMVLESESSRDMVHAADDEPADVGGEDAPGAEEVVEVKLGKFMCVEGNVFFNVNAIAGEGDRAGTSSNGNGDANAKAGGLGQRRCHSMGSYEYVMDAHASLRVSIKPPRKKPAAAASKSRRRGAMSECEFGASKRGESSLRLPPFRATPRKNPDDDAAAAAGAKLAKDSFSVSKIWMVPSKKEPGAAAERRAVSFRWPAAKDWDVEAGSCGGNSAVSSVAAEERPSFARRTLLWVVGGSRQLSRVGSCS

SEQ ID NO: 18356 - protein, 207 aa, Oryza sativa
  Clone ID: TF_OSC411506j.C1.p3.fg
MASFLDSFSSLGVGYAVAIALGFLVLLASLLLAFYFCSRRGGAGVVRRGGGQGVHSARHAVSSASSSGHISITVPRVIFVADDSDSPGSSSRGGAGGGAASSPVGLDPAVIASYPKVPFSRAATGADAEAACSICLCEYKEGEMQRMMPECRHRFHLMCLDAWLRRSASCPVCRSSPIPTPVSTPLATPLSELVPLSQYAADRRRHR

SEQ ID NO: 18357 - protein, 823 aa, Oryza sativa
  Clone ID: TF_OSC900235j.C1.p2.fg
MPAQKRPAPEAASAPAGGDGHVEGGGAGGGGGADEDAHRGGERSPKVMNGGGPEKEKERRDADSDAEEEEEEAGGGGGGGGADEDRDSPSSESDGDMDEFILVKLMDIRKEVQCPICLGIIRKTRTVMECLHRFCRDCIDKSMRLGNNECPACRTHCASRRSLRDDPNYDALILALYPDIDKYEEEIQASIAETFRRQSEALVKKRSVAKATGSTITRRTRGNMRAKRRGRTSSPDIVATDNEDEDRDENGNEGSKESSSVDDRSPDVRQKRVRRWPVPRSSPAKSIGGIDSSFEDIDDLGSGRDIMSTSPLRGEMLAWGKNGTRSQTRHGNSGGSSGRMAKGGRVTKLVEYLRNTDEFDNKFNLYLVLLPLNGQSMPKLEKPYLSCQPTFSVRHLCQFVALQLSRHAKEVEIFIRKNPNNGCFASIDTSADEIKLNHDALERLEEEKSLSELYPSLASGHGDLAPWTRYGALNNEQMVGCRKNREVIKLLLTGAGLTVCHAMLPLKLADWPSTLTQSRCQSNWPMSLEVLSESLLCFGATSVTVDDIAAAGNLDEITITSIFAHGEDVGSCVSSAASSAGLEYNPVYESSVGKQCDWVTVVQETYESTKVIDGLWVIPKWRTPPDPQAINIIINPGLAFGTGEHPTTKLCLLLLRETVKGGERFLDYGTGTGVLGIAALKMGAALSNGIDIDPQAVTSACENMMLNGIDSNKMLVYLVPTNAQSACFPSNIDKSEENRPTGNLELKSSKGSYDIVAANILLNPLLELVEDIVGYAKSGGIVAVSGILSEQVPKVEEAYSRYLENISVSEIDGWACLRGNRRA

SEQ ID NO: 18358 - protein, 436 aa, Oryza sativa
  Clone ID: TF_OSC400351j.C1.p25.fg
MEALSRTERVGGGGGAMVEVAFASSAGSSAAAPRRLRGELVVRDAIPYAGVAPPPPALPLPQPQLQPQVQATTSGGGGGGKISPAVLFIIVILAVVFFISGLLHLLVRLLMKKQHRRGGGGGAAAGVSRSAAGDDAGGGGDAALQRQLQQLFHLHDSGLDQAFIDALPVFAYREIVVGGGGDGDKEPFDCAVCLCEFDAEDRLRLLPLCGHAFHLHCIDTWLLSNSTCPLCRGVLFVPGLTENNPMFDFDEGLEEGRLSEDCDNGFGYPGHKATEGMQTPGTEKRVFPVRLGKFKNVGTQGAVEGGGIGNANGAVLRREEGESSSSSLDARRCFSMGTYQYVLGTSELRVSLQPDRIRNGGGGVTRARPTGLSSVNAEIMEGKKICARNKGESFSVSKIWQWSNLKGKLPTGSDECSEAGSLPWMKRGGIGDTSNM

SEQ ID NO: 18359 - protein, 426 aa, Oryza sativa
  Clone ID: TF_OSC401057j.C1.p12.fg
MGNMGSSGGHRRRNNGHGRHHHHGQPTAPPPPPQQQQQEVAPNRYVFAAASPYPPQYPNPNLPQYYPQYGNFYPPPPPSMPGPLPAPYDHHHRGGGPAQPPPPPPPPQPIHAAGEFPPAMLQQHPHYHGWGGNFSYGPPTQPPAPAPPYVEHQKAVTIRNDVNLKKETLRVEPDDECPGRFLITFTFDATVAGRSMTVYFFAKEELNCNLTATKEDLLKPVTVTFKEGLGQKFRQPSGTGIDFSLFEDAELFKEGEMDVYPLAVKAETTFSIGQFSEGEEQKSQTPNSQITQAVFERKENGDYHVRVVKQILWVNGTRYELQEIYGIGNSVEGDTEGNDPGKECVICLSEPRDTTVLPCRHMCMCSECAKVLRYQTNRCPICRQPVERLLEIKVNNKGEEQQQQQIPQPPPPPSTAPPHQQQESQA

SEQ ID NO: 18360 - protein, 133 aa, Oryza sativa
  Clone ID: TF_OSC401965j.C1.p31.fg
MVVVVSHVMALLSSALSGKKAAAEGDGDDDGGQCRCWRDGDGVGGGQAAAAGCCVCISGFRDGEEVRRLPCGHAFHRDCVDRWLALYCRRRTCPLCRLHVGGAVVAAAVAGLDELQLGDDLVIWFSSLFVAGF

SEQ ID NO: 18361 - protein, 170 aa, Oryza sativa
  Clone ID: TF_OSC20545j.C1.p13.fg
MSLPGVSASTFKSPVFIGLLAVMCVAVVLLLHHCVLVTFCDTRRRRRRRRRRGTSTQQQHVQQGEDDDDDDDEDDMMSSSSQAKLVVCPYKKAEEWGEAMCPVCLSEFGDGEAVRVLPECMHYFHVDCIGTWLRANTSCPLCRADTTPSSGDLHHHLSISVSLEEILVRT

SEQ ID NO: 18362 - protein, 163 aa, Oryza sativa
  Clone ID: TF_OSC900108j.C1.p13.fg
MDDDGDWITARYLLSSILGRNPLVVDYVDEESFPVEDPPPVAGGARGGRQAVVSQPPVVRATAGVAGTVCSVCTEEIAVADAVVRLPCAHWYHAGCISPWLGIRSTCPMCRAELPASDDAAEEGGGAGREKPPRAGRAGTSAGGGVRRDASYELLAGGGVLSG

SEQ ID NO: 18363 - protein, 413 aa, Oryza sativa
  Clone ID: TF_OSC412800j.C1.p2.fg
MGSPRGRRRGDNGRLLLLAAAAVVIASLVGGGAAQPTTSGPGPNYFNPKSFNPSMAVVIVVLVTAFFFLGFFSIYIRRCAGGPLGGPGGYGVGGGGGGRVGGGFTFAAARSRRVRGLDPAVLGAFPTMAYADVKAHKAGKGALECAVCLSEFDDDETLRLLPRCSHAFHADCIDAWLASHVTCPVCRANLAFDAGVPPPPLAPPHALTTGQDVAAAPPQPAAPEQVTVDVVVADAEETEERIRREEAAELMRIGSVKRALRSKSGRRPPQFPRSHTTGHSLAAAAAVPATADDAAERYTLRLPDHVLREIVTSARLRRTTSLQSFRTTAAAGGGARAGRSVRLGQSGRWSNVSSLMRTFSARLPAWGSARRGAEADSPGKDGAKVAGDCTASVEQHCDGGGGGACPRPLGDHV

SEQ ID NO: 18364 - protein, 182 aa, Oryza sativa
  Clone ID: TF_OSC423581j.C1.p8.fg
MSAGSPSPGGGDGGGGGGSIFGSGGIGGFGYGVGASVGVLLVVSTVALAIYFCSRTSMPVAAAAAGRPPSPPRPRDDGDVETGTGIDDATLEAFPEVVYGEARKARGGAAATQTCCPVCLENYGDGDVLRALPDCGHLFHRECVDPWLRQRPTCPVCRTSPLPSPMPTPLAEVTPLALVRPS

SEQ ID NO: 18365 - protein, 576 aa, Oryza sativa
  Clone ID: TF_OSC401769j.C1.p7.fg
MEWGDTAGWLAEEDNAIEPSLSGGGGRVQGTRIALGQAASGAVCLGAGKDRVPEAYVVVVHGRRRGRRLRVRAMLKLNNGRTAVSPLRGSGAVGAEAYLEGIDSSRWATAVAAAASMGTVSRLSLKHLLRCFDFYSIDRKFCNGTNLNTLYQYHWSMRLSTGSWHSWYPVKHTEIKVVSIENSEVLADGSKGVVKVRGPQVMKGYYKDHFFQFTDAKMMGCSFQISPILIVNESFTVDNGLLTSTLKIRRDKFRSANETVDHLFVSCPLARFACNVIASAFGLEKINSIQHLLEAWLNEFDKKKKQLVAVGIAATLGRWKAKEVYNVGSTLRLAKAGCKRDYIIPSMAGTLIEDGWSLWAYILPFMPGALHVSRTCNLIGCVISILHPGKGNADEVDGIRSEDVACLICQELLFDPSVLNCGHVYCMPCLTSVGGEELECQFCGAPHPAEPTVCSNLKNFLKHRFEELYNSRQEKSSGVPSRKEGTRKGKPSEILHTHVGVGCDGCGVFPIQGRRYSCKECEAPGLDLCEKCFMTGSTAEGRFDQKHTADHDMELDDSFLFPNLVDYMDDLYIDMT

SEQ ID NO: 18366 - protein, 313 aa, Oryza sativa
  Clone ID: TF_OSC400772j.C1.p73.fg
MGNIASSGGASPRPPPPHLEAYRHGVPPPYYHSYPRPPPGAAAPPPVPVPAHVERHRAVAVSVGVNVKGDTLRLVPDDDDDDGRSLLLAFSFDADGPGSITVCFFAQEDKCALKTAKENLLQPVTVPFKEGRGQEFKQPSGSGIDVSRFEESELTNVGEGGVFPVAFKVQMDVSGNQESEGAHETEQSKYLVKYAIFVKKDNAEYGVHVVQQILWVNGIRYVLQEIYGIGNTADKNAHEDDSGKECVVCLSEPRDTAVLPCRHMCLCRECAQVLKYQTNKCPICRQPVEGLREIEVDNKPIPQQGSQQLTAPQ

SEQ ID NO: 18367 - protein, 303 aa, Oryza sativa
  Clone ID: TF_OSC400964j.C1.p102.fg
MTLSEQLSAPDQAIRDFLKIPHDGLGGGDGEGGRIPAAAGASGGGGGVGGMINWKPLRDRLRLRRAASAWMSASPKPAASNSGGGGGGGATLSSSNSGSNHSNKYNYSPGEAAAAFSRTFSRTRSLRPTPTFSRATSTRLGATAFSSGSRRAAVDGGGHANEDDDEDHTDDDDDDDEEEQGKDDAPAAQMSLMALLEQSDSQWDSEDEDDQGHGGGGGGGGNGGGGGGGGARKNGDGDDDEDDGEGREEEMVHVCCVCMVRHKGAAFIPCGHTFCRLCSRELWVSRGNCPLCNGFIQEILDIF

SEQ ID NO: 18368 - protein, 348 aa, Oryza sativa
  Clone ID: TF_OSC416024j.C1.p2.fg
MGVAAANVAAFVLLAIAPVAAAPSSPPRSGGDSLSFSDVISISFFMAVFFPVFIVLLAFACLRLFRPLDDDDGEPALADTSSSEWSRRGGGGGNRAGLDAAEIAALPLVSYRDARRHRIGDARGDPLECAVCLLEFEDDDALRLLPACPHAFHPECIGLWLEKHVTCPLCRANVLDAPPPPPPPPPSLEQDTASPPPAHETVVVIGDAGASEEAEAEERIRIQCLAGVRRAAGRQALPRSNSTGHERGGGGMERFALRLPEHVRLEILMSHRLRHVTSAVASVRVREGSAHDAGAVRNAVARLLSLFVPGAGWKGDDEGKSSKAAEGSSRRRRDESARGGVGEEKRSE

SEQ ID NO: 18369 - protein, 243 aa, Oryza sativa
  Clone ID: TF_OSC900160j.C1.p18.fg
MSEEQGLIHCAALLLLLLLEHVGDAAGRANAIQRNYGGACVQMRLSCSSLAPFFLYLIQWLDCGCCYALPSYLGLFHILICKVYADGDSSVSTYERRASLREFYALNNLCLPAIIYPILQQLEGSLIERDLKGKGRCKDIVSRKRLEDWRKLCNKDVEREDECGICMETCTKMVLPNCSHAMCIKCYRDWYRRSESCPFCRGSLKRIRSRDLWVLTNYNDVVDPVTLERENVKFIVLLMVSLL

SEQ ID NO: 18370 - protein, 167 aa, Oryza sativa
  Clone ID: TF_OSC400184j.C1.p4.fg
MSMPPPVPQENQSVGKGTAIFSYTCVGLTGVALVAVVVFYCNRHVRRRAPVVAAEGAGGAGGREDDVLRGVADVAAKIPEFAYAGSARHGGGGECSVCLGAVQGGEAVRRLPACKHLYHVECIDMWLASHATCPLCRTEVEPPPGDGGGRPAPAADESSPTEALPPV

SEQ ID NO: 18371 - protein, 400 aa, Oryza sativa
  Clone ID: TF_OSC900298j.C1.p28.gm
MTRASRASLLLFCFGGGDDDYECRACYGVSVACVSLLLFCVLAASVSVTKACAVAGLAVLLFGVIGWFVPLCGAGGPPARAGAAAGGGGRGAGAAGVTRCACRLVGAALIATLPAFVFEGPAEGGAGGGGGSKHGGSVLCAVCLEDVARGETPRIPRARNLKTGRAAGPTPTPRARTRRATTGLQMFNGERRPAASQRGGDGGYLACYSVVMVCASLLLLSVLAATVSIAKACVFAAAAAVLFCAVGCVSRWCGDAGGAPAALPTTAAAAEEARARAPAAAACATCGLVGAAIDALPAFAYARPAADDGGGGGSKSGRCALCSVCLEDVQAGEMVRQLPACRHLFHVGCIDMWLHSHSTCPLCRCNVSPPATIVVKATATSTATAAAAAQQLPADTLPPV

SEQ ID NO: 18372 - protein, 141 aa, Oryza sativa
  Clone ID: TF_OSC932j.C1.p2.fg
MDAEDIVDCLMWGIIFFFLLACIGVALCFLALTIATVVGLIRRRNDDANNKYDMLIERLLLRPKDDQDNEQCVICLSESEDDVDDGGGERGRWRMLPGCAHAFHKDCVVKWLRNRTTCPLCRSDVAVAAADDIISTADNMV

SEQ ID NO: 18373 - protein, 719 aa, Oryza sativa
  Clone ID: TF_OSC20084j.C1.p3.fg
MAVAKWERAKRALATRLCVRAPRVRAAAAEAEGEGEEGEGRGRSVAASPPAHVASSRRLSRCGSRSSTKICAICLGGMCSGNGQALFTAECSHKFHFHCISSSVRHGNTVCPICRAVWKELPFQGPLPAAAAADASLLGTARVNPHPLDDRHQHQRMAVVRRLSRGDSVTRQWQLPIFRTLDGGIFDDDEQLDLHPAEDVVGTQDVDSIVADEMAPASVGITTYAAFPAMEESVMVEEFAVLIHLKAPSSPATVTSRAPIDLVTVLDVSWSMAGTKLALLKRAMSFVIQALGPGDRLSVVTFSSSARRLFPLRKMTESGRQRALQRVSSLVADGGTNIADALRKAARVMEDRRERNPVCSIVLLSDGRDTYTVPVPRGGGGGGDQPDYAVLVPSSLLPGGGSARHVQVHAFGFGADHDSPAMHSIAEMSGGTFSFIDAAGSIQDAFAQCIGGLLSVVAQELRLSVECGDDGVLLTSVRSGGYASHVDGDGRGGFVDVGDLYADEERDFLVTVRVPAARGVSALITPSCTYRSTATMETVRVGGDTVTVPRTVDAPVGYDGMSPEVERELHRVQATEDMAAARAAAERGDFELAAAILDERRGVLESRADDDPQSVALAAELREMQDRVETRQRYEESGRAYMLAGLSSHSWQRATARGDSTELTSVIHTYQTPFMVDMLQRSQTLQPEVVVAMSRSAPLPAPSLSLSPPPPPSQLRRRS

SEQ ID NO: 18374 - protein, 499 aa, Oryza sativa
  Clone ID: TF_OSC400622j.C1.p109.fg
MEEAGDEEGEQGLRLGGVGDGADGEEEVARGVVAPQVLELSSSSSGEEGGSWEEEESQGSVEVTRGGGGDREARVSESRDSAEVNGGEAESQSLPGCPICMNAWTADGAHRVSCIPCGHVYGRSCLERWLLQCRKKPATCPQCGRRFKLNNIINLYAPEISVPNNDLEKQVLSLREKNESLEKQNQELVQEINEHKRQIILQQNFINESSLKRKNEFFLDGARVMGIDASSQIILTSGRAPGIGAEHVLTKAPGWSCSGDQNSPNHIYAGLQNGMLLTFDIRQTVAPLHSMMGLSTHPVHTIHSVVDGGGSRKVISASSIGPCIWDVDGSRNRPDLLNGMENHGVCISLACNPPSSDLLVASFRPKVELSDDGTSQAGKSQSPTPSASGKLGCHALIRRTSNTSFARDQICRGNVSGLRMSKSAIIPFTGRSNQQHLFAYGDESLRGVRTWRLPSLQTFADLRPHRQPILDLRFAESSSTGERYLGCLSEDRLQVFRVR

SEQ ID NO: 18375 - protein, 175 aa, Oryza sativa
  Clone ID: TF_OSC400283j.C1.p29.fg
MDLVGAMASLVFLHLLCAGWRMLRMWTAAGWPWPYLAAGTLDQALRPQCKLCKQKMMAGAVVRALSCDHVFHKACVDERLRNRKHGMRCRICNRVARCMLPWKASPANLIDHNAQRFQHIRARGGVRTLDRALNDACPICQHRMVARDDVRTLSGGHDFHEDCDIAKWLRDNKKA

SEQ ID NO: 18376 - protein, 235 aa, Oryza sativa
  Clone ID: TF_OSC401583j.C1.p29.fg
MGGFCCCLCTDDFEEYAHPNNPIYRQGVCLRNFFHNFFGGYTATFQRLESRPSNPAQGAAPLASTNPSTNITDNSLSETYHLVSRPPPYDTDPRYARVQREGLVSRREKSINLTQEESLALRRNGSSSGIEHLAAQKKWSSTEPEGEYKVHRSESTKSLSAKSYNSSFAVVTSEDEDVCPTCLEEYTPDNPKIIAKCSHHYHLSCIYEWMERSDTCPICGKWKAKDLQCDMLESL

SEQ ID NO: 18377 - protein, 222 aa, Oryza sativa
  Clone ID: TF_OSC415227j.C1.p3.fg
MEVAPAAAMTRAEEESRRRAATRLPRLLRGVVSGMLTGIFAVAGGLTGAVTGALAGRASDGGVLRGAGLGTFAGAVLSIEILEASRAYWCQDRSSSPGSLSMGDFVKQLIHARFVQEQNEASGHITYRWQVGIADVVNGAVHEILGDVPSGEGLSKYSLMKLPYHVVIDHNNGSIGESLSCPVCLQDVVAGQTVRRLPKCSHTFHQPCVDKWLVGHGSCPMY

SEQ ID NO: 18378 - protein, 348 aa, Oryza sativa
  Clone ID: TF_OSC401237j.C1.p13.fg
MASEDGCGGGNPPGDAAAAPPVWNAAPAAGAGCGDLEEDLRFQCCVCLELLYKPVVIEDEKRVDTYSPQIIEFLNSKSNNCEIDGENRPEESNSRPPQEVTSDGNTINGHPKKVKLEDVSCALCKELLYQPAVLNCGHVYCMSCLSSLDDGALKCQVCGGLHPGDFPNVCLDLDHFIEDYFPAEYDLRREKIKLLKGECNQGSSSGTSCIKEGRGRPTNKENRAHQDDDLSDVHIGVGCDSCGMYPIRGKRYKCKDCTELIGFDLCEECYNTKSKLPGRFNQHHTPDHRMELDHSALFNRLMRLQGIHEEGPGEIIIEGAFVAPDAVVHIIADDHEEIEDNGEDDHLL

SEQ ID NO: 18379 - protein, 231 aa, Oryza sativa
  Clone ID: TF_OSC18908j.C1.p4.fg
MGANDGHLDATSNNRGGLHEQTTTGCLPVDQSCFALSRLSYRRSSSSNPRACCSTTSYLEVLAISLASLLVIVLVLCAIRCYRMRRAVNRVTVAAASAAAAAAAAGNVTNKKRPAPGLGEDAIAALPKFEYRGTGDECDRWECSICLCAVADGEVARQLPRCMHLFHRGCVDMWLVAHTTCPVCRAEVVVNKPPDEDDGRCAETPEDEAAPPASALEPARLENGERDLEAQ

SEQ ID NO: 18380 - protein, 185 aa, Oryza sativa
  Clone ID: TF_OSC404797j.C1.p3.fg
MATANGVDLATAGLLRLLAMGMGPSVQIPGEGGVPVMMVQHIIIGDDGGDLFSGGLGGGVPPASKAAIASLKEVKAGEDGEGGDSLGDCAICLDAFAAGKEMPCGHRFHSECLERWLGVHGSCPVCRRELPAAEQQPPEEQQSGGADAGERRRPRAVVVSYVVLGDGGRGGERGEPWNIRIEDVD

SEQ ID NO: 18381 - protein, 168 aa, Oryza sativa
  Clone ID: TF_OSC926j.C1.p2.fg
MRRLGDVVEAPALVLTPASMQQAGGRGSSGALDASMVVILAALLCVVICALGLTSLIRCALHCARGLSPTTATPTPSVSTAATAGLKKTELRRIPVEVYGAKQAGVPDGECAICLGDFADGDKVRVLPRCHHGFHVRCIDTWLAAHTSCPTCRDSILSVHGVVAGGQT

SEQ ID NO: 18382 - protein, 299 aa, Oryza sativa
  Clone ID: TF_OSC400397j.C1.p48.fg
MAEEAAAGGLYYCHMCASTVSAVAAAEGEVEIKCPYCHSGFVEEIESARGVATGGGGAISSVWAPIIDGMVGGGGGDAVRRHRRSRRLADAAGADDGYYRDLALLDFSESRRRTAALLLLMQEFRERQLQRLESATATISAAAAEAGAVVGTSRDAEGVALADYFLGPGLDALMQRVGDGDAGRQGTLPAKKEAVESMPTVEVAAGGDCDSACAVCLEDYAAGERATEMPCRHRFHAKCIVPWLKMHSSCPVCRFQLPTDDDDDSSKSARGGAAHSGGGRRLSQPSPASTGEAWAGCRP

SEQ ID NO: 18383 - protein, 111 aa, Oryza sativa
  unsure (1)..(111): unsure at all Xaa locations
  Clone ID: TF_OSC401498j.C1.p12.gp
GTGPVRKKRYGALPCHDVVKGGGGGDCAVCLEELEAGDRCRRLPRCEHSFHAPCVDSWLRKSRWCPVCRADVVGRAPEGERKMAAAAAAVETTVAGRSSSPATGEIVAERX

SEQ ID NO: 18384 - protein, 188 aa, Oryza sativa
  Clone ID: TF_OSC402160j.C1.p21.fg
METEEDDHRLHPRTRTIADLLNQLDQIHSTSATRTTGGGGGVAPASDEAIEALKDVTGDIDQLPAECAICLHGGLDAAAAPAGWKEMPCGHRFHGGCLEKWLRAHGTCPMCRHQMPTTTAPPPPAAEQEDYLDGDEEEDAGDDDEVEAGVGPLPLELRVVVAHSSGGYGGVAASASTTRRLLAWSTTI

SEQ ID NO: 18385 - protein, 174 aa, Oryza sativa
  Clone ID: TF_OSC406125j.C1.p2.fg
MGSRSGSTTTSMPPVPQENQSVGKGTAIFSYTCVGLTGVALVAVVAFYCNRHVRRRAPVVAAEGAGSVGGREDDGRGVADVAAKIPEFAYAGSARHGGGGECSVCLGAVQGGEAVRRLPACKHLYHVECIDMWLASHATCPICRTEVEPPPEDDDGRPAPAADESSPTEALPPV

SEQ ID NO: 18386 - protein, 173 aa, Oryza sativa
  Clone ID: TF_OSC412156j.C1.p1.fg
MASPSSSSVISIFLLVAGVALMLVVHIVVVFWALRRGRGASRGEEEAAPGRAAEGNGGGARGGGGKGLSADEIGALPCHDVVKGGGGGDCAVCLEELEAGDRCRRLPRCEHSFHAPCVDSWLRKSRWCPVCRADVVARAPEGERKMAAAAAAVKTTVAGRSSSPATGEIVAER

SEQ ID NO: 18387 - protein, 153 aa, Oryza sativa
  unsure (1)..(153): unsure at all Xaa locations
  Clone ID: TF_OSC412156j.C1.p1.gp
MLVVHIVVVFWALRRGRGASRGEEEAAPGRAAEGNGGGARGGGGKGLSADEIGALPCHDVVKGGGGGDCAVCLEELEAGDRCRRLPRCEHSFHAPCVDSWLRKSRWCPVCRADVVARAPEGERKMAAAAAAVKTTVAGRSSSPATGEIVAERX

SEQ ID NO: 18388 - protein, 826 aa, Oryza sativa
  Clone ID: TF_OSC400860j.C1.p53.gm
MAGSTLFRWLFLLLAIVSLAAADSGSGEAETTVPGQIRLSCGASASATDGDGRAWDGDAVSTFAPSVTGVAADASYQDPSLPSPVPYMTARVFSSSYTYSFPVKPGRVFLRLYFYPSAYGNLGAAAAAADALFGVTAGGITLLRDFNASQTALAVGYAYIVREFSLNVSSGATSLNVTFAPSPRGAPGHGSHHYAFVNGIEVVPTPDMFTTPVPAFANGGRPNPMPLRADTAFQTMYRLNVGGEAITPRDDAGGFYRTWDNDAPYIFGAAFGVTFAKDSNVSVRYNPPSVPKYAAPEDVYATARSMGPNAQINLNYNLTWILPVDAGFYYLLRFHFCEIQYPITKVNQRSFFIYINNQTAQSQMDVIVWSGGIGRAVYTDYLVVTAGSGQMDLLVALHPDLSSRPEYFDAILNGLEVFKLHKYGTHSLAGPNPPIPLKQVFSTVDGSRSESRKKSVVCAAVGGVAAGCFLAVLVAFAVAWAVRRRQRKAAAEKPADGLLGPTKGSALYDPFGERYSMNTAVQGSSPPPPPPPPLPRTRREVHNVEAADASPVRRNGVCEGKKEVVGDEKQRLIESLPLFTMASSLAALPKSSPDCAVCLSPFTLDAELRLLPACRHAFHAACVDAWLRTTPSCPLCRATVTLPHPSISAILAAEQPPPPEPRSRDRSRSFRVEMGSVSNRSASTATGGNARPTYSLGTFDYHIDEEVEAVVSRAAPMTTRSAAAVKEDKPAAEQSPPPPGEAVAEAAGATRGWLREYVERLATSASSLSSFSGRWSSRWSQSYQSHHSHSQEEPWLWDAEAVRMSPPGTEEEETAFMVLYRWIAGA

SEQ ID NO: 18389 - protein, 359 aa, Oryza sativa
  Clone ID: TF_OSC400939j.C1.p46.fg
MASTLSSPSPPSADPVTGSSDAASSFLPSLLIIAALLAFVLLASVSIHLLLRLLSRSSPPPPPPPPLPRTRREVHNVEAADASPVRRNGVCEGKKEVVGDEKQRLIESLPLFTMASSLAALPKSSPDCAVCLSPFTLDAELRLLPACRHAFHAACVDAWLRTTPSCPLCRATVTLPHPSISAILAAEQPPPPEPRSRDRSRSFRVEMGSVSNRSASTATGGNARPTYSLGTFDYHIDEEVEAVVSRAAPMTTRSAAAVKEDKPAAEQSPPPPGEAVAEAAGATRGWLREYVERLATSASSLSSFSGRWSSRWSQSYQSHHSHSQEEPWLWDAEAVRMSPPGTEEEETAFMVLYRWIAGV

SEQ ID NO: 18390 - protein, 407 aa, Oryza sativa
  Clone ID: TF_OSC417199j.C1.p1.fg
MAVICFEESIHLLLCLIGFRIIVSINWKRYRLCAHPLHIWIVVDYTTVFIFRLLMFVDNGLAAGMGLALDNVYTCLFVKFGHLRHFHLPEEGQKWGFLIWLLFSYCGLACIACVAVGKWLSRRHALQQRAQQGIPVSEYGVLVDMIRVPDWAFEAVGLEMRGMGQDTAYHPGLYLTAAQLDKISMYLFASDLRDAKKSLKTSGFVLRSKVTLKSSVIEQNDFKLVLLLQREAVEALIQELPKFRLKAVPTDCSECPICLEEFHVGNEVRGLPCAHNFHVECIDQWLRLNVKCPRCRCSVFPNLDLSALNNLRPSSEPDRPSASEVTAATMARYVRSSQPAGQSYLLRLQGLLLRQVVVRHGGGDDMASAENGASHVAAAVTAPATTGGVESELPSIVVDGGHQLPDR

SEQ ID NO: 18391 - protein, 387 aa, Oryza sativa
  Clone ID: TF_OSC419721j.C1.p4.fg
MGTRELLVVLAVVVMAAVGAGAQSSSASPAPATSQAPTVRQQTPFGRTMSTVITVSISVFFFLLFFCAYINQCRLAEAGDARAAAAAAAGGGAGGGPSRRGKRGLDPAVVATFPIVPYREVVKHKIGKSVLECAVCLTSFDDGDDLRLLPHCSHAFHPECIDPWLESRVTCPLCRANLEKPPPPPPPLPAAAAASPSPERSPRCQPSPPPPPPPHALVIPVEDEEDDSDEDDRKEEAVELEMLRSERRAARLPRSHSTGHSLVASAAAAAESGDHERFTLRLPQHVRDEVLRSLRLRHAASLVNLSDMSSEGSSRGGRRALGLAFGNGGGSSHGGRRWQAFLARTVSWARGGGDGSVRRGWDGSTRRGKDDAESSRKGATSPAAGRP

SEQ ID NO: 18392 - protein, 294 aa, Oryza sativa
  Clone ID: TF_OSC401716j.C1.p124.gm
MAAAQDASSQALGLRWRYGDVDDGNFAVRGRAVPLLVALLFVLVCFVAVSLYLRWACHCHRYGRDTTPMPATTSSGFSSSHAAATAPGSASSVTGLDDATIASMPVALYRAVASAAGDGDDGGAAQCSICLGEFEEGEKVKALPLCGHGFHPECVDAWLRSRPSCPLCRSSLLPAAATTKPDVAGSDAAAGGGEQLQGAFSRFWDTGLASIFMLLAFSSNSGDLLFFSDAGDTLDSGRGPYSDAGAVVLEEGGGLMLVAGHLVVDGLGRQSAARWGGGGRGSGIAEKCVMVAAK

SEQ ID NO: 18393 - protein, 170 aa, Oryza sativa
  Clone ID: TF_OSC20545j.C1.p14.fg
MSNNNGNPGYYNNRNAGDQSDYKATIAILFSVFFVVILIRLIHFIINQSNNRAPANGGAAATSDRRLGGGGGVSRVPARLPRQRPGGAGAGNGTAMAWQPPPCTSTYRRDDGWKETACPVCLSEFADGELIRLLPECMHYFHAACIDEWLRTRATCPLCRAAPAGDVSTA

SEQ ID NO: 18394 - protein, 137 aa, Oryza sativa
  Clone ID: TF_OSC28130j.C1.p1.fg
MVDLSGLEIFLAVVALIAAICAISWTVRCLIGRRFEVATGDPNGERQGLLNKEEVVIIDVAAATEARGDDVALCAICKGRLAVAVADGGGQPCRRLRPCGHVYHAECIGLWLQRGTTCPVCRADVVASRNEIVGAMA

SEQ ID NO: 18395 - protein, 212 aa, Oryza sativa
  Clone ID: TF_OSC400203j.C1.p24.fg
MGCPVCCYSELLLPKQLLHLLLLLGYIRRFLLWAFHAVGLGDLLDLGDEQQAVLQDHAREHRAPAQALPPQQQHRRAEFRTVPAMVIEEVLPVVRFDELVAAAPAVCGGGDCAVCLSGIGGGDEVRRLSNCRHVFHRGCLDRWMEHDDQRTCPLCRAPLIPDEMASALWGAAGVSDASDFDFSYFGAPLTPMPTPTLLRPHELLLTGLGGYQ

SEQ ID NO: 18396 - protein, 213 aa, Oryza sativa
  unsure (1)..(213): unsure at all Xaa locations
  Clone ID: TF_OSC400203j.C1.p25.gp
MGCPVCCYSELLLPKQLLHLLLLLGYIRRFLLWAFHAVGLGDLLDLGDEQQAVLQDHAREHRAPAQALPPQQQHRRAEFRTVPAMVIEEVLPVVRFDELVAAAPAVCGGGDCAVCLSGIGGGDEVRRLSNCRHVFHRGCLDRWMEHDDQRTCPLCRAPLIPDEMASALWGAAGVSDASDFDFSYFGAPLTPMPTPTLLRPHELLLTGLGGYQX

SEQ ID NO: 18397 - protein, 508 aa, Oryza sativa
  Clone ID: TF_OSC400099j.C1.p27.gm
MLAVVGAALLVVLYARLVSRVFRAARRRWRRRRRRRLLMIPGSPADDSFATFTTYDNYYHTFSPYGLDDAAIKSLPSAQYLKSSAMAARGGGGGGGADTAARDCAVCLLEFADGDELRALPLCAHAFHADCIDVWLRAHASCPLCRAAVALPPPVASPLRAARRVRPSLDDLLFFHPVPQPPHAAADPSAAPAEITPASPDHVGPRDDFLLKRSYSFGFERHLLAVEAPSTASPPWRYRLNIGGGGGGADGPNRGGRSSFWSKRWPSPFGGGGGAAAASRVFSFRSYRSAAAKSSPFSRRRGGTGPGGATAPGGGFFMSLASEPPSILAAARRASAAAAASSRLRCGDPEALLSPDRLSRATLQVTAPPREEGGHGLALLLWLPLRRPALPRRGLQGGLLAATALPGEKAQPTTRRMLPRRAKGRRSGVRLRCWWREQEESIVTRRKGLVGTDEDHSDTLIALQHPPVYTLGTDSTEDYLHFDVKDAPFEVHRIDRGGEVTYHGPGQA

SEQ ID NO: 18398 - protein, 388 aa, Oryza sativa
  Clone ID: TF_OSC900069j.C1.p6.gm
MLAVVGAALLVVLYARLVSRVFRAARRRWRRRRRRRLLMIPGSPADDSFATFTTYDNYYHTFSPYGLDDAAIKSLPSAQYLKSSAMAARGGGGGGGADTAARDCAVCLLEFADGDELRALPLCAHAFHADCIDVWLRAHASCPLCRAAVALPPPVASPLRAARRVRPSLDDLLFFHPVPQPPHAAADPLRRAGGDHPGKPGPQPPSILAAARRASAAAAASSRLRCGDPEALLSPDRLSRATLQVTAPPREEGGHGLALLLWLPLRRPALPRRGLQGGLLAATALPGEKAQPTTRRMLPRRAKGRRSGVRLRCWWREQEESIVTRRKGLVGTDEDHSDTLIALQHPPVYTLGTDSTEDYLHFDVKDAPFEVHRIDRGGEVTYHGPGQA

SEQ ID NO: 18399 - protein, 379 aa, Oryza sativa
  Clone ID: TF_OSC900395j.C1.p11.fg
MATPRSPSPRGDARLDSAPLLGGGGGGGGRRHGGALRRPSLRGAARFLRRSGRRAMREPSLLVREAAADQLEERQADWAYSRPVVALDLLWNLAFILVAAAVLALSREESPSMPLRLWIVGYAVQCVLHMACVAIEYRMRRGQSGESPMAADEETGTDGSSSSSDEDAGERAPRGRNGDYVRIAKHLESANTMFSFIWWIIGFYWVSAGGQVLTHDAPQLYWLCIVFLAFDVFFVVFCVALACIIGIAVCCCLPCIIAILYAVSDQEGASEDDIRQIPRYKFRRMDEPEKQSVNMTGSSGGIMIECGTNQPIEKVLAAEDAECCICLSAYDDGAELRELPCGHHFHCVCIDKWLHINATCPLCKFNVRKNSSSSGSEEV

SEQ ID NO: 18400 - protein, 370 aa, Oryza sativa
  Clone ID: TF_OSC400009j.C1.p30.fg
MSNPAAYYAAVARKQYFCYQCNRTVLLPASAAAAGALSCPECRGDFIEEVNVPAPAIIPFPFAFPPMMPTATSASAAAAAAASPTQSSSSSAATSPSSDLSAFLNSMLGPLNLRTDERMPGTTSAAGTATPEDEPDGFDAVTFFQNYLQNLMDGGANIQVLLDDASVGLAPGIGRVGGASFGDYFVGPGLEQLIEQLTENDPNRYGTPPAAKSALSTLPDVVVTDAMVAAADGAECAVCKEDFSPGEGAKQMPCKHIYHADCIMPWLDLHNSCPICRFELPTDDPDYEGRKKSNPQPTAGVDAGAASGSSTAAEEREESGESARLVERRFNVSLPWPFSGLGSQTPQQDGSNGGAGASGSKDGGASSDKK

SEQ ID NO: 18401 - protein, 714 aa, Oryza sativa
  Clone ID: TF_OSC401901j.C1.p1.fg
MSLGLNLCVYVPRTLDDGDSPSTGSSTAALVSPVASSSSAATSANTTPTAEQRVKGAGALMPTTPTPTSAGLRLSKSGSKSFKKTCAICLTTMKPGQGHALFTAECSHTFHFHCIAANVKHGSNNCPVCRTKWKELPFRGPLPGEFPQGSARINPVNGHQNGGQMTILRPLPRARSSGRLHHMTSLLPDTDRSIFNDDEPLDSLSEANEGSQQGCLRTVEIKTYPEFTEVPESTSERNFTVLVHLKAPLAQTLQTSSKLEDGNSLGTTRAPVDLITVLDVSGSMAGTKLALLKRAMGFVIQNLGSSDRLSVIAFSSSARRLFPLRRMTETGRQQSLQAVYSLTSNGGTNIAEGLRKGSKVIEDRQAKNPVCSIILLSDGQDTYTVSPTAGVHKAAPEYCSLLPYTSNGCQQVPVHVFGFGADHDSVSLHSISQTSGGTFSFIETEAAIQDAFAQCIGGLLSVVAQDLHVKVESLHPDVHFGSIRSGSYSSRLADDKRNGSIDVGDMYAEEERDFLMSVNVPPGYGETALLKVGCVYKDPLMKETINMADVQVKISRPAFVSVQSVSIEVDRQKNRLHAAEVMAEARLSAERGDLTHAVSLLEDCRRMIMGSTSGQSGDRLCQALDAELKEMQERMANRQRYEASGRAYVLSGLSSHSWQRATARGDSTDSESLIQAYQTSSMVDMLLRSQTMSRSSTPPQMRHVKSFPARPQPR

SEQ ID NO: 18402 - protein, 314 aa, Oryza sativa
  Clone ID: TF_OSC19766j.C1.p10.fg
MAAGTSSSSGGGSGPLVVSNGVLLAAVIFLFMVVVFVFLLYLYAKRYLGANPLLAPVSPSSRFLFLDASPFPRRGLPAAALRALPVTVYAKPAAARGEEALECAVCLSEVADGEKVRMLPKCDHGFHVECIDMWFHSHDTCPLCRAPVGPDAGGEGLPRVPRGGTRLAMDFPPCSPPNVLFWGTAHDDVANAGDRHPFHPPPPPPPLMAAPSTSSSASARRKESLVIDIPSRSAAAAAADSVTSSSASTPLPASRMADDMRSPVSARLRSLRRLLSRGKQAVVGPSFSPRGGGDIEQGLAGAPPKTPKTPPPAN

SEQ ID NO: 18403 - protein, 246 aa, Oryza sativa
  Clone ID: TF_OSC19766j.C1.p8.np
TSSSSGGGSGPLVVSNGVLLAAVIFLFMVVVFVFLLYLYAKRYRREPAARPRLALSRFLFLDASFPRRGLPAAALRALPVTVYAKPAAARGEEALECAVCLSEVADGEKVRMLPKCDHGFHVECIDMWFHSHDTCPLCRAPVGPDAGGEGLPRPGEEPGLPWTFPHSPPNVLFWGTAHDDVANAALCRRRRGGLRHVVLRLDAAAGEQDGGRMRSPVSARLRSLRRLLSRGKQAVVGPSFSPRGGG

SEQ ID NO: 18404 - protein, 226 aa, Oryza sativa
  Clone ID: TF_OSC23270j.C1.p1.fg
MFLSGISPAVHHDLQPGGRSPYDGDDGDRTLVVLLTFGIFFSFVILYLVAGLIWAVVITAAAVVLSFLYLRVRRRRAAVGGTAAAAAPNDVVFIVGAHQAARSTGSSGGGGDVAAAAIVSAIPAFEYKRVNGGGGEDGGAAAGSGWAQCVICLGLVQVGEVVRRLPACKHMFHVECIDAWLSSHSTCPICRADVVDELAAAAAGGRLSLSPYGTELIHMKFITEFL

SEQ ID NO: 18405 - protein, 304 aa, Oryza sativa
  Clone ID: TF_OSC400045j.C1.p24.fg
MRPPSSSATPGTGRVSAFTMRAVARMSRARWFIFLRRVYQYQNGPRSDLGSNPFNSPGWLALELGVIMAQMVVTTAVVATSPKERPAWPLRVWVAAYNVGNVLSLPLLYWRHRHSSSGARGGTLSDDPEMHGANDPLRNRSYLMNKARAFLELFFAMWFVMGNVWVFDARLGSFHRAPRLYALCIGLLAWNAVVYSLPFLLFLLLCCFVPAVGYALGYNMNSASVGRGASDEQLAALPQWRFKEPADAPRDRDHDDQECCICLAQYKEKEEVRQLPCTHMFHLKCVDRWLRIISSCPLCKQELS

SEQ ID NO: 18406 - protein, 267 aa, Oryza sativa
  Clone ID: TF_OSC400378j.C1.p8.fg
MLAAAAAIFITFVVCFYLFLCAKRYRGAAPTIGGDSGGGGRGRARFVFGGPGDGGCGGGRGLDEAAIAALPTKVVAAAAEGGDGGDPAADCAVCITELAAGESARVLPRCGHGFHVECVDMWLRSNSTCPLCRCAVIDEALPPPPAVRPPEADAESPNFPTNVLFFGSQDAVRTGGAAAATPPPPPPSSHHQQQPAFPPQPSAGPIAGVAAVVEAARIAALRRLLGCGGATPPPPPAPAQGDRDVEMGLPGGESSASRPATKPQPGS

SEQ ID NO: 18407 - protein, 195 aa, Oryza sativa
  Clone ID: TF_OSC405090j.C1.p3.fg
MLLVNLYSRLTASTGVGVGVDDDDDDGSGGYGVLDGACGGTLAVFCALAVSVVVWKACAFVAMAAALLAIGWRVVAPRRSVGRAGAGAPTPAECGLTAAAIDALPASEYERPRGGGGDPACSVCLEDVRGGETVRWLPACGHLYHAACIDAWLRSRTTCPLCRSDLSSRRGGTASGRPRPRLVTHESLLPPLPSV

SEQ ID NO: 18408 - protein, 160 aa, Oryza sativa
  unsure (1)..(160): unsure at all Xaa locations
  Clone ID: TF_OSC918j.C1.p2.np
SDDQISNLEYGGFERXGGGGGDGGRRELRRLDANMVIVLAALLCVVICSLGLSSLIRCALHCARGLSPSPAMATPAAASGLKKKELRRITVEVYGAKQAGVPDAECAICLGDFADGDKVRVLPRCHHGFHVGCIDTWLAAHTSCPTCRDSILSVHAGVTG

SEQ ID NO: 18409 - protein, 1001 aa, Oryza sativa
  Clone ID: TF_OSC412549j.C1.p5.fg
MSTGGNGGGVGVRRRRWNLYWCYVCRRALRVVVPSATSDVYCPRCFGRFLHEIDLPVPRVSPPAEDQFFQPPFLPYDGPRRWVLYTGGGGGGDYGGADVTARRRRLPSPPPAPGTRRQDGAGDGDPPPPAPAIDPGEYFAGPDLNALIDALTQDDRPGPPPAPESAIESLPTVHISPDHLPADGGSECPVCKEEFELGEAARELPCKHAYHSDCIVPWLRLHNSCPVCRQEVPPPPEPDGESPGIDGGCDDGVGGGGEPAEPPRPAMAGWDPIALLAIALRPDLNGWENSHGRSESEADDDEVAGGGVSPHLLKRTTTLTFWVLHPPIITGVHALTKPALDERCRWNRFGFFLFDEKIGMIARDTVLRFAVRLFVVIVVSSRSSSADDGGGDGGVDFIYQGFQHAANLTMDGSAKVLHGGALQLTNDSNRLVGHAFHAAPVRFLDDGAGGGGGGVVSSFSTAFVLDIVTVGSGGGHGLAFVIYLGVLGPRTNGNASDHVFAVEFDTVMDLEMNDTNGNHVGVDVNSLVSVVSEPVAYYAGDGSTKVPVQLESAQQIQAWIDYDGGSSILNVTVAPATVTERPRRPLISTKLDLLPIFKENMYVGFSSATGKLASSHYILAWSFRTNGVAQSIDLRRLPKVPRQSSPPPKLLIIKFAAVACAGTLTLIAAAMVAVLWLRRRAALADTLEEWELEHPQRIPYKELYKATKGFKESELLGAGGFGQVYRGVLRRRSGEAVAIKRISNGTRQGMREFVAEVASLGRMRHRNLRFAILKGVAHGLLYLHEEWEHVVVHRDVKANNVLLGAGDTGAARLGDFGLARLYEHGATPATTRVAGTLGYMAPELTFTSRATTATDVFSFGALLLEVACGRRPIEPAAAGEADGDVLLVRWVRDRALDGDGGGGDVLRAVDPRLEGCYDEEEARLVLWLGLMCSQARPEARPSMRQVCRYLDGEEMLQEDATPAAIFSGADSSDLFGGSFVVSMTSSSAGGTMSASSLQGGR

SEQ ID NO: 18410 - protein, 995 aa, Oryza sativa
  Clone ID: TF_OSC900289j.C1.p1.fg
MATPLADEGSIAAAVMPRSPSPPAAAAGSAAEAPMLIFVYFHKAIRAELERLHAAAVRLATERSGDVGELERRCRFLFSVYRHHCDAEDAVIFPALDIRVKNVAGTYSLEHKGENDLFAHLFSLLKLDVRNDDGLRRELASCTGAIQTFITQHMSKEEEQVFPLLIKKFSHEEQADLVWQFLCSIPVNMMAEFLPWLATSVSSDEHQDILNCLHKIVPDEKLLQQVVFAWIGGEAVKTISHDFCSPCSKSNVRCKDAIDQTDKYGCSHEHFKTGKRKRAESSYSQLVMHPIDEILCWHNAIRKELSDIVEETRRIQQSGDFSDISDFNVKLQFIADVCIFHSIAEDQVIFPAVNDQVSFEQEHAEEERRFNKFRCLIEQIQITGARSTAVDFYSELCSQADQIMEKIERHFKNEETKVLPQARIHFSSEKQRELLYKSLCVIPLKLLERVLPWFVSKLNDQDAEAFLQNMFLAESFRSLSLNYSAPSLYSSLFSWETDAAFSGPDNISRPIDTIFKFHKAIRKDLEFLDVESRKLIDGDESSLRQFIGRFRLLWGLYRAHSNAEDEIVFPALESKETLHNVSHSYTLDHKQEEELFKDISTILFELSQLHADLKHPLGGADAVGANHIHPYNRIDWSKKNNELLTKLQGMCKSIRVTLSNHVHREELELWPLFDKHFSVEEQDKIVGRIIGSTGAEVLQSMLPWVTSALSLDEQNNMLDTWRQVTKNTMFDEWLNEWWKRSPTSSGPSSDASHPEEDHFQEKFDQSEQMFKPGWKDIFRMNQSELEAEIRKVSRDSTLDPRRKAYLIQNLMTSRWIAAQQKSPQPQSEDRNGCTVLPGCCPSYRDPENQIFGCFVMIKLVTIQWKEHKCREKMLEMNCPICCDFLFTSSAAVKGLPCGHFMHSACFQAYTCSHYTCPICSKSLGDMTVYFGMLDGLLAAEELPEEYRDRCQSFQLPGPNSLENQEKPNQMGTKGVSSQGIGGMWGNKIVGTQIWK

SEQ ID NO: 18411 - protein, 96 aa, Oryza sativa
  Clone ID: TF_OSC410095j.C1.p1.fg
ELLDLGEAVGTQSRGLSQERISLLPVTKYKCGFFSRKKTRRERCVICQMEYRRGNLQMTLPCKHVYHASCVTRWLSINKVCPVCFAEVPGDEPKRQ

SEQ ID NO: 18412 - protein, 590 aa, Oryza sativa
  Clone ID: TF_OSC401506j.C1.p8.fg
MKFAKKYEKYMKGMDEELPGVGLKRLKKLLKKCRSDLQSHENDGSSAGRCPGHCSVCDGSFFPSLLNEMSAVIGCFNEKAKKLLELHLASVTIFVRINVSIIVLVFGFKTVLNGYINNYIHYSKQGQEFKAQAQSLHIEILQSPWLCELMAFYMNLRRSKKNNGAMELFGDCSLVFDDDKPTISCNLFDSMRVDISLTCSICLDTVFDPVALSCGHIYCYLCSCSAASVTIVDGLKSAERKSKCPLCRQAGVFPNAVHLDELNMLLSYSCPEYWEKRIQMERVERVRLAKEHWESQCRAFLGIFLETGPKARMFEEILIPREAAAVRSSPKQPQGDHIELHQKRHGRRLDYEERKRKRAAREVHKRSRDARQLLGAKGKRFAKKRYAEKAQMKKTLKMHDESTSRQKVDDVQEGALPPYLLDRDQTQRAKVLSNTIKQKRMEKAGKWEVPLPKVRPVAEEEMFKVLRTGKRKTKQWKRMVTKATFVGPGFTRKPPKYERFIRPTGLRFTKAHVTHPELKCTFNLDIISVKKNPNGQMYSTLGVLTRGTIIEVNVSELGLVTPAGKVVWGKYAQVTNNPENDGCINAVLLV

SEQ ID NO: 18413 - protein, 150 aa, Oryza sativa
  Clone ID: TF_OSC406125j.C1.p5.fg
MRLEMSPDNLLFFCSVAASAAAGFCLFSLYRRLARRCHHHHAAPAGGSEEEEEERRRLTAVASGLPAFMYDRLVRHSGKGASWTECAVCLGVIHVGAMVKLLPACAHIYHVDCIDLWLSSHPTCPLCRCRVDHPGQGQETARQLAQLSPA

SEQ ID NO: 18414 - protein, 197 aa, Oryza sativa
  Clone ID: TF_OSC401779j.C1.p7.fg
MTRRANHTASPSVNATTAAAAAAMITATPSPPPRLPLPNPGNADAGAGAWGPYASSRAFFSNVATILIILACVSLLAFCLHAAARCLIRCLARRRDSGAPALAPALAQAQPPKPSSDDGANTGSSGAASAASGVAMVGGWAEAECAICLSELADGGGERVRVLPACGHGFHGACVDGWLAARASCPTCRAPSRAGEP

SEQ ID NO: 18415 - protein, 233 aa, Oryza sativa
  Clone ID: TF_OSC900008j.C1.p12.fg
MGSVLCCLADDGRPVCCFRLPWPIFNAAHNHNHNSGSIARPRADTRVAPDQGRISLTAPSQHDSMDTFRCPPRPLPWDDPRFSHHTEHHPLVGGHDKASTTFHKSGSLGESKNADSISNSKAVKDDGPSTAVKDDGSSVKHHSDGLHIGKEQVHDLFDFEDDCPICLEEYDYENPKMTLQCNHNFHLCCIYEWMERSQACPVCSKKKLVACVNPHITFRLDVTDARLSDCICF

SEQ ID NO: 18416 - protein, 385 aa, Oryza sativa
  Clone ID: TF_OSC17452j.C1.p2.gm
MGAVSMSTTTRLPLVAALLSAAACVAAAQPATAEAAPETPGVGIKVSFRPRGGGGGGVFTMIFSLTFLLLMYAKFCHPSSPVAAPAPTVVPAAAADDGVAKPVIESLPFFRFAALRGARQGLECAVCLARFDDADLLRLLPRCRHAFHLDCVDRWLESKASCPLCRARVDAEDAALGLKYASSARFVPAGGASESERFDGDQDLLGIFVERVPSSRMEPAAAAHCPDLDRYKHRIVVSDAVFKSRWSEINSSDLIALDTELLRSMETMEVEMEMELYKETEEEETDHDHQRKTLLAASGGRSSVDAAARARMISSSSSSGSVRSMSEMVSLPRLRAAMRERLAHEDRWVPIARRTARWFAGRESRHDEAAPVVDSPPASHSNSLV

SEQ ID NO: 18417 - protein, 373 aa, Oryza sativa
  Clone ID: TF_OSC416024j.C1.p1.fg
MAKPFPDPPKPPVPEPPKPGSDGACYDCPSPPPPPPPHSRDHRRVVIALATTASLLFAILLAFSVYCFIRRRRQQRARREALLAPPPSDAAGGGGAPGAPVAAGDGAVGGAGEGEGEGEVLHHAWHIRTVGLDEAAIESIALARYRAGAGMLGATDCPVCLGEFRDGELLRLLPKCGHAFHVPCIDAWLRAHVNCPLCRAHVLHPADADADAGDGERVPPPAGANGGGGGGGGAATDQASSPTDQTADQENPGQQQQGEQHELRVQIDRRDQPSSPEPPRRSPDPRSAQSFRRVASMGSRSPPAPSEDAPEDEQTTTQSSKEKQGSGGDSACCGKAPSGSGRLHHMRRSFSGGGGRRSLPSRHGRTSSSMLPL

SEQ ID NO: 18418 - protein, 348 aa, Oryza sativa
  Clone ID: TF_OSC900112j.C1.p8.fg
MSSPPSDPSSGGGDGGSAVPGTASSNFTLLYIIIAVLVGVILYMAIRYGRSVMSEWRQLQAGGGGGEPRAALLGLSSDDIDALPTFTYRARGAAASPLVGGGGRRGGGSGKGKGATTVVVECVVCLQELADGDVVRVLPACRHFFHGGCIDLWLRAHSTCPVCRAHPEPDGVRLSDVVAVSPPLPQLLRCGLFSYWPTAASRALADILARSPLRGNTTSTTTTTTTGGPITSTSSKSPSSPVQAAIINYVQASRSPSPTAYHSLNERWPSSPTPVVVVRSKSPSPSSPPIGGLSLQTTTAAAARGVGVVEGVDAGATTSASASAPTQVVALSREGGGSRSKSPSPVPH

SEQ ID NO: 18419 - protein, 320 aa, Oryza sativa
  Clone ID: TF_OSC900058j.C1.p15.fg
MAAGATLSVLLLVAGVVLMLVLHVVVVFWALRRGVFLRGAFRVEERRDQRAAGLTPDEIAVLPCHERKEDGGGGGGGECAVCLEAFQAGDRCRVLPRCEHGFHARCVDSWLRQSRVCPICRAEVEVSGYAGKPAAAVAEASQATTLEIVTERLGGTERLEVSNVCEVHPLDSVDRMKGDNSNVFLVAGLSLVVVVHVLVLLWALWWGYGRSRLALARARVVGQHDVARGGLSAEQVGELPCHVVKEGAGECAVCLEAFRAGDRRRVLPRCERGFHAQCVDSWLRVSRLCPICRAEVAASRGKEGDAPVAEAASLEIVAER

SEQ ID NO: 18420 - protein, 241 aa, Oryza sativa
  Clone ID: TF_OSC401250j.C1.p3.np
LSPGSHVGPRRGVLGWEMAMRPHTPGRIVAWKRGRGEKLRYGRVPEVRPSAGQALYRFPVETSAGETCMLLSSQVYSFKSVSMADLSPAPLQLDSGRAAGGQQGFSPINTGTEAADDVATGLEYGKVSSTELVQAVHDMLSAAGVRMDATKETLLQTTLSLQDQLKESQVALLVEQEKAEAAVREADVAKSAWSCRVCLNAEVNMTIIPCGHVLCNRCSSSVSRCPFCRTQVSRMMKIFRP

SEQ ID NO: 18421 - protein, 4737 aa, Oryza sativa
  Clone ID: TF_OSC900265j.C1.p8.fg
MDPGGMLLEDFGQRVDLTRRIREVLANYPEGTTALRELIQNADDAGASRVRLCLDRRAHGAGSLLAPALAQWQGPALLAYNDAVFTDEDFASISRIGDSRKVSQVWKTGRFGVGFNSVYHLTDLPSFVSGKYIVLFDPQGAYLPNVSAANPGKRIDFVSSSAITLYNDQLSPYRAFGCDMKAPFQGTLFRFPLRTAEQASLSRLSRQVYTEDDILSLFAQLYEEAVYNLLFLKNVLSLEMYVWESGMSEPKIVYSCSIGSQHDNLRWHRQALVRFSGTAAESSEQKIDSFSMDFVSKSFLGEKFEKKSYTYFIVQGMASALSKIGIFATTAAKDYDLHLLPWASVAACISNVGPEEVILRQGRAFCFLPLPVKTGLSVHVNGYFEVSSNRRDIWYGADMDRGGKLRSDWNMLLLEDVVAPLFRELLLQLRTVLDSKISYYSLWPTGLYEEPWSILVEQICKFIYTSPVFHSEIKGGTWITPAESLLHDEGFSRSDDLSEALVMLGMPVVRLPGAIADMFPKFHSKYMLKIVTPATVRHFLKDFENLGTLEKSQKLILLEYCLADLDSGNIGKCMNGLPLIPLANKQFGIFSGISQENQYYVCDSIEYELLSAVSDRIIDRSIPPVILDKLYQIASSSQVNISLIEGRTFLQFFPWLFPPGWKCRNQVPWDPESGGSSPTAAWFKLFWQYIGDCSYDLDLFSDWPILPSTSGHLYRASTVSKLINTGSLSNLMKELLTKLGCKILDTKYLSTCQHLSNYVYDGDASGVLHSIFGVASLEGVDLQALFQRITPAEKNELYQFVLDAKWYLGPHLSDMSINLCKKLPIFRVFDGGSPSSYGFSDLSTSRKYLPPLGVAEQLLNDDFVFCISPSDEDIIMRYYGIERMPKSNFYQRYVLNRLDELQTEFRDSVLLTILQDLPQLSLENPRFKEALKVLRFVPTTNGVLKSPQSLYDPRVEELYALLQESDCFPHGLFQNPEVLDMLLCLGLRTSVSIDTIIQSARHIDSLVHKDHHKAHSRGKVLLSYLEVHAHKWYVHKPFDGRKKVNMLAKVTTVLRSRDTSWEADLEKFWSDLRMICWCPVLVTAPSPALPWPSVSSMVAPPKQVRMQDDMWIVSASSRILDGECTSSALSYSLGWLSPPSGSVIAAQLLELGKNNEIVTDQVLRQELALVMPKIYSLLSNLIGSDEMDIVKVVLEGCRWIWVGDGFAKTDEVVLTGHLHLAPYIRVIPIDLAVFKDLFLELGIKEQLDPVDYASILTRMATRKASTSLQAEELRTAVLVVQHLAEFRFQDHQTQIYLPDSSARLCLSSELVFNDAPWLLDFDEDITGNAPSIAFNSKKYVHNFVHGNISNDVAERLGVRSLRRLLLAESSDSMNLSLSGVAEAFGQHEDLTTRLKHIVEMYADGPGILFELVQNAEDAKASEVVFLLDKTHYGTSSILSPEMAEWQGPALYCFNDSIFSPQDLYAISRIGQDSKLEKPFAIGRFGLGFNCVYHFTDIPGFVSGENIVMFDPHASYLPGISPSHPGLRIKFVGRRILEQFPDQFTPFLHFGCNLQQPFPGTLFRFPLRNEAAASRSQIKREQYTPQDVEMLFSSFSEVVSEALLFLRNVKNITLYVKESDSQEMKLVHRVSKHNSYEMAKEPHALNTMLAFINGNQPSGMDRNQFFNKLNKTKDSDLPWSSQKVSIFEQSPAACLVHSWILTESIGGGHARKLSTASGSKSHFFVPWASVAAYLHSVTVDNTKELSGEAEVNLDDLVLKQLSLGSSKDRKFFEGRAFCFLPLPINTSMPVHVNAYFELSSNRRDIWIGNDMAGGGRVRSEWNLALLEDVAAPAYGHLLAAIAQELGPSDLFLSFWPTAVGVEPWSSMVRKLYVSIAELGLHVLYTKARGGHWVSTRQAIFPDFSFSKAIELAEVLSEAGLPVVSVSKQIVDSFLNVYPSVHLLNPHLLRNLLIRRKRGFRNREEAILVLEYCLSDMGDPSFPDKLQGLALLPLANGSFTTFTNRGEGERVFFSSQMEFELLKDSIPHLVVDNSLPDAILKKLYDIACSARSNIYLFTCNFLLELLPRILPPEWQHAKQLFWSPGHQGQPSVEWMVSLWNFLRHSCEDLSIFAKWPILPLVDGKLMQLGNASNVIIDDGWSENMYSLLQKLGCFFLRSDLQIEHPQLANFVQEATAVGVLNAVQSVASNFQDIKELFMGISLAETHELRSFIFQSKWFSGNHMNSSHMNTIRNLPIFESYKSRELVSLTSPRKWLKPEGVHEDLLNESFIRTESAKEKSILVSYFAIREPQKAEFYKDHVLPRISEFLSQPAVVSAILRDVKLLAENDTSVRAALHETPFVLAASGAWVHPSRLYDPRVPELHKLLHKETFFPSEKFMTTEVIELLASFGLKSKLGFSTLLDIARSVSLQQDDALEHGKRLLTYLNFLEFKASNMEDKKTFHGDDNQEASKTDGSFEAENDGDGYDPEETILSLFSNFDHDLPEDEFWSELKNISWCPVHVAPLLKGLPWFISEDHVAPPITTRPKSQMWLVSSKMRILSADSCSMYLQRKLGWLDPPNANILSSQLVEISKSYDELKMFSEDSTNDAVPQKEIQLIYSKLQDIIDTADTNILKRNLDGHPWVYIGDRFVPPQALAFDSPVKYHPYLYAVPSELSEYKRLLSVLGVKQTFDAADYLNVLQCLQSDAKGEPLSTEQLSFVHRVLEAFVDCYPDNQAPDMMVNSLLIPDSFGVLTPARNLVYNDAPWMNADPTSKSFVHLSIGNDLANRLGVRSLRGSSLLDNELMTDLPCMEYAKISELLALYGESDFLLFDLIELADHCNAKKVHLIYDKRDHPKQSLLQQSLGDFQGSSLTVVFEGTIMSREEVCSLQLPPPWKLKGNILNYGLGLLSSYFVCDTLSILSGGYFYIFDPLGLTGGTTSTATSSARFFSLIGNDLVERFHDQFTPMRVTQEASLSSANSTVIRMPLSSKCLKELEAGCNRVKHIFDRFTQNPSSTLLFLRSIIQVSLSTWEGGASQPTLNYSVLVDPSVATLRNPFSEKKWRKFQLSRIFASTSAAIKMQAIDVHVIDNGCNYIDKWFVALCLGSGQTRNMALDRRYLAYNLTPVAGVAAHIARNGVSTNIHASSCILSPLPLSGSISMPVTTLGHFIVRHNGGRYIFGSSHDKSLSDLEMHKNKLVEAWNKELMLCVRDSYVEMVLEFQKLRKDPLSSAIESRSAHSVSTILQAYGDRVYSFWPRSKQHPASLTGYGSTVTNVNSPRASKADWQSLVEQVIRPFYVRLADLPVWQLYGGNLVKVDEGMFLSHSGSGDDDNLPSASVCSFIKEHYPVFSVPWELVREIQAVGVNVREIRPKMVRDLLKASSSILLRSIETYMDVLEYCFSDMDPYRFSDLHIHEESRVSNQQSEIMNSSISNSMPSSSSSVSYHRNTQRQGASGGDALEIVTYFGKALYDFGRGVVEDISKTGGSASHRTQAAENNVLSSIITELKGVPFPTSTKCLTRLGSTELWIASEEQQLLMRPFLHHFIHHQCLQKPFLELLLTTQVIHRPLKLRSFSPHLLSGHLKHIFDERWVHLAVEKKSPWIPWDNNANSSTAGPSPEWIRLFWKIFSSMSGDLSLLSDWPLIPAYLDRPVLCRVKECHLIFVPPADDSNPDSGDSAARVVDTSAHPGDETGEAEQNSILDTAFQSMNSAFPWLPALLYKLNIPVFDLSFPECGTICNLFPSRDRTLGQIIASKLVAIKNGGHLPLPLSLSSEDCDKLFALFVSEFRLSSNHLYQREELDVLRELPMYKTVTGTYTSLSGSDHCILSPTAFFHPADSRCLSSTANADLFLQALGVEQLSDQEILVRFALPGFGNKSAQEQEDILAYLYSNWKDLQLNSSVVNTLKETNFLTSANEFCTELFKPRELLDPSDALLTSVFSGERHKFPAERFLSDGWLVILRKAGLRTSTEADMIVQCATKIESMGNDIVSSSEDPSDFEADFSGSKNEIPFELWSLAESVVNVILANFATLYDSSFCEKIGKIAFIPAEKGFPSIGGKRGGRRVLASYSESILSKDWPLAWSSAPILTNQAIIPPEYSWGAFRLRSPPAFTTVLKHLQSVGRGNGEDTLAHWPTSSGIMTVEDAFLRILQYLDKIWGTISSSEKNELQTLAFIPVANGTRLVTVKSLFARLTINMSPFAFELPSLYLPFVTILREIGMQETLTNTYARELLLDIQKACGYQRLNPNELRAVMEILDFMCSGVNQATDGSEDIFDSVIPDDGCRLVSAVSCVYIDPYGSHLLSNIDTSRIRFAHPDLPQNICNTLGIKKLSDVIVEELDGKEELKMVNSICSVTLDKIKEKLLSKSLQDALRIVMIGVSNHFPSFEALNLAQIESVLKDISQNLQFVQRLHTRFLLLPMLQDVTRSSQRPPFPEWSSNGKHRSVCFVNKSTGQILVAEPPNFLTIHDAIAIVVSYRLGAPVILPIASVFACPDGTEKEVLKILRLGTDIGVSKREGRYNGSLGAELLSQDARQVQFLPLRPFYSGEIVAWKTGKEGEKLRYGRVPEDVRPSAGQALYRFPVETSAGETCMLLSSQVYSFKSVSMADLSSAPLQLDSGRAAGGQQGFSPINTGTEAADDVATGLEYGKVSSTELVQAVHDMLSAAGVRMDATKETLLQTTLSLQDQLKESQVALLVEQEKAEAAVREADVAKSAWSCRVCLNAEVNMTIIPCGHVLCNRCSSSVSRCPFCRTQVSRMMKIFRP

SEQ ID NO: 18422 - protein, 72 aa, Oryza sativa
  unsure (1)..(72): unsure at all Xaa locations
  Clone ID: TF_OSC400770j.C1.p13.gp
DLICYLVPFKNKCSFFSRKKNDEXCVICKSTYKSRQKLIRLPCSHCYHADCITRWLKINKACPVCNEEVFGX

SEQ ID NO: 18423 - protein, 481 aa, Oryza sativa
  Clone ID: TF_OSC408415j.C1.p6.fg
MPAVEGMRDVVATVSGYHGDERHRLVRLIAETGASYVGAMSRSITHLVCWRLEGKKYDIARRLRTRVVSHRWFEDCLKEGRRLPEKPYMLESGEEAGPVPELPTFPRSRSKRNASMEDRCLKELPDDFCNTSYATDVLVVADSGSDCNHQRWSDSSLLKENFVGDRDNSKIGATHVKERRKRLKHAQNSTNEDALDAEDNISRLMARQGRYESSYTSSRSASNQKGDLLKLLHNDDASMMRKRNSLMKKETRTKLAGYLIESCENGSLTDSFDEPQMSDTPPTEDRRKIRKTRLRQSTLDSIYDYGEASEHDPEKSEDQENFELGESSRSFQSSDSSRQEPAFCTEKTNQGSIDIAADDDKGDDEKATLEEPTSCQGQAELSCVICWTDFSSTRGILPCGHRFCYSCIQEWADSLSSRGKVSTCPLCKTSFAWISKIDEAGTSDQKIYSQTIPCSTSTDTFIFDDRVYGLPESPVDVMKKD

SEQ ID NO: 18424 - protein, 211 aa, Oryza sativa
  Clone ID: TF_OSC405088j.C1.p1.fg
MDWFVRCYMLAIANGVCIGGAAMIVYGIVQVSRTGGDAGSLVVLSLFLALWVAVGSCVYASFCGAFFPWASLRRPLAPVRDALSRCARALLPRRNGGGGDGLPSHLRDGVQPRETPTVRGGGGARVATADDIPAYEQPPAGEGEGGAAAAPECAVCLGEVEKGEMAKRLPACLHVFHQRCIDAWLRGNSTCPVCRRNAFATAAPPLPAQMV

SEQ ID NO: 18425 - protein, 45 aa, Oryza sativa
  unsure (1)..(45): unsure at all Xaa locations
  Clone ID: TF_OSC900281j.C1.p9.gp
QEEYVDGDDLGTLDCGHDFHVGCVRQWLVVKNTCPICKNTALKSX

SEQ ID NO: 18426 - protein, 60 aa, Oryza sativa
  Clone ID: TF_OSC9137j.C1.p1.gm
EAQVSEARESDCAVCFEGFDQGEKLTRMPCSHCFHATCILDWLSLSHLCPLCRFPMPTGQ

SEQ ID NO: 18427 - protein, 192 aa, Oryza sativa
  Clone ID: TF_OSC423581j.C1.p10.fg
MTKPQLACLRRSAYVTSRQSIPTPRSQLMGAGAGDWPVFVDGGGSSYKTSWSGAAAVIVCLCAVAAVFLIMAGITQLCKRVFPAAPPAPPPQRRRDDDDDDGIVVAVGIDEATLQALPLVLYGEARTAQTSCAVCLESYGGGDVLRALPECGHLFHRDCIFTWLRRRPTCPVCRAPPSPAPPADVLGLQLSV

SEQ ID NO: 18428 - protein, 210 aa, Oryza sativa
  Clone ID: TF_OSC900408j.C1.p20.fg
MLGSGLNLVTTVIGFGMSATFIVFVCARLICGRAARADAEADAAEGRVAAARAMAAGPAPFDFDVEFRATDLDRTIEHTRSGLEPFVVAAIPTMKYSYEAFQSKDDAQCSICLGEYNEKEILRIMPKCRHNFHLSCIDVWLQKQTTCPICRISLKDLPSGKPAESPVRSLPQLFSHPESSKRRAFFQQQGSTYTALAQNCKEFVYDRTGF

SEQ ID NO: 18429 - protein, 411 aa, Oryza sativa
  Clone ID: TF_OSC400887j.C1.p6.fg
MALYSTDSKKVGFLSFLNFFHNSTAFSNLIGCCLFILPSYLVGHYIEHHHLVSPFIPENQYICCISSIIKPGLSSSVAHLLVCLSSCLQQTMDADRDPIFPVQQMPSLLFPPPPPRPLALDSTSSASSSFVPHHPSITSFPILVLTVLGILTTSVLLLTYYIFVIRCCLNWNSSSSSDTRTAGLISRRRRGAASSSLPAVAEPRGLEEAAIQSLPAFRYRKAIKDTTADSSECAVCISEFQEEERVRLLPSCLHVFHVDCIDTWLQGNANCPLCRAAIATNDSQLPLDQFVRPEVVVIQVITGAEEEGAQAPQQEANTAASDPAVDATSTNQQVSSKKTKNQNAWHVSISKGDECIAVRRDRNVLPLRRSFSMDSLGGAGEVHLQIQNILQRSTHFHRDISDSSSSSTGTL

SEQ ID NO: 18430 - protein, 386 aa, Oryza sativa
  Clone ID: TF_OSC415629j.C1.p5.fg
MASSSPSSSSSPPSAAGASSYWCYSCDRFVRAPAPHDDSAVACPDCGGGFLEEMSAPPPRAAYLRRPRAHHANDLRLRRTRRAAAAAAAGDRSPFNPVIVLRRSPAAAGDDDSLAAATSFELFYDDGAGSGLRPLPETMSDFLMGSGFERLLDQLTQIEAGGLARARENPPASKASVESMPTVTIAASHVGADSHCAVCKEPFELGDEAREMPCSHIYHQDCILPWLALRNSCPVCRHEMPTDAARPRPSNAGTEEETVGLTIWRLPGGGFAVGRFAGGRRPEERELPVVYTEMDGGFNNGGAPRRISWGSRQSRSTERSAIRRIFRNVFSCFGRSHSSNSQASSSHSRPELNDASDRSAVFSHGSRSRSTSWRLEDGHADAMVQR

SEQ ID NO: 18431 - protein, 216 aa, Oryza sativa
  Clone ID: TF_OSC24360j.C1.p1.fg
MTVYFFAKEELNCNLTAVKEDLIKPVTVSFKEGLGQKFRQPSGTGINFSVFEDSELLKQGDMDVYPLAVKAETTMPVDQKLEGEDQKMKTPNSQITQALFEKKESGDYQVRVASQILWVNGTRYELQEIYGIGNSVEGDADANDPGKECVICLSEPRDTTVLPCRHMCMCSECAKVLRYQTTRCPICRQPVERLLEIKVNNKAEEQQQPSPDSPIK

SEQ ID NO: 18432 - protein, 240 aa, Oryza sativa
  Clone ID: TF_OSC900028j.C1.p10.fg
MTVYFFAKEELNCNLTAVKEDLIKPVTVSFKEGLGQKFRQPSGTGINFSVFEDSELLKQGDMDVYPLAVKAETTMPVDQKLEGEDQKMKTPNSQITQALFEKKESGDYQVRVASQILWVNGTRYELQEIYGIGNSVEGDADANDPGKECVICLSEPRDTTVLPCRHMCMCSECAKVLRYQTTRCPICRQPVERLLEIKVNNKAEEQQQPSPDSPIKVNSKAEEHQQQPSQSLPIPHREEV

SEQ ID NO: 18433 - protein, 306 aa, Oryza sativa
  Clone ID: TF_OSC422248j.C1.p9.fg
MGRSFRDSLKVLEADIQHANSLDTCHQIYCLSGQSYLLWPCSAAEFRREYDGACLQMRMSYCPAAHFFLFLVQWTDCNLAGALGLLRILIYKVYADGTTTMSAHERKASIREFYAVIFPSLMQLHEGINEVEDKKQKAICIERYRRRDEDQKMVISEIDDNIEEECGICMEINGKVVLPTCSHAMCIKCYRDWRSRSQSCPFCRDSLKRVNSADLWIYTDNRDIVDIATVRKENLRRLFMYIDKLPTVIPETVFDVYDSHCCRNCGALGVHAAPLVEAWVTGLSFRTLQRAPGMVQLQSENACRSA

SEQ ID NO: 18434 - protein, 290 aa, Oryza sativa
  Clone ID: TF_OSC400555j.C1.p39.fg
MASPPPYDNPTAGFPIAIVIAIGFMVTSLILASYYFLVVRCWLRGTGGGGAAGAGLLHRSRRESAAERVAAVFFTDYEAEVGGGLDPDVVAALPVVKYRRAASGKSASPQECAVCLSEFVRDERLKLLPSCSHAFHIDCIDTWLHHNVSCPLCRTVVTGGAIGLLVRDDQYDASSRELAAGERRIDAAARMGHGISSCRFPKTGAEQEPIRRSFSMDCFLGDLGRKPPPPPPKDPAGSEAGPSHPDAAGSSSIVGTAGAGETSGRFRRLLSSFGLGRSSRSTVLPIHLDP

SEQ ID NO: 18435 - protein, 522 aa, Oryza sativa
  Clone ID: TF_OSC413563j.C1.p5.fg
MVWTHQVASPENQVQPESFYHGGAGSNLSNLSVQVAVGVPGNTDFRSHYESINLQHQHVQNPYPHVGVASSSVFPSTMYNPCISTTAVDRYVPPIQSFGLGNPLLLPLYHQLAQGSMDENGSSGNFCDSVREFIKRKNALLVGGHHFVNSFASSSSSAYVPPNPLHRSWNASFEANILPSTGVSNPPEYSSADSLNNSNSMASHPELVHHGNYVFPAGHMSQYNAWIAQASRTGGVPQWEHGNAAANPPGGFVHSGTIDMPNGGLQGYQAGPFANYYGPLPHFHQNPLNSMQHPALFNHIQMQVPHQHCLSNNLLHHPSGNGLPLDPRILAISSNSGHTFGPTAQPSLANQVNAGSSRIQPYEFLFFKLDNTKFKGYQNLVEKYHLILFLNAPFVDLSRLYEAGVIDEHRDMRLDVDSMTYEELVALEERIGNVNSGFTESYIEENLKSSSYVPDADCMPDQSSVEKDACIICQEEYEAKELVGTLGCGHKYHAMCIKGWLMVKNLCPICKTTALPADRRNG

SEQ ID NO: 18436 - protein, 185 aa, Oryza sativa
  Clone ID: TF_OSC401369j.C1.p3.fg
MNTPNSWLFADNSKYSTRARLLFMGLSFSIGILSFLVYLAIWYTCTRRRRSRQLRGGGSASADQEAPEANSHGMSAAAIAALPTFGYEASAAAAAALDCAVCLGQVDAGEKVRQLPKCGHLFHAECVDAWLRAHSTCPMCRAAVEGPATAAIAKKASSGGGATDTPPVVAPAPPAAAEALPLPPV

SEQ ID NO: 18437 - protein, 953 aa, Oryza sativa
  Clone ID: TF_OSC401238j.C1.p36.gm
MRVELEMDCAMVATRLTSKVQDRSQWSFQIREASASNGNSSDEWLAPSFNRTAPASLAPSPCRRGGAMLRDRAFDAGYKDDVFVCSSLLHLYARWGAMGDAVKVFVRMPRRDRVTWSTMVAGFVSAGQPLDAIQMYRRMREDGVKGDEVVMIGVIQACTAARNVRMGASVHGHLLRHGMRMDVVTATSLVDMYAKNGLLDVACRVFGLMVHRNDVSWSAMISGFAQNGQSDEALRLFRNMQASGIQPDSGALVSALLACSNIGFLKLGRSVHGFIVRRFDFNCILGTAAIDMYSKCGSLASAQMLFNMISDRDLILWNAMIACCGAHGRGQDALTLFQEMNETGMRPDHATFASLLSALSHSGLVEEGKLWFGRMVNHFKITPAEKHYVCLVDLLARSGLVEEASDLLTSMKAEPTVAIWVALLSGCLNNKKLELGESIADNILELQPDDVGVLALVSNLYAATKKWDKVRQVRKLMKDSGSKKMPGCSSIEIRGTRHVFVMEDQSHPQREEIVSKVAKLDLEMRKMGYIPRTEFVYHDLEEEVKEQQLSYHSERLAIAFGLLNTGPGTRLVIIKNLRVCGDCHDAIKYISKIADREIVVRDAKRFHHFKDGVCSCRDYWLPRTSMARGCVLLYVYPTDPPRRGPSEEVQPRKAATSVRPSRGTRRRGSGAVPVAFAIPGRGRHLSRRKRPGRWRQRLLLPTRWGARVADDHPRPLHCTCPMWEQHPAWPVRNATPLRCRRHPRRLLCALICVVGLAAVARCARNRRNSGGAGAGAGSASPSHSPAHAGHFGGGGSGGGGVTTTTAATTAAKGLKKKALKALPKLAYADAVAAAAAARGTVVGEEEEGKVEVLAECAICLSEFGEREEVRVMPQCGHGFHVACVDTWLRSNSSCPSCRRPIVLDDPSPPKRCRKCEAIVLEAVVAASSSSSSSAATATGSGGGGGGGGGRFLP

SEQ ID NO: 18438 - protein, 213 aa, Oryza sativa
  Clone ID: TF_OSC405088j.C1.p2.fg
MECCFRVYGLAIANAVSIGGTSLLVYQLVRLARTPGSKGGVVALAIFLVFWVSINAVAYSVFCGMLFPWSALRRCLAPLPSAARWLLCLPCRCARRRRRRPATSTSSSASALPPHMYVLEREPPVRWGARVATADDIPAYEQPAASEGGAAAAAAECAVCLGEVEKGEMVKRLPVCLHMFHRRCIDPWLRDHSTCPVCRCDAFAAPPLPAQMV

SEQ ID NO: 18439 - protein, 238 aa, Oryza sativa
  unsure (1)..(238): unsure at all Xaa locations
  Clone ID: TF_OSC400261j.C1.p18.np
PRVSSPPASAPAPSPASSSPDAAGDVWAKLVPSDSVFPEVELAEDDAVVCSRVTPDGGGEVVAWCKIRRGGDVSAATIWNLSLDAIIVDGRVIQQAVDIKPGSEIVPGPQKDGYLLYTFDITGLNRTKIISIVLGIENAKCSICLNLWDDVVTVASCLHNFCNGCFFEWLRRSSANSRDKSXSAACPQCRTTVQLVGGNHFLHNIEEAILXVFSSLQRSDEEIALLESYAPVKTNIVI

SEQ ID NO: 18440 - protein, 213 aa, Oryza sativa
  Clone ID: TF_OSC900165j.C1.p12.fg
MSLTNAPSSMVSIVTPVTDRDSGRRVAGVPPVLVGASVSSAPELRGRAYLVHHVFYEDGSASADGGGGVAPASRASIAALREVEEEDDDGEEASDCAICLDDGEESRETCGSGRRKEIPCGHRFHGECVERWLGIHGSCPLCRHEMPPATAAEAEEEEVVVAMVHGERVVMRGRRVVLSVLVMGRAHDDGEGPEQRGTDPIPPLPRVLIDDVD

SEQ ID NO: 18441 - protein, 220 aa, Oryza sativa
  Clone ID: TF_OSC14849j.C1.p7.fg
MDDDGGAGRDGILAFAHQLARQAAFLLQASNDLLASLLQSTSRGGGGADILSFANQLARQAGAFLQDSNDILASLLQSTSRGASAGAAAASDEAIQALKDVGGGDVDGGGQKLDCAICLNHDDPSASAAAGWKEMPCGHRFHGGCLEKWLRMHGTCPMCRHQMPAAEVVEGAASEVTTSEPLLLIARVRRSGDGGNEEEHYHYYLYEIRVQYSTNVEINP

SEQ ID NO: 18442 - protein, 181 aa, Oryza sativa
  Clone ID: TF_OSC400505j.C1.p10.fg
MEILVSALLLLLVPPLSALLAVAAPSLAWPSGSSSVRKLIAKKVAPEQAARDELLRVARYSSASAAAAASAVQQPGGSESSRPAAAAADDGGRPDQCAVCLSGIEEGDEVRELRCRHLFHRGCLDRWWLSARPPATCPLCRCRLLQSPSAAADDGDGDGEEDSDSDMVMFMAYLRSSSTWL

SEQ ID NO: 18443 - protein, 349 aa, Oryza sativa
  Clone ID: TF_OSC2013j.C1.p1.fg
MGRRARCLCLLLLLLLVVGGGFHVANAQASPAPPQTGTRAVNRAVSTVITVVIGVFFVLVFVCVIVNQCCDCDSSAGAGAGQGQSSAARRRRGLDPAAVAAIPVVPYAEVRKHRSGGGGALECAVCLTVFDDGDDLRLLPQCSHAFHPDCIDPWLEGHVTCPLCRANLEKQPAPSPPAVEFSSSPAAAAAAAEESRTPEAAAVRVEEVAEASDEEETRRREEEAVELESLRAVRRAARMPRSNSTGHSLCALPAPRAPGPGDGGDHERFTVRLPPHVREEVLKSRRLRHATSLVLGIRGSSREGSSRGGGGSWHGARRWPSFLARTVSWARGGVGADTSAKETPCRDAV

SEQ ID NO: 18444 - protein, 268 aa, Oryza sativa
  Clone ID: TF_OSC416014j.C1.p1.fg
MGRRARCLCLLLLLLLVVGGGFHVANAQASPAPPQTGTRAVNRAVSTVITVVIGVFFVLVFVCVIVNQCCDCDSSAGAGAGQGQSSAARRRRGLDPAAVAAIPVVPYAEVRKHRSGGGGALECAVCLTVFDDGDDLRLLPQCSHAFHPDCIDPWLEGHVTCPLCRANLEKQPAPSPPAVEFSSSPAAAAAAAEESRTPEAAAVRVEEVAEASDEEETRRREEEAVELEICAPNSGFGTFNGIAEKGELMNDFTNIAFSLELFALERCF

SEQ ID NO: 18445 - protein, 141 aa, Oryza sativa
  Clone ID: TF_OSC32353j.C1.p1.np
PPALADAGQWSCPDCSGDSTDAPPPAPAPLAPGSAGQLVADIRAIECDATLSDQEKARRRQELLGGAAPAGADANDDEGDDVLQVIGKNFSCAFCMKLPERPVTTPCGHNFCLKCFQKWIHSGKRTCGKCRAQIPAKMAEQ

SEQ ID NO: 18446 - protein, 209 aa, Oryza sativa
  Clone ID: TF_OSC33081j.C1.p8.fg
MPPPTRTRRGVTLAEQMAASSNLRDLLKLRDNDDDDDDGGGQGGRRQPRPLPDAVVVAAGRRRTLLDVIRGVDDDDGHDHPPTGVLEGHRPATSTRTAAAGGARGGRVSLMALLEQAERQWTTAAAGDASRRRVADDHAAAAEAGTNKGFAGAAAGVGGRCCVCMARGKAAAFIPCGHTFCRACARELRVGRGRCPLCNAAIHDVLNLF

SEQ ID NO: 18447 - protein, 99 aa, Oryza sativa
  Clone ID: TF_OSC33082j.C1.p1.fg
MALLEQAERQWTTAAAGDASRRRVADDHAAAAEAGTNKGFAGAAAGVGGRCCVCMARGKAAAFIPCGHTFCRACARELRVGRGRCPLCNAAIHDVLNLF

SEQ ID NO: 18448 - protein, 94 aa, Oryza sativa
  Clone ID: TF_OSC33082j.C1.p1.np
GARGGRVSLMALLEQAERQWTTAAAGDASRRRVADDHAAAGRCCRCCVCMARGKAAAFIPCGHTFCRACARELRVGRGRCPLCNAAIHDVLNLF

SEQ ID NO: 18449 - protein, 156 aa, Oryza sativa
  Clone ID: TF_OSC406125j.C1.p4.fg
MCALCQGHRNSSRASAAAAAAAAAAQSRPPPQMRSGGDGGDDGGGGERQLGRSSASPSAPPWPTALVPAFTYSRSVRRNVGGDDGEEEETAAAAAACSVCLGAFQLGETVRLLPACLHLYHAECIDPWLDAHTTCPLCRSDTGDPSPVDAGRIPPV

SEQ ID NO: 18450 - protein, 148 aa, Oryza sativa
  Clone ID: TF_OSC932j.C1.p3.fg
MLFLKELPIWQAFGFSLFTGALAGSILYAVCVLLLCCVDRRRRHAGAPPPDPKIWLPDHAHHRRRRDESSEMECSICLGELEEGERCCTLAACRHEFHKECIYRWLANRNTCPLCRHISLPPASSPPPAPPPHHASPPPSNVLAAAHV

SEQ ID NO: 18451 - protein, 260 aa, Oryza sativa
  Clone ID: TF_OSC12971j.C1.p1.fg
MPSSSSSSVAAAPSGSNGTRRDGGSGSVTGCLPADQACFALSSSASSPGYLHASATTTRRDASATVARACCTTASYVVVLGISFGSLLAILLILCIIRWYLVWRSARPRRDDGAADEAVGSAKKRSAGLDDDAIAALPVFAYKQREEGGGGAVGAAEEEKEERECAVCLPVMADGKAARRLPRCMHVFHRGCVDVWLREHSTCPVCRAKVVVRPAGAARVEKLPKSSASRALTSPVPAPAPRPTGTVVDDGRERDLEAQQ

SEQ ID NO: 18452 - protein, 171 aa, Oryza sativa
  Clone ID: TF_OSC900034j.C1.p1.fg
MNPASRRHYDSLVARYGDQDALADRFGGQNDGPDAWWSNLRVRMSQDHLLRHEARRRAATLEVFEDRENSHDGAFGCGDRASAKAMVTLHQPNLGETREQDCAVCLEPFEEGNTLRMMPCFHSFHQRCIFSWLRISRICPVCRFTLPSQADFESEKAEKERVSASPEDGNN

SEQ ID NO: 18453 - protein, 154 aa, Oryza sativa
  unsure (1)..(154): unsure at all Xaa locations
  Clone ID: TF_OSC900034j.C1.p1.gp
MNPASRRHYDSLVARYGDQDALADRFGGQNDGPDAWWSNLRVRMSQDHLLRHEARRRAATLEVFEDRENSHDGAFGCGDRASAKAMVTLHQPNLGETREQDCAVCLEPFEEGNTLRMMPCFHSFHQRCIFSWLRISRICPVCRFTLPSQADFEX

SEQ ID NO: 18454 - protein, 163 aa, Oryza sativa
  Clone ID: TF_OSC401539j.C1.p112.gp
MDRTSAVPGRVSDPGSAWFGGGERSSSAGPGRNVRLIATAVAAFVSVLGLALFLHLYVCHVRRRNRRRAAEAAALATVNAGAPPKQVGLDPSAIAALPTAAYGKVAGGDAAGGTTECAICLGAMQEADAVRVLPACRHVFHVACIDKWLASSSSCPVCRAGVE

SEQ ID NO: 18455 - protein, 238 aa, Oryza sativa
  Clone ID: TF_OSC401539j.C1.p91.fg
MDRTSAVPGRVSDPGSAWFGGGERSSSAGPGRNVRLIATAVAAFVSVLGLALFLHLYVCHVRRRNRRRAAEAAALATVNAGAPPKQVGLDPSAIAALPTAAYGKVAGGDAAGGTTECAICLGAMQEADAVRVLPACRHVFHVACIDKWLASSSSCPVCRAGVEPPPPPPSTAAARCVHEKQDAEKEEAAAGSSAPVRVLGASLMKMLSRERPSPRRQPGVHAVEMEDLESQLPRPQQQ

SEQ ID NO: 18456 - protein, 692 aa, Oryza sativa
  Clone ID: TF_OSC409503j.C1.p6.fg
MGAGSSRADAPPRRRAAARGLGLGLAGCFGGGSSGAATGGGGGGGATAASSSRAHEVESWQAARAVAEMDFRASVAAKDIRISSESDPRVHPSSSTISHHLRFNHLNSHENKEDALGTEIAETSVRQSSSGKEVMPRGNFSNEVAYAEITSREGISHIGRDILEPAANNAETDTVCIPEVGGPVSESGFSSSQRASERIMADLEAGEIAHGTSSTTIMSSERSDTSQSSLTSVLPATSTAPSTIGESLPDTVPSREDVPIFSGTQGEIGGNTLHDDMMSIFSNDGPARVRDSSSNEMRRSHRRVLWDTFSRRSSRGYLDSDTDDLGFYSRWLDLGDELFADEIEEARFFHRRRHGSIRVSQYSRSRIREHRRAVFDSGTDQSTVACPLGIHQIGRCTCDSFLIAEESSARASISRIVMLTEALFEVLDEIHRQPASLSLSMVSAQAPESVVNSLPCKSYKKQTAQCSDDMEQCHICLTEYEDGDQIRSLPCKHEFHLLCVDKWLKEVHSVPKLISKALTNRLQLIIDYLIDPMQSSFIKNRSISENFILASKMVQSALKRKEPMIVLKLNFHKAFDTVSWDALFKTLEARGFPELWIRWMKCLLCTGKAQRQIKHQGKQQPTDFINLKTYRLSLWEVLIGVGPYGKHATPGSLMGSKILSLSCQVKSGNPLNSGVIEAKKQPGLSSCPGVKG

SEQ ID NO: 18457 - protein, 595 aa, Oryza sativa
  Clone ID: TF_OSC407936j.C1.p30.fg
MAEQPRINSALVSVIRMAKVSKNANSAVSAAAYHYIRNDDRPDKAFTTERAKRAGKANASSGQIFVTIPPDHFGPILAENDPKRSIGVLVGDTWEDRLECRQWGAHFPHVAGIAGQSTHGAQSVALSGGYVDDEDHGEWFLYTGSGGRDLSGNKRTNKEQSSDQKFEKLNAALRISCLKGYPVRVVRSHKEKRSSYAPEAGVRYDGVYRIEKCWRKISVQGKFKVCSDIYGDRPRPLPKVDELKGATDISERKGTPSWDFDEKEGWKWVKPPPISRKPNLSGDPATDKEIRRVARRAQMSVTERLLKEFGCSICKQVMKEPLTTPCAHNFCKLCLVGTYGSQSSMRERSRGGRTLRAQKIVKKCPSCPTDICDFLENPQINREMMDLIESLQRKAVEEGDTKTSSDVSNGAESSGDDGNNEALEKGEDDSSLKDDGSLKDDGKVVKAVVVIKEEDLQPKKSKGEDEKEQGDKKMDSADVVDIAVEKKQATKRASEKAEKKQARKRKGDAVATNDGKRMKTGGDAMETAAEEDAPLSGGTPVKRNSRKSSEVDAKGGGGSPVVSSPRRVTRSNAKASGEADGSPATRTRRATRAEA

SEQ ID NO: 18458 - protein, 204 aa, Oryza sativa
  Clone ID: TF_OSC14789j.C1.p6.fg
MVSIVTPVTDRDSGRTVAGVPPVLVGASVSSAPELRGRAYLVHHVFYEDGSASADGGGGVAPASRASIAALREVEEEDDDGEEASDCAICLDDGEESRETCGSGRRKEMPCGHRFHGECVERWLGIHGSCPLCRHEMPPATAAEPEKKKVVVAMVHGERVVMRGRRVVLSVLVMGRAHDDGEGPEQRGTDPIPPLPRVLIDDVD

SEQ ID NO: 18459 - protein, 156 aa, Oryza sativa
  unsure (1)..(156): unsure at all Xaa locations
  Clone ID: TF_OSC14789j.C1.p7.gp
GSASADGGGGVAPASRASIAALREVEEEDDDGEEASDCAICLDDGEESRETCGSGRRKEMPCGHRFHGECVERWLGIHGSCPLCRHEMPPATAAEPEKKKVVVAMVHGERVVMRGRRVVLSVLVMGRAHDDGEGPEQRGTDPIPPLPRVLIDDVDX

SEQ ID NO: 18460 - protein, 204 aa, Oryza sativa
  Clone ID: TF_OSC400332j.C1.p12.fg
MVSIVTPVTDRDSGRTVAGVPPVLVGASVSSAPELRGRAYLVHHVFYEDGSASADGGGGVAPASRASIAALREVEEEDDDGEEASDCAICLDDGEESRETCGSGRRKEMPCGHRFHGECVERWLGIHGSCPLCRHEMPPATAAEAEEEEVVVAMVHGERVVMRGRRVVLSVLVMGRAHDDGEGPEQRGTDPIPPLPRVLIDDVD

SEQ ID NO: 18461 - protein, 156 aa, Oryza sativa
  unsure (1)..(156): unsure at all Xaa locations
  Clone ID: TF_OSC400332j.C1.p15.gp
GSASADGGGGVAPASRASIAALREVEEEDDDGEEASDCAICLDDGEESRETCGSGRRKEMPCGHRFHGECVERWLGIHGSCPLCRHEMPPATAAEAEEEEVVVAMVHGERVVMRGRRVVLSVLVMGRAHDDGEGPEQRGTDPIPPLPRVLIDDVDX

SEQ ID NO: 18462 - protein, 110 aa, Oryza sativa
  unsure (1)..(110): unsure at all Xaa locations
  Clone ID: TF_OSC900163j.C1.p11.gp
GSASADGGGGVAPASRASIAALREVEEEDDDGEEASDCAICLDDGEESRETCGSGRRKEMPCGHRFHGECVERWLGIHGSCPLCRHEMPPATAAEAEEEEVVVAXMVHGR

SEQ ID NO: 18463 - protein, 242 aa, Oryza sativa
  Clone ID: TF_OSC900163j.C1.p7.fg
MSLTNAPSSMVSIVTPVTDRDSGRTVAGVPPVLVGASVSSAPELRGRAYLVHHVFYEDGSASADGGGGVAPASRASIAALREVEEEDDDGEEASDCAICLDDGEESRETCGSGRRKEMPCGHRFHGECVERWLGIHGSCPLCRHEMPPATAAEAEEEEVVVANVVLHGDERRGEERREEAEAVGHWGRGGGSDGSEGREEKTAVAVEGEEAEVAKRRVRGVAAIHRRGRGKMKIHRHRRTRS

SEQ ID NO: 18464 - protein, 375 aa, Oryza sativa
  Clone ID: TF_OSC900418j.C1.p14.fg
MAGLAGDDSSFFGDDGDGDEFCYGPFDVEDLCYGASDVDDDWEEFCDGPFGGGGVEEFCVSGFSVRDLSDASSSGARETGDPHDDDPLPQTLARSLDSDGDLSATLHQIVSAMRLSEDEEEEEEEELLVLGHGHGVGIGGGGDVDGFMVSAFDLDTAMAIGGILEDIHEVMGADEVREEVVVEEEEAGNGGGIMPNGFEFGPPPRAISGTAAGFRMMVDADDTDSDDFQFVEVLGGGQVREAGAGMSMRPSRASQLVVESLPEATLSEEEASRGCAVCKDSFASGQIVALLPCKHYFHGDCIWPWLTIRTTCPVCRHQVRTEDDDYEQRMARRVIVLAAVEHQGAPAQGCGDSATMGAEGASECVVENGPEKTSF

SEQ ID NO: 18465 - protein, 338 aa, Oryza sativa
  Clone ID: TF_OSC401561j.C1.p21.fg
MNKRFNPQYRAWRPPTGPQGHRAGPESGIVPPTRDYVVEEEDEERHPHPHHRLLLDDDAAGFDHDETLAAPAPAPGSPFSFASDPDPDPDIDLELRLSSRSPPFWDCLEDDLADEEMVGGGFEWEEIADAAVPAPGAVAAGGGGGGGGGDGGLVGDGDVFGFLDEREILGAMEGLDSGDDESGFSDEPFDFGDEGDDIGDIFRSVGWEVLPVPLDEDDFEVLPGHVADAAAGGAPPAARAAVERLQVVPVGGGGEEAAAASRGCAVCKDGIAQGELATQLPCAHLYHGACIEPWLAIRNSCPVCRYELPTDDPEYEKRRVKRRSSGDSVAQLGTPMQI

SEQ ID NO: 18466 - protein, 645 aa, Oryza sativa
  Clone ID: TF_OSC34790j.C1.p5.fg
MEPSRRLLLSDYDGAIVSPLPSPPPSSATPFRPGVAVVVGILTSVFSITFLLLLYAKHCKRNAAESSGPYGSGGAFGSSGGGGAGERRNSGVDRAVVESLPVFRFGALRGQKAGLECAVCLGRFEPTEALRLLPKCRHGFHVECVDTWLDAHSTCPLCRSRVDPEDVLLLPEPPKPSTTGPPDPPETKVAAAAAAATAKDKEASLAPAAPAPSPAFRGFFSGRHSTGSVRAPGRVGPASRRSADLVGGDGGAVVGCFEAAKVRKDRVLLMEPAAAVAEPDPEAYDRRFGHRILVSTAGGCEDETAPAAKQRWSEVRPSDLMFVRSEMLVTEAGRVQLETITSRALFLSTIGCYYYPMVNMHVSRRQSGDVIVVRVSLIETWRTTDDDVLSRSSLLGGPDEHDVREHLLDVDGVGEEGAAAAAGPKIRVRGLTRRSEARGEEILRGVDLDVPRGVVVGVIGPSGSGKSTLLRALNRLWEPAPGAVLLDGVDICGIDVLALRRKVGMLFQLPAMFDDKNYFEKYFYCGRNYNYPKLPKVVFEGTVADNVRYGPQLQGKKLTDAEVLLLDEPTSALDPISTQNIEEAIVRLKKTRGLTTVMVSHSVKQIQRIADLVCLLVAGEVVEVLPPSELSEAKHPMARRFLELS

SEQ ID NO: 18467 - protein, 363 aa, Oryza sativa
  Clone ID: TF_OSC400903j.C1.p30.fg
MMVAGVIRSNQDGGGGGGTVSGAARISPAVVFVLVILAVVLFVSGLLHLLVRFLLRRGRGRDGGGGGDAEAAEGVEESALQRQLQQLFHLHDAGLDQDVIDALPVFMYREVVVGVGGGGGAGGGAKEPFDCAVCLCEFAGDDRLRLLPVCGHAFHIDCIDTWLLSNSTCPLCRAALGADAAALFDAAFDEMADEEDRKQQEDAVFPVRLGKFKNLSRAVGPVHDRDDAAAAAAGVGVGGGIITREEGESSSSSLDARRCFSMGSYQYVLAEASLQVSVHRRHGDGNGRARLRGLAGANPAGNDAAAAADGKKIGAGSKGDSFSVSKIWQWPRQGKGKLPVLASDDSPAVDGRLPWPRRSPGAS

SEQ ID NO: 18468 - protein, 364 aa, Oryza sativa
  Clone ID: TF_OSC21352j.C1.p8.fg
MSTKRLNKGSAGVACVYFAFLHILVLRTLQVCTFYQKGSCSYGSRCRYDHVKVSRNPTVAPPPSSSTTTRASSSLQPLSFGRPHHVGYQADSSNPRQQISMDVLAHSGSKPVWRNDFQHESVLEDGIDWSISPTVQNQTTLSPADLPICSFAAGGNCPYGEECPQMHGDLCTTCGKMCLHPYRPDEREEHTKLCEKNHKRLESLKRSQEIECSVCLDRVLSKPTAAERKFGLLSECDHPFCISCIRNWRNNSPTSGMDVNSALRACPICRKLSYYVIPSVLWYFSKEEKLEIIDNYKAKLKSIDCKYFDFGTGTCPFGSSCFYKHAYRDGRLEEVILRHLDADDGSTVIAKNIRLSDFLSRLHL

SEQ ID NO: 18469 - protein, 298 aa, Oryza sativa
  Clone ID: TF_OSC7089j.C1.p1.fg
MKEKTLAMVSGLPSARMMRQSRASWVYQLSPMTCAVAGTSTLVSMEVMHDTTGKKEVVVCYMNAPLPYMIEENYGGCFFEDDVDLAQVLQDQEIVYQLIQGNYGTGSSKTHSNPSSSYSHGCELGERKPSGVASYEAQLVVDEALARELQQMEDQLASASIDDHNIIEHGRKPIASSTSSGGNASASRPPQVVMEDGIDPDNMTYEELQQLGEAIGTESKGLPEDVIALLPTSTYKIRIFSRKEKHDECVICCMTYKNRDRLTKLPCEHQYHQTCVTKWLKINKVCPVCNKEVYGSGK

SEQ ID NO: 18470 - protein, 748 aa, Oryza sativa
  Clone ID: TF_OSC900071j.C1.p19.gm
MASSLLSSPKPSSFSSANPTSTPRPRAQTLSPFRAAAPRFSHGLATAAAAANPSASRRCYHRAFARPVRASMAQPRRPEYVPNRIDDPNYVRIFDTTLRDGEQSPGATMTSAEKLVVARQLARLGVDIIEAGFPASSPDDLDAVRSIAIEVGNTPVGEDGHVPVICGLSRCNKRDIDAAWEAVRHARRPRIHTFIATSEIHMQHKLRKTPEQVVAIAKEMVAYARSLGCPDVEFSPEDAGREFLYHILEEVIKAGATTLNIPDTVGYTLPYEFGKLIADIKANTPGIENAIISTHCQNDLGLATANTLAGAHAGARQLEVTINGIGERAGNASLEEDGMLKYKGTYEIISPDDIGLTRANEFGIVLGKLSGRHAVRSKLVELGYEITDKEFEDFFKRYKEVAEKKKRVTDEDIEALLSDEIFQPKVFWSLADVQATCGTLGLSTATVKLIGPDGDEKIACAVGTGPVDAAYKAVDDIIQIPTVLREYSMTSVTEGIDAIATTRVVVTGDVSDSKHALTGHSFNRAFRKTEDAAMIGNGIAPRMAGDQSIVMSEQQRAEFCLTLMAVMYGHTRQPADAELLRRPQRRRAAAAADPPPHIRNASVVENTEPDVLFAYTPHDGLSPEFDDDSGGVADYFAADDDEAYSNGGFGAVPALSEAIVSMPELSVGEAREKQCGVCLEGFEEGDKLRKMPCEHYFHESCVFKWLQVSRLCPYCLFAMPAAEEEEHNNDDEEEEDEAMMCIRFLFPE

SEQ ID NO: 18471 - protein, 562 aa, Oryza sativa
  Clone ID: TF_OSC422112j.C1.p3.fg
MAADDAARSSRRMDLNLYLGLPRAPRLRRPDLGSDLALGTPMLSSSPSSSAASADAPPLETEPLHPPYSPPPAELVRPPTPLPEPYDPSAPEAHPPYVPPPVPPPEAIPELADDLEFGFSHPPLLLRPSELLGWVDRPSSSTASSSFRPERVDRYRPPVICLNSRQSRCLRPRRFRSDLPPLGSEAPALENDAAAQPPPQEPMQDTVEENKVVADGAIVGASEEEPAERGKSVAMFECNICFEMASEPVVTSCGHLFCWPCLYQWLHVHSTHKECPVCKGEVTEGNITPIYGRGNSTSDAEKKVAEEGNVSGPTIPPRPHGNRLESFRQKFHHLRPISRRLGEAHGILSSWRRILDQQIMNSVSRFEGPPESTVQEMIDHAHHASRLGRITTRMRARRLQREAENSTFVASSAAESGLPANSTSDLPRRSSSPFSSERIDLLQHFVDLASTERLASAVSDLRRMVRPSPYGASTSSNPPNPPNTELLPVDGNHVAVALAADQASNSSTMAVIQEDAAFTESTGEPSNAGSSRSLRRRGRNDALGSLDVDGVGLHRNKRRRLN

SEQ ID NO: 18472 - protein, 323 aa, Oryza sativa
  Clone ID: TF_OSC402805j.C1.p20.fg
MAEAAITRYWCHECEQAIEEAMVDEIKCPSCGGGFVEEMTDEEIERLTNRQPEPGFSQWNPIEHPGETMDSDDEDNDLGREFEGFIRRHRRASTLRRVLDSIHDDLADDQERDSSILINAFNQALALQGSVLDPDEGQGDQGGSTNDDGLLEEYVLGAGLSLLLQHLAESDPSRNGTPPAKKEAVEALPTVKIEEVVSCSVCLDDLEVGSQAKQMPCEHKFHSSCILPWLELHSSCPVCRFELPSEETKDLNEPSNIGRVEDSHEEVRADGPGNVSESSNRPWAIVPWLNELFSTREAQNAGGVSTDQQSPHTSGTNPNAGHS

SEQ ID NO: 18473 - protein, 285 aa, Oryza sativa
  Clone ID: TF_OSC400283j.C1.p26.fg
MELTGWHLPEPPSSTVRSVIDGGGAHHPRLISSQVGQPARPTSPSPLPPRHRHRHIPKAEAVQGERQSPRHGSMELSASALGFGLCLDPHPVGGLRRRLRRGGGRHTSRSDCRRRLGYVPRPAHFPVSGVGGGLRGFLHRAPPGSARNDKGCARRHKTASSSATSAEPMDEGEADLLQFLFVTSGVSWGGIVGVVVAVNASVPAARVWMLPGVTTLDRELGGDDCSMCQYDKDAGAVVRTLSCDHVFHKACIDVWLREHGMACRLCRRTASCVLPWKTGGRRRHG

SEQ ID NO: 18474 - protein, 456 aa, Oryza sativa
  Clone ID: TF_OSC401376j.C1.p7.fg
MGPSAAALRAAAVVGLVVAVGLALPPLAAALRPLRERVASAGAASSSGSWGDEHAFFKRDENEISPYSWNITGTYKGSWNFAGSTNGSSRFLEFTKLKGDAVLELLSTPTKISGVHYVQGSVTFHDVLDNAHDRGVAQISGADGEPLQEEDYFLSNPYHLNMSVQFGPLAFHNLKDSSFEVVYIILQGAAKVSILMIGQQAIMDAYLCLLHLTAGILVESLFNAFATAAFFKFVVFSIFEMRYLLAIWKASRPLNSGEGWEVMRRELSVLYSRFYGILLGGILLMYELHNFLRPLLFLMYSFWVPQIVTNVIRDTRKPLHPQYILGMTITRLAIPLYIFGCPSNFMRIEPDKTWCIAVTIFMGIQAAVLLLQHYFGSRCFIPHQILPEKYCYHRKVEDNTNQPIDCVICMTTIDLTQRTSEYMVAPCEHIFHSGCLQRWMDIKMECPTCRRSLPPA

SEQ ID NO: 18475 - protein, 206 aa, Oryza sativa
  Clone ID: TF_OSC416737j.C1.p20.gm
MARSCSSSGSDHSSYDLALTLRRKLLLLDILAVLRFLAAALLERLGVVSCQEDNELPGCHSWCDSDVVDTGAMERLMQAKLSTSWYRLRRRASRGGSDNMASPHGDTSADICTICLAELEAGGGGGGCQRQVAELSSCSHAFHAACIDGWVVEAGTCPLCRTPEYIFIASTIMPVGNFPCSSCNLDDLQNLYSGNDSWSVHQLGIH

SEQ ID NO: 18476 - protein, 468 aa, Oryza sativa
  Clone ID: TF_OSC900230j.C1.p4.fg
MVIDRNKNGNGKKYGNENGNGFAVIPIVSVFTVFLRKLPFLIIWCFSGRCNQLNSYATFWLMAVPPVESETRSEETDNFPLLADHMENTGHHAHAVDIPWDSSPSTSRRDNHNGFDQLPRILEGSPGTSTPSNSQNGPLARRDDNRGRRQPSPLNSGCWISVELVVNVSQIIAAICVLSVSRNEHPHSPLFEWVIGYTVGCTATLPHLYWRYLHRNLPTTGQEPTVQNIPPNNTPEANSYGVTGTNGVSRNNEATVNPRFQAFADHFKMALDCFFAVWFVVGNVWVFGGHSSAHDAPNLYRLCIAFLTFSCIGYAMPFILCALICCCLPCIISILGFREDLNQNRGASAETINALGTCKFKSKKTRDGDGNEVGVGVVAAGTNKERVISAEDAVCCICLARYVDNDDLRELPCAHFFHKDCVDKWLKINALCPLCKAEIDGVSTSAPAIGFGRRHSDNRVGNDIESQL

SEQ ID NO: 18477 - protein, 261 aa, Oryza sativa
  Clone ID: TF_OSC400545j.C1.p54.fg
MAMETIIRLRSSSKQLEGHHGTAPLEEGPSYVRFVCDVKVRCWSRRLGGGGEPVRHDGIKFTLETERKHVLDGAGGDVFLDYEETRRMAWAVFTGMRELRCVDLSRSNWATPMPDDDAAAWIHRAVRRNHDDGLAGGHYRFAARVKVAVELVFSEPVSLVRGLVWLETRAGDTCGICLDGLTASERCKTPPANLPCGHAFHPPCITRWLFKGTTCPICRDDLTGLAAAPWESGVMSCPGCIMPSTPCVEDCPSLKALSLNS

SEQ ID NO: 18478 - protein, 398 aa, Oryza sativa
  Clone ID: TF_OSC900378j.C1.p8.fg
MEQTTGVSGHEHIIDIPRDSGPSTSTSHSVARENHGEPNPVDRSATRALVPALQAPSAVGAPSAGHTSGARRSDNYVRRHRSPLNSGLWISIEVLVNVSQIVAAIVVLSLSRKEHPQAPLFEWVIGYTVGCFATLPHLYWRYIHRNIVNGENEPAHTLQGSSQNNSTEPSASASERRRNAARNAVLANPRINALFDHFKMALDCFFAVWFVVGNVWIFGGRSSAADAPNLYRLCIVFLTFSCIGYAMPFILCAMICCCLPCIISVMGFREDTNNTRGATSESINSLPTYKFKTKKRRHSSGNEAEGQDGGIVAAGTDKERSLSAEDAVCCICLAKYAHNDELRELPCTHCFHKECVDKWLKINALCPLCKSEIASSSGTSDTRRSDHTDIPVQEIEMH

SEQ ID NO: 18479 - protein, 304 aa, Oryza sativa
  Clone ID: TF_OSC400225j.C1.p16.fg
MDVQLESTAVQHGQAKINVEEHALVSLLSDEKYATEKTEDVDPDDYEKLEEGIMQYGCAHYRRRCRIRAPCCNEIFDCRHCHNETKNSIKIDAVKRHELPRHEVQQVICSLCGTEQEVRQVCISCGVCMGKYFCEVCKLFDDDIGKHNDTSFYNVRFQNSNIIAMVVEYAGCCYSIVLKNSHACVEGAMHHDCPICFEYLFESTNDVSVLPCGHTIHVKCLREMEEHCHLKLMLRFACPLCSKSVCDMSKAWERLDEELATISDTCDNKMVRILCNDCGATSEVQFHLIAHKCQKCKSYNTRQI

SEQ ID NO: 18480 - protein, 186 aa, Oryza sativa
  Clone ID: TF_OSC33582j.C1.p2.gm
MGRHYAFVAHVILLLSIAHAAPRPPLPRIVAVGAVLCTPARPFASSVGNIGGGTWGSTYATARAVKAGHGALECAVCLAEFVDDGEKLCLLPGCCHVFHTACIDVWLAAHVTCPVCRADLADRAVAAAGHVLAADQAAPQVGEHGHHARDRIKRAVGFGGIADNVGGASEPVMVAAAPCIVQATLE

SEQ ID NO: 18481 - protein, 246 aa, Oryza sativa
  Clone ID: TF_OSC400800j.C1.p38.gm
MGRHYAFVAHVILLLSIAHAAPRPPLPRIVAVGAVLCTPARPFASSVGNIGGGTWGSTYATARAVKAGHGALECAVCLAEFVDDGEKLCLLPGCCHVFHTACIDVWLAAHVTCPVCRADLADRAVAAAGHVLAADQAAPQVGEHGHHARDRIKRAVGFGGIADNVGGASEPEKENNMPTPRQAEQETLERCARTPRASTPSSLWELTDDAFSGNERKRKKRMGERTRDIHEKIHVLWMSHSKCHKF

SEQ ID NO: 18482 - protein, 204 aa, Oryza sativa
  Clone ID: TF_OSC401325j.C1.p13.fg
MEIGGVLVSLLFAAFSLPCLLLLLVLAEAGLRLASLALRGGRYAWPTRSDFLGYRIARRRRAAVSGGAGGADGEEEAQPTAECCDRLAVAMYRRGRDAAPVDCVFCLSRVDDGEEVRELRCRHVFHRACLDAWLVLPRATCPLCRDCLLPPPCEPPRSFPLDYYDDDDDVHFGFNDFSITSSTTTTTSAAAAVAYPHGVALWPM

SEQ ID NO: 18483 - protein, 192 aa, Oryza sativa
  Clone ID: TF_OSC13655j.C1.p5.fg
MAPPPPSSELPPPPPTNAATSSSAMAVPYFCRKHVALATSRSSTVWTVAKQTGLRSVTVGSDTAVACAVCTDDLPPAATACRLPCGHLYHADCFVQWLSRRNSCPVCRRRVPLFPDHGAAYTDEDEDEDEEEIAPSPPPPHGPETTATDDHRPRSLPGASWIGRICRRLLGYTETSHPRQLNRCSGDTTQQW

SEQ ID NO: 18484 - protein, 834 aa, Oryza sativa
  Clone ID: TF_OSC13655j.C1.p5.gm
GIAGRYVRFDKGSDAYDLPDGVRVPRSTRTLVRKLCELGWLFRKVRGFISDNISRSPSDAATEVGTVAQAFCSALQEELSDYYKLLAVLESYSLNPIPTPGSDSGVSGNYLSLRRLAVWLAEPAVRMRLMAVLVDGCRGLRGGAMAGAIHGHAQHGDPTFQDFMGRLLRRVCSPLFEMVRSWVLEGELEDVFAEFFIVGQPVKAESLWQEGYLLQSDMLPAFISPVLAQRILRTGKSINFLKVCCDDNGWADAATEAAVCVGTTTSRGGLGYGQIDALEALVVEAAKRIDRHLMDVIHKRYRFKDHCLAIKRYLLLGQGDFVQYLMDVVGPELSEPANRISSFHLAGLLETAIRASNAQYDDRDILDRIKVKMMDHGDGDRGWDVFSLEYDARVPLDTVFTASVMKRYLKIFNFLWKLKRVDHSLTGIWKTMKPNCIVSSPFYKEGTNIRSQFVSVLRKCQVLFNEMNHFVTNFQYYIMFEVLEVSWARFSEEMDSAKDLDDLLLAHDKYLTSIVEKSLLGERSHGILRNLFALFDIILQFRSHADRWFERIYELQLRGKGSASREEAEHLVVVFLGHDGAASALVRAAASAADERRHLFVGYGCPVLLPQARRSGHVREAPVPAVLVQDERDLPNYRSAGGGGDDDGSFSLPAPAATPSTRTPRTAPSPVDSLECVSLFSSRSSTVWTVAKQTGLRSVTVGSDTAVACAVCTDDLPPAATACRLPCGHLYHADCFVQWLSRRNSCPVCRRRVPLFPDHGAAYTDEDEDEDEEEIAPSPPPPHGPETTATDDHRPRSLPGASWIGRICRRLLGYTETSHPRQLNRCSGDTTQQW

SEQ ID NO: 18485 - protein, 575 aa, Oryza sativa
  Clone ID: TF_OSC401539j.C1.p2.np
MSAGLPAWKINRTFPLRVCSLRSTTLLKRGNNSKAEYNHRTQQATPTMQTCKGNTRTRKATLQAQPLPTLACGAGPTRQRQSPPWTESTAAAGHVGAHPTLRIGRGRSDGRGRPSGTTGQARPQAAATAEPRPPATTPAAGGDGARGGERVEREAVLTERMGRRDEDEEGDGRGATGGTKVAVARVHRGAGGSGVEWRSGVVAGLAGGAAKLVVVAARLEVDGNGGKRLPKAAKRRRCSDRGVHHHHHHSSSPTIPNPSSSDSPPVAASVCSPARRAPAGECTARGRLVDAISGVLRGDLCCARSRSSLAVDGDLCCARSRSSLAVDRPVQIRVVYTVRGCSSIYGSDLGLMENRVGESSATAVDGGGGAKDSGSFECNICLELAQDPVVTLCGHLFCWPCLYEWLHVHAHSRECPVCKAGLEEEKLVPLYGRGKASTDPRSRSVAGVQIPSRPAGQRPATASQPDHHHDHLPHHDPWFMGGAGAPVAGGRWGNYTFSAAIGGLFPLLSFQVHGFPQAAAYGPAAGFPYGYGHSFHGWHGHGFPHQAPQGQHVDVFLKVLLVLVGVLVIASLIVF

SEQ ID NO: 18486 - protein, 354 aa, Oryza sativa
  Clone ID: TF_OSC401785j.C1.p9.fg
MVAVPVVADDGGGGHGAKGEESVSGSVAGISPSILIIAVIVVVMLLASVSIHYFIRHLCRRSSASAAASSSAPVLPVVVRPASSAAVGEQVVGKASAERAAEMERLISRLPLFTLASSLAALPKSSRDCAVCQSAFRDDDELRLLPACRHAFHSRCVDPWLRANPSCPLCRASIALPHPPLPDLLRVELGSVSSRRSNPNSAAAVASAPPEGAAVRAYPLPTLPNSEYLVEEELEVVIKQPAAAAAPRTGEPSQHPLPAAQAERGQPSSVTPTASFSSARSQERWSNRWSSRWSSRWSSGRWSSRYDAGTVTAAATAEWWWDMDGGAAPAARRREVEEQGNAFHGFMRWLTGAY

SEQ ID NO: 18487 - protein, 1902 aa, Oryza sativa
  Clone ID: TF_OSC21831j.C1.p4.fg
MGKHKGRAASSGLAASLLPHAQGAVPIVGFGGYHGASRVEPAAPSSSTDPDASILLPPDVDSEVLQHLRRLGRKDPTTKLKALSTLSMLFAQKPGQEVVQIVPQWAFEYKRLLLDYNREVRRATHDTMSSLVKTVKKGLAPHLKALMGPWWFSQFDPALEVAQAARHSFEAAFPQSDKRLDALMLCVKETFLHLNENLKLTTQALSDKATPMDELEDMHQRGGIEAGQVTGTVCHKSLQQPSDEHKQLFVGWVISSSLLAMATLIDILLGVKLQNCVRDNSSSENTSLSKVLSGTLSSAESAFSMNKYFLDFLKSKSAIIRSATYSLLASYIKHVSHVFNEEAMKVLSPALLGAFNEKDPSCHSSMWDAFLAFSRRFPEAWSYCNIHKVVFSRFWHFLQNGCYGSKQASYPLLVQFLESIPSKAVTTEQFVFDFLHNLWAGRNQRQLSAADSLAFFTTFKQSFLWLLKVLPRHSGGGSSDDIPIKLITYFLAKVVWHDYLRIPSSKNQDISLSGLSDEAISGDCQLSHKESLLASSTRYPTYYLQDLGKCIIEILDEISAMENHLLNIACETLLKDCLDIIHQRESLPNFQYHVEQVVSFFISLDQLIVQKGKTWPLESLARPLIEQSVPAIKSMIQKDTPIVVKLLSVLVEIFRPVPLFLKNSQKESEESVQDECFFDQWCTIIKYTSAKQKHPVDNKNSHVDDQFELLTLILQKVRERIAGGKLRNLQKNGSLPEHWRHDLLDSAAESVFCDLPATDSHVHYVCAALGGSDQDDQICFLSADTVHKMLGSILKCLTSVLMTSTFEWARFAYVVLLPTEPKDSKVIGAQSFSSNIKMAHFAFKVLEGSLFALRRLEEDSLFPSVLAALFIIEWEYSMALTLDEEHDLKGYKEDIDVGSSACNSSDDHLDEGIHLKANLAESIHTFCQSLSPSFWSDLHPFTLNNLLNILAQSVRCALFQTLELPTESTSVLCSEWMVNMLKLISLDHTKLQSFFYLLLSEGEYWPLWVKPSLQNENAPVKIKFEPVITNETGLKHHQFVAFVDKLVLNLGFGEVILGVPGNTCYNTSQSIDTTSTVPSLSRAWVAAEILCTWKWKGGSVFSTFLPSMIQHLKMESCAEVSILSILLDTLLEGAFHECNQWVLFNAWHISDNEIEKIQDHFLRALVALLFSINSINECIWRESEALVFFEKLLSNLFIGSTVNRKCVKTLPFVMSTIIKPLSGKLKLNEASCYTDLVGQNILSWLDVAISCLSSSPREVLQQDIVDWMQVVLSCFPLNITCGTQKLEVKIEREISDTERSLLLTLFQKYKIFCAIEAPSLSTSGTTLSTMVELLGVKLIAVMVGYCWTELQENDLHFVFHTVQKWIESAVLLVEEMTDAINDAVINQKSNEDTLEKLKLVVSSIDELTLSFGEFALVTLCHLNHLVDIQETENFQSLQIIKSGDFADRNNNMMESMLRLFLASGVSEAIAKSSCEEASSIIASSRVAYMHFWELVASFVIYASPQTRRCALESMELWGLAKGSVSGLYSILFSSQPISHLQFAAYSLLLSEPLCQFSLIKECSLGSNRPLTQESCMGQSIELMPDSEKTLDLREELSSLIEMPTSELLQTDLLAHDRVDAFIAWSLLLSHLQLLPPASITRERHIPLRTGAPCGKKKDAELMPEAEVAAQASKNAIITCSLLPCIESLWPVGTWQMASLAGGLYGMMIRLLPSYVRTWFTSLRDRSLSSSIESFTRAWCSPPLLLDEFSQVKDSLYADDNFSVSVNRSAYEIVATYKKEETGIDLVIRLPSCYPLRHVDVECTRSLGISEVKCRKWLLSLTAFVRNQNGAIAEAIHTWKSNFDKEFEGVEECPICYSILHTSNHSLPRLACKTCRHKFHGACLYKWFSTSNKSTCPLCQTPF

SEQ ID NO: 18488 - protein, 256 aa, Oryza sativa
  Clone ID: TF_OSC400601j.C1.p18.fg
MTMRRTGGVGCRNAKGADADATAAGEECGEVGGEAHEDGAREEDAAVSFGIGSLGPVAMSDRGTSSSVSGDTDADSVPTADAAAPLWAPHGRALTGCLVVVNVALVLLVYLYFWRVFSRKRAAAAASARSDDDDDDDEASSSASAPPPAAAAVSVRTRDDVLASLPVFVVRSSGGEKAEAEAECAVCIAELRDGDECRALPRCGHRFHASCVDGWLRLHTTCPLCRASVVALAAAPERKGGVADTTAAAEDVDARV

SEQ ID NO: 18489 - protein, 266 aa, Oryza sativa
  Clone ID: TF_OSC408540j.C1.p1.fg
MRGRRRRGVGRRSRREGAVVASLTVFTMASALAALPKSSPDCAVCLSPFAPEAELRLLPACRHAFHASCVDAWLRTTPSCPLCRATVSLPHPPLLTAAAAAVSNAVQQDPLYSRSSNNSRSFRVEISSISNRRSSAAADDRRTYSLGSFDYRVDEEVEAVVSRIARPAAAKSTTGSVTPAPGEALAEAAGSRGWLREYVDRLASSASSLSGRWSGRWSARWSQSHHSNRQEDSWRWDPEAAVMSAPRGVDDDEPGFVTLYRWIVGV

SEQ ID NO: 18490 - protein, 373 aa, Oryza sativa
  Clone ID: TF_OSC408596j.C1.p11.fg
MASLPPPAPPAIGGDPLAATIPPSLPSPAPSSSSLNLSPSLLIITALLAFVFFASVSIHFLLRCLARPSHPAPSPLPRASAAAQRATTASAVEAGEATAASAVGRSHEGEAAAGGGEEVDDEKERLIASLPLFTMASALAALPKSSPDCAVCLSPFAPEAELRLLPACRHAFHASCVDAWLRTTPSCPLCRATVSLPHPPLPTAAAAAASNAAQQDPLDSRSSNNSRSFRVEIGSISNRRSSAAADDRRTYSLGSFDYRVDEEVEAVVSRIARPAAAKSTTGSVTPAPGEALAEAAGSRGWLREYVDRLASSASSLSGRWSGRWSARWSQSHHSNRQEDSWRWDPEAAVMSAPRGVDDDEPGFVTLYRWIVGV

SEQ ID NO: 18491 - protein, 111 aa, Oryza sativa
  Clone ID: TF_OSC402928j.C1.p3.gm
MATTGRLLLPHDINGRFGSVPACSEAIAALEETSAGEAKEKDCSVCLEAFEEESDKLMRKMPCCHAFHESCIFEWLQVSRLCPLCRFALPTQAEAEAGLWPLLTPGSGSGT

SEQ ID NO: 18492 - protein, 717 aa, Oryza sativa
  Clone ID: TF_OSC34790j.C1.p7.fg
MAFGREKGIQGNTMRESRAIEGPHVLRQTLSNGCNCSTKLFMAVKEAGGPNAKAGCSIVVLEKQSWRKEEKEMETRGVRKRQLRRTFHGGGGRLTRGADVDESHAAHESRRGANGRICLRGGGHVRGISAPRVKTGLRYVEDSGRSISTTGFLRRGSSVSLKDQGNEERPNKTKLNPMNARWADSKEKPRYLREPFRSSGTKAACPSSSKAPVRKYFEEKQGRTFLGEADNAESSSRRTEANRLQCSKKAVVEEDVHPYGQQDEPEDLLSTSTTEDQPAELDPELLDSSVSSGVSAHAIGSVVRNAALRSKSRQQKGKEELCQIRPQTASAFVNRSTIPRNSTNGVKSSNAAGPGVQRRTLKNLGCTSISDVLPSGCSSANSIHNKRAEVMRNRAFDGESSSRPRGLNGHSSLGHSPAMYSGITGPRVRTAEQSASQQTRTSSRSIQESADSSRIRRPSTQHARVRVPNEREDSVFALRETLARDRQPEWAHFSLGEAAPRRSMRPFSMELPHEIYSSSRQGSSNQTARSRSSYRPDESPPQMFHGLLVERENYRRINMEGIAEVLLALDRIEQDDELTYEQLLVLETNLFLSGLGLHDQHRDMRMDIDNMSYEELLALEERIGSVSTALSDEQLVKCLKRNVYKLPNSDLEANRAVLDDAKCSICQEEYIEGEEVGRMQCEHQYHVSCIHEWLRQKNWCPICKTSAIPSEMDKGGT

SEQ ID NO: 18493 - protein, 200 aa, Oryza sativa
  Clone ID: TF_OSC900007j.C1.p17.fg
MSTPTVQMVAPAAAVVEDPSKHWTRHGPVLTACLVGINLLMVLLVFFYFWRFFSGKRGPPTSSTSTMASGGDDDEEEGASSSSSSADTSPGRHHQDREDIASSLPVFVYSSSAAAPDVGDAGGNGKAAAAAECAVCIVEFRDGDRARLLPRCGHRFHADCIGAWLQLHSTCPLCRAAVLLHPAAAEPAKNDQPKDDDCPV

SEQ ID NO: 18494 - protein, 84 aa, Oryza sativa
  unsure (1)..(84): unsure at all Xaa locations
  Clone ID: TF_OSC900007j.C1.p23.gp
VGDAGGNGKAAAAAECAVCIVEFRDGDRARLLPRCGHRFHADCIGAWLQLHSTCPLCRAAVLLHPAAAEPAKNDQPKDDDCPVX

SEQ ID NO: 18495 - protein, 218 aa, Oryza sativa
  Clone ID: TF_OSC422132j.C1.p3.fg
MDPPARRLMDSRAAQLAAPLPDPYSAETFEDLLRELGVDPSIHTIVRSAGRWMDPAAAAARVPVRFHRTLQRLGIDPNSDARSIRDMLQEFYRVVYHGEVYWAGRVIRPRPSSMPTPVIGRRRRAADGDAPMQPPSKYARVHAVSRDVLLGLALTKACDARQEECAVCLSDFEEKDRLRTMPCNHSFHENCLFRWLRDSCLCPLCRYALPKQQQVQSC

SEQ ID NO: 18496 - protein, 149 aa, Oryza sativa
  Clone ID: TF_OSC900071j.C1.p17.gm
MATTGRLLLPHDMYRRLQAPTAAAAASLFILAPHLHFQRPNAAAAAPEGYSNGRFGSVPACSEAIAALEETSAGEAKEKDCSVCLEAFEEESDKPMRKMPCCHAFHENCIFEWLQVSRLCPLCRFALPTQAEAEAGLWPLPTPGSGSGT

SEQ ID NO: 18497 - protein, 501 aa, Oryza sativa
  Clone ID: TF_OSC400410j.C1.p4.fg
MSHYTMHAHINYTALPPTSPLQLPLPYLPPPPPPPQPPLLQLQPPPPPSSPVSFDTAFQSRISPSILLIILILAVIFFVSGLLHLLVRFILRPAPRDAGDADSGDANVTAFQGQLQQLFHLHDAGVDQSFIDTLPVFLYGAVVGAGRKDPFDCAVCLCEFADDDRLRLLPKCSHAFHVDCIDTWLLSHSTCPLCRRSLLADFSPYGGGCSPLLFVLESGSEGSISDRLDAASSAHLSLVMEQEEEAEPEQKHAEAAEKADEVVVSVKLGKFRSQATEVAAGGGCGGSSSANPEQDVRRCYSMGTYEYVMDERSLLRVAVKPPAKKRPTTQMPGHRVAMSECDCHSKRESFRGLDALPGGKLAQAQPPKPPAKVGKKESFSFSKIWMRGAPRIRKDGASSRRASSFRLSSVLQRAASDVGATAAPKPLRPDVVSPVTESEYNVSAWDKSEKSASGSVADWDLESAAATAAVPGAGAGNGLSSRADEAPSFARRTLLWIRGHL

SEQ ID NO: 18498 - protein, 502 aa, Oryza sativa
  Clone ID: TF_OSC401273j.C1.p23.fg
ILADWCFGLQLGAANVVLMGTNLTLSFDDVEASFAPGVKGSGFEGVVYTAEPLDACSPLTSKAEKGPPSPFALIIRGGCTFDEKVKNAQDAGFKAAIVYDNENSGVLISIHLALFRLWGHMVLHYLTLKFTVAGSSGGIHIYAVFISKASGEVLKKFSGHTDVEVWILPAFENSAWSIMAISFISLLAMSAVLATCFFVRRHHIRRDRPRIPEAREFHGMSSQLVKAMPSLIFTKVQEDNCTSSMCAICLEDYNVGEKLRVLPCRHKFHAACVDLWLTTWRTFCPVCKRDASTGIPDPPASETTPLLSSAVRLPSQSSSFRSSVAASPPRPISRRPSSQSISRIYAASGTPNSPNPIRSFTNSTAMSISRSNVDLSNMSSRPRASHLASAHSLVGSHLSPPINIRYASPHMSHSGYASPSPHVSSSYVSNSGYGSSSYYLGSSSQHRSYLRRCGESGPSLSTMAPQSPQQSQLGHSGAYGLSLSRSILRPVVRRSSLRLCAD

SEQ ID NO: 18499 - protein, 1234 aa, Oryza sativa
  Clone ID: TF_OSC400549j.C1.p7.hg
MDHHPPPPSPPRDSGGSLEVRLFYVRLSPRGPTPPPRLALALRSSRGGDEEEAPTPLSLPLRLDRRDPASGEATYVSTASARLPPPSAAFEVADHRGAALLRGSLRRCPDAKPDSSPAWAIDCIPAAGAEAETSAFEVYVAGCCAGEPAVLTCALRLATPEEQKAAGGLVRRRSPTSNAAGDEDVNGSIQHPEGWYSDDDDGQLTWFNAGVRVGVGIGLGVCVGVGASGFFSPPLPNPTTRRGGGGHRSHPPDATAADDDDAAMTGAAAWPVCTICYEDLRPLSDQHLHCLPACGHVFHALCLEQWLEYCPGGKKKLTCPICKQPCGAAHPPTRLFFQSTGACPTQTASSSPSRHEPTDGGADRDELAAEVARLEQKAASLGRVLDEQRDGIQKLNAEASAAAGPPNLGGSCVAMWREKAAEAEVMKESVRREKECVQHLLNAKTEELSRKSSECGRLQEKGLSLAKELAALKLSTDMNLQEEEILKLASLGNHGNAANAVDVLTRSLALRNKSYKELMIQCNVLGRSESRSQQRFEKAKELIKKLKARVQDLEKEQEEKENGVIRDLRSAKKFKADQTNSGNTTVNNGFSGLAAGCGDYPMKLDEVVQDPCDKPGPSPEAKNDLNIKDKMDDKHADVIDLDADDSVFQHEHKKGLSAKPFGNDATRMAPGTGPQQVHNFNSLSDDFQIPIRNLGGEGTGKSVGKWCKGVATPGSLNTNANKRNLIAVGPDGRGGKDSKTQALWPKAQKVGSRAIVPSLGEVAVALRRKAAEMASTAAAASSQGCISWALRQRGLGGGGARAVPVLPRRRFCVSAAAGAGFDNENREYVIVGGGNAAGYAARTFVEHGMADGRLCIVSKEAYPPYERPALTKGYLFPPDKKPARLPGFHTCVGSGGQRQTAEWYKENGIEVLYEDPVVAFDGKTHTLKTSSGKILKYGSLIISTGCEASRLPAKIGGNLPGVHYIRDVADADSLVSSLGKAKKIVVIGGGYIGMEVAAAACGWNLDTTIIFPEDHIMPRLFTPSLAKKYEELYQQNGVKFIKGALIDKLEAGSDGRVSSAVLEDGSVVEADTVIVGIGARPVIGPFEAVGVNTKVGGIEVDSLFRTSIPGIFAIGDVAAFPLKMYDRMTRVEHVDHARKSAHHCVEALLTSHTKPYDYLPYFYSRVFEYEGSSRKIWWQFYGDNVGETIEVGSFEPKIATFWIDSDSRLKGVFLESGSSETKLSSKVQPLSRMP

SEQ ID NO: 18500 - protein, 306 aa, Oryza sativa
  Clone ID: TF_OSC401172j.C1.p1.gm
MNGFAPTGYQQPPPPPAASASPGGWIASTAIFMSIFFSTFLLAMAVSVYCCLLCRDRVRSDDDDTGAAAERARGGGTIAPFPVEALPPAYAYVVGSSEDGGATAASGGGGRECAVCLGAVREGEMVRRLPACEHVYHADCIDRWLAAHRTCPLCRRELDPGKNPPDQLPRAHPPSPATRRAEVDEEVGRRHRARPPKVLVTEPPLLLVTEPRRCRSSSSATSHPPAPQDPPSRESALRVPSRRIRRLQALPLSVPPSARLVATGSAASRVTEAPPVDQATARHELHRRSSRGPAGGRMERWRKEGE

SEQ ID NO: 18501 - protein, 190 aa, Oryza sativa
  Clone ID: TF_OSC406124j.C1.p3.fg
MTGAGVETCCGGGGQAAAASASGPPPRGLIVVSAVFLSIFLATFLTLMSLAFCCCRRWRERDAVSGYVDGEGAVVVVAAGESGGGEPFPVEALPPAYAYVVGSSDDGGATAASGVGRECAVCLGAVREGEMVRRLPACEHVYHADCIDRWLAAHRTCPLCRRELDPGKLAAGAPPAPAQQQVDPTDQLPV

SEQ ID NO: 18502 - protein, 155 aa, Oryza sativa
  Clone ID: TF_OSC900108j.C1.p16.fg
MDGEMDWIAARFVLSAIMGVHPLVAVDDAGADDEHFPVDDAAAVHGHASPPPVALPAAVLAPEEVAGAVVCAVCTEEVAARQAVVRLPCAHWYHAGCIGPWLRIRTNCPTCRAELPREPAAADWRVPRRPAVAETAGSRLRREASYTMLAGTLPS

SEQ ID NO: 18503 - protein, 239 aa, Oryza sativa
  Clone ID: TF_OSC900112j.C1.p15.fg
MCCHSHPDLTGLLLLVSCSLHRRRPGQQLSTMARKLRGQAASSGTQNSNGLSNSSLELPSEHHFLAARTGMNGFAPTGYQQPPPPPAASASPGGWIASTAIFMSIFFSTFLLAMAVSVYCCLLCRDRVRSDRDDTGAVAERARGGGIVAPLPVEALPPAYPYVVGSSEDGGATAASGGGRECAVCLGAVREGEMVRRLPACEHVYHADCIDRWLAAHRTCPLCRRELDPGKNPPDQLPV

SEQ ID NO: 18504 - protein, 713 aa, Oryza sativa
  Clone ID: TF_OSC400934j.C1.p47.np
MAEHLASIFGTEKDKVNCPFYFKIGACRHGDRCSCLHNRPTISPTVVFANMYQRPDMITPGVDAQGQPIDPRQMQEHFEDFYEDIFEELSKFGEIENLNVCDNLADHMIGNVYVQFREEDQAAAAHTALQGRFYSGRPIIVDFSPVTDFREATCRQYEENSCNRESHNEAGAAAQAQSHNEAGAAAQAQAHAIGGSDMIVMTIEDVTITLVVVEGGVEAADMKGMMMEEGVGTVVALQGVRGVQSGRAARSAGPRSNSGIVKGTKSRGDRLCPSLARACDRTAMRRLTKRLLPSFRGAGRACHRRMARYRQAGTGTPGGGGGFLLICSTGDALFDETEFTFGKVEIFNTMHSCFKFSNDLGNQLKTIFFKKENKGGMQGKSKSMYNPCMSTTSMNQYVSHTQSFGLPSNQVVLGSMDEESAQHGNYAFPTSHISQCFQPTSNTWISQSANGIADGIPQWEYVNGMNNAPGMTETVNGSFREYQNGPSTLCRGPLPYFHQHAGMHAHNLLDHTQVQAPYQQCHNNPVLHGVNHSGNRFHLGPRIPVLFSNSERTFGPPHHPLLANPVNHRNIRILPPEHATIMDFSRLYEVSNVVDEHRDMRLDIDSMTYEELLALEEQIGDVNTGLAKSYIVEKLKTSLFVPGSSCMSNKSSESSMENDACIICQEEYQVKECIGTLDCGHRYHEDCIKQWLMVKNLCPICKTTALSTGRRSG

SEQ ID NO: 18505 - protein, 187 aa, Oryza sativa
  Clone ID: TF_OSC415400j.C1.p1.fg
MVCKNGSYLCNVISTTTGHPVFYLASPCGRLVLMKLLLVDLSFSSQLASYFVIICVIVAVFYCFLKQLAEFSDTDHQTVRDQDARNNETEPILPRKRVVFSYGATEEQPESSMCSSEDMCSENVCKICYDAPRSCFFIPCGHGFACFTCARRIAEDKNQACPICRRLIHRVRRLVEPLGSSCGKDFQ

SEQ ID NO: 18506 - protein, 267 aa, Oryza sativa
  unsure (1)..(267): unsure at all Xaa locations
  Clone ID: TF_OSC407922j.C1.p16.np
LRARRHAGGGGHHSSSPSPSWSPPNHQPPPFQSSFDEPPEVIPVVSSLNFQYQHPMNVVPGIPQSHRFTGPGASSSRSHQHPRLRSGFLLERQGDCLGCSVVNXEQGRKKINXEIRNALEMIHRGENVRFEVYLFLLQSIFYGGVDIHDRHRDMRLDIDNMSYEELLALEERIGNVELLALEERIGNVSTGLSEEEVTKLLKQRKFSSWLEASVEEEPCCICQEEYVDGDDLGTLDCGHDFHVGCVRQWLVVKNTCPICKNTALKSX

SEQ ID NO: 18507 - protein, 128 aa, Oryza sativa
  Clone ID: TF_OSC900212j.C1.p6.fg
MLPVSAVSSGAGAGGGKAALGELDISALPVFVHVAGCEAAAAVECAVCLGEVRDGERGRLLPRCGHRFHVECIDRWFRANSTCPFCRAAVVAGEPGGAAAAAGDKGDAVAVAVVGVPDVVVHVQVEEG

SEQ ID NO: 18508 - protein, 847 aa, Oryza sativa
  Clone ID: TF_OSC400256j.C1.p9.fg
MAAGTASPPPDAEPPECPVCLSPFDAASAAPRVLPCGHSLCGPCIASLPPASASASASAASLRCPLCSQCVPFSRALGPSSLPKNLALISLLPSPPNPSRSRTAAAAPPPPHVPLHADHSRLLSRFRHAVLPESASPLHSPAPAAGLAIGSFASDLGAPWFCPRGHPVSLLPIETPAAAAKQESPLYYRPSHAARVAAAIDALSAAARDEVIDLVAVSSRLARRVCRVYGFWMGPEAAPLWLLSERHSRGVSCLLEERSRREETVALIRNVGMEVCEAFMGLHGEGLVLGCIGLGCFCLDRFGHCLLDLNQVLALCHGVRVGVCSSKSKAFMAPEVAEVVHDKLQIKDHDFSGLLGPSSDAWLLGCLLVALVTGDEQLAAGWSTEGSYDDWKNEVLTKVDASLVGTHMEPWSATIVSCLNYDPEGRPEIADVWKCINGSLMNSDIEALIPNVDLAARKSFMCLLLGELSSMCSNLGAVESDDTMHLSQDLDDKHSTPDDASSGGIINNEEVGAAGMDGPKCGLYNSSTLLAHRDCITGLAIGVDIFNVMHLTRTATQGLPNNRSSLTAGGFLFSSSYDKTINVWSLQDFSHKQSLKGHEHKITAIVVVDNDNQSLCISGDSGSGIFVWCVDPSLSNEPLNKWYESNDWIYRGVHCLAVSGTGYLYTGSRDKSIKAWSLEDYSLRCTMTGHKSTVSCLAVACGILYSGSWDGSIRSWWLTDHSPLSVLEDGTPGSITPVLSISTELDFVVASYENGCLKIWKDDVLVKSEKLQNGAIYAAKLNDKWLYAGGWDKVVNIQELLEDDSEVEIRDVATFTCDSIITSILYWDGRLIVGLSNREIKVFYKAS

SEQ ID NO: 18509 - protein, 271 aa, Oryza sativa
  Clone ID: TF_OSC400608j.C1.p11.fg
MASSSLLVRLASDEMPQTLDASSSSSCYDAFVPVFHPDPSSGFSAASVVAAADRLRSQFLSVEPDLFHDALVAPSPDHLGFPDEEEEEEIRWDCLQLDDDDEEEEGVADLRLEASNAAEEFDWEEVASPSGGAGMDQPEPEWEVLADVPPPPPPPADEGFVYTSDRDVYEVLVGEGLFLKSKPPAARSAVEALPSAVVAAGEDGEGEECAVCRDGVAAGERVKRLPCSHGYHEECIMPWLDVRNSCPLCRFELPTDDPQYESWKASRAAAA

SEQ ID NO: 18510 - protein, 164 aa, Oryza sativa
  Clone ID: TF_OSC5328j.C1.p2.fg
MDPDAALRVELVGVVAVGAVVVVLAAGAFPGGRWRKRAAARVDDVERALGAATLMTYEQAAAAAAKKASSSSRAAAAAEEQGEDRCAYCQSEYAGADEVRVVQCGHFFHAGCIDRWLRKHRRCPLCRGGLSPLPPLPKPGCRPMPPRTSRPAASSATATASAAG

SEQ ID NO: 18511 - protein, 135 aa, Oryza sativa
  Clone ID: TF_OSC8949j.C1.p12.gm
LSSDDEEEINHHPTHATSPPTNAAASSSAYRRAGLDNIPRLDSSSHPGPDFVAVDKLRMMPCCHTFHQRCIFDWLRLAAAMHLLSLPPPPLPTQHNRRMIRLGARSQGRSQGRNFFSLQKWLPLQQQTNHAQGNC

SEQ ID NO: 18512 - protein, 241 aa, Oryza sativa
  Clone ID: TF_OSC419098j.C1.p9.fg
MGSALSGSGSGSLLVLSVSVVGILFTSILLLAYYLFLACSWRRRSHQTARPTPPLPSFFLAADQPRRGLGLEEAAIRRIPTLRYQQQQQHNKQQQCGVCLGEFREGERLRRLPPCLHSFHIDCIDAWLATALTCPLCRAHVTVDTNHIAAATTSTRHDDDQLLSGVHQPMRRSFSLDSCHLYLAIILHPHQLSDSDTRSRSRREPKPAVLESERPSRTLRRSFFSFSHTTTSPVPTPILPI

SEQ ID NO: 18513 - protein, 202 aa, Oryza sativa
  Clone ID: TF_OSC401894j.C1.p13.fg
MLGSGLNLVSAALGFGMTAAFVAFVCARFVCCRARRADASASRPHPSPVDFDADFPSDFDRPIEHSRSGLEPLAVAAIPTMKYNCEAFHSEDDTQCSICLSEYKEKDILRIVPICHHNFHLYCLDAWLLKQTTCPICRISLKELPDGKSTVSSAPTMSQPPTLPESSVNPTSHFLPVHQEHRSHQDGPDMPESVEVVIEIRQ

SEQ ID NO: 18514 - protein, 115 aa, Oryza sativa
  Clone ID: TF_OSC402429j.C1.p6.fg
MSYLLSYISKMLCIKIPSEARQASEDGGSGGLTECSVCLSRIRVGEATRRLPCRHAFHRDCVDRWLLSCRRTCPLCRVYVVVDGNKPGVAAKHTGEPPLAEDMVIWFSAMLVPGF

SEQ ID NO: 18515 - protein, 178 aa, Oryza sativa
  Clone ID: TF_OSC421349j.C1.p1.fg
MSASSPVAYDANVLLAAVTALSAAIAFVAALHLYARCLLRRRVAGAGAGAAGNPHALRRPVTPGGNYELEVISVAACALEGGGLDAKQLGALPVFTWGSSSPATAAADAAVQCAVCLGEMEDGELGRLLPACRHVFHAECIDTWLAVSSTCPVCRAAVGAAEDDEPAAAPVAGVSPAS

SEQ ID NO: 18516 - protein, 474 aa, Oryza sativa
  Clone ID: TF_OSC401970j.C1.p9.gm
MDMLKEINIMVEDNKNEDGVRSYKIEDPFEWRNRMREIDSKEKFQQVRALAKFLQDLYAMSHSIGISCGHETSSTQEGFPEALGRDLETPGLCKPGFQEALEITSMHPRRDSSAYTTRPPPPPPTADGGGNGGRISPAVLFIIVILAVIFFISGLLHLLVRLLMKKQHRRGGAENAAPSPHSRHVGRDAAMDRQLQQLFHLHDSGLDQAFIDALPVFAYRDIVGGDKEPFDCAVCLCEFDGEDRLRLLPVCGHAFHLHCIDTWLLSNSTCPLCRGTLYVPGLTIESLMFDFDERLEEGRLSEECEDGFQSSRQKKPMDEEQTVTEKRVFPVRLGKFKNVGNTGVGGVDNGNAAGIVSREPGESSSSSLDTRRCFSMGTYQYVLGASELRVALQPGRNKNGVGSRLKGRATGISSVNAEIMEGKRICAKSKGESFSMSKIWQWSNVKGKLPAVLVVEFLNYSYSFGLISHVYVFH

SEQ ID NO: 18517 - protein, 114 aa, Oryza sativa
  unsure (1)..(114): unsure at all Xaa locations
  Clone ID: TF_OSC24818j.C1.p1.gp
MPPRDGGGGGADEEGGSGDCAVCLAEYAAGDEVRVLPACGHGFHRECVDRWLLTRAPTCPVCRAPVVARVEGPDDDAKEDYCGDGESVERHGGGGGDIGFLSVAGESRVLPAIX

SEQ ID NO: 18518 - protein, 188 aa, Oryza sativa
  Clone ID: TF_OSC900356j.C1.p14.fg
MDRAQRAHMVRALGVTTTVLFVASVSYIALTALYACFCDGGGRRRREDGGSSSVRPEPSEETKRALDGIPVHVVQMPPRDGGGGGADEEGGSGDCAVCLAEYAAGDEVRVLPACGHGFHRECVDRWLLTRAPTCPVCRAPVVARVEGPDDDAKEDYCGDGESVERHGGGGGDIGFLSVAGESRVLPAI

SEQ ID NO: 18519 - protein, 327 aa, Oryza sativa
  Clone ID: TF_OSC401948j.C1.p36.fg
MAGDRRGGGGVVSADGERRRGIRRLLLPRGEGSSSSSPPQPPPLQAEEGRRKGFASAALRGLGCTSAAASQAYAPGAGAAAAAAVRSSADWHGRRRRRGKEKRKERGGGGGGGGGGHLVGGGIGADVWCAPGIPFAAEASSVDCVVARHQMVGRGRGGDAERPHRERPCLSRRVTVQEQISSSFMDSPPPPHLDVAPFFGADLLPSGRLRRMRGYRHSPVGLEEEIMMFQTRVLLGGMSMYDRYQDWRLDVDNMTYEELLELGDKIGYVNTGLREDEIVRNLRKEEFEANEEMGRLDCGHSYHVYCIKQWLSQKNVCPVCKTAVTKT

SEQ ID NO: 18520 - protein, 197 aa, Oryza sativa
  Clone ID: TF_OSC412775j.C1.p23.fg
MLASAAEFTDNPAATATVAARHGVDGGGSRVVVPLFLVTVSLFFVTYQLFGVAAAAGAMVLDVCAVALAALNVTVTRARRFPFLRLSLGGEEGHGGGGGAGGGDVAPAAAGMDAAAIMALPAAFGYKREQTAAAAGGWAQCSICLGLARVGEAVRRLPSCGHLFHAGCVDEWLRAHATCPLCRAAVCAAGPEPELPV

SEQ ID NO: 18521 - protein, 285 aa, Oryza sativa
  Clone ID: TF_OSC401064j.C1.p6.gm
MSSSSSSLLSSLATLGLGYSIAIALGFLVLLASLLLASYFCFRRGGGGGHFSGVLTPSSSSSHLSITVPRVLFVAEGSESPDAYSSGVAAASSPVGLDPAAIASYPKVPFYSGAGADADAMCSICLSEYADGEMLRVMPDCRHRFHVCCLDAWLRRNASCPVCRSSPIPTPVATPLATPLSELVPLSQYAADRRRSRGLCLGYLEKFGRCKTTTRDHALGENRSLVTCLGKRRGQGELAVVIVAATEVALPLHVADEVVSPLQVATAKIRRCQWPLDCREKGAGG

SEQ ID NO: 18522 - protein, 570 aa, Oryza sativa
  Clone ID: TF_OSC14624j.C1.p1.fg
MAMGGIRCPVCFAAMAAGQAIFTAECSHTFHLRCVPGGAAACPVCATPWRDAPSPLTTSSIPAAYDDDDPVEPVATAARNSSGGGGGVLVLKTHCEYPALSRGAARDGFAVLVHAKAPAAAAEAAGRAPLDLVTVLDVSTSMTGDKLALVKRAMGFVIDSLGAADRLSVVAFATPTRAGCSAAPPDAHVGGREGTAKRAVDALVANGNTNIRDGLDVDAKVLDGRRHTDAVASVILLSDGQDNQTMGYRGRFHMTDFKAAATSYDVLVPPSFTRAGGGERCAPVHAFGFGTDHDAAAMHSISEITGGTFSFIENLAVIQDTFARCIGGLLSVAAQNARISVECLDPGVRVRAVKSGRYESRIDAEGRAATVDVGELYADEERRFLLLLDVPRADGDAAVATRLASVRCTYRDTATEQSVDVAGEEDAVVLRPAVATGVAPSMEVELERERVRLEAADDIALARAAAERGAYGEAARILDARREALSRSAPAASGDAMCAALVAELRELSERVADEREYAQTGRACVLAGMSSHGQQRASSVQLGELRVRVFVRVRDTGDAEDGEALGDFA

SEQ ID NO: 18523 - protein, 571 aa, Oryza sativa
  Clone ID: TF_OSC900244j.C1.p19.fg
MAMGGIRCPVCFAAMAAGQAIFTAECSHTFHLRCVPGGAAACPVCATPWRDAPSPLTTSSIPAAYDDDDPVEPVATAARNSSGGGGGVLVLKTHCEYPALSRGAARDGFAVLVHAKAPAAAAEAAGRAPLDLVTVLDVSTSMTGDKLALVKRAMGFVIDSLGAADPPQRRRLRHADARRVLPRLRLTRMSEDGKATAKRAVDALVANGNTNIRDGLDVDAKVLDGRRHTDAVASVILLSDGQDNQTMGYRGRFHMTDFKAAATSYDVLVPPSFTRAGGGERCAPVHAFGFGTDHDAAAMHSISEITGGTFSFIENLAVIQDTFARCIGGLLSVAAQNARISVECLDPGVRVRAVKSGRYESRIDAEGRAATVDVGELYADEERRFLLLLDVPRADGDAAVATRLASVRCTYRDTATEQSVDVAGEEDAVVLRPAVATGVAPSMEVELERERVRLEAADDIALARAAAERGAYGEAARILDARREALSRSAPAASGDAMCAALVAELRELSERVADEREYAQTGRACVLAGMSSHGQQRASSVQLGELRVRVFVRVRDTGDAEDGEALGDFA

SEQ ID NO: 18524 - protein, 423 aa, Oryza sativa
  Clone ID: TF_OSC400993j.C1.p79.np
MAKCQFSPIPRAIAASSLVLPLPPHPGEHILRHRCLLRSPFIARASTASSLVLPLPPHPGEHILRHRRLLRSPSIARASEGRRRSSCCFRRIDKMPNRATHWCYACRRPIRVSGQDITCPNCNDGFIQEISEIGGSLNTYGIFDPSFDERRDRSFGMVEAMSDLMRQRMAEMGRNRVLDFHGTRGASSHQGRQPTVRPMLIFGSNAPDRVSSSSEEADILLRQGRRIGADRPNFSRFLVGPSLEALFEQLLLHNNRQGPPPAPQSAIDSMPVVKINLRHLRDDPHCPVCTDKFEVGTEAREMPCKHLYHAECIIPWLVQHNSCPVCRHPLPSSSHRSGSTRSSSTHSNEAISHGVARSDADPVPVARSDDSRNHEMHGSFSFLWPFDSPTPDSSSYTHEGGVGEPTVHDDAGQMTYSEWHYDY

SEQ ID NO: 18525 - protein, 162 aa, Oryza sativa
  Clone ID: TF_OSC416737j.C1.p15.fg
MSFPLVCFCRQIPRPIVALFKLLQAVALAFVLILCFLGLYEFPYTVEDHAPLIHGRRRDPLGDDGLQPEAVKRGLPLVEYMQLADLSADCHDGESGYPATCRVCLERLEATDEVRRLGNCTHAFHIGCIDRWIDLGEVTCPLCRSHLLPRQRRGLLGSRRFG

SEQ ID NO: 18526 - protein, 320 aa, Oryza sativa
  Clone ID: TF_OSC900362j.C1.p8.fg
MSAPAAVEQRLQALRQKLGRKQHFEEAVADLAAAVRDHHAAASPALRDLMYSTVCRVATVLQTRYTAPGFWRAGLNLFLGTEKLVTNPSEKEQLKTFILRAREHLDEKENEESMPNNRETDTRFLFEGHLTVGPEPPPPAWLVAQNLARELSILAEPSGDQGANNNGESRAEEMAPAAAIMNFLNTMTVDGDLEAALEESLQNVMANPKVPPASKEVVANLPVVTVTEEIIARLGKETQCAVCRESLLVDDKMQELPCKHLFHPPCLKPWLDENNSCPICRHELRTDDHVYESRKEREREEEEDRKGAANAVRGGEFMYV

SEQ ID NO: 18527 - protein, 331 aa, Oryza sativa
  Clone ID: TF_OSC421892j.C1.p4.np
GAPCSAGSGGATSPGTTRRSRSGSARRRRRRRRGSRRSGPCGTTRGGSAGSRGSSTGRCTTYSVTARKNQSVNANYLLNFHYDPISRPQPRGPRTYPTRRQRKIRPYNKDLFLQANFKFVVLDTGSYEIELMDPDKMLQWEDIVCVRYYSPCEVQCPICLESPLCPQITSCGHIYCFPCILRYLLMGKEDYKGESWKKCPLCFMMISTKELYTIYITQVQHFHVGDNVTFTLLSRSKNSLTPSIKNLTDESTIDEDPCSAFSKFILTSDVELSVREAKTDLVNWLHMADLGLVDDLEKLPYVSTALEQLEERMKYWSEYKLLTYKLWVSKL

SEQ ID NO: 18528 - protein, 521 aa, Oryza sativa
  Clone ID: TF_OSC420404j.C1.p5.fg
MGSGSSKAGASSASSSSSASASASASGGDEASKGNGKGQRRGRGRGRGLLQRLPSSSSSCFRGHGTPSRDDASSASSPPPPPRPPRRPFESSKGEENGSLPSIAQMDKSEEDAPTIPKSHPGEGATLPSSHINRDQDVDVLQNATAVNNRVEVNQSPNHSDSSRPRFGVNFGLSRAVSLGSSVACSILSSDLSTSANPDGGHGNVDNSSDANISQQGGASTAGIDSTLDMLRDSVTAQARAAHQARRNLLESDNANLRYSNRRMGPQEPFEGSVRFSRTLSVGRLRDRVLRRTPFSDGLFTPSLLYDRAIWPSGNASARQNSAIMQRTNSERNSELQLDSSTDSATLREANNRDLLERRSAFLERRRIRSQVRALQRLGSRTSSRPGNSDEETNTRASISRIVMLAEALFEVLDEIHQQSAALSSRPSFSSIGSVPAPKEVVERLPVKVYRRSLKHQTEEAAQCYICLVEYAEGDCVRILPCNHEFHLTCVDKWLKEIHRVCPLCRGDVCRSNASGIGKTT

SEQ ID NO: 18529 - protein, 353 aa, Oryza sativa
  Clone ID: TF_OSC21192j.C1.p6.fg
MAHRRIALAVLVTLLLSAFRPCLAQQSNDDTSKHHRSATAGGFTPTTVVVLVALITAFVLLTVFSVLINRCAQARAPPRRAFRSTASHQPVGGAAAASRASRGLDKEVVEAFPTAVYGDVKARMAAKSGPLECAVCLAEFADSDELRVLPACCHVFHPDCIDPWLAAAVTCPLCRANLTAPPVSLAAAESSDLTAPEEAVQEEESEELDEASLMATFTPESVIDFGATHDHEFDRAGYPHYRRTQSAMDAAPDRHTLRLPEHVMKELAADRRHRRAASLAGYPDSVERTPRWLTSLWRSVSWQRQSRADWDAGEEHGGSKRVHPVAGAQDETPSGSGSDGSKENSDSDALNRV

SEQ ID NO: 18530 - protein, 387 aa, Oryza sativa
  Clone ID: TF_OSC21192j.C1.p6.np
VGPLVNLSFSVVLLRLFLSVQAQQSNDDTSKHHRSATAGGFTPTTVVVLVALITAFVLLTVFSVLINRCAQARTASHQPVGGRRRTASHQPVGGRRRRASRGLDKEVVEAFPTAVYGDVKARMAAKSGPLECAVCLAEFADSDELRVLPACCHVFHPDCIDPWLAAAVTCPLCRANLTAPPVSLAAAESSDLTAPEEAVQEEESEELDEASLMATFTPGRTQSAMDAAPDRHRTQSAMDAAPDRHTLRLPEHVMKELAADRRHRRAASLAGYPDSVERTPSLRVDASRMCVDYWEEKRTPAAAMRRRRRGPGRRCWSYSARASSSSAPAGRSSSASFVHGGTRLWLSATLRSPAGRCCCRRCACRSTAAAGTGSATSSSRGASSAPP

SEQ ID NO: 18531 - protein, 391 aa, Oryza sativa
  unsure (1)..(391): unsure at all Xaa locations
  Clone ID: TF_OSC410031j.C1.p6.np
HRRIALAVLVTLLLSAFRPCLAQQSNDDTSKQPERHGRLTPTTVVVLVALITAFVLLTVFSVLINRCAQARAPPRGVPQHGVPSARRRRRRLSRASRGLDKEVVEAFPTAVYGDVKARMAAKSGPLECAVCLAEFADSDELRVLPACCHVFHPDCIDPWLAAAVTCPLCRANLTAPPVSLAAAESSDLTAPEEAVQEEESEELDEASLMATFTPESVIDRRDARPXIRQSRVPSLPEDAVGHGAAPDRHTLRLPEHVMKELAADRRHRRAASLAGYPDSGRGRRGRGRTARRRTPRRWRSSSSGTAGIAAAGRGRRRRGAAGXTRRTAIADSSGGXPVRSSTSSAXMYMGSSSTAHASSTIPNAACTPPSCGTSSRRTPAHSVSSALAMPS

SEQ ID NO: 18532 - protein, 260 aa, Oryza sativa
  Clone ID: TF_OSC412577j.C1.p7.fg
MEAVAVHASFSSYSPPVVAGGRDDAGSSSSSRSMSRLPARVAGAVARGIVTFVFATVGTILGAITGGLIGLATESGMVRGTGIGAISGAVVAMEVVDSSVAMWCSHDSGIWSVLYVLDVIWSLLTGRLVREKVDPAVQNAVDSQMNAADAPFRESAPTLAEMFDTGIPGVAAAATGMPADAIAALPVTTFAAAAGGDDRAGCSVCLQDLEDGERARRLPECGHTFHLRCIDSWLLRHASCPLCRRTVVAAAVAVDDVVVG

SEQ ID NO: 18533 - protein, 391 aa, Oryza sativa
  Clone ID: TF_OSC20834j.C1.p2.fg
MAAAAREAAESPNPRSAPRRAAAAAAKDASSFLSPRFRSAAAQAGWDEESLLHAALVVEDTPVRESRRRRRASTTSSSAGGGGSAGSNTRKRRSWRQPPGSIPPVVFLLDDDEKKPDTTADGKKEVKEEEKKTVVVGEKEACSEKAAATSELPCMDRLREELSCAICLEICFEPSTTPCGHSFCMKCLKHAAAKCGKRCPKCRQLISNSRSCTVNTVLWNTIQLLFPSETEARRTSIASSSETNDDLAQQISQRSNSMAQGGIRSSSSNGIGYITQRSTRSSATNNRSFTTTGSRRSTFVAQEGSSTATGRGFVRASQLVPSARVVSVRSHQSDDAALAYRLQQEEFMTAFESEGERQPPRSSSSTVSAARANLRAMASRAIRLRARGWPV

SEQ ID NO: 18534 - protein, 197 aa, Oryza sativa
  Clone ID: TF_OSC900034j.C1.p2.fg
MEVDASAVARALPRDFPPIENLSFEGFPRYTFKIGNRIHCTNLMYRPGSRTLLTQEEAHEIIREGLRSDIRRGRIQLNADFLQQLVDQVRDHILQRQRRGTATAMDGVVEVEDAYRNGGFGAIPASSKAMAELQEAMASDARERGCAVCLEDFEAGEKLTRMPCSHCFHATCILDWLRLSHRCPLCRFPMPTQDQSY

SEQ ID NO: 18535 - protein, 199 aa, Oryza sativa
  Clone ID: TF_OSC900071j.C1.p5.fg
MEVDASAVARALPRDFPPIENLSFEGIPRYTFKIGNRIHCTNLMYRPGSRTLLTQEEAHEIIRERLRSDIRRGRIELDADFLQQLVDQVRDHILQRQRRGTATAIAMDGVVEVEDAYRNGGFGAVPASSKAMAELQEAMASDARERGCAVCLEDFEAGEKLTRMPCSHCFHATCILDWLRLSHRCPLCRFPMPTQDQSY

SEQ ID NO: 18536 - protein, 162 aa, Oryza sativa
  Clone ID: TF_OSC401236j.C1.p2.gm
MMMSSSSSAAAGYDGELGPSAAAQAAGVRRKALRAMPTMVYSAAGGPSPACAICLADLEPGERVRVLPKCNHGFHVRCVDRWLLARSTCPTCRQPLFATPPVRPFLAPLRPEGFVTPSNVGGGAVVLGTLAMVSAVLEEEEDDDPCSTGGRRSAGSRAELTV

SEQ ID NO: 18537 - protein, 158 aa, Oryza sativa
  Clone ID: TF_OSC900293j.C1.p4.fg
MALSLGEVAMLVVDVAFVLCLIVAIMCCCEDDRRRPRSSSQRDAQVGGRVVMLRVVEAPPGQQRVAPAAAKAALPYFPYAQAQGRTSSSETQTLVCAVCLEELRHGELCSEVPACRHIFHRGCVGSWMKKSDSCPLCRVKISSWIAGPTESPTAADAV

SEQ ID NO: 18538 - protein, 248 aa, Oryza sativa
  Clone ID: TF_OSC401206j.C1.p18.fg
MVLCSMRKSFKDSLKVLEADIQHANTLASDFSRDYDGACLQMRMSYSPAAQFFLFLVQWTDCSLAGALGLLRILIYKVYVDGTTTLSTHERKASIREFYAVIFPSLMQLHKGISDVDDRRQKAICTERYRRRDEDESKRHVSEIDVEREEECGICMEMNNKVVLPNCSHAMCMKCYRQWRSRSQSCPFCRDSLKRVNSGDLWMLTDDRDVIDMATITRENLRRLFMYIEKLPLVAPDNIFYAYDSHVK

SEQ ID NO: 18539 - protein, 255 aa, Oryza sativa
  Clone ID: TF_OSC900263j.C1.p18.fg
MVLCSMRKSFKDSLKVLEADIQHANTLASDFSRDYDGACLQMRMSYSPAAQFFLFLVQWTDCSLAGALGLLRILIYKVYVDGTTTLSTHERKASIREFYAVIFPSLMQLHKGISDVDDRRQKAICTERYRRRDEDESKRHVSEIDVEREEECGICMEMNNKVVLPNCSHAMCMKCYRQWRSRSQSCPFCRDSLKRVNSGDLWMLTDDRDVIDMATITRENLRRLFMYIEKLPLVAPDNIFYAYDSHRMFLVVGCG

SEQ ID NO: 18540 - protein, 529 aa, Oryza sativa
  unsure (1)..(529): unsure at all Xaa locations
  Clone ID: TF_OSC410012j.C1.p1.np
MNCTKGGGFPLLFCAVICLMAQQGACNVVLIANNTTLSFDDVEATFTPEVKDSGVNGAIYAVEPLDACSPLRKKAANGPVSPFALVIRGGCQFDDKVRNAQNAGFKAVIVYDDEDSGVLVSSNFTVAGSSSGIYIYAVFLSKASGEVLKKYSGQSDVEVWILPVYENSAWSIMAISFTSLLAMAAVLATCFFVRRHQIRRDRGRIPVTREFHGMSSQLVKAMPSLIFTKVQEDNSTSSSCAICLEDYSFGEKLRVLPCRHKFHATCVDMWLTSWKTFCPVCKRDASAGTSKPPASESTPLLSSVIHLSAESTALSSFRSTVAVSPPRPIRRHPSSQSTSRAYSISSAPRNYNLQRYYTNSPYISTSRSNVDLANMSSRSHTPHQASMHSLRSGHLSLPINIRYTIPHVSRSDYGSASLGLSHDSCSHHGSPSYYHSSLGQQRSYLMHRTESGPSLSTMVLQSPQXSQXQYNGESGKSISCGLTRSLRQAYVQHCLDSDGSLSAVTSDQSLPRCXLSYEVHCFMSICASP

SEQ ID NO: 18541 - protein, 228 aa, Oryza sativa
  Clone ID: TF_OSC400622j.C1.p98.fg
MATAPRARRLAAADVQPATPAVGPASGGRPQFNLSSGAATAVVFVSIVLCFILLCTYCRCARQRAIAGARSRVMREIRERVPGVLLLRPAAAAAALPVLPYSAAAAAAGAKKGPLVEDCPVCLEAFAGDDGVKVVPACGHVFHAACIDQWLAVRNSCPVCRCAVVCYYADRARDTAVVVDDDDDDQEVVLERVVAMIEAIREEQREEEAAARRAPASDGGGGEGLMTS

SEQ ID NO: 18542 - protein, 469 aa, Oryza sativa
  Clone ID: TF_OSC16299j.C1.p4.fg
MATATAVYYAFSSREQFYPAMVYLSTSKICFVLLLNTGLVAMCVAWQLVKRLFLGTLREAEVERLNEQAWREVVEILFAVTIFRQDFSVSFLAMVAALLLVKALHWLAQKRVEYIETTPSVPMLSHARIVSFMLFLLVVDCLFLSNSLRSLIHKREASVAIFFSFDDMLMEGQWEKKAVYTFYLELISDLVHLSLYMLFFIAIFLNYGVPLHLIRELYETFRNFRIRIADYVRYRKITSNMNERFPDATADELNASDATCIICREEMTTAKKLLCGHLFHVHCLRSWLERQHTCPTCRAPILPPDNGRTAARPHGVHPGVQPGNGTPGSERAAGENISRRQAKLEAAASAASLYGRSFAYPPANNLNRYSTPPQSTSNGPQSGEASTSNQSPKGHATADPSAPTFYARGAVSSVTTTRELESSLQKAYENAIKSQIERLMQAACKFLDMSVVNTSLTALKLHAWYEPLG

SEQ ID NO: 18543 - protein, 303 aa, Oryza sativa
  Clone ID: TF_OSC16389j.C1.p1.fg
DMLMEGQWEKKAVYTFYLELISDLVHLSLYMLFFIAIFLNYGVPLHLIRELYETFRNFRIRIADYVRYRKITSNMNERFPDATADELNASDATCIICREEMTTAKKLLCGHLFHVHCLRSWLERQHTCPTCRAPILPPDNGRTAARPHGVHPGVQPGNGTPGSERAAGENISRRQAKLEAAASAASLYGRSFAYPPANNLNRYSTPPQSTSNGPQSGEASTSNQSPKGHATADPSAPTFYARGAVSSVTTTRELESSLQKAYENAIKSQIERLMQAACKFLDMSVVNTSLTALKLHAWYEPLG

SEQ ID NO: 18544 - protein, 77 aa, Oryza sativa
  unsure (1)..(77): unsure at all Xaa locations
  Clone ID: TF_OSC461j.C1.p4.gp
GGEETAETDVCAICLGEFADGEKVRVLPRCRHGFHVRCVDAWLVSHGSCPTCRRQVIGGGGSTPPPDSDTIAVVVAX

SEQ ID NO: 18545 - protein, 439 aa, Oryza sativa
  Clone ID: TF_OSC400542j.C1.p6.fg
MGAARGGVRRVRREALVACMTCPLCKGLLREATAITECLHTFCKECIMEKIDDEEVDHCPVCNIDLGCDPEEKLRPDHNVQDIRNKVFPLKVKKVGAPKAPTVTLPVKRKQRSLSSLVVDTPRVAVQTGLTGRRTKTARRTAVSHVNSPGNNGTIKLANKSEGRDHKTQKISAAQSAKMTKTGNKKKNNTDVDVTIQSSSEDRKDDHTIDKEDLKKPLNSLVDTANRTKFFRSGPKGQAAKEDKIKNSIKLLAEDDTEDKLVVTGRKVMPCSNKLKVKEENNRSPSQSASSKDKTTSDYELRKGQHADSQQGQIGSTRTGALHDGITRPVWFLLVPSPDQKQDPRLPQLPTYYVRIKDGSLQTSLIQRYIMNKLDLASEDEVEITCHGEAISPSTTLQGLLELWLKSSPVEQVQASLGAQAKEFVMELGYRRPQRPPSS

SEQ ID NO: 18546 - protein, 166 aa, Oryza sativa
  Clone ID: TF_OSC405090j.C1.p6.fg
MSSHDPSSATAADAVAGGSYRVCDTVVLVCLAFASSIIVFTVAVCFRRAVTLQGYAASASASPSGRGGGAAAAPAAVGGLRGLAPSALAAIPKFAYRRGAAGGGGGWAQCAICLGVVRDGEAVRRLPECKHLFHVECVDMWLYSHATCPLCRRDVGAAAAAAGDKV

SEQ ID NO: 18547 - protein, 542 aa, Oryza sativa
  Clone ID: TF_OSC421348j.C1.p9.fg
MAVPGPLKQQFRTDCTEYFLWRYPFDGGGRKERLVNSQKLFMHPRSDPANGAGSSGYVGNTMRSNDLPSSSYAGQAYGQQNRAPIHASYSGHAPAGSSSGSYAPYNTQHMPASSYPHGSEDNFIPSSHVDGRRVALKRRNPIIHPTDGFGVGNYYAGSSSNTQFSRPMPPNPIPPPESCVRMPSHLGSNHWNDHRYVNHEGSQRNVRGRHDHSTIHLEQSPAAACPSSSINVPPYHPNANGPFGSAPVQRDRAPLSVHPRILPPGPDGSSIAFRERPYYPAPQSTNISAPVPTLPISCDSAPFAHGGYAPRSAHRNNLRTYPPPAFASSSNPGAVSHEPAIPSYPPAAPSYPPATSAASSSVQPFHAEAAAHLRHPRHVSVGGSGSARSRRMRDSYHGFHHLMIEDNNLGRSAAERFMMLDQLVIHESREAFDPHWDMRLDIDDMSYEELLALEERIGHVNTGLADEKISGCVMEVACCSSSHLQDDQDNERCVICLEEYKHEDTLGRLKCGHGFHCNCIKKWLQVKNTCPVCKAAAADEGS

SEQ ID NO: 18548 - protein, 338 aa, Oryza sativa
  Clone ID: TF_OSC8255j.C1.p5.gm
MSSSPAHAQRFYCHQCDRTVPIPPPTFPDADVLCPFCGGGFVEELGEDINPNPNPNPSPFLPHHPFFPFASPSFDLRNPSDLAAFFGPPSPSPSPSPAARHFDPSNFLHDHFTGLLSGGATIQIVLEGSSASLPLGGAAAGPGGISLGDYFVGSGLEQLIQQLAENDPNRYGTPPAAKSAVAALPDVAVSADMMAADGGAQCAVCMDDFHLGAAAKQLPCKHVFHKDCILPWLDLHSSCPVCRFELPTDDPHHAHPTLGSHRPAAPASASASPSPAPPPRLAERRFRISLPWPLRAAFGGQAESSNPTNQDPVGGSTDASGSGNNNATGGHRGYDDLD

SEQ ID NO: 18549 - protein, 338 aa, Oryza sativa
  Clone ID: TF_OSC900291j.C1.p18.fg
MSSSPAHAQRFYCHQCDRTVPIPPPTSPDADVLCPFCGGGFVEELGEDINPNPNPNPSPFLPHHPFFPFASPSFDLRNPSDLAAFFGPPSPSPSPSPAARHFDPSNFLHDHFTGLLSGGATIQIVLEGSSASLPLGGAAAGPGGISLGDYFVGSGLEQLIQQLAENDPNRYGTPPAAKSAVAALPDVAVSADMMAADGGAQCAVCMDDFHLGAAAKQLPCKHVFHKDCILPWLDLHSSCPVCRFELPTDDPHHAHPTLGSHRPAAPASASASPSPAPPPRLAERRFRISLPWPLRAAFGGQAESSNPTNQDPVGGSTDASGSGNNNATGGHRGYDDLD

SEQ ID NO: 18550 - protein, 233 aa, Oryza sativa
  Clone ID: TF_OSC18908j.C1.p3.fg
MSSSNGTTTYLPGGEAAGGGGGGNSGCCSTTTLFGALAASFALSFFLITIFICLRALRVARRRRDRPLVMEQEQRRPTPPRFGLDAAAIARLPSFPYVRARDDGEVSDSASSSSVECAVCLSAVDEGETVRQLPACGHVFHRECIDMWLSSRASCPVCRGKAAPADELADAIVARIAVTPDLVGPRVSMSVVVPVEMLKGEMVGASSTSRAASAPPEQLDARAPGPETDLESK

SEQ ID NO: 18551 - protein, 212 aa, Oryza sativa
  Clone ID: TF_OSC16946j.C1.p2.fg
MEVVVARRGVVVLRLRHGEPPPSAAARSGGRCSRLLLLWTFAVGFAAGLFMFASHVLAAVAAAVLFAAMCLYTCLCLNNAAPEEEEEQQQQPPVLLLPGQALRVAVMPPSVGRLQQQEVNGGGGGGGLRQEDVEAAIPAFEYSKGSGGAAEAEQCAVCIGVVRRGKTVRRLPACGHAFHAACIDGWLRAHATCPVCRADVKVAAGGGGGAPV

SEQ ID NO: 18552 - protein, 177 aa, Oryza sativa
  Clone ID: TF_OSC405090j.C1.p5.fg
MSLSSSSNSLPYSTDQGGYSTHDTLVLLGIGFFATAVSVLMIVLCECLCCRRRRRGGGTVVYVAARPFFLGGGGLSASAVATLPSFVYRREEWAEAAPRGDGSGSGRGGGGGWAQCAVCLSIVQEGETVRQLPACKHLFHVGCIDMWLHSHSTCPLCRASVEPLGKETPLKDQAPPV

SEQ ID NO: 18553 - protein, 418 aa, Oryza sativa
  Clone ID: TF_OSC900340j.C1.p12.fg
MLYPERPSRVNGTATVDCSAYPLDCHPVCPGGSCYEIAEPPPPSPVVPRVDVAVDDHHLPVRLLLTVSLLSAFLFISLSVSTILLYRRRVVLRRRRRAATAPLPGDDGFGDGDEEAGGGGGDVHHVWYIRTVGLDEATITSIATAEYRAGVGWGGDCAVCLGEFRDGELVRLLPRCSHPFHAPCIDTWLRAHVNCPLCRSPVVVPSDLPATATEGEAEGGGQAEEHQVFDEISLSESRADVSEDSDTSSDTQSEDTAASPEDGGRVMPKPIRRSASMDSPLFLVVVPEAQDDAMRGDRKFPNGQEMKLFSVKEKDATGTSSSSCQAGRFGIGRSMSSSGQGFFFSRNGRSSSAVLPLFRKDSPDQGTSYQLFHFPRFFISISFGAQSKIWDHYINILMCLLLKLYSTFQILLSTDYFG

SEQ ID NO: 18554 - protein, 279 aa, Oryza sativa
  Clone ID: TF_OSC24709j.C1.p1.fg
MASSPVSYWCYHCSRFVRVSPSTVVCPECDGGFLEQFPQPPPRGGGGSGRRGAMNPVIVLRGGSLSGFELYYDDGSGDGLRPLPGDVSHLLMGSGFHRLLDQFSRLEAAAPRPPASKAAVESMPSVTVAGSGAHCAVCQEAFEPGASAREMPCKHVYHQDCILPWLSLRNSCPVCRRELPAAAAPESEADAGLTIWRLPRGGFAVGRFAGGPREQLPVVYTELDGGFSNGVGPRRVTWPEGDGHVDGGEGRIRRVFRNLFGCFGRSSRPESSSSQSRSG

SEQ ID NO: 18555 - protein, 341 aa, Oryza sativa
  Clone ID: TF_OSC900024j.C1.p21.gm
ARMASSPVSYWCYHCSRFVRVSPSTVVCPECDGGFLEQFPQPPPRGGGGSGRRGAMNPVIVLRGGSLSGFELYYDDGSGDGLRPLPGDVSHLLMGSGFHRLLDQFSRLEAAAPRPPASKAAVESMPSVTVAGSGAHCAVCQEAFEPGASAREMPCKHVYHQDCILPWLSLRNSCPVCRRELPAAAAPESEADAGLTIWRLPRGGFAVGRFAGGPREQLPVVYTELDGGFSNGVGPRRVTWPEGDGHVDGGEVDNRVVFLLEFVPDEIKDSAFVSPDSIRRHRRGLAVPISEVDIRRLVLTYVVASVVPCMLTVVGSDKALSALGIPSRSFLRFLGVLVKTA

SEQ ID NO: 18556 - protein, 696 aa, Oryza sativa
  Clone ID: TF_OSC900134j.C1.p9.fg
MGRRTWQWHAIAALGVACAAAAAVAADRRAFSVTSAAGGGAAAAAAVVAATPEEVGILRKVANFLWQTDGNSYHHVWPEMELGWQIVLGSLIGFFGAAFGSVGGVGGGGIFVPMLTLIIGFDPKSSTAISKCMIMGAAVSTVYYNLKLKHPTLDMPVIDYDLALLIQPMLMLGISIGVIFNVLFPDWLVTVLLIILFLGTSTKAFLKGVETWKKETIIKREAAKRLEQTSEEPEYAPLPTGPGAVADAKRPSDEAASLMKNIYWKEFGLLAFVWMAFLVLQVTKNYTATCSSWYWILNLLQLMFLFIPKKWKPLKITYSKSFTLYGIKIPVSVGVTMYEALGLMSGKRVLSSKGNEQTTLKFHQLCIYCFFGITAGVVGGLLGLGGGFIMGPLFLELGIPPQVSSATATFAMMFSSSMSVVEYYLLNRFPVPYALYFVIVAFIAAIIGQHVVRRLINWLGRASLIIFILAFMIFVSAISLGLSLEITGAKGEKRTFCVFLQGAMEPSSLSLRLKAAIYDLFNSNSLQTYVPFRIRHINGGGNPRPRQEDPGLTDAEFKKAMEQLNKQAYRSLDPHKMVESNRGGRNHAKSARSKPAPNNTEEEKACTICLETFLAGEQVVATPCNHIFHQECITPWVKGHGNCPVCRFALCERNTVSDNSQSGVGEVEVDLDLLEMMRAMEEIFSRVTFSNFMPYN

SEQ ID NO: 18557 - protein, 383 aa, Oryza sativa
  Clone ID: TF_OSC400939j.C1.p7.fg
MASSAPAWVPYEPTRDCSQGLCSMYCPQWCYFIFPPPPPFDVAGTSADDSSGPVFSPLVIAIIGVLASAFLLVSYYTFISKYCGTVSSLRGRVFGSSSGGAAYGGGAGSGGRHGHGQSRSHESWNVSPPSGLDETLINKITVCKYRRGDGFVHTTDCSVCLGEFSDGESLRLLPRCSHAFHQQCIDTWLKSHSNCPLCRANITFVTVGLASPEPEGCAPGETGGDNTHEVVVVMDGLENLCEEQQEAVSRASTADDDHDAKDVAEGMEEANGAAEIREEGSPPKRGASSFDLHRDNRMCIADVLQESMEDELTAARESGLLAGGAGTSRRCHGENSKGRGGRSRRALQLQDAMEALPGKRLPSGGRSCFSSKSGRGKDSDHPM

SEQ ID NO: 18558 - protein, 364 aa, Oryza sativa
  Clone ID: TF_OSC900225j.C1.p18.fg
MARRDGVGGDGGASAAEQQRRVALRVLLSRAEASSPPPATVEEEAQRGRSGGGNKGLASAALRGLGCTSTAALRAHAPASAVEVASSSERWHGRRRRRKVQERRSARGGGGGGGGGVAPPGPAPAAAGDVWCTCAPGIPFAAEASSVDCVVVARHHHAHHTAAAMGSGRRGEAERRHRERPAAPRARRVTMREHISSSLMDSPPFPDMPLLNADLLPPPPSGRHRHGYRHPHVGAAEEEIMMLRTRLLWGRFGMHDQHQDWRLDVDNMTYEELLDLEDRIGYVSTGLHDDEIARSLRMVKYSAFNPKHFATEVERNCSICQEEFEANEETGRLICGHSYHVQCIKQWLSRKNTCPVCKTVVSKT

SEQ ID NO: 18559 - protein, 936 aa, Oryza sativa
  Clone ID: TF_OSC826j.C1.p13.fg
MSDHRTHASDCHPVASQPDVQCLVCTRPFTLDAQVTDTFEALAICRDCKMTVLNDDERDEITSTYRQNTRRRQISRTASIDFLEDAFLQEFSQLIDLARRQGRETDIDSSSVAPQHASFNSTPSQSQRWHASDDESDGLNYVDSVFGEIESAISLGDYGGDSDTSIEEHSVMTRRRISIQLDNDSYMNTDTDIDPMNARLDQWDSDDQEDVEESGFDEIVNTMTQHQQQSHDIQLSGLSEDESEDGVWNWSVSVRQRANVTNLLDDMEEPEMRTTFVGNPDDYVDARQFEMLLEQFAEDNDSRRGAPPAATSFIENLPSVIISASHQTNGDVICPVCKDPIPTRARAKQLPCMHLYHSSCILPWLSSRNTCPVCRYELPTDDAEYERSKQATTNVRDIQVVEEISDEQEVQVTRQMAAGVIEETNTSEHNVRVDEQPNSARRRSGWLFIAAAPVCFCQNSTQCPVESLALFYLCNILWLRAVKIRKKLRRQGIRGPKPTFLYGNTKEIKRIRQELKFSQKQGTNNFISTLFPHFLLCRETYGPVFLYSTGALEILQVSHPDMVKDIGRWTPSELGKPNYLKKSRKALFGGGLFTENGDEWAYQRKIIAPEFFMDKIKGMIQLIEDATVTVLEAWEDMIDDVGGCREIVVDDYLRNLSADVIARACFGSSFTKGEEIFCKLRQLQKVIAQQDSFVGLSALWKYLPTKSNQEIQMLDEQVRLLILDVAKEQHHYQDSHNSLVNAIIDGAQDGRSAAEAEDFIVGNCKTIYFGGHESTAVTAIWCLMLLATHSEAMEVTMVIQETLRLYPPASVMMQEALTDVKLGNIEVPRGTIVQVPRLMLHLDKEAWGADADEFRPDRFANGVTAACRAAHMYVPFGHGPRTCIGQNLAMAELKVVLARLLTKFAFSPSPRYRHSPAFRLTIEPGFGLPLMVTKLP

SEQ ID NO: 18560 - protein, 684 aa, Oryza sativa
  Clone ID: TF_OSC421431j.C1.p19.fg
MDQQNLLPSNPTADEQNLLPNTLEDDDYPHYLLGSHEVEMPNGSVIGQQNTSLNLWDSAGSSSMGCVADHDSLFEAKREHFAPALSIRAPLIIGGRRHEGSSSLPSQSLNLDLNLNQADQFDSEDVDMIQSNGQPGINAFPLNRGLSIPEHVLRHTNSSSATGNPSQVASFSDGMTGQEVNLFGGHRSSCKRKNIDGSLAESSANGSSRNNQRNNIILEPSPSSHESTSGLTAPAPTNHVFSYSPVEQLNQNTNMSANAMLSDHYSLYGDHERERFLRNTRMRTSPNEYDQSSSNLLPEGSLRCSVYQPTQQQSLFIPVQPRASSSSTSSLSRPYVPAVTQFSQNLHRAPSSGNFGSRIGIFPSSADTTNQLSSQDPNRSSVRGNFPEPLLLGSSLFPSDSAELLSMPGGRSNQQNSSSTIRTAVNIGAQQIAGLNASQPTSSSRGSVDIVRRSLQAASVPQSRGSSITSQQQRGHSSTSHEIRSHQPGSSSRANQQHYVRAVPHSVDRQNSNYLDLQSFMQSIAASRDGIRTVSESANQLVHLRNVVEQIRQGRGGRFEDPNFERALFARRASLIDRHRDMRLDVDNMSYEELLALGERIGYVNTGLSEDKIRTGLKQWKYVSIPIEEPLTGVEPCCICQEEYAEGEDMGRLDCGHDFHTACIKQWLVIKNLCPICKKTGLGT

SEQ ID NO: 18561 - protein, 499 aa, Oryza sativa
  Clone ID: TF_OSC414513j.C1.p15.fg
MAEEADETTVAARGMHARSRRCSKDLTLENGDAEGAQGCDDGGVKSSAMASEEREADNIVPSDSAFPEVELAEDDAVVCSRVTPDGGGEVAAWCEIRRGGGDGDASSATIRNLRGEPLETGKRQSGHGSDAIIVDGRVIQQEAVDIKPGSEIVSGPQKDGHLLYTFDITGLNDQDKTNIKIVLDIENAKCSICLNLWHDVVTVAPCLHNFCNGCFSEWLRRSSANSRDKSQSAACPQCRTAVQSVGRNHFLHNIEEAILQAFSSLQRSDEEIALLESYASVKTNIAWHAFIPFPWSYAGAMILRSTMGINICQREVLGKQKIQSRKRRLPRSNDEANHTNHADFLCPQCGLGCDRAFCGAYWCSQGVNSSQHNPICDQETFKMISQRHISSVPDTVHGGNQYEKDVGSFNMILYYHIAPFIPQIVVSHITERCIQQSGKALQAIISEWIVKFDNKELDRSRLQLNHVDAITSRTYVCNQCYSKLIDFLLYWFRVSMPRN

SEQ ID NO: 18562 - protein, 74 aa, Oryza sativa
  Clone ID: TF_OSC419672j.C1.p5.fg
MSRDVLLGLALTKACDARQEECAVCLRDFEEKDMLRTMPCNHSFHEICLFRWLSESCLCPLCRYALPKQQQIRL

SEQ ID NO: 18563 - protein, 167 aa, Oryza sativa
  Clone ID: TF_OSC4300j.C1.p1.fg
MGMASFTRQPFYCKSLACHHQQNPASTIVAIDKNLDTSTPDTYRAPPTPLPYDVGLVLKDNPDLEKTGIKRKIHEHKESLMMDDNESLQKCVSEDKPDEEDVCPICLEVFRYSPEYDEENPRSMTKCEHHFHLCCILEWMERSETCPVCDQGKLVVDLKLKNTNFDV

SEQ ID NO: 18564 - protein, 338 aa, Oryza sativa
  Clone ID: TF_OSC900381j.C1.p6.np
PLEGGALRTWAPRWPTAAAAGRPGRSAPVCSFVRKPPKNIRKRPTAPAGSDDDDEDGSGAIAAARAKKAPSSTSKLFFSSDGSSEPRRFQYESSRTIQASTDSRATATLETETEFDRDARAIRERQLKQAEESLKKNRSGSGSGEVYKGIHGYTDYKAGFRREHTVSSEKAGGSHGPLRASAHIRLSARFDYQPDICKDYKETGYCGYGDSCKFMHDRGDYKSGWQIEKEWEEAEKARKRRIAMGGDGSDYEAGEEDDDDDEEALPFACYICREPFVDPVVTKCKHYFCEHCALKHHSKNKKCFVCNKPTLGIFNAAQEIRKKMAQDKKQYEILKKRV

SEQ ID NO: 18565 - protein, 342 aa, Oryza sativa
  Clone ID: TF_OSC409503j.C1.p3.fg
MRCPFSILNSVRGMNPRFSSPSILVSATTQNWIVRRLIQQGSQLVWVGATNNAEWQPQPGCSKVAGPCLVRHEHEMHWRKALLIETAHKHIMEDQKRLRDFDLLQALSVVLFVEKDMRIRLEVDRSVDGTDGRDASRSGVRAAATSPAGRRGGAVRDAAAVIVPDNHRSDIEFEIAVFGIGIMLQQQRSACEEQQPGWWTLDSNVREAKERLDQKLRSQRESAVVVVKRHNKAQVAGTSSDGGEQSTATTAAPQWEVYTRKEGRRRMWFRRLGRRPTPEEEEECAVCLEELRAGEAVAHLPCTHRFHWGCAVPWVQTASRCPVCRAAVYLTSPAPAASNNYN

SEQ ID NO: 18566 - protein, 325 aa, Oryza sativa
  Clone ID: TF_OSC900024j.C1.p9.fg
MSFVFRGSRGDIEAGGFPGFAPERRAMRIHAGGRPVNSNLAFLVTVLMLFMVLNSHQMSPNFLVWLVLGVFLMATSLRMYATCQQLQAQAQAHAAAANGFLGHTELRVHVPPTIALATRGRLQSLRLQLALLDREFDDLDYDALRALDADNSPHAPSMSEEEINALPVFKYKVQAHQGSASFRKSDGPSQPSVSSTESGNEKKQDRFKADATDNTLEDELTCSVCLEQVVVGDLLRSLPCLHQFHANCIDPWLRQQGTCPVCKHRVSDGWHGEADASNMVVIFLVDLYPVQYELTYNPFYSVSVGKLAYYGCLRLKISRGFKIQE

SEQ ID NO: 18567 - protein, 166 aa, Oryza sativa
  Clone ID: TF_OSC18908j.C1.p5.fg
MATVGAVDGVEVVSALIGQYYDGLALELVVFSLAIVVLRYAAVLYANHLVDSLSELQAAVGAGIGGSSSGGGLDSAAIARLPCFVLPPRRGGSAAAAAAECAVCLGAVEEGETVRALPCCPHAFHARCVDAWLRLRPTCPLCRADVPVPARPTAPRRRHVPRGTVE

SEQ ID NO: 18568 - protein, 184 aa, Oryza sativa
  Clone ID: TF_OSC413688j.C1.p3.hg
SPPGFSGYAPPLFGKFCLLDHRGAQKTSRGVSLIQNPGCSNRPSGETCCGGPLVFLALPGPALGVKGRRRQTGGNRGAPRVRGRGGGGPSLANSFRNSFRPQSFGRRQGGGAGATNCRVCLARFKPESVVNRFPCGHFFHRACLEKWLDYDHATCPFCRHRFLPATTESPSPSPATATPHFARI

SEQ ID NO: 18569 - protein, 267 aa, Oryza sativa
  Clone ID: TF_OSC400547j.C1.p23.fg
MEVAAAEDALEESGVAVYLPRLLAGVISGALTGLFALAGALTGAVTGALAGRASDSGVLRGAGLGAFAGAVLSIEVLEASRAYWCSDRLGSHGTSSMVSISDFGHDDLYDIFGDCSSKGLSRESLNKLPHYVVTDQTRNSFGEDLSCTICLQDIVTGETARRLPNCSHTFHQPCVDKWLVGHGSCPCCGCASSACARPFRSPLFGYGEEKEKPGQCAYEKVDWVPDVDGGGSILVQRRISSESRRAAAANCWMVVVAAQNLCPPWRC

SEQ ID NO: 18570 - protein, 750 aa, Oryza sativa
  Clone ID: TF_OSC401537j.C1.p14.fg
MASSSNPSNLPCSSDGVCMLCKVLTTEVEQLRCSTCATPWHTPCLSSIPPLTDVAHWVCPDCSGDVTASYPPSDVVRPESSLIAAIRVIEADPVLSIQEKARRRQELLGHAGDAGAAITEAVGENVEDSESNNPLSMLNKNINCSFCMLLPERPVTTPCGHNFCLKCFRRWIENGKRACVICRAPITQKVAQDLRINLALVQAIRMAKAANNASTTGETTVYHYKENEDKPDRAFTTERAKRAGMANASSGQIFVTIAPDYFGPILEDHDPRRNRGVRVGDHWKDRMEGRQWGAHFPHIAGIAGQSTHGAQSVALSGGYLDDEDHGEWFLYTGSGGRDLSGNKRTSKEQSFDQKFEKLNAALRVSCLNGYPVRVVRSFKEKRSPYAPESGVRYDGIYRIEKCWRKTGVQGTFKVCSDEHGDHPRPLPDIEELKNAIDITERKGNPAWDFDATDGWKWMITPPISRKAVVTGDPRGKKMQGAARHTNNLSMRERLLKEFRCSICRNVMEEPVTTPCAHNFCKKCLLGSYDNLSLTEERSRGGRTLRARKIVKKCPSCPSDIADFVQNPQVNRDIMNVIESLQKEAEKEDHARVSGEGSSAALVDSDDENDTAWENQDDGNLDEGGCNNPEDMITESVDLNSVTNVDNTENKVEVQQPHKRTAGAGKGKGGKWARTSSAPGDADARNVVTSTETLDGIAAENVADLVQIEDCTFTGVERADPNALEVDGKNMIPDFSEAEKVNPKQDQEVLP

SEQ ID NO: 18571 - protein, 361 aa, Oryza sativa
  Clone ID: TF_OSC407908j.C1.p13.fg
MASAASPPRSGDASPSSPLLPSPTSPDRRSGGGGGGGRLLPGLRGAARFLGRTGSRRLMREPSVAVRETAAEHLEERQTDWAYSKPVVVLDVLWNLAFVAVAAAVLAASLPESPSVPLRVWLAGYVLQCLFHVLCVTVEYRRRREARGGGFGADQGAAADGDFKLSIVKHLESANTMFSFIWWIIGFYWISAGGQALSHDAPQLYWLSIVFLAFDVFFVVFCVALACVIGIAVCCCLPCIIAILYAVTDQEGASEEDINNLSKFKFRTMGDADKLVAGIAAPVGGVMTECGTNPPVEHFLSAEDAECCICLCPYEDGAELRELPCNHHFHCTCIDKWLHINATCPLCKFNIIKSNLGPEDV

SEQ ID NO: 18572 - protein, 260 aa, Oryza sativa
  Clone ID: TF_OSC900241j.C1.p6.fg
MPSSSSSSVAAAPSGSNGTRRDGGSGSVTGCLPADQACFALSSSASSPGYLHASATTTRRDASATVARACCTTASYVVVLGISFGSLLAILLILCIIRWYLVWRSARPRRDDGAADEAVGSAKKRSAGLDDDAIAALPVFAYKQREEGGGGAVGAAEEEEEERECAVCLAVMADGEAARRLPRCMHVFHRGCVDVWLREHSTCPVCRAEVVVRPAGAARVEKLPESSASRALTSPVPAPAPRPTGTVVDDGRERDLEAQQ

SEQ ID NO: 18573 - protein, 145 aa, Oryza sativa
  Clone ID: TF_OSC18110j.C1.p2.fg
MATSSESVNQLKDDGTEEMDVDDYIGGGSGGGGEALIGMKTVEAPDDGSNCPICLDGGGGGGEKTTTEAWVETPCAHRFHSRCLESWARVKLGTCPMCRRELTAAAAAATTTAGEDVHVLVADPMVADPLQARWNLFVQRSTDGF

SEQ ID NO: 18574 - protein, 1021 aa, Oryza sativa
  Clone ID: TF_OSC21837j.C1.p7.gm
MATSSESVNQLKDDGTEEMDVDDYIGGGSGGGGEALIGMKTVEAPDDGSNCPICLDGGGGGGEKTTTEAWVETPCAHRFHSRCLESWARVKLGTCPMCRRELTAAAAAATTTAGEDVHVLVADPMVADPLQASVTHVQPEQTAGEMPPAAGESGDDVVRLSFYDVMFVSMMPIQRLFFYEGAALPPFPSLVGSLRSSLAAALAAFLPLAGKLTFRAALGDVVLDYSAAAVPPGVKFVEAEYGSSDEISAFDAMRRLAGDVEHNVEAFMELVPELEVEQLPAPVLAVQVTRPAFRNDDGDDAVGVVAVGVSVHHAVADGQSLWQFMKAWSAAAMVGSPAAPGLLPPTFDRALIRHPRSEELASKFLQLSSPTLPEVKLSRVAADVIKGQRTRTFLLRADQIRSLKRRISRRIAAGEPPRETASPVTAYVAIASLVWTSVVRAKPHDAADEAYLMVTADCRRRLRPPIDPGYFGNCVAACYARANVGALRRGGGDNGGDDEGLARAAAAIGAAIREQLEDPLGGDIEGWLQFHLSLPAARLTAVGSSHRFMAYETDLGWGAPSRVELVSPFARELVMLLGAAGGGVQVSVSLDEAHMDAFETSCIRMSTLVRVLAVSHVHPDEAAVGAAWPPPNTVELSFLDSFQVARGAIQRLFFYEGDDLPPFQSIVGALQSSLAAALPVFLPLSGKLAYLPESGDVVIDYSPDAVSPGVRFVEAEYSGSVDDMRRLAGDDEHQIEAFLQLVPELEVSMLPAPLLAVQVTRPRDDNVGGGGAGGAVAVGVAIHHGVADGQSVTPLPMGVDMSQQRRRTFLLNAGEIESLKQRISESDAGREQLRNRLSTYVAISSLAWTSIVRAKSLDAADKVYFMVSADCRRRLRPPADKGYFGNCVTTCVAKAISGDLSAGSDDGLAGLARAAAAIQRAIREGLEVPFGNSERWLDGATATTPPVRSFTRSGSSHRYMAYETDFGWGAPSRAELATVYGEEVVMMLGAADGGVQVSVVLRRALMDAFATNFRRQLVAST

SEQ ID NO: 18575 - protein, 532 aa, Oryza sativa
  Clone ID: TF_OSC400832j.C1.p5.fg
MAGRCAGGGDGGGEGMLARLRRAAARRIGLSCASFFSHAATSPSPPPKTISCSALNAPADSTDEDQEKLEEPTSTRMADKNLCAICLEPLSTGSVDIDNGDRPAIFTSQCSHSFHFLCIASNIRHGNVTCPICRAQWSQLPRDLKVPPLLQNNQSDPILRILDDNIATSRFNRRSSIRAARYNDDDPVEPYTLTEHVDPCLRFALIPSPVAAHHHALGHYPCGRVMPLQQHCQYSSSSMLSPPQIASPSGQRRAYLSVSLAPQPAMDLVLVASPNGPHLRLLKQAMALAVFSMRAIDRLAIVTNATTATRAFPLRRMSSHGKRMALQVIEHLCCVGGTDPVGALQKGLKILEDRAHQNPSSCILHLSDHPIRSCFGVDMNRFNIPVHQFHVGLGFGVQNGFVMHEFEELLARLLGGVISDTQLRIGEHGGVVRLGELRGGEERRIPLDLVSDCGFILVGYSYLEGGREDQFRTGEVAVGFEEKGDNRYCGVRDAGGLSIGGERRSSCCAERWDYLDPFMARRWAKHFNVYRA

SEQ ID NO: 18576 - protein, 156 aa, Oryza sativa
  unsure (1)..(156): unsure at all Xaa locations
  Clone ID: TF_OSC900165j.C1.p19.gp
GSASADGGGGVAPASRASIAALREVEEEDDDGEEASDCAICLDDGEESRETCGSGRRKEXPCGHRFHGECVERWLGIHGSCPLCRHEMPPATAAEAEEEEVVVAMVHGERVVMRGRRVVLSVLVMGRAHDDGEGPEQRGTDPIPPLPRVLIDDVDX

SEQ ID NO: 18577 - protein, 251 aa, Oryza sativa
  Clone ID: TF_OSC900112j.C1.p20.fg
MELPWLDLPFTLLTLLLATRLAYDYYGVVAATFTGSFSLQIFLFYCFARWYRHTIAARAAADADGDGGGGAVADEEAAPPVLIPLLEGRGGGGGGAGAASSLANRCFAVVFMVFVPLVIVVFERSQADVVAYALCLANILVMVVWLSPDAAADPASAAKSFLRLSDDEDEGSCSGSGHGAAEDKCCVCLAGMREAQALRDLPRCGHRFHAKCIGKWLTAHPTCPVCRTTAVPPPAPLPASGDHADDAITPV

SEQ ID NO: 18578 - protein, 167 aa, Oryza sativa
  Clone ID: TF_OSC900112j.C1.p18.fg
MLYLAGARWVLLLLAAVTVLLCLQLSARDNAVDGAAAAAAAAGPAQTADLPLQQPAALPREAPAEGDLRGLGASSSPVFVVAVLPAYAWRKKAAVDGDDGDGECAICLGEVRRGQVVKQLPACTHLFHARCIDKWLITSQGTCPVCRTPVDSAAAALQAVRVADQPP

SEQ ID NO: 18579 - protein, 561 aa, Oryza sativa
  Clone ID: TF_OSC401716j.C1.p92.fg
MDADEAAGSSRRMDLNLYLGLPRAPRPRRSDLGSDLALSTPMPSSPSFSAASVDAPPPPPELSHPPYSPSHADLSPPLQEVYSLYNPDDPPASETHLPPYAPPPAPVVSELPDDLEFGLHPPPPLVRASELLGWEDRPSSSTASSSFLPDTAARYWRLLEQTGSRWLRARRFRSDLPPLSSEAYPAGRDAAAVPVLQHEPMNDTVEHNKVAADGAEVGASEESEEQGRSAATFECNICFDMASEPVVTSCGHLFCWPCLYQWLNVYSNHKECPVCKGEVTEANITPIYGRGNSCLDAEKAVEGGKQTGPTIPPRPHGNRLESFRQQFHHLRPISRRLGEAHGLLSSWRRLLDQQIMNTASRFEGPPESAVQEMVDTAHAQHTSRLSRLASRMRARRLLREADNPNPPDGGSTSPDSGLIRNNASDPSRNGPSSLLPDGIDWLRGLTLLGYEDTERFASAMSDFRRITGPSQYGASASSSNPPNLESTFDRTHVVAAPSADQASNSSTAAVIQGDAGISESAGEPSNAGSSRSLRRRGRSSALGSLDADGGGLQRNKRRRIN

SEQ ID NO: 18580 - protein, 199 aa, Oryza sativa
  Clone ID: TF_OSC405090j.C1.p7.fg
MSSTAAGGAPGPAAQRHGGGGGGGGCCSSGVTLELVGAFTAVCLVLYGVILYFNYLYVRWSGRDGVHRTSGGGGGGGRGAAARKRGGGGGLDKAALAAIPVFRFKASASAAALGGGEAECAVCLSGMQDGDAVRALPGCGHAFHAGCVDAWLRAHGTCPVCRARPAVPPPPPAKPPCLKAPEPAAAAAGRQPVDLESHV

SEQ ID NO: 18581 - protein, 789 aa, Oryza sativa
  Clone ID: TF_OSC401785j.C1.p3.fg
MDAAALQYENQKLVQQLEAQKSKMRALEGKFKELRDEQCSYDNTLICLNKMWNQLIDDLVLLGVRAGGDLNGLQALDHEEMSEESLESCPSEEIFLFRLLNSRNFRNNDDSSLSKLVEEALALRYSTTVTLMKSLQEAFAVQQARSESLSLALNGQNSSEDVIVALENHNDYLKEVVDNLRQAVSIINRKHEKYLDEIEAFKNNQSRELHEVKCLSGELEESMAELEESRRKLAVLQLQTGGGSLMNTSAPNGVNGSVSTDKSSDKGMGWRDLKDAVEEAKTLAANRLFELHETQEDNLILSKQLEDIQDQLKDENYIVTSKPYTILSDQLHHLNAEIERYRGLVEVLQAKIEDLEHEIQKLMAEKNDLEIKAEEALQDSGKKDFKDEIHVMAASLSKEMELLDNQMNRSKDAASEALALREEADYLRTLLAKKIETLDQEKQELQFIVDMLGKECSESRAISEIEESENRARKQAEYLRKCLEEHNLELRVKAANEAETACQQRLSIAEAELEDLRAKVDASERDVMKLKESIRIKEAEVDGHISEIETIGQAYEDMQTQNQHLLQQVADRDDFNIKLVSDSVKMKQAYGSLLAEKNMLQKQLQHVNSSLESSKLKITSGEEQMKTYVAQAMKSSSENRHLAISLERTMLEVSDAEKELKWLRSATGSAEKEYEINQKKIAELKMELERERNERIKLEEEYEEVKNEVSELTSETEETTIQKLQDEIKECKAILKCGVCFDRPKEVVITKCFHLFCSPCIQRNLEIRHRKCPGCGTPFGQSDVREVKI

SEQ ID NO: 18582 - protein, 459 aa, Oryza sativa
  Clone ID: TF_OSC422293j.C1.p1.fg
MLAKPESVDAVQQSITTYKAKIEDLEHEIQKLMAEKNDLEIKAEEALQDSGKKDFKDEIHVMAASLSKEMELLDNQMNRSKDAASEALALREEADYLRTLLAKKIETLDQEKQELQFIVDMLGKECSESRAISEIEESENRARKQAEYLRKCLEEHNLELRVKAANEAETACQQRLSIAEAELEDLRAKVDASERDVMKLKESIRIKEAEVDGHISEIETIGQAYEDMQTQNQHLLQQVADRDDFNIKLVSDSVKMKQAYGSLLAEKNMLQKQLQHVNSSLESSKLKITSGEEQMKTYVAQAMKSSSENRHLAISLERTMLEVSDAEKELKWLRSATGSAEKEYEINQKKIAELKMELERERNERIKLEEEYEEVKNEVSELTSETEETTIQKLQDEIKECKAILKCGVCFDRPKEVVITKCFHLFCSPCIQRNLEIRHRKCPGCGTPFGQSDVREVKI

SEQ ID NO: 18583 - protein, 105 aa, Oryza sativa
  Clone ID: TF_OSC900044j.C1.p9.gm
MGVVEKTDASNPVFIGEIRVGGELSKAIQGLREVTAAGAREEECAVCLQDFVAEEKLRMMPCSHTFHQRCIFDWLRLSCICPLCRRALPTQHYSRRMTTSLGARS

SEQ ID NO: 18584 - protein, 197 aa, Oryza sativa
  Clone ID: TF_OSC400283j.C1.p28.fg
MEKGGFIAIFVAFGLINLGLHLYERAPGWLVWMLGGVTTLDRALGDCSMCRYGMVAGDVVRTLSCGHVFHKDCDYSVDKWLREHGLSCPECRKKARSVRVLPWRARPQQPLPEEQNPPPQETSASSSSSSSTHVRIAPEEPGDLDLEAQDQLLPPPATGSPKGPEEQHPPRPAAATSSSSADTSSLEEPLLRPSASP

SEQ ID NO: 18585 - protein, 345 aa, Oryza sativa
  Clone ID: TF_OSC400555j.C1.p10.fg
MASWPTSCTKVYEIIQFSRCKEEASATSSIIDHRTAKVGRRDDGPNMSKVLRATIPENSVSGSSVRGKLREMEMDLAVEQYGSIGASSILSTLSVPEYSNLAWDETYPKTMLSALSATKNRMYNRIAPIVGHAWVNISAQNATFMMTMQVVLNMHSCDGVMKYEPFLINLTITFYRTGGAENFFHCDKCGCCYSYVLKDSHHCVERAMHHNCPVCFEYLFDSTKDISALHCGHTIHLECLYEMRSHQQFSCPVCLRSACDMSHAWQKLDQENTIQITLHSGCSIADASDLSEENDMDPMQRLWDDIERAIPHIGTQVPRMQLLQHPADKSRPCCRVLQSLNSEEQ

SEQ ID NO: 18586 - protein, 415 aa, Oryza sativa
  Clone ID: TF_OSC419721j.C1.p5.fg
MPLHHRRALHSNDCDDGGYGCSSWPLSPPPPSVILTPFASPSPAPWACPPAFPAPSPSPLHGAAGGRRDQGGYHGSPPGGGGDADEHRRRIINLIVVGAAALAFLSMILLVVIVAVRRRRLRRRRQRQQALLAPAAPADAVAVNVEDGGDDDAEGGGGGGGGGGVVHHIWYIRTVGLDEAAIDSIAATRYRAGAGLLGAADCSVCLGEFQDGELVRLLPKCGHAFHVPCIDTWLRAHVNCPLCRSDVLGPAATATESGGGDTGSMPQADPVANTIAAAQQAAAPGDAILERQEEEEEAEQEDQGAPPHMEENRQEQSSSPDPLPPPRNVRRAASMDAAIVSTAAEVAALERLPEAAPEEEQSGGGGGGDKRGGAPGASCLKVSSSGRLSNLGAAERLPRSFFSRHCRARSSVLPL

SEQ ID NO: 18587 - protein, 442 aa, Oryza sativa
  Clone ID: TF_OSC401685j.C1.p93.fg
MVQPNNEQLNQPLPLGQKLFVHAGNDAALKIGPSYHGNVAIRSNDLPSSSRVAQYSGHRVKNTGTLHNSYVHYPAGSSGGHVSYNPQTEPVITYPHRSEGEFARGSSQIDNRTAAVKRKNPVIYPEYSINGDGYCAGSSSSTQFSNYPQPAPFSESLHRQMPPSVGPINWNDQSLHMYLNDYVGASGMHSGEMPYTMGSSNSSVPVPTLQGSSSSAIFASGVFAPRHVHGDTVPSYIHLPSVASSSSTAIPHEVIIPSYQPATSATTSTPMRASQPLPVRAVASSRHARNVLIGHANSGRNRRARSSYYGIQPLMIDAQQLIMMQQFALRESREAQDPHRAMRLDIDNMSYEDLLALGESIGNVCTGLVDEKISGCVREVIYCSSDEQQNDQDDGKCAICLEEYKDNSLLGILKCNHDFHTDCVKKWLKEKNSCPICKSAAA

SEQ ID NO: 18588 - protein, 192 aa, Oryza sativa
  Clone ID: TF_OSC400860j.C1.p33.fg
MAARKLLEQPGTAAPPVLGGSIADDRDIVIILASLLCALICVLGIGLVARCACSRRGGGGPDAAAANKGVKKSVLRAIPTVEYVSPGGGGKGKEEEEAAAEEGEQSECAICLSDFEHGDAMRVLPQCGHAFHAACIDKWLRGHSSCPSCRRILVLQLPQGERCQRCGARPEPAAASAVWKPTHYSEVPPFLP

SEQ ID NO: 18589 - protein, 455 aa, Oryza sativa
  Clone ID: TF_OSC20771j.C1.p9.gm
MEDISCQGRKASKTPRHVVVVFLVAVAEFPPPSRALGINRREKFLRALSHPPTPHRGDDDEEEMLPGVELARRRRVHYHGDGAAAGAGFGEHHHGHYNYFHQQHHRQAVASAEAGAGAGGEVSPAVAARIRLEEKLRGAAAAPSSSLSRQQNNQQEQQIQLPTEPRPTPKHSMTMLEAPSTRKAPRREMRRTLSKADLCAVCLDEVRERHQRVTRLPCSHKYHSECVLPWLAIQPDCPCCRTQAMIAMLPDGAGAQNGDGSRCSKVRCGMGSCSESSDYVFGFACRCNPGWSRYHLGNLQFPFLPCVIPNCTINYSCQNGSSSPSPSPPPPPPPPPAMPSLTNLSIYDPCLLQYCGDGGSCERSSEFGHRCACHDGFQNLLNDTSYPCYRQCSLGSDCSGLGISMFNGSQPGTAPPAPFSFTVKKSGAAASSLLPAGGGVLLHLLLVLVSSFMIG

SEQ ID NO: 18590 - protein, 301 aa, Oryza sativa
  Clone ID: TF_OSC900339j.C1.p2.gm
MASRSPPPPPPPPPFPDLETWDYFFGQYDHPSSPSSSATAMPHLPLSRVSSSSSFVSTELELPPPPPPPLPTLPAKPLLRRRVASPSSSSFSTELLPPPPPLLRREPSSSSSSFSTELLLLPPPPPPPPFLSSDYFISSDPDTPPHAGGPPTSSIHDSSFVSGPSSSRPALATVITVTVSDDAAAAAACAVCTDALQLASPASRLPCGHLYHAHCIAQWLSLRNTCPVCRRSVPMRTEETAPPWSPPTETDQEAVPSPPPTTTTATDHRRRSLPGERRIRRICRRLLNYMEISRQRQQHTD

SEQ ID NO: 18591 - protein, 208 aa, Oryza sativa
  Clone ID: TF_OSC101188j.C1.p17.fg
MSGGGAPPGAPGMMTPGDGNSVGMFSSDRIGGFGYGVGVSVGILLLITTITLASYFCTRAPVTAADAAAAAGSSRRHRGGGGGGGGGGGGAGHEHDDVELGIDEATLKGYPEVVYGQPRKEAAKAASAAATKKGGATTCSCCSICLDNYGDGDVLRMLPECGHLFHRECVDPWLRQHPTCPVCRTSPLPSPLPTPLAEVTPLAMARPS

SEQ ID NO: 18592 - protein, 145 aa, Oryza sativa
  Clone ID: TF_OSC964j.C1.p1.fg
MLFLKELPIWQAFGFSLLTGALAGSTLYAVCVVLLCCVDRQRRHAGAPPPDPKIWLPDHTHHRRQRDESSECSICLGELEEGERCCTLVACRHEFHKECIYRWLANHNTCPLCRHMPLPPASSPPPAPPPHHASPPSNVPPAAHV

SEQ ID NO: 18593 - protein, 455 aa, Oryza sativa
  Clone ID: TF_OSC401457j.C1.p8.fg
MAAESSAAAAAGGGERRGPMDLNLYLGLPPLPPPPGRLDVAADYPSLLLNSAATVANEQRGSVVVAAPPPAAAAYSPSNALSAPEQVLVDPVAAWLVDPGEQQPVPPLETPSYMARASSTLPQIFACAALEMLVQTGGAIPPTGLIRGAEIAAASRPMTPENRLRRLIQVSDQHGVGNGRAGTGPVSRSRRANSPEADNLARAIQRSHNSLEASRRQMLDGDGSDATKKDDGCGCNGSFECNICFESAKDPVVTPCGHLFCWPCIYQWLHGHSEHSDCPVCKGEVLEVNVTPIYGRGGGEENSSRNDIQIPPRPSAQRTESLRQQLQRPDTRGGIANMVRRLMQNQDIVVGQAASSAPRPRGRGRRQAKQDAPSAPATQQQVVNADAGSGHQAPLPPPDANGAAPAAAVAPQQSSSVEQASTSSTVGVIAGGPAQGRRSRVSESTPARRTRRRHQ

SEQ ID NO: 18594 - protein, 247 aa, Oryza sativa
  Clone ID: TF_OSC900031j.C1.p15.fg
MELDDASRHGFGRMGFGCKHYRRRCRIRAPCCNDVFHCRHCHNESTVICLVCDTEQPVAQVCYNCGVCMGEYFCSACKFFDDDVRCRCCLLCFCWIWLTGNTSTAKIAASAGSCYSVSLRDKHCCIENSMKNNCPICYEYLFDSLRETSVLRCGHTMHLQCFHEMLKHDKFSCPICSMPIFDMDKFLRALDAEIEANMLHIDYMGKGWIVCNDCRDTTQVYARVAGHKCCHCQSHNTCRVAAPVLPA

SEQ ID NO: 18595 - protein, 444 aa, Oryza sativa
  Clone ID: TF_OSC400897j.C1.p19.fg
MDTSASTSPPPPRSVLSTIEDKMSPGVLLIIAILAVVFFLFGLLNLLIQNLLRMRRARRRRRRVGDGGGGVGMGSPTAFQGQLQQLFHLHDAGVDQTFIDALPVFVYRAVVGAGLRKDDPFDCAVCLCEFAGDDKLRLLPTCGHAFHVPCIDAWLLSHSTCPICRGSVLAAAAAADDDDDSSASTPVARRVLDSESLGETFANNGGGDSEGSSPKAAAAEEEEVVEVKLGKLKCIDGNGNAGDLAVVKGTTTSNDGDIGGGGRGDLGQRRCFSMGSYEYVMDEHAALRVAVRTPKRRPPARSRSRRRLALSECDFAGSASKKGAWEAAVIEAASADAAAARLNRDSFSVSKIWMTSATRKEDVRTAAELAGGGRRAASFRWPAMAEASKKHGGINDERRDVEAGGNGDSSLADERPSLARTALQYIVGGGGGGRQQSSRVGSHS

SEQ ID NO: 18596 - protein, 205 aa, Oryza sativa
  Clone ID: TF_OSC21837j.C1.p18.fg
MASSSSSSFAMDDGEAYLRDMTAITELLDGDMTAITESLDGDMTAIAELLDQARSYSFADLQSHDPPAAAAAAVNDDDDNVSGLMMAMMKTVDAPAGGGDGGDCPICLNNGGGEEWKETACGHRFHARCVARWARVGRKGMSCPMCRRDMMSPAVDLLVRDIRALYGDEELSDVRELLEDGLRQLEISSSIAGGAEEAAYRASQA

SEQ ID NO: 18597 - protein, 559 aa, Oryza sativa
  Clone ID: TF_OSC418082j.C1.p3.fg
MAPARVHSNGRLLMLLLLLAVAGFAAAQPSQDNPPAGYYATNFSPSMAIVIVVLIAAFFFLGFFSIYVRHCYGGRGDYSTTPLPRSGAARSRRQRGLDQSVLATFPTMAYADVKAHKSVKGALECAVCISEFDDDETLRLLPKCSHVFHQDCIDTWLASHATCPVCRANLVDGASEPASDVAAELPTAPAPRPEGATPSEAAAPGGEAPAAAAAAAVVIDVEETEEERIIREEAAELTRIGSLKRALRSKSGRAPAARFPRSHSTGHSLSSSAAASAGAERFTLRLPEHVLREVIAAGQLQRTTSLVAFRAGRQGSTRRGLRSGGGGGGGEGSSRAGRSVRLGQSGRWPSFLPRTFSARLPAWGSRSTRRGDGDGSSKGGRTAGSGAGAGGNTTTCSPRISSPCSPRTSPPVPPHLFVMECYLGGADACAELTENGQLLVMAKRLGEEGLMQEFASRVRLLMDPAWTTPWRRPGGEAGHAVDAAAEEEEDAGHRTAAGSGGDEEDDDADKEERIPSGRAGTGHADADDHREKGENRGNKERRLTWITLTCRAHGNSAAT

SEQ ID NO: 18598 - protein, 596 aa, Oryza sativa
  Clone ID: TF_OSC403595j.C1.p4.fg
MPAAESCHSRSLSWLVKSCIPADPARHIAVPVLCPTPQPPPPSSPPAPPISTLPDDLLLECLARVPRASLPPLPAVSRRFATLLASDAFLHLRRAHAHLRPSLLALSVSDNGCVPQALLRFESSVPVLEVAPLPLPPTLLHCGGSVFAHARAVVLGRDVFLIGRGATLRVDALTGAARACAPTLFPRKKFAAAAVGDRIYVAGGSARTAAVEEYDPEVDAWRVVGEAPRRRYGCAGASAGGVFYVAGGVAVSGEGARALEAHVCAGSVDALHVASGTWARPRALPGGGCVVGACGVGDHLYVVASHAVELSFWRWSGATGRGGDGRGWGGWVALEAPPMPRGSVGLGMAVRVAMAGLGTNRVAAVLRLKFCHAIFNSYAARIAARSCHYPAASSTSLQPQSPSIPFDLPTLLLRMHASISFALAPASSPDAASFAPTAADVGGAVCLGYGIAIAVGVLVFISTVMLASYICVRAKAGAAAVLLADDDGGGAPAASAVVVLGLDGPAIDALYPKLLHVGVGDDDDACAGAQCAICLGEFVAGDALRRGHGCGHRFHAECAERWLRVSATCPVCRDSPLPSPMATPLAEAVPLAAHAR

SEQ ID NO: 18599 - protein, 321 aa, Oryza sativa
  Clone ID: TF_OSC414138j.C1.p13.fg
MAAVAAVFLAFVLCFYIFVCAKRYRGGAPPAEGGVAARLWFLLGGGGGGGGAAGSGDAAWCYDGGLDEASMAKLPCRVVGKGEEAVDCAVCITELAAGETARVLPRCGHGFHVACVDMWLKSHSTCPLCRCPAVDEPPPAAPPPVVAPPEADPESPNFPTNVLFFGSQDELLRIEKKLVDLGGKIVELAASMVLQSSWPNKQQTAKPATSKNWRNGDSPANHLQITSSSDLLCDATGKYIFFVRRKFRYSAFTKSKDSFLIHMRLSCCMEMFQFQSHPDTERMILAIWGLKLTSATDIKYLLRWVWTIIDTNRDEQLVAEM

SEQ ID NO: 18600 - protein, 320 aa, Oryza sativa
  Clone ID: TF_OSC412751j.C1.p3.fg
MAAGATLSVLLLVAGVVLMLVLHVVVVFWALRRGVFLRGAFRVEERRDQRAAGLTPDEIAVLPCHERKEDGGGGGGGECAVCLEAFQAGDRCRVLPRCEHGFHARCVDSWLRQSRVCPICRAEVEVSGYAGKPAAAVAEASQATTLEIVTERLGGTERLEVSNVCEVHPLDSVDRMKGDNSNVFLVAGLSLVVVVHVLVLLWALWWGYGRSRLALARARVVGQHDVARGGLSAEQVGELPCHVVKEGAGECAVCLEAFRAGDRRRVLPRCEHGFHAQCVDSWLRVSRLCPICRAEVAASRGKEGDAPVAEAASLEIVAER

SEQ ID NO: 18601 - protein, 769 aa, Oryza sativa
  Clone ID: TF_OSC400839j.C1.p11.gm
MWPVRPCYSATARKLAVVVLSEGPIGLAGQTEVEWPVRPALARSDRHRLGLTDYGSVGFVSAIPSSTIPASTGPAERLNTLIYFALGSPRLDLVGWFYLGLMNDIVDERERGLDTDRLRCSWRKKRRTSSLSSQLDVDGGDGVLDGGGCRCSGGRGQSRRGRGAACDGDPPAIRLGAPDQGAVKVRCAVGPDGWEIYLTHINKENEDSRDRQTIDACTLSVKPTAACVLPSHARHEVRKSNPRADARPTRNTWTARIPRPRPVTDAKTPSRLVHSNPSKPKPPNSDRANRDSRHHQTRRHDTLRPKSYTARRDLVQQTQRKHSLDRHMPTPRPRHRHHALPLALALAAPLLLLAAADGQPNESRDKNNGGGGGGFMAPSGGGGGMGSQSPSFSAPMVVLLVALIAAFFFIGFFSIYIRRCGGEASTGPTIPAAALAALSRQEQRSRRQRGLDPAVVESFPTMKYAEARELRDGGKDAVLECAVCLSEFDDDEELRLLPKCSHAFHPDCIGEWLAGHVTCPVCRCNLAPDAAAAEANVVSGEVDGEQQEEEVVVAIDVDREGEEEDEERRREAMELERIGSQRRAVRSRSGRPLPLPRSHSTGHSLATTRLGDAGDLERFTLRLPEHVRREMVAAAGEESLRRTAVREGRVGGGARSARIGRSDRWPSFIARTFSSRIPFWSASRRVLDAAEAGADAAATTTTTTPTSTARTKRDKTAAAADGSVSSAKGSVRFDCLGGGGGGGGPSNRVVAFANDDEEDDDEKPIARQV

SEQ ID NO: 18602 - protein, 159 aa, Oryza sativa
  Clone ID: TF_OSC900212j.C1.p9.fg
MKVAIAGNVVVAVLFVAVIVWRLFFFGGRDRAGGAAASAAADADGESSSAGSSPCASPRAGGGLGREDLMALPVYVHGASAAADGGAKAEECAVCIGELRDGDTGRLLPRCGHRFHAECVDKWFRSHATCPLCRAAVAAADGDSGGEGDTKVAVVQQDV

SEQ ID NO: 18603 - protein, 240 aa, Oryza sativa
  Clone ID: TF_OSC410532j.C1.p3.hg
AGAAHNADVGAQRAGRGDTAPGAHRKPELPPKKRKDNSPPAGGFFGPGARSLPVGAGGGKTRAPAPGLPQGTPPAPPGHRTGKGGRHGRRRRECAGAGARLLSLGVQAAVMAAALALFLLFAAAAAILLLHLVVAARAFRNQRHGGAGRSRYRVPETSYTPSRAGLSPADLRFLPCFAASASASASPELCAVCLEAACAGERWRALPACGHAFHAACVDRWLARAAACPVCRASVSASAS

SEQ ID NO: 18604 - protein, 380 aa, Oryza sativa
  Clone ID: TF_OSC401894j.C1.p36.fg
MATPRSPSTRGDALLDSAPLLGGGGGGGGGRRRGGALRRPSLRGAARLLRRGGRRAMREPSVLVREAAAEHLEERQADWAYSRPVVALDLLWNLAFITVAAVVLVLSRGEDSPMPLRTWVAGYALQCVVHMVCVAIEYRMRRGQRDRAPASADEERGSDGSSSSSDDDVTEDDRRGSCTDCVSIAKHLESANTMFSFIWWIIGFYWISAGGEDVIRDAPQLYWLCIVFLAFDVFFVVFCVALACIIGIAVCCCLPCIIAILYAVSDQEGASEDDIRQIPRYKFRRTDEPEKQTADETGPFGGIMTECGTNQPIEKVLAPEDAECCICLSAYDDGAELRELPCGHHFHCACIDKWLHINATCPLCKFNIRKSGSSSGSEEV

SEQ ID NO: 18605 - protein, 449 aa, Oryza sativa
  Clone ID: TF_OSC23746j.C1.p3.fg
MAQQQKKNAHVPKFGNWDNGGNVPYTVYFENARKGKVAAAGKMFNPNDPVDNPEAFSSSIAAPSPSRAPPPPPSHHERAPSDAPPPPPPAPYAGGSPYHRHAAGGGETPPARRGGGRTSGGGGSSYSVEHSPSPSPLHPYSDSGSGSYGGGLVANSRAKGGGGGAPRGNETPTRGSAVPRFGDWDSNPASADGYTHIFNKVREEKQTGQAAGKPAAGLGKGGAAAAGHGNAAKRYHDDDFASTVIPNIIRIMSTASTARSRKRAHDGSRQKVDVINLETTAPVVNTGSQHEALILRGTRTSPIDVEALDDKRRSRKIMRRSVAVVDPEKDTGPGGYGVAGAIFSRGRNFQGAVHVICLSPDREEGTSKPKNVAQTSTTHAKVAPKEPTFTCPVCLNKLDKPSTTNCGHIFCEKCIQAWLKAQKKCPTCRKSLGIKSFHRVYLPTPADYD

SEQ ID NO: 18606 - protein, 465 aa, Oryza sativa
  Clone ID: TF_OSC405088j.C1.p5.gm
MTRASRASLLLFCFGGGDDDYECRACYGVSVACVSLLLFCVLAASVSVTKACAVAGLAVLLFGVIGWFVPLCGAGGPPARAGAAAGGGGRGAGAAGVTRCACRLVGAALIATLPAFVFEGPAEGGAGGGGGSKHGGSVLCAVCLEDVARGETVRRLPACGHLFHRDCVDMWLHSHTTCPLCRCEVLPRKPAAKPAPPPPAQAAESTSAYADPDALPPPRIPRARNLKTGRAAGPTPTPRARTRRATTGLQMFNGERRPAASQRGGDGGYLACYSVVMVCASLLLLSVLAATVSIAKACVFAAAAAVLFCAVGCVSRWCGDAGGAPAALPTTAAAAEEARARAPAAAACATCGLVGAAIDALPAFAYARPAADDGGGGGSKSGRCALCSVCLEDVQAGEMVRQLPACRHLFHVGCIDMWLHSHSTCPLCRCNVSPPATIVVKATATSTATAAAAAQQLPADTLPPV

SEQ ID NO: 18607 - protein, 183 aa, Oryza sativa
  Clone ID: TF_OSC5323j.C1.p1.fg
MDTEEAVHLVVVGVVAVGAVVFLLAAAASGACGCAAAFPAARWRKRAQVGDDDDDVESALGGATTVTTYEQAAAASSSSPAAGAAAEGADTCAICCQEYSGADKVRRVVRCSHFFHAGCVDGWLREKRNCPLCRAVLSSLPPLPNPGCRRGRAAPPCPPPLPPPLSSANYLSGFCRSHFVLDY

SEQ ID NO: 18608 - protein, 242 aa, Oryza sativa
  Clone ID: TF_OSC18908j.C1.p1.fg
MLTCSSTNPSLVGRAAGGEVGGFVESAAELQLQRARAAHGRRDPVRDRRRLRRHPRLAVLPRGAVRRWRRRPSSWRPGRGDLAVVELARRERRRGLDASALAALPVTAYRKNGGGGGGGEGSNRGGPGATAADCAVCLSELADGEKVRELPNCRHVFHVECVDAWLRSRTTCPLCRAEAEVPKARASAAATATAQSSSSLGDGGITVVVTIHGGSDEAGGRSTALTGQPGSSNSPSCEAARN

SEQ ID NO: 18609 - protein, 237 aa, Oryza sativa
  Clone ID: TF_OSC401369j.C1.p9.fg
MSDTALSGAPPAARSEDSWSQQQSYNFSGRVLLTAVVILFVIAVVFAVTRVLLYYLVVRPGGGGGGRRRGGLAGGILRSLNSLGVSGRRGLDASALAALPVTAYRKNGGGGGGGEGSNRGGPGATAADCAVCLSELADGEKVRELPNCRHVFHVECVDAWLRSRTTCPLCRAEAEVPKARASAAATATAQSSSSLGDGGITVVVTIHGGSDEAGGRSTALTGQPGSSNSPSCEAARN

SEQ ID NO: 18610 - protein, 105 aa, Oryza sativa
  Clone ID: TF_OSC21790j.C1.p1.gm
RHGVRAEGAALDAKQLGALPVFTWGSSSPATAAPNAAVQCTVCLGEMEDGELGRLLPACRHVFHAECIDTWLAVSSTCPVCRTTVGAAEDDEPAAAPVAGVSPAS

SEQ ID NO: 18611 - protein, 161 aa, Oryza sativa
  Clone ID: TF_OSC401978j.C1.p3.fg
MVVILASLLCALICVAGLALVARCACRRRGAATTTTTTTTTPAATSPAPKGLKKKAIDALPTVSFALKQQQQQAECAICLAEFAGGEELRLLPHCGHAFHVSCIDTWLGTHATCPSCRATVGTSTLFLPLPGRCRRCGEVDLPTLHDFSTATATAHHNTPP

SEQ ID NO: 18612 - protein, 807 aa, Oryza sativa
  Clone ID: TF_OSC400058j.C1.p5.fg
MEMEMEDNKAPSPPSPMESDVAGEKRKREDDASSSAVLAAANNTGGAQHPMWKTSLCSFFRRRAASSADGCSHGDSCRYAHSEEELRPRPDGTWDPTSDRAKKLRKVAADEVEEEVVTIDDKALDKCLVGLPRGWANDRLKTFLQDKARTNYSSILPPALLLGISYATAKKKKGMTVGFVTFENIEQLKNAIEVLTENQSGGKEIKIADANRRSHQKLHTEKPVSDNGVTTENGTSVDVPPGETSAPEAAISNKKSVRDAVTPLAHMSYNDQLEHKKNSVAQILKRLTRNARKACPTGIPLPDWVFKSKEIGGLPCKLEGILESPVINGYRNKCEFSVGFSLEGKKTVGFMLGNFREGVTAVEEPVDCPNVSEISCKYALMFQDFLQSSSLPVWNRVDNCGFWRQFTVREGRCQAQAVAQNAENQISEVMLIVQVCSTGVDDAVMKDEFDKLTVALQQGAATCSPPLPLTTIVVQDHKGISNAAPADCPLIPLLVPKVDQSEGTVDKTRIHDHIGNLWFSISPTAFFQVNTLAAERLYTLAGDWANLNSGTLLFDVCCGTGTIGLTLAHRVGMVVGIEMNESAVSDAERNALINGVSNCRFVCGKAEDVMGSLLTEYLGSPQQDIPVSEGAVSGTVKDEEVIDSSKNSGENLDSSMQKNDNGESQQLGDAPADSSSSAIDEIKGNSNDRVGNGLEGSHDEYNEVAGEDIHGEASLINESVDLKVSDCLEDRKTSDDGSSISNNDVTAATACQFEDIVAIVDPPRVGLHPTDQAYTLNLIGDQGIEDSSTNSTSSVNPKRGQGVAVFI

SEQ ID NO: 18613 - protein, 363 aa, Oryza sativa
  Clone ID: TF_OSC418263j.C1.p1.fg
KFIHAISPTPASTMSSVDIHARPPNTTLSPYISPAKSVPVEETPKRPAEDADLQYWRYDVKKQRHGEAGGNRLCFKFTSSGSCPRGSKCNYRHDEEAREHYNRNVCFDFLNKGKCEKGPECRFAHSLSDEGAVRDTKPRSERRRVESSCWFCLSSPDVESHLVISIGEGYYCALAKGPLVPNHVLVIPVEHCSSTLKMPVEAEAELGRYKDALAKYFEKQGKIAIYFEWVSQQSRHANLQAVPVPLSKASSVKKIFHLAAQRLGFEFSVVNPDGDANRARELLRSECDSKSSLFYVELPEGSVLLHLVDSNEKFPAQFGREVLAGLLSMADRADWRNCKVSKEEEIQMVDDFKQGFREFDPAE

SEQ ID NO: 18614 - protein, 784 aa, Oryza sativa
  Clone ID: TF_OSC400591j.C1.p19.fg
MEEPSPVPPAAAPASLAAAPPTTDVLSRRRAHLDSASYRALSRLFSHCLHLHPPRHAARPDAEVEPAAAAAIPPGGSGGLPHGDSPPPADVGGDRGKNLEVEVALGNHAPHETPSTSASPDAAVNPTTDPGVVPQGTEEGRVAGVERVEGVEEVVFAGGTSGEADADGDELGAGAGLMGDDEALRSMQACLDGEDSELVIEMVGNDNEQLQLDAMMNNLSGLIDDASACVMSAQSCGVSGDKLQSDDRVAEEVKELGAGIGNDRSVCSLDHGSLDGGGGFEEGEIEGDTQNLDADDSGNSELQDDVELEEDFDSRRIEEDGSCGHDLKSNLHLIPQKGNGDTARNMLCNSKGDSQMHVARAQAVSYDEVLDWNETPLPDDKALKHGNTRKRTLTEERKAKKTKTKRIKRALQREAEGVKRLKLQPVIKPKVVKVCHFYLHGKCQQGNLCKFSHDTTPLTKSKPCTHYARGSCLKGDDCPYDHELSKYPCHNFMENGMCIRGDKCKFSHVIPTAEGPSTPDAKKSNASSVPEKANCQEQTSRQKTSTVYSGEPATSVPIKHHSILKNLAGISGNAQKDVVSTEKHKNPTGGPHQNFGRPQPADGKKLGKHNGHRSAPLLDEKDSSKQANLHPCSEPKKNSLPTTAAVPSSHTWMLFSDEPVPMRLCSIFCIPHTSFIAVTPSCKLQLLMWTYFAELGANIYCQILKIGNYQMNALLFNPQAYNSKSQFLIFISLQQQEANSAAKGSMPVCIHQLVLSMFLNKDLNWKVGVYLFVWDYENAKRHMT

SEQ ID NO: 18615 - protein, 1389 aa, Oryza sativa
  Clone ID: TF_OSC400657j.C1.p8.fg
MSRRQEICRNFQRGSCKYGAQCRYLHASPHQQQQQQQAKPNPFGFGTGSRQQQQPSFGSQFQQQQQQQQKPNPFGFGVQGANAQSRNAPGPAKPFQNKWVRDPSAPTKQTEAVQPPQAQAAHTSCEDPQSCRQQISEDFKNEAPIWKLTCYAHLRNGPCNIKGDISFEELRAKAYEEGKQGHSLQSIVEGERNLQNAKLMEFTNLLNSARPSQTPSFPTMSSFPEVKNNSSFGASQTNGPPVFSSFSQIGAATNIGPGPGTTAPGMPASSPFGHPSSAPLAAPTFGSSQMKFGVSSVFGNQGSGQPFGSFQAPRFPSSKSPASSVQHRDIDRQSQELLNGMVTPPSVMFEESVGNNKNENQDDSIWLKEKWAIGEVWDTFLLVIFEVLFARNVCSFTTFVPAMEVIGIRNSIAILSDWPGDWSGLEKFHDLPLNMQAFEIYHLIHVTFEICTEMRISSPYHFGPSEEIDRWCKFMSIVAIVHTFYGNLWMRDGVFITEIQDRWQDKIQLDIMDNILVVCKSTLADDESASEVSSGSDSDSDCILGDDCPSDDDEEAAQIHKRFKELKEKLKTGKVDKLDDVVFEAGAEQDGNDTPSFDSDDEESVEEVASDEEVSARKLIKYPRFKEKPGVPTFELGMTFSCKKQFKKAITAYGLAERKAINFVKDDPKRVRARCDWPSCPWVCLLSKNSRTDGWQIATLENSHLCPSRRDNKLVTSSRIAEKYGKFIVANPSWKLAHMKATVQEEMFADVNISKLKRAKSITMKKAINAAKWQYQKLYNYQLELLRSNPGSTVVVDREVDMDPPVFKRIYICLDACKKGFLAGCRKVIGLDGCFFKGAKNGELLCAIGKDANNQMYPIAWAVVHKANKEEWHWFCGLLCSDLQVGDGSGWVFISNQQKEIINAMDKWAPQAEHRICARHIYANLKRHFYDNEHQKFWKCAKAPCITLFDLAMAELVQLTTPAVQTILNNHPQHWSRAWFRSGSNCDLVDNSMCESFNKWILEARFFPIITMLETIRRKVMVRIHDQRTISGRWTTSVCPNILKKMNVYITESAFCHATCNGGDSFEVKHHDNRFTVHLDKKECSCRYWQLSGLPCPHAISCIFFKTKTNSLDEYIAECYSVKEFKKIYSQCLEPVEGMSSWPEDDKEPLNAPGYIKMPGETRRESNEPLKATKLSRIGSIIRCSKCKQIGHNKSTCNKHHGGGSSTPDSLQVVNPADNLMLSNTQQSSKQSRKRKSRTAANTNSASQSRKTVSSKQKALVELHAHSQGSTSATIKVTSGQAFVNVSTQESAKFKPKKLTPVARLNGILMQSRKPSGSFGSSCSSINNFLKSSAGTTKMKMKMNNLVKEKWAIGEFVCHLSEGIDSGSYVAAPGSTKDLSNNQKKNTQE

SEQ ID NO: 18616 - protein, 424 aa, Oryza sativa
  Clone ID: TF_OSC6623j.C1.p1.fg
MSRRQEICRNFQRGSCKYGAQCRYLHASPHQQQQQQQAKPNPFGFGTGSRQQQQPSFGSQFQQQQQQQQKPNPFGFGVQGANAQSRNAPGPAKPFQNKWVRDPSAPTKQTEAVQPPQAQAAHTSCEDPQSCRQQISEDFKNEAPIWKLTCYAHLRNGPCNIKGDISFEELRAKAYEEGKQGHSLQSIVEGERNLQNAKLMEFTNLLNSARPSQTPSFPTMSSFPEVKNNSSFGASQTNGPPVFSSFSQIGAATNIGPGPGDCVTNLLPPFHNFSNEVWSFEYVAESCAFTSIFVAVYHGRILETRGSGQPFGSFQAPRFPSSKSPASSVQHRDIDRQSQELLNGMVTPPSVMFEESVGNNKNENQDDSIWLKEKWAIGEVWDTFLLVIFEVLFARNVCSFTTFVPAMLHDDTKELYNKQENLQE

SEQ ID NO: 18617 - protein, 278 aa, Oryza sativa
  Clone ID: TF_OSC415553j.C1.p1.fg
LNGGGKTTHSAEYPERPGQPVCEYYMKNGTCKFGSNCKYDHPREGSVQAVMLNSSGYPLRSGEKDCTYYVKTGHCKFGSTCKFHHPEIGGVSETPNMYPPVQPQPISSSHPYQHLAGWQMGRPPVLPGSFLSGSYPPMMLPSTVVPMQGWNPYISPVNQVASAGGHQTVQAGPFYGLSHQGPSAAVTYGSQYAPLSSSTMPSSSSKQEPAFPARPGQPECQYYLKTGSCKFGSACKYHHPQYLNTPKSNCMLSPLGLPLRPHAVARIVSPNVYRLSLD

SEQ ID NO: 18618 - protein, 476 aa, Oryza sativa
  Clone ID: TF_OSC422882j.C1.p4.fg
MADADARAPPKSDPGATPIDEVSGGEKLPGEVAAAVGVEGAAADSRPRFPRRPGEPDCTYYVKFGSCRFGMKCKFNHPARKKKSRVKGSNGGSGSGGSNSSSNKASSPDDEQQAPKEEYGSYVPDISPEVDSLGFADKGSASNLENFKKYSYEIIDVKKGRVEPKELKVLKVAKEKRKEFISEGSSQEECKYYSTPGGCKFGKACKYLHRDGKEGKTDAEKVDLNFLGLPLRPGEKECPYYMRTGSCKYATNCKFHHPDPSNVASKDPQLEHENGDAPQQDVQGSSSQPNASIWPDQRTVNEHHVPFIAPSPSYSAGMLPPQGMYPPPEWNGYHQVPLNPYYPPGVPFQHFPAAPINHPMYKAPEIPGHQQVPSEEYPERPGQPECQHFVKSGFCKFRMKCKYHHPRSPVPPAGALSPLGLPIKPDQPVCTYYGRYGVCKFGPACAYNHPFNFSPVPAAGPPLLPAQYPTPGNYTL

SEQ ID NO: 18619 - protein, 718 aa, Oryza sativa
  Clone ID: TF_OSC27392j.C1.p3.fg
MAAPAADDDDHRAALPREEDDGEEEEGSEEEVESDDEEEEEGEGYDWSEEDDPEAASLAGICDPDAGSYDDPTFDPAADGDLEVDAVLRSRMARMSLSSARKDRKGSRMPKMGKEEMDLLAMVDKLMHGQFFLRLPLCDCDISNNVMQTDGQLEKLKVYECKAYLRMHKLRLSGNKEVLLTRIRGQIEYELYPLCNLSFFFICYLSTLLIFCNANELLLFDHFLVLQNQGENYGRGDSCKGDVVVFEQNIYKRKKGAPRGVKGHLCGQRTNAGRIIKESYGTKKQQHTFTPWLDEEERNRALQEKHARGYVARKTREVRIKDKENERMRRLNRNKENKSKGQDNMNKKSSQAVFPQHTVTTNTVQKRAEKIIPSLQHGESGNSSQQHLSSKQTPTEQLLHYLPQFPHPQQHNEVLLQKGTSRTSTTQLINHQAPSLQHAVKVETTQQQQQQQPPKSIKPAPIQQSSAYPQQYPKHQHHNQALPRVPPSQEQRAAVSQTSAARQDFTNHQAPPSRQHGGSENMRRQEISSRPTPTPTPQQAVSYTQQQPPNHQYRNEAFWQQGGTSTSRTGFMDRQSNNWGSTDHDKPAFQPFTQKAKTYQHGSNGSGHHQARVDRETHQPLRSRNQDYHWEDQSYHHQQNHHQNYYGHRQMSQDQYHHQQNHHQNYHGRQGMNGNQYHDRQNHNQNPQRFRPWKPCFIYQQQGWCPYGENCKFMHDLR

SEQ ID NO: 18620 - protein, 719 aa, Oryza sativa
  Clone ID: TF_OSC411215j.C1.p5.fg
MPQDDDWFWGRPTPVVVGDGETTSKPKPPVAGKTKKVEEQHPRRPGEPDCSYYVKFGSCKFGISCVYNHPDPRPQHGADDKKPAEQFPRRPGEPDCSYYVKFGSCKFGMNCRFNHPPRMPVPPQQEYFSGNACHCHHIEGKSKVEQVKLNVLGLPLRPGTGLCSYYMNRGICKFGTNCKFDHPDPGSDHEKWVVSSNANQVSSQVNIYSVLDHGESNEHTFTSEEVHQPGIPSFHQRISYTRDQLLQLCQNVEVPKDILKFCQDINVELNGEDKISGFGAEKDHVSILPFSYVIMAEIVCAALINVPQRCKVLYFIVQTPSYKRFDATDSRDWHSWSAQTNWEQKFWDNFSEAKEPYSLGWKQEKFNKPDQSSFHFDSKDQRGIISGKDEVLKTLKSILNTFSPKMFDLQKGQLIETRISSADILKDVINLIFEKVVAEPAFCSTYAQLCTYLNQNLTPFPPEDCDCEEITFKQALSNKCQEIFESAHTVCSEIGKLIGQDREMEQRDKERVVKLETLGNINFIRALLKKKLITNKIIDHIVQAVMDCCKFRFEPLGKVDLLNIIFEGMLDSDSAGDESNICVNAMIGGNKSSIASNDVEMTRKNVNRQNEEAILQKSYDEVPNNKMDPQKNYADGAISYLIEKEKPTNLESSVRICRGGCSISEIMELVVDAGAVEGSDEHFMATLLFIKPEYREIFLTLDTREGRLGWLKRMYKVKE

SEQ ID NO: 18621 - protein, 90 aa, Oryza sativa
  unsure (1)..(90): unsure at all Xaa locations
  Clone ID: TF_OSC32478j.C1.p1.gp
GEPVCTFYSRYGICKFGPNCKFDHPMGTLMYGSATSPRGDVSSMHYQLSPSPGHPGILLDGGSGRSHRVPQSDSQQIPSGDGNAEREASX

SEQ ID NO: 18622 - protein, 413 aa, Oryza sativa
  Clone ID: TF_OSC101178j.C1.p1.fg
EAKKEYPPDLTLPDLKSGLFSTDEFRMYSFKVKPCSRAYSHDWTECPFVHPGENARRRDPRRYSYSCVPCPEFRKGGSCRKGDACEYAHGVFECWLHPAQYRTRLCKDEVGCARRICFFAHKPDELRAVNPSAVSVGMQPTVSSPRSSPPNGLDMAAAAAAMMSPAWPSSPASRLKTALGARELDFDLEMLALDQYQQKLFDKVSGAPSPRASWGAAANGLATASPARAVPDYTDLLGSVDPAMLSQLHALSLKQAGDMPAYSSMADTTQMHMPTSPMVGGANTAFGLDHSMAKAIMSSRASAFAKRSQSFIDRGGRAPAARSLMSPATTGAPSILSDWGSPDGKLDWGVQGDELHKLRKSASFAFRGQSAMPVATHAAAAEPDVSWVNSLVKDGHAAGDIFAQWPEQEQMVA

SEQ ID NO: 18623 - protein, 240 aa, Oryza sativa
  Clone ID: TF_OSC33167j.C1.p1.fg
MYLRPDMITPGIDAQGNPIDPEKIQADFEDFYEDIFEELSKYGEIESLHVCDNFADHMIGNVYVQFREEDQAARALQALTGRYYSGRPIIVEFSPVSDFREATCRQYEENSCNRGGYCNFMHVKEIGRDLRKRLFGHLHRSRRSHSHGRSRSPSPYHYRRDYDRRSSSRSRDHDDYYRGGSHDYYRGGSRRSSERHRSSYDSDGSRRRHRSRTRSPVRDGSEERRAQIEQWNREREAAQV

SEQ ID NO: 18624 - protein, 355 aa, Oryza sativa
  Clone ID: TF_OSC14394j.C1.p1.gm
MTTKFADLPRVVTSEKKEYPVDPSLPDIKNSIYASDEFRMYSFKIRPCSRAYSHDWTECPFVHPGENARRRDPRKYHYSCVPCPDFRKGVCRRGDMCEYAHGVFECWLHPAHTIPKSLGNSYNGDGCSNGLDAWFSIISFSSHVPIYTTNVPFRQWDAPFIGLAAAKCSDTTPSRQQPQSSRLRTSLSARDMPADDYSLMQDIDSQLINDLCYSVLGGMFSPSHKAAFLNQFQQQQQALLSPINTVFSPKSVDNQQLPSHSSLLQASLGISSPGRMSPRCVESGSPMNSHLCAALAQREKQQQTMRSLSSRDLGPSAARASGVVGSPLSSSWSKWGSPSGTPDWGVNGEELGKLR

SEQ ID NO: 18625 - protein, 386 aa, Oryza sativa
  Clone ID: TF_OSC400431j.C1.p28.fg
MMMMGEGVSSVPPWSHLPVSGVDVLGGGGGGGDEMTPYVIAALRDYLPANDVGVGADEEEEAAAMAAAVDAYACDEFRMYEFKVRRCARGRSHDWTECPFAHPGEKARRRDPRKYHYSGTACPDFRKGGCKRGDACEYAHGVFECWLHPARYRTQPCKDGTACRRRVCFFAHTPDQLRVLPAQQSSPRSVASSPLAESYDGSPLRRQAFESYLTKTIMSSSPTSTLMSPPKSPPSESPPLSPDGAAAIRRGSWPGVGSPVNDVLASFRQLRLNKVKSSPSGGWSYPSSSAVYGSPKAATGLYSLPTTPLASTATVTTASSFMPNLEPLDLGLIGDEEPVQRVESGRALREKVFERLSRDGAISGDATAFATAGVGLDVDWVSDLIN

SEQ ID NO: 18626 - protein, 464 aa, Oryza sativa
  Clone ID: TF_OSC900188j.C1.p9.fg
MVRKRRDTARVNPTAVSGGGLSGLYSRASSSPPLHHSGSRRRLRTNTLPRRSWRRGEELESKMMMMGEGAHAPPWQQHVASPVSGVEGGGGREIEVVATPYHLLDTLRHYLPSNEAAAPKDKEKAAPVAAAVDAYACDEFRMYEFKERRCARGRSHDWTECPFAHPGEKARRRDPRRYCYSGTACPDFRKGGCKRGDACEFAHGVFECWLHPARYRTQPCKDGTACRRRVCFFAHTPDQLRVLPPSQQQGSNSPRGCGGGGAGAAASPLAESYDGSPLRRQAFESYLTKSIMSSSPTSTLVSPPRSPPSESPPLSPDAAGALRRGAWAGVGSPVNDVHVSLRQLRLGSPRSAPSCASFLPAGYQYGSPKSPAAAAAAALYSLPSTPTRLSPVTVTTASGATVTVEPLDLGLIEEEQPMERVESGRALREKVFERLSKEATVSTDAAAAAAGVAPDVGWVSDLIN

SEQ ID NO: 18627 - protein, 388 aa, Oryza sativa
  Clone ID: TF_OSC418457j.C1.p13.fg
MADPNGRRRLPTGDPDQANASPSRRVSAVDGVTGGEGRPTYSHFPPGAYEPTDVAYGIRDAANDERARARARARHDQGGGAHDHHHDRPRQDQRGEAHLHDLPGEKSEVPDVGPSDQQGKEASDTDMAPLAALAKRSYDVNFPPLHEHRAAPFPAPAPAFAPAPAGTMGSSSAQVQGDGAPDNHDHDPRHLPRQDQSGGAHPDDLHGEKTIGSGSDILDDSKRGMINAGPQHGRITTSNGGSGSGSDKGKGVSYAGDKPASSSSSSSSAGQQGSDTDKTPSAAAASSYAVNFPPLLPAPAPVPAPAPAPAVAGAMGVANAHHKIALCSKWRKGRCHNGAACRYSHGEEEQRIVPEMRVGGGGRPCPELAAAKGWCRYGLNCKYCHGGV

SEQ ID NO: 18628 - protein, 53 aa, Oryza sativa
  Clone ID: TF_OSC32469j.C1.p1.gp
EAMWQMTLGGGESMESTPYPERIGEPDCSYYMRTGLCRFGMTCKFNHPPNRKL

SEQ ID NO: 18629 - protein, 506 aa, Oryza sativa
  Clone ID: TF_OSC419228j.C1.p18.gm
MEQPHAAAAAAGGGEGEGGASPDTGLEGPMWRMGLGGGGGGGGGGGGGDGDAAGRLPERPGEEDCVYYLRTGACGFGDRCRYNHPRDRGGTELENWACHCLDLVRRIGSTHRVAALEFGFAVEGEKECSYYMKTGQCKFGTTCSYTPMMLSSGMIPLQGWSPYPASVNPVVSGGAQQNVQAGPVYGMGHHGSSSTIAYGGSIVLIGSSRHWETRIHSLVAGGEKGQSAPTWRRFGDIVHLDTSGGRGGYSSSSSPLLVTGQWSPLAGEEDKLVVVVGRLAIIRQRRPMLVQPPNADAQHTDIPDGRSFLGVPRYYRHSLTVLQRAVRSWNAHNHKHPMTAAVAPSLLAVQAVVAEFDRFLDAYDFNAVGWSRDHPMAAAAGRFLDKRNPNTDKNNPSGLAGVARRFVMFNGAVCEAQLRWLDGVLRGLMWNYEGVMRVVHRWTRGPTCHRLPPTVSSSLLSPEAPPVGSFPHLPPIPVSPSLVRTSASPVFAASLVFLRRPLPPLR

SEQ ID NO: 18630 - protein, 566 aa, Oryza sativa
  Clone ID: TF_OSC400711j.C1.p10.gm
MATTTSSSASDPAAISPTPSQQHASSTVKTLDDRRPAGTSSSAGETEPKAAVEPQEYPRRPGVPDCSYYVEFGSCKFGMRCLYNHPAKHAGGCDKLEHPQRPGEHDCLHYLRFGRCKYGMNCRFNHPPDRLPQQQVPAEQIRYTRDQLLKLRETVDVPKDIMKLIQDINVELRAEDESRAPNETNYETDSHDWHSRSLQTPVVAEEEKSQDDTREAKEPYALGWKQKEFNKQDQKSFQSDSKAQAGPTLALHKAEDPWSIQRSTVPEKYKVLKTVKGILNLLTPEKFDILKDQLIEAGITRTDILKDVIDLILEKAVAEPTLCPMYAQFCSYLNENITAFPPKDTHCEQITFKQALSDKCQQAFEIARNVRADIYKLTGREQEMERRDKERLVKHQILGKIRLIRDLLKQKMVPDKIVHHIAQAVTDCENFHFEPLENVDLLNIIFDGVLDSVLPGTEANKVVNAIIGIEKCSIASNDAGIIHKDVNRRNEEAKLQKSSNDIPNNLIDPQKNYVVSAFGHPIENEKQTNSETSVRISEVGCGISEIMELIVNAGAEEGTLKEDFGG

SEQ ID NO: 18631 - protein, 428 aa, Oryza sativa
  Clone ID: TF_OSC400964j.C1.p103.np
MDDAGRASAPAVVTLPATAAATDLPATAAATDEPSHDPAALYGEGMWQQMTMSGSGAMQPGPYPERSGEPDCTYYLRTGLCRKGEYPERMGQPECQYYLKTGTCKFGPTCKFHHPREKAGIAGRVQLNTLGYPLRPSEKECAYYLKTGQCKYGNTCKFHHPELFNAMASSRGSPIYPSVHSSATAGPPYTGTMASWAFPRGSFIPSPRWQNPSNYAPMIVPQGLVQVPSWNSYTGQMMPVSSSESRLQSPGAQQTYGTSQQVDASAGNQGMLSPYRSSSYPVPQYALQRENVFPERPDQPECQYYMKTGDCKFGAVCKFHHPRVRSMPTPDCVLSPVGLPLRPGEELCKFYSRYGICKFGANCKFDHPTMAPPMGVYAYGSASTNVPMIVGIGFSGSWQQGAKDPTDSSGAPPNTHVLGEDPIPYRKI

SEQ ID NO: 18632 - protein, 609 aa, Oryza sativa
  Clone ID: TF_OSC22496j.C1.p9.fg
MLLVDGEPVSASASPTFGSSRGVRLLGCWRDFFPPRLSPSRFLQGSGGRELVAALMGNPGLRAASERLRAEPERRISSGPEEDDADAAAAAAPRHVYVFQREFATVDPARVELVGTDEVTTCVGVVIRNNKTGMTSISHMDFPKIVEGGLKQMLELLGDDNAPFDVVHSAGRKHIKQEGYSYPLCCRILEVLYKSRQQFHLRTFCVLGSNTTTDSYGNTRPIIGGFVVETSSGAVNPASFEMNSRCPDEIVRRIRVSVSSYDPNWQGRLLETYDTHSDAFEIAPACWMPDWAEMASSLNQLSDSEVLLQCSTSPAAEPPHFVENERRIWRYLIENPYWQDTFPKYKPRVFHRTSDGSTSGCPFGSSCHFLHNFPGGYQAAAKMTSHGGTAVAAPPGRMPLGPGAPNGPPTSSVKTRMCNKYNTAEGCKWGSKCHFAHGERELGKPMLLDNSMPHPMGSMPFEAPPMPGPDIVPPSTFGASATAKISVDASLAGGIIGKGGTNTKHISRMTGAKLAIRDNESNPNLKNIELEGTFDQIKHASAMVTELIVRISGNAPPAKNPGRGSHAGGPGSNFKTKLCENFNKGSCTFGDRCHFAHGESELRKPPAAA

SEQ ID NO: 18633 - protein, 496 aa, Oryza sativa
  Clone ID: TF_OSC26691j.C1.p8.fg
MADSEDGDHVATTTTEQRYDDDGHLVPSSGGQEEEGSGGRDVVVPGGHVAEDYRSGVGVPVGRDAGGATSSPPQPVHVTPSILVGSIHAPVFQGELVGMKFGVGSGSMGAGTSATRRLPATGFGALPTSSMAEDSADHADDDHLAEEEEEEEEEHYIDDGPLVPSSGGQEEEGSGGRHVFVPGGHDGEEDHPDDLVADLDLDLLVDGVVGPVPGGHLNADAPAFVPTTRGRQDLYSALSSSAPAAGYRYRHYITSSALAEAGHVSPFLGLPYATAFDSPLDRELVGPSSAPPPCSAASRAWLVRCSSPLSDSEWTRRSILAREAAHTPASTVTGRGRFEFVPIPGAPYAPPPSFAPIAAGAGPAARPLQQLAFGLEEHKTKLCAEYYSRGLGCPRGNTCKYAHGEDDLRLVVAVSSLADAGEGSSSSDSSFAALGGEDKYKTKLCKTFTSGGLCLFAANCRFAHGEVELGKKEPCWYFFSGQTCPRGDTCGFRHSY

SEQ ID NO: 18634 - protein, 534 aa, Oryza sativa
  Clone ID: TF_OSC418457j.C1.p20.gm
MSVMDANQAYARHHFDGGHLRGDRADVLAQQAGMDIGSMADSEDGDHVATTTTEQRYDDDGHLVPSSGGQEEEGSGGRDVVVPGGHVAEDYRSGVGVPVGRDAGGATSSPPQPVHVTPSILVGSIHAPVFQGELVGMKFGVGSGSMGAGTSATRRLPATGFGALPTSSMAEDSADHADDDHLAEEEEEEEEEHYIDDGPLVPSSGGQEEEGSGGRHVFVPGGHDGEEDHPDDLVADLDLDLLVDGVVGPVPGGHLNADAPAFVPTTRGRQDLYSALSLSAPAAGYRYRHYITSSALAEAGHVSPFLGLPYATAFDSPLDRELVGPSSAPPPCSAASRAWLVRCSSPLSDSEWTRRSILAREAAHTPASTVTGRGRFEFVPIPGAPYAPPPSFAPIAAGAGPAARPLQQLAFGLEEHKTKLCAEYYSRGLGCPRGNTCKYAHGEDDLRLVVAVSSLADAGEGSSSSDSSFAALGGEDKYKTKLCKTFTSGGLCLFAANCRFAHGEVELGKKEPCWYFFSGQTCPRGDTCGFRHSY

SEQ ID NO: 18635 - protein, 367 aa, Oryza sativa
  Clone ID: TF_OSC416788j.C1.p1.fg
MDYTNAIHIIPDAAGPDAWANAAAQGGDAGIWATEDDYNSQWNADGGGGGSSRAGSEQPPPGKKSRGGGGGEGGGNTSKSRAIGKMFFKTKLCCKFRAGTCPYVTNCNFAHGMEELRKPPPNWQEIVAAHEEATEAREEHQIPIMTSSGPTAGGDAGCGGGGGGGSGRAYKGRHCKKFYTDEGCPYGDACTFLHDEQSKARESVAISLSPSVGGGGGGGSYNSAAAAAASASAAAGNGPMQKPSNWKTRICNKWEMTGYCPFGSKCHFAHGAAELHKYGGGLVDIDSRDAAATPDSKQAVVSAKAPAETAAASTTVLPHADVYHLGVQAQRSTIAGQRSGQVQRPIQKWKGPDKISRIYGDWIDETE

SEQ ID NO: 18636 - protein, 387 aa, Oryza sativa
  Clone ID: TF_OSC400011j.C1.p3.fg
MQEALLPPAHPGRFYSDFGPKPFGSGDQRLSSPNLLTNGGDLFYGCYSPFSPTRVLSPPPPRRAASFSHCSSSSDSVVDDGDGAGAAAATEHRLHLAHLALQYQEMANRFELCLSHLADAADEAAALRQENAELRVANNDLACRIAKFGGRQSSAIALAGDLRRLRLPKEQTVPALPPPPQSPPAALMNPVAVPEKQAVLPKSISIRSTGYQKLNQGGKHRVSKPVNVGSVRPNPPIPPLCCVWLPLLQRTDSCAESKIPILTSTMFLMRQCKQQRVFVGIDGAEGGEHKVGVKKEEPPMGGLEFEVYNQGMFKTELCNKWEETGACPYGDQCQFAHGVAELRPVIRHPRYKTQVCRMVLAGGVCPYGHRCHFRHSITPADRFSFGH

SEQ ID NO: 18637 - protein, 441 aa, Oryza sativa
  Clone ID: TF_OSC400848j.C1.p12.fg
MSDPFYPHGHGGAAGGEGAAAAGYSSYEVDLIAARYGGRPLANPSSAAADLDARLAGARRSMGVLYHQPIMGSHSTVEQIEALYSSNTMTKRPRLESSLPIYPQRPGEKDCAFYMMTRTCKFGGSCKFDHPQWVPEGGIPNWKEAANVEESYPEQEGEPDCPFFMKTGKCKFGSKCKFNHPKEKVNALASGNTNDFYAKTGKCKFRAMCKFNHPKDIEIPSSQNEPESAVTVEGETDIGSAADSVSAKMQTPVAAAQEFNSKGLPMRPGEVDCPFYMKMGSCKFGSTCRFNHPDRLVLNFPLPLGQTILPTPESMLLNSSANFMQGFDFHAAHMPVGPGPVTYPQRPGATVCDFYMKTGFCKFADRCKFHHPIDRSAPDPSANWEPAEESVQLTLAGLPRREDAVVCAFYMKTGVCKFGMQCKFDHPPPQEAIAKVSNSGS

SEQ ID NO: 18638 - protein, 678 aa, Oryza sativa
  Clone ID: TF_OSC404615j.C1.p9.fg
MSTAAADPAAAADAAVTRKERRRERKKERRRRARREAAEAARKAAEALAADPEEERRLRELEEAEADASERARRAFEDAERRWLEAAAARAAEKAAAAREESTAPEDSSREYKDDHGNGTEEDDEWEYVEDGPAEIIWEGNEITVKKKMVKVPKKAKENQPIQQDKAHCPFHLKTGACRFGVRCSRVHFYPDKSCTLLMRNMYSGPGLALEQDEGLECTDEEIEQSYEEFYEDVHTEFLKFGELVNFKVCRNGSLHLRGNVYVHYKSLDSALIAYSSMNGRYFAGKQITCEFVAVTRWKVAICGEYMRSRFKTCSRGIACNFIHCFRNPGGDYEWADWDNPPPRYWIRKMAALFGPSDDSIYGKPSDTPHLERSQSSDRRRPRSSDPRYTPSRTRDEDAHKQHSSRDYSHSKHERSSHTEHRRDRKESSASDKHRHREIKDKTSKYSSNMESERESHKYMREEKHRIDHGNGGKGDHGKVRSRKNRSERQESLEPGSSGRSSDFIDQDTTESPSGSKSTGRHHKKTRRQSLEEHSTRRSSRHRDMEDDGRGQSVAVKRKDHHDTSDDRWVATNSDVDSDLETQYQRSSSEGSKLGMKYHARSDSETGYGRSRSGTTKSRRERKRQSGNGERSDTLEVTSDSDTRDMSSDAWRSRSRSSDENLSTHRSRRKRSRSSHDS

SEQ ID NO: 18639 - protein, 605 aa, Oryza sativa
  Clone ID: TF_OSC413661j.C1.p5.fg
MADMKQEEDELAVDPGVGAVCDPVTKLRFEAIVCLLDRIPITLQQIDMFGQDVAFRTKRIGNIEALLDFLKGSAAATWGARAGAGEPIDASSPELHRLVEDAETAYRDVRGLQPRMVVQMPRVFHKVCLPKLHQLLVIARRLLAQNVALRRLLLQPVGCDVSPMALAEAAVSSDDFERHGRNKVVIDEFGYEDLLRRRHTGHESQNDADDAEQHGREVREGEYEDLILMRHRDTSHELLQDDARRRRADAEAEQQGGDGEVRDEYEDYLCRQLGAVYSGPDQIYEHDMRGPEPAHSPNTPDQIYVPCERMLPYPSNCDNAEDRIHMACLALKNLVKDMEGIYSPRGTLWQYLEDVISLAHALFLENTKLHRFTDQASHQDLPLQPPQGFPFQQQPQHDGYQQPGVPFQQPQQGGYYGHGQGIMFQRGGYLQDVPFQHWQWQQGGYGQGFMFPQAQHQGGYGQGFLSEQPLPGDPSFMNMQAPYDGDGGVLFQKPQHYHHGHVPSEKGAIQAKGKQKMREPKTVMCPDWCRTGHCSSGDGCEYAHSQDELRVIDARPKYRTEPCRYWLAGKGCWYGDKCRYKQHRLAREPLYVDPFLTGHELRNKT

SEQ ID NO: 18640 - protein, 300 aa, Oryza sativa
  Clone ID: TF_OSC101298j.C1.p6.fg
MEVGGRKRGKPDGANGAGGKRARESESFQTGVGSKSKPCTKFFSTSGCPFGEGCHFLHHFPGGYQAVAKMTNLGGPAIAPPPGRMPMGNAVPDGPPTPTVKTRLCNKYNTAEGCKWGDKCHFAHGERELGKPMLMDSSMPPPMGPRPTGHFAPPPMPSPAMSTPASFGASATAKISVDASLAGGIIGRGGVNTKQISRVTGAKLAIRDHESDTNLKNIELEGTFDQIKNASAMVRELIVSIGGGAPPQGKKPVGGSHRGGGPGSNFKTKLCENFTKGSCTFGDRCHFAHGENELRKSAAA

SEQ ID NO: 18641 - protein, 466 aa, Oryza sativa
  Clone ID: TF_OSC419228j.C1.p6.fg
MEPYAAAEGGGGGGGGGSTDTGLEESMWRMGLGGGGGGGGEAVAAGRLPERPGEADCVYYLRTGACGYGENCRYNHPRDRAAAAVLNGGGKTTHSAEYPERPGQPVCEYYMKNGTCKFGSNCKYDHPREGSVQAVMLNSSGYPLRSGEKDCTYYVKTGHCKFGSTCKFHHPEIGGVSETPNMYPPVQPQPISSSHPYQHLAGWQMGRPPVLPGSFLSGSYPPMMLPSTVVPMQGWNPYISPVNQVASAGGHQTVQAGPFYGLSHQGPSAAVTYGSQYAPLSSSTMPSSSSKQEPAFPARPGQPECQYYLKTGSCKFGSACKYHHPQYLNTPKSNCMLSPLGLPLRPGSQPCAYYTQHGFCKFGPTCKFDHPMGTLSYSPSASSITDLPIAPYPLNYAVAPVAPPSSSSDLRPEYLLTKEFSANQSASPGTTCGPAGAMLKAYAPHMLIRPQTSGAGGMVTTHGGEL

SEQ ID NO: 18642 - protein, 690 aa, Oryza sativa
  Clone ID: TF_OSC400151j.C1.p17.fg
MARIKELCNSFSSAALLYIGSSISISMRMHDSLHAYGGEGWDGGVGGGAAAGFGGRDRAAPGPPARRRPPPVKAVEPESGGFAYEPPEKLFYKTRVCETFVTSGRCMFEDGCTFAHGDEELRPSLTACAGGWRKPSPSLSAAAPPVAVAPTPPPAQVVHELLARGSGSGGGGHRAITKVCFEFRDKGICYFGETCAFPHVSAAEIRQGSRLSSMSSSSWEMPARRSVAVTVPRTFVSVPPVAPPPPPPHYRVNNSSSYNAASMAAAAPAASDANLVAQQPPPEQGGRKMTRLEMLSLKKMTGIYGDWLEGAREMRIWCSLVQVKRRRPEEGKRGRRMGSGIGAVLVLVAAWLTFAPPGALASSRSIKLWMNRFDYRGLMQPFGGICEIPIIKLSPYQLNDYNQEAVEKGQHRWGKWFDLSIAQEKLVNSTGGSTASSSHLVFDPSKSKRLSWHPRIFLYEGFLSDMECDHLVSMGRGNMESSLAFTDGDRNSSYNNIEDIVVSKIEDRISLWSFLPKENGESIQVLKYGVNRSGSIKEEPKSSSGAHRLATILMYLSDVKQGGETVFPRSEMKDAQAKEGAPSQCSGYAVRPAKGNAILLFNLRPDGETDKDSQYEECPVLEGEKWLAIKHINLRKFDYPKSSLASEDECTDEDDRCVSWAASGECDRNPVFMIGSSDYYGSCRKSCRVC

SEQ ID NO: 18643 - protein, 478 aa, Oryza sativa
  Clone ID: TF_OSC400481j.C1.p19.fg
MAAGAGAGGGGGEGDSNGGGTSPGGVSAAAPAIGPHHLGVAAAEGGGGVICSVLLYLNLWGKRVSGVREAMWQMTLGGGESMESTPYPERIGEPDCSYYMRTGLCRFGMTCKFNHPPNRKLAVAAARMNGEYPYRVGQPECQYYLKTGTCKFGATCKFHHPREKAALANRVQLNVLGYPMRPNEKECAYYLRTGQCKFASTCKFHHPQPSNTMVAVRNSMYSPGQSATSPGQHTYPGAVTNWTLSRSASFIASPRWPGHSGYAQVIVPQGLVQVPGWNPYAAQMGSSSPDDQQRTPVTTQYYGSRQSETGGMGDHGMYQSYQGGSVPVGVYTVQGENIFPERPDQPECQFYMKTGDCKFGAVCKFHHPKERLVPAPNCALNSLGLPLRPGEPVCTFYSRYGICKFGPNCKFDHPMGTLMYGSATSPRGDVSSMHYQLSPSPGHPGILLDGGSGRSHRVPQSDSQQIPSGDGNAEREAS

SEQ ID NO: 18644 - protein, 304 aa, Oryza sativa
  Clone ID: TF_OSC413563j.C1.p4.fg
MAEHLASIFGTEKDRVNCPFYFKIGACRHGDRCSRLHNRPTVSPTIVLANMYQRPDMITPGVDAQGQPIDPEKMQEHFEDFYEDIYEELSKFGEVETLNVCDNLADHMIGNVYVQFREEEQAVAAHNALQGRFYSGRPIIVEYSPVTDFREATCRQFEENSCNRGGYCNFMHVKQIGRELRRKLYGGRSRRSHGRSRSPSPRHRRGNRDRDDFRRERDGYRGGGDGYRGGGGGGGGDGYRGGDSYRGGGGGGRRGGGSRYDRYDDGGRRRHGSPPRRARSPVRESSEERRAKIEQWNREREEKP

SEQ ID NO: 18645 - protein, 559 aa, Oryza sativa
  Clone ID: TF_OSC401249j.C1.p75.fg
MSSAYTVHRSISLLSVIQLNNSSQWRAERIKQQIKVHFCANRLAHRKLFVASLSFEKDMTGNKSFMEPRFFGPKVLRQAKHPMRHAVHHFFTFLFDYKYSVIRVLQNENDVGHVFRALAKFKSLLLDVVRKKRAPTRGGGGKKYAIGYRSRPEKSKKRIASFMKLLRFNWAAAAAVTPARAKDLELHYHPYYYDYDDSTWNVVVPADGAAEELRGGGGDDGEDCGYLCWLEEETSAGALPAAGEGEDGGNGNGDGDGNGAVNEIDRLAERFIARCHAKFLLEKQESYRRYQEMMARSITIGCPFGEGCHFSHFVPGGYQAVAKTLNLGNPAVPAPARAPMDHAAGGNSHPASSGKTRMCTKYNTAEGCKFGDKCHFAHGERELGKPAYMSHESAMAPPMGGRYGGRPEPPPPAAMGPPAGNFGASATAKISVDASLAGGIIGKGGVNTKQICRVTGVKLSIRDHESDSNLKNIELEGNFDQIKQASNMVGELIATISPSTPAKKPAGSAAGAAPAGRGGPGGRSNYKTKLCENFVKGTCTFGDRCHFAHGENEQRKGAA

SEQ ID NO: 18646 - protein, 333 aa, Oryza sativa
  Clone ID: TF_OSC401329j.C1.p67.fg
MQEALVSPVRSALELKPFNFGDQRLASSPRYLPSGDDALYRCSSPFSPSFGFSSPSPLATSVSLSPSSSASLVDDGDDGGAAADATGQRLQLARLALQYQEVADRYELCLSHLAEAAEEAAALRLENAELRVTNSDLALRLALLSGKHTAAVAVADEIRRLRLGEQKVAAATKERTPEKLAVLPKSISVRSTSYLKLNQQSQAATATSAAPNRKPRTSSNPTNPPNSQRAYDGGKKGDEQKAQPADSGAELEVYNQGMFKTELCNKWEETGDCPYGDQCQFAHGVTELRPVIRHPRYKTAVCRMVLAGDVCPYGHRCHFRHSLTPAERLLLRS

SEQ ID NO: 18647 - protein, 374 aa, Oryza sativa
  Clone ID: TF_OSC401327j.C1.p1.fg
MEQPHAAAAAAGGGEGEGGASPDTGLEGPMWRMGLGGGGGGGGGGGGGDGDAAGRLPERPGEEDCVYYLRTGACGFGDRCRYNHPRDRGGTEFGGGARNAAALDYPERAGQPICEYYMKTGTCKFGTNCKYHHPKQDGAVLPVMLNNSGFPIRLGEKECSYYMKTGQCKFGTTCKFHHPEFGGVPMTPGIYPPLQSPSIASPHPYASLANWQMGRPPVVPGSYIPGSYTPMMLSSGMIPLQGWSPYPASVNPVVSGGAQQNVQAGPVYGMGHHGSSSTIAYGGPYVPYASSTGQSSNNQQEHGFPERPGQPDCQYYMRTGDCKFGATCKYHHPRELSAPKSGYMVNSLCLPLRPGAQPCAYYAQNGYCRYGVAC

SEQ ID NO: 18648 - protein, 1981 aa, Oryza sativa
  Clone ID: TF_OSC33100j.C1.p1.fg
MAARRCGSRRRRRRAAATRVGLISRLADTPCIKRGLESPSAWKSPWFVDMQFQGSYFVSPADRTYNALGFVKQINVQTAAALAEAREVLVSGGQSENINSGKENLESPNAKKEPGATTKLQAKIKIGKGLLPPLPMAATEHKPAGRKTAEKVEEKPSPPPLLLLLLGVCFLWGESPRKQARLKSAIVVPETRKLSVFNRLSKGEPGAPSSIWQEVKPRFWWRQGRAPLPATASRRPTTGVIPAWRPFNPATLGRCLRCLAQDHKIADCRDPPRCYICKRSGHISSGCPSKYKNKPSIFSCIYSTHPAPPSKQEIPNPLAFPPLTGHKAPVRERLGPKMDYIPGLPENHPACGYAVVVADAAMEHEAMRLYNHGAVIKARLPNYDVSAKEMAQALQQQVGTPNYDVRRCSKMSASSTNPNLLPRVSVFTLFPAGVGQVLETGGMPTPSQEVASAPLGRVRHLLIHLDMVEDWRPLPARSSNSSGSTDSDDPPRRRVHRFDWHLGYEDGVSPPPLQPPQPPLPVRRLHEERGRPEQRGIDLRNRLSQRGSPKAETTAGTAAAPPVAAIATSPAIGWVAPQPGAHPGRLLAAGALAGRARQARGVVRSRRVAVFAGALPKVVGATREGEDPMFLELAVAAAFHAEKSANASTLEAGASVPIGSAAPLGPVAPIGPVSPGPVAPLGPDGSAASPGLIASPGLGLLELVGEQMEGTATQPMQGGVEPFFAPLPPPLVATPPVRRRGRPRKKVLLPSRHSKRLEARPSPVLISMRAQVRIMKEMRVLKPGEPVGDEAVAEYIKRFQDPLPTVVVQGIRALTGLDSGKPLPPDVTEEADGATPEWCTSLGVTYGSRMIEGLKILNWNVRGLNNPARREAICEVANNADASILCIQETKLANIDQFLGREIGGSRLRRFEFLPADGVRGGVAIFWDDTKVQVDNTQIHTFSVSIRAQVIGGNVPFILTSVCGPSEDEHKSDFLAELESLVPQPLLPWVVLGDFNLICEASDKNNLNLDRRRMGQFRSTLNRCCLKEFKLQNRKFTWSNEQEAPTLERIDKVFCNIDGDILFSNHTLQALSSSCSDHCPLLLAFTVSPPKRVVFRFENFWVWVPGFMEVVQQAWSSHTFGGHPFTKLSHKLTATAKALRKWSRSLFGEIKMQFHVAQEVILRLDLAQEDRILTADEHQLRKDLKLRILGLAAVAKSKKRQRSRLTWLKEGDANTKFFHIHANSRRRKNHIHQLHTTSAILTEHEEKSEALFNHFNSILGNKEARNCTLNWNAIDLPQVNPDELDEPFTEEEVWAALKQMQAEKAPGPDGFNGGNFGVLNRAAITLLPKRNAPTLVTDFRPISLIHSVAKLISKVLAIRLARQMDGLISVAQSAFIKKRCIQDNFLYVRNMLRNLNASKKPTLFFKLDIARAFDSVSWEYLLELMQNMGFGPRWRNWICLLFSTATSKVVLNGDQGECIAHRRGLRQGDPISPYLFILAIDPLQRLLHLATEGGQLTNIGSRHARLRTSLYADDAAVFLNPVQSEVDVLITMLRDFGKATGLHVNLGKSLVAPIRCQEVDLDDVLCSFSGARASFPLTYLGLPLTPGRLRKVHFQPLQDKIKGRLSGWKPSLLYMGGRRIMVNSVLSAIPTYTLTVLKPPKQSLQEIDKARRRFLWAGNENMHGGKCKVNWLKVCSPVRTPEKPWIGTETPCDELDKDLFAASTRVQIGDGQKASFWESNWIGGQRLKSQAPNLYRHSKRKTRTVQDALQQGRWINDILHSLTIPLLDEFFHVWEILARNTPQLTEGVQDSIVWQWTTNGEYSAKSAYQFQFNGMVLLPSTKLSWEAWAPVKCKIFSWLVLQNRVWTADRLQIRGWPNNYFYQLCFRNLETIDHLLFECLVSKQIWFGILTWLHQGHIIPKWNTSRNLLDWWTQGTSDLEATKQKGLRTLFLLIAWEIWKERNARIFRAKEATVHQMISRIQEELGWWSMAGAKHIGRMLP

SEQ ID NO: 18649 - protein, 462 aa, Oryza sativa
  Clone ID: TF_OSC900317j.C1.p10.fg
MAPQPTCQTCVRNYLGSKEDPALSENPNQLAEQVTNQVAKTDNTVPGPNKEVATRNQHSSMDIYQILANQTQMLQEIAQNLASIQQQLLLPQPKVNPDKSKNEAAEIQGTQSVEGTDTHKEKNKEFLNVMITGMKTPLRANNCPNLQNSINKSVSRENSMIKEGSCHKRKTLPSEVDMQDVPQCQTMQSCQNLPKSPTLKSKKIRHVPGFICFICHKIGHYMRHCPQKPYMDAPLQANMSTSRMPFYPQGSPNSPNVNAVRSTFPDDKRAKASCDMCQDIQEKKEMQEYKRRKVMSLEIQAKEDLCRKTNSPAQYYQKASQHSTSSGSTSRSTMSEPGQQATMINSNSHEGSNSVPCPTPSKRRGYKAGVECFICHEMGHYSWCCPQKVKSKRVQPTTSLPNVSGPKSSKSPNSGSASLTSPPVGQGRLNHVQVETNGKVGNLEQVEGAGEEQVPQARAEPQ

SEQ ID NO: 18650 - protein, 276 aa, Oryza sativa
  unsure (1)..(276): unsure at all Xaa locations
  Clone ID: TF_OSC28031j.C1.p1.np
SIEDPTHIITWMEFTTTFRDAFIPTAVIRMKKNEFRRLRQGFMTVQEYLIKFTQLARYAASDIQDEKEKIERFIEGLRDELRGPMISQDHENFQSLVNKVVRLENDRRMVEGLPKRRMNLQXQSLTRGSLQVRRPYPFKASLPNARPGMPPILPRPGLKMEDSPCYVCGKIGHFARLCPNRQNMGGQTSYQKPSTTGFIKKNPPIIKSGHNLGRGQVHHIKAEEAQQDPNILMGMFTINSKPVTILFDSGASFLSICQSQLESLYLKDNLDKAVLI

SEQ ID NO: 18651 - protein, 673 aa, Oryza sativa
  Clone ID: TF_OSC28041j.C1.p3.fg
MPPILPRPGLKMEDSPCYVCGKIGHFARLCPNRQNMGGQTSYQKPSTTGFIKKNPPIIKSGHNLGRGQVHHIKAEEAQQDPNILMDIILGMDWLAKNNGLINCATREVILTDEQGMNTRIIVKSNLSMEQHMTDICMLKPKEEVPVVQEYFDVFPEELSSLPPDREIEFIIELLPGMAPISKRPYRMPINELEELKKQIAKLQEKGFIRPSSSAWGALVLFVKKKDGSLRMCVDYRALNEVAIKNKYPLPRIDDLFDQLKGASVFSKIDLRSAYHQLKIRQEAFGLTNAPAYFMNLMNKIFMEYLDQFVVVFIDDILIYSKNKEEHKQHLRMMDLNLRQRRWLELIKDYNLEILYHPGKANVVADALSRKANCNLQQEIISEQLQAEMLKLNLGIIKFEELNTLELKPTLMDQIKEHQKEHSEIQTFKERKVQGKAADITEDLEGIFWYGDRIVVPQSGNLRKVILKEAHDSAYSLHPGSTKMYHDLKDLYWWPNMKRHIAEYVALCHVCQQVKAEHQKPTGLLQPLQIPEWKWDEIGMDFITGLPKTSTGYDSIWVIIDRLTKTARFIPVKTTYTGAQVAELYMTRIKLHYELGSYLDFSTAFHPQIGGQTERLNHTLEDMLTACGLDFAASWDKCLPYAEFSYNNNYQASLKMSPHEALYGRKCRTPLIWT

SEQ ID NO: 18652 - protein, 392 aa, Oryza sativa
  Clone ID: TF_OSC32878j.C1.p1.fg
MDEVGRRWTFSRANEGYTSCGPMFNREKGKNVSGYAPSNSSFQLNPPLASRELTRAHPWSIPSTLLSSQLPLVGSQDQNQYVFDRAFATQVNELPMPGEDVPFCHDCREQGHYALNCPWVYAKEAPSFGLTGQASLNQPPHTKSSLQPSVQSRELNGENPLNPGKCFPPSLSYHVGSHTKQAKGKKSKNQKRKAPMRTEEEVRKMTITSTEWPPAGITIPRRQKGNTFRGARQLTQHLLSHGGRVSDSEGSDQVSSDDEDESPRHLGEEEMESKACTRCGEIGHIASMCLTLCAYCEEDHPPGECPTRKVICFLCEGTNHVPKDCQLSVLLTKTAEIQRTTLRLSHQLVSSNSNIDDIIHNTNAPLAAPDSAVNHSDNTFSTNHSRHRQPQQ

SEQ ID NO: 18653 - protein, 1615 aa, Oryza sativa
  Clone ID: TF_OSC400152j.C1.p9.fg
MPYVTSEAQARALLQVGGWPVGTLVHVVIVDAACRARRLDHTLRAMVARRGWVVVNRHAVLRVIRVSDLVHNILDITLPRLLDDAYDATQLTHFRRQAAALRTMAGVIGGNFRNRAYVVVRKIRFVASSARNHSMAAARLQQRLLDIRRRLSGLVEAPDMNLQRLCADCSYLINQIAGELLALLADAAFETVSIPFRFIFAKVIGDCSLVAKQRAFIIHAACALDKAMMVRLCEKSGNFYCTELGRIANHFYLQYSSVETYNEMLWHHMNESKIRRPRVRSEFLASFPVLVSPSPRLSCSRFSASDLLRAREIGRSSASETTPSPEMGDQVFGGVPPARLLIAMSGVAAAAIGGGGAPPPTGAGAPGGGAVNDYNNGGNSASPSSGGPFSGYNLLLLLLLALLLFPLLALYCVRYVLVPVLHDAFSMLSHYWYVPDSDIHDALSMLLVMLRSPYTAYAMIIVSISWIKICRIMTIFPTIQKPDRSFSVVGFAAALKPHAFDGSNYKRWKARALLWLTAMQCFYVSRGKRSEPPLSPEEEAKFEASDCLFRGALISVLADNIVDVYMHMPSGKDMWDALEAKFGFYDYKMVDDRSVVEQAHEIQMLAKELENNNCELPDKFVAGGIIAKLPPSWSDFATSLKHKRQEFSVPDLIGSLGVEEKARAKDIRGKKVEGGSSANMVQKKNPHASHNNKKVKPDVKPKAATNFKKKGKGKAKGDCFVCGKSGHWAKDCLERKDRKSANMIISEGGGTSGYGRERFLLVDGKRVACGCSWCCSKCHTCVQSKQPRKPHKASEARNLAPLELVHSDLCEMNGVLTKGGKKYFMTLIDDCTRFCYVYLLKTKDEALHYFKIYKAEVENQLERKIKRLRSDRGGEYFSNEFASFCEEFGIIHEMTPPYSPQSNGVAERKNRTLTEMVNAMLDTAGLSKEWWGEAVLTACHVLNKIPMKHKEVTPFEEWERKKLNLSYLRTWGCLAKVNVPIVKKRKLGPKTVDCVFLGYAIHSVGYRFLIVNSGVPDMHAGTIFESRDATFFENEFSMKYTPSTSSKETVMPHEHFAPIEHNDETPEENPEEDNIVDTRKSKRQRVAKSFGDDYIVYLVDDTPRTIEEAYSSPDADYWKEAVRSEMDSIMSNGTWEVVERPYGCKPVGCKWVFKKKLRPDGTIEKYKARLVAKGYTQKEGEDFFDTYSPVARLTTIRVLLALAASHGLLVHQMDVKTAFLNGELEEEIYMDQPDGYVLEGQEEMVCKLLKSLYGLKQAPKQWHEKFDITLTSAGFVVNEADKCVYYRYGGGEGVILCLYVDDILIFGTSLNVIEEVKDYLSKNFEMKDLGEADVILNIKLQRGDEGGITLVQSHYVDKVLSRFGYSDCKPAPTPYDPSVLLRKNRRIARDQLRYSQIIGSLMYLASATRPDISFAVSKLSRFVSNPGDDHWQALERVMRYLKGTMSYGIHYTGYPKVLEGYSDSNWISDADEIKATSGYAFTLGGGAVSWKSCKQTILTRSTMEAELTALDTATVEAEWLRELLMDLPVVEKPVPAILMNCDNQTVIIKVNSSKDNMKSSRHIKRRLKSVRKQKNSGVIALDYVQTARNLADQFTKGLPRNVIDSASREMGLIPT

SEQ ID NO: 18654 - protein, 1782 aa, Oryza sativa
  unsure (1)..(1782): unsure at all Xaa locations
  Clone ID: TF_OSC401418j.C1.p2.np
MSDLGGKNGENGNEDGASSKETPSPKGATIPFDYSKLTIPPHNFVSVPSGRAPQFDGTHYAAWKHKMKLHLISLHPSIWKVVCIGVDVPNDDMELTSEQEQLIHRNAQASNAILSALSLEEFNKVDGLEEAKEIWDTLQLAQEGSPTVREAKIELLEGRLGRFVMDDKETPQEMYDRMMILVNKIKGLGSGDMTNHFVVKRLLRAFGPRNPTLVSMIRERKDFNRLTPSDILGRIVSHEMQEEEAREVRQMVKNAAMIKNQEVALKAKQEEMAFIVKRFKHFLRKSGYGKRRALKAKQEEMAFIVKRFKHFLRKSGYGKRRKDDDKGKRQSKRACFNCGEYGHFIADCSKSNEAKAKGGKKKPERAHVAEAHMAEVWYSGDEEDPEVKPKPKLKDKVEGEGGVATVAFKSSSSSKERLFNNLSDDDDDSYHYSCFMAQGRKVMTQKPSHTSLDVDSSDEESDNELDDVLKSFSKPAMQHLAKLMRALDSKVQSLERQEELLILEKKRNLALEESLAKECAKNEQLANELNLANGSLASLRDVNETLQEKFASLDKSHKDLEVQFDTLWNSTSQPNVVSNSSNPSTSNGCARCYNIDLNSHATNVDAMQALKKENERLGTLVKYGCMKTYHSKDALYKTITAHPNKDGHGLGFSSGSPVSKRVMVNGKECLMFVREGNAPQASEMTCPLTGQTPGTSGQNDRKFSCKTGSSGHFVRKFWASDRPKGLAGSSGYNARKFRPEGLYYDSYAYSSGGSSWVVDSGCTNHMTGEMSMFISLDEEGGSRENIVFGDDGKGKVMGLAYISIGGNKYGFVIVDDFSRFTWVYFLHDKSEAQDVFKRFAKQAQNLYDLTIKRVRSDNGGEFKNTQVEEFLDEEGIKHEFSAPYDPPQNGIVERKNRTLIEAARAMLDEYKTSDVFWAEAVSTACHAINRLYLHKILKKTSYELLSGKKPNVSYFRVFGSKCFILSKRPRSSKFSPEVDEGFLLGYESNAHAYRVFNKTSGIVEVTRDVTFDESNGSQGEQVVVHVVGDVDPSQAIGTKAIGDIRPVETQDDQEDRDQPPSSTSNSPTSAVSAEPEVPGPIDRNLRTSPGPEVPGSTVRNLQTSGSEDVSTAQVDGIDVEGTLEHSDQAQVPPVHHLRIHHTVQRDHPVDNILGDIRKGVTTRSRVASFCQHFSFVSSLEPTRVEDALGDPDWVMAIQEELNNFARNQVWTLVERPKQNAIGTKWIFRNKQDEHGVVVRNKAWLVAQGFIQVEGLDFGETFAPITRLESIRILLAYAAHHDFRLFQMDVKSAFLNGPISELVYVEQPPGLKDPKLPNHVYKLHKALYGLKQAPKAWYECLRDFLLKNSFEIGKADTTLFTKKFKSDLFICQIYVDVIIFGSTNVSFCEESSIMTKRFEMSMMGELTFFLGLQVKQAQEGTFISQTKYVKDILKKFGMEGAKPIKTPMPTNGHLDLDDNGKCVDQKGCDFKLLGYSDSDYAGCKVDRKSTTGTCQFLGRSLVSWSSKKQNSIALSTAEAEYVAAGSCCAQLLWMKQTLKDFGYNFTKIPLLCDNESAIKIAINPVQHSRTKHIDIRHHFLRDHETKGDICLTHKRQKLSQDVPGDSSPPVRGPRGRLGKEKVGDFYNGSQILIHSRRAGSIVIRDAPRSPSPAASESDDGGNEDEPGSESNPLRLYKTRAVDPDPKRPRVNYLKNLLKCGKDMIMGRSHPIMGRSHPVVEMKWLDWQYMSSKNNIVFNEVRKVCERKHVADLLALQYSXNEEVIGXFYSTAFFGTTRKGLISD

SEQ ID NO: 18655 - protein, 855 aa, Oryza sativa
  Clone ID: TF_OSC417975j.C1.p4.fg
MEALVGKYTPCLAKGRQAVGIHLAFGDAFIPTAVIRMKKNEFRRLRQGFMTVQEYLNKFTQLARYAASDIQDEKEKIERFIEGLRDELRGPMISQDHKNFQSLVNKVVRLENDRRMVEGLRKRRMNLQRQSPTRSSLQVRRPYPFKPFLPNARPGMPPILPRPGLKMEDSPCYVCGKIGHFARLCPNRQNMGGQTSYQKPSTTGFIKKNPPIIKSGPNLGRGQVHHIKAEEAQQDPNILMGASHSFLSAKASWNQSLPKDNLDKAMLIHSPGGTILVSSICRNVPIKLGDQIFLIDLMVLPTQTIDITLGMDWLAKNNGLINCATREVILTDEQGINTRIIVKPNLSMEHYMTDICMLIPKEEVPVVQEYLDIFPEELSSLPPDQEIEFIIELLPGTAPISKRPYRMPINELEELRKQIAELQEKGASIFSKIDLRSGYHQLKIRQEDIPKTAFVTRYGLYEFTVMAFGLTNAPAYFMNLMNKIFMDYLDQFVVVFIDDILIYSKNEEEHKQHLRLVLEKLRQHQLYAKFSKCEFWLDQVAFLGHIITKEGVVVDPEKIKVVMEWRTQTSVPEIRSFLGLAGYYRRFIKDFSAIAKPMTRLLKKDRKFEWTPECQSSFQRLKHKLTTTPVLILPDIQKDFEIYCDASRQGLGCVLMQEGKVVAYASRQLRPHEDNYPTHDLELAAVVHALKIWRHYLIGNHCKIYTDHKSLKYIFTQTDLNLRQRRWLELIKDYNLEILYHPGKANVVADALSRKAYCNLQQEIILEQLQAKMLKLNLGIIKFGELNTLELKPTLMDQIKEHQKEDSKIQTFKERKVQGKAAYITEDMEEILWYGNLNHRTTIRKLKEDNTKGST

SEQ ID NO: 18656 - protein, 937 aa, Oryza sativa
  Clone ID: TF_OSC101063j.C1.p15.gm
MSGQAGDGIDGDKGAKIPYDYPPTSTSYNPEDPTKEDDENEHKNAQAANAILSALSGSEFNRVDGIESAKVIWDTLRNLHEGTDSVRESKVEILKGQFERFVMLDGESPSDMYDQLSKIVNEIKGLGSKDMTNDVVVKMMVRAITPRNSTLVIIIRERPDYKTLTPRDFLGRILAHDMLVQESKDVIQYINQSSTASIKKEDLALKAKEEEEENRKSKSKAEIDDEEMALFVKKFGKFMRRSGFFKGGSSKHYSNKSSGRHSARVCYVCKEPGHFIADCPHLKDGSHIKEDKKKGEKKDEKKEKHKHRKREHYGQAHLVMIFGSDSESSSSDEEGVVAFAVKPSSPPRLFDNSSDEDAPICLMAKEPKVPSPLKSFNVDLVSDEEDEAKSILTNDYASHGSFDASYVLRKNASGYVVAKYVGLRGKNISIKREYVSGGRSWVIDSGCPNHMTREESMFSTLDPNGTSQDNIVFGDDEKGKVMGLGKIAISDLSMANVLFGCSQGRALPCGFFLNACQAGKQIGAHHPVKNVMTTTRPLELLHMDLFGPIAYLSIGGNKYGLVIVDDFSRFTDNGKEFKNTCIESFHDEEGIKHEFSAPYSPQQNGVAERKNRTLIEMAKIMLDEYKTSDRFWAEAVNTACHAINRLYLHRLLKKTPYELLTVNEGFLLGYGSNECTYRVFNKTSSIVEIARDGATTRSLFLNTSRTTYINPSRRSLYLKLESRVEEALNDPDWVMAMQEELNNFTWNEVWTLVERPRQNVIGTKWIFRNKQDEAGVVIRNKVRPINELVYVEQSPGFEDPKYPNHVSKLHKALYGLKQAPRACRMMTKRFEMSMMGELKFFLGLQIKQLKEGTFICQIKYLKDMLKKFGMENAKPIHTPMPSNGHLDLNEQGKDVDQKGARFDLIGYADADYAGFVSTCIISGSSLHHLLLLEVEDS

SEQ ID NO: 18657 - protein, 372 aa, Oryza sativa
  Clone ID: TF_OSC101552j.C1.p1.fg
MKCFWVSTGKPEGILTADQQKQFEEATTLFVGCILSVLGERLVEVYMHMTDAKELWDALNTKFVATNASNDLYIMEQFHDYRIADNRSIVEQAHEIQTIAKELELLKCVLPDKFVAGCIIAKLPPSSRSFGTALKHKRQEYSVEGLVASLNGEEKARKKTPRLRAMNKSKGKYKAQQNTNFKKQKKNNNNPNQDERTCFVCGQPGHLARKYPQRKGMKAPAGQTSKSANVTIGNTGDGSGYSNLPTVFSVNQSTNWWVDTAANVARSSTVLMGNGSHASVHGVGTVDLKFTLGKIVQLKNVQHVPSIDRNLVSGSRLTRDGFKLVFESNKVVVSKHGYFIGKGYECGGLFRFSLSDFCNKSVNHICGSVDDD

SEQ ID NO: 18658 - protein, 1735 aa, Oryza sativa
  Clone ID: TF_OSC102249j.C1.p19.fg
MSGQAGDGNDGDKGAKIPYDYPSTSTSYVSTYSGKAPYFNGTDYAAWKHKMKMHLKSINPSIWRIVKKGYVLQNPEDPTKEDDENEHKNAQAANAILSALSGSEFNRVDGIESAKVIWDTLRNLHEGTDSVRESKVEILKGQFERSVMLDGESPSDMYDRLSKIINEIKGLGSKDMTDEVVVKKMTLTPHDLLGCILALDMLVQESKDVIQYINQSSTASIKKEDLALKAKEEEEENRKSKSKAEIDDEEMAPFVKKFGKFMRRSGFFKGGSSKHYSNKSSGRHSARVCYVCKEPGHFIADCPHLKDGSHIKEDKKKDEKKEKHKHSKREHYGQAHLGMIFGSDSESSSSDEEGVATFAVKPSSPPRLFDYSSDEDAPVCLMAKEPKVPSLLKSFNVDLVSDEEDEVEDEVIDDELFKSITKESLPHLSELLERIEDQYATLERQETLLIREKERSHELKSELAKEREKNEALEYVSGGRSWVIDSGCTNHMTREESMFSTLDPNGTSQDNIVFGDDGKGKVMGLGKIAISNDLSIANILLVKSLNYNLLSVSQLCSMGYNCLFTDVDVTVYRRNDSSVVFKGVLKGKLYLVDFSSSKAKHETCLVAKSNTGWLWHQRLAHVGMRNLHKLLKHDHILGLTNVQFEKDRVCSACQAGKQIGAHHPVKNVMTTTRPLVLLHMDLFGPIAYLSIGGNKYGLVIVDDFSRFTWVFFLHDKSETQAIFKKFARRAQNEFDLKIKNIRSDNSKEFKNTCIESFLDEEGIKHEFSAAYSPQQNGVAERKNRTLNEMARTMLDEYKTSDNFWAEAVNTACHTINCLYLHRLLKKTPYELLTGNKPNVSYFRVFGSKCYILNKKARSSKFAPKVDEGFLLGYGSNECAYRVFNKTSSIVEIARDVTFDKINGSQVSERSNQKIGSWGREEGEQVPPSPINLARPRIHQSIQRDHPTDNILGDINKGVSTRSRIANFCEHYSFVSSLEPLRVEEALNDPDWVIAMQEELNNFTRNEVWTLVERPRQNVIGTKWIFCNKQDEAGVVIRNKARLVAQGFTQIEGLDFGQTFAPVARLESIRILLAFATNLNFKLYQMDVKSAFLNGPINELVYVEQPPGFEDPKYPNHVYKLHKALYGLKQAPRAWYECLRNFLVKRGFKIGKADSTLFTKRHNNDIFVCQIYVDDIIFGSTNKSFSEEFSRMMTKRFEMSMMGELKFFLGLQIKQLKEGTFICQSKYLKNMLKKFGMENAKPIHTPMPSNGHLDLNEQGKDVDQKVYRSIIGSLLYLCASKPDIILSVCMCARFQVALKECHLVAVKRILRYLVHTPNLGLWYPKGARFDLIGYADEDYAGCKVDKKSTLGTCQFLGRSLVSWSSKKQNSVALSTAEAEYVSINWEELQAHNDPVIDSMIANCDLMGIRSFMTLQQNWCNEVIAQFYATVYFDRYRAMHCMTQGSWYSVSYQQLAEIWGFRLRSLLNLDDLHNLQIPANTELLPLYTPNDPNVVLGKVDGLKPYFAYLNRMFRRSFVSMDSDANSINHLSRTVLLRFDPPPHRFHVYHFVWEEIRMASIQYKKGLVYALHIMRMIETVTQLQFRHDVTHSQLHLRLLKAPRSSAAWDIPSSSTLPPPAPERPASVARREPSPLFHNLRSLFGLCSTEAKKNRRLRNSAKKTARDVKFLKARYYEDHHIDIPPSPPGFEAEPDEPQDEAIEDPFAGLPYDFDFFGYGHGYGYPPPPPPEDPSQAPFA

SEQ ID NO: 18659 - protein, 124 aa, Oryza sativa
  Clone ID: TF_OSC11196j.C1.p1.fg
MDNRKRGRIVFQEAQGQEQSQQLGISGEINSETNASNEDNDEQATQSVSFQQDQSQEDNSNGREQRVCFNCYEPGHFVKECPKPKRQQPQGQVNNLVLTEANAVPVASQGIQLSHQFQSGISFL

SEQ ID NO: 18660 - protein, 1069 aa, Oryza sativa
  Clone ID: TF_OSC22995j.C1.p3.fg
MAQFNELRRNMEARQDRMAQDVQNILGHFENINPFGGDASVHSGEDEEDDNDDLPYRFGRIPRRRNNDEERLGKLKFTIPKFDGGSDLEAYLMWELKVDKIFHIHNYSEEKKLAMASLEFEDYALIWSRDIQCFKCGGRGHVVRECPNNRAIIVIEHGEFDSASEDAENGQRNNLFQTRAKVGGKVCKVIVDGGSCHNLASKDMCDKLGLKLLRHPHPYHVQWLNDSGDIKIGHRVKVSFKIGEYEDEVLCDVVPMTVCHLLLGRPWQFDRSSRHCGRTNQFSIKWKGRNFVLKPMTPQQIMAEHMQKSSEVRIESEKEREQNKFSDIHKSVSKSHKPNMSDKKKREGENFVMLATKSEMRDEYEDVFPMETPAGLPPLRGIEHQIDLIPGAALPNRAPYRTNPQETNEIQRQVQELLDKGYVRESLSPCVVPVILVPKKDGSWRMCVDCRALNNITVRYRHPIPRIDDMLDELSGSMIFSKIDLRSGYHQIRMKIGDEWKAVFKTKFGLYEWLVMPFGLTSEPSTFMRLMNHVLRTFIGKFVVVYFDDILIYSKSLSEHASHIKQVLDVLRKEKLFANIEKCTFCTEKVVFLGFVISGQGVEVDESKVEAIKDWPTPVNVSQVRTFHGLAGFYRRFVKDFSTIAAPLNELTKKGIEFHWGESQKDAFQKLKRCLTEAPLLVWPDFTKTFEIECDANGIGIGAVLMQDKKHVAYFSEKLGGAQLNYSVSDKELYVLVRVLETWQHYLWPKEFVIHSDHEALKYLKGQAKLNRRQAKWVEFIETFPYVVKYKKDGQTEVVNRTLSTLLRMMIKKNLKEWEDCLPLVEFAYNRAERTNMDASKRAAYVKKIHEKTKEEIEKKARSNTAKVNKHRKKVVYETGDLVWVHLQFRTTPFQEGEDDVPQPLSHDDEHIPATPDVNKGDVNNGDGSHHKSHEENEDDVNHVDGLCLNKNDQAYHGPITRSRARKIQQEVNSLFAQLNPNFCENFILPKCSTFLLLRFTPEEIITTPRRMGYIEDDKGYVEDDKGYDEEEPAHPKPVAVYANKKMVYSAKDSTSKACVTQPVNFLHA

SEQ ID NO: 18661 - protein, 82 aa, Oryza sativa
  Clone ID: TF_OSC25748j.C1.p1.hg
QATQSVSFQQDQSQEDNSNGREHRVCFNCYEPGHFVKECPKPKRQQPQGQVNNIVLTGANAVPVASQGIQLSHQFQSSSSFL

SEQ ID NO: 18662 - protein, 117 aa, Oryza sativa
  Clone ID: TF_OSC28706j.C1.p5.gm
MPQGGSSSVVRPQRQFFNNNTGNNIRNQAPRPVAAPTQQQPAKREQGSKPVVCFNCGDPGHYADKCPRPRRVKVVPTQSNSTVPASKARVNHVAAAEAQDAPDVISGQSYPARIQRP

SEQ ID NO: 18663 - protein, 256 aa, Oryza sativa
  Clone ID: TF_OSC28815j.C1.p1.fg
MNRAERQPITWEEFTEGFKKTHVPVGVVALKKREFRALKQKDRTVAEYLHEFNRLARYAPEDVRTDEERQEKFLEGPKDELSVMLISHDYEDFQELVDKAIRLEDKKNKMDNRKRKMTVSQEAQGSSQRQRIKPLQIGESFSAGQEQSQQQSQQLGISGEINSETNASNEDNDEQATQSVSFQQDQSQEDNSNGREHRVCFNCYEPGHFVKECPKPKRQQPQGQVNNIVLTGANAVPVASQGIQLSHQFQSSSSFL

SEQ ID NO: 18664 - protein, 1991 aa, Oryza sativa
  Clone ID: TF_OSC400269j.C1.p2.fg
MSGQAGDGNDGGKGANIPYDYPSTSISYNPEDPTKEDDENKHKNAQAANAILSALSGSTDSVRESKMEILKGQFERFVMLDGESPSDMYDRLSKIVNEIKGLGSKDMTDEVVVKKMVRAITPRNFTLVTIIRERPDYKTLTPHDLLGRILAHDMLVQESKDVIQYINQSSTASIKKEDLALKAKEEEEENRKSKSKAEIDDEEMALFVKKFGKFMRRSGFFKGGSSKHYSNKSSGRHSARVCYVCKEPGHFIADCPHLKDGSHIKEDKKKDEKKEKHKHSKSEHYGQAHLGMIFGSDSKSSSSDEEGVATFAVKPSSPPRLFNYSSDENAKVPSPLKSFNVDLVSDEEDEVEDEVMDDELFKSITKESLPHLSELLGRIEDQYVTLERQETLLIHEKERSHELKSELAKEREKNEALVRLYKQTKESHANLEVANAQLQERVDGLDKAYLTLEEKFKTLKNSVSLPSEPSCSKIVPSNEPCVRCKDIDIEACATNSISLSALQKQNEKLMGLLHNGLLKCHMDSKALKEYLGYQRDNFYHQGLGYVPPPKEKVDKSVLIRRPQGLSNFVKAKSILPNDYASHCSFDASYVLRKNASCRVVAKYVGPRGKNISIKRVLWVPKTLVTNMRGPKQGKVMGLGKIAISNDLSIANVLLVKSLNYNLLSVSQLCSMGYNCLFTDVDVTVYRRNDSSVVFKDVLKGKLYLVDFSSSKAKHETCLVAKSNTGWLWHRRLAHVGMRNLHKLLKHDHILGQTNVQFEKDRVCSAYQAGKQIGAHHPVKNVMTTTRPLELLHMDLFGPIAYLSIGGNKYGLVIVDDFSRFTWVFFLHDKSETQAIFKKFARRAQNEFDLKIKNIRSDNGKEFKNTKCYILNKKARSSKFAPKVDEGFLLGYGSNECAYRVFNKTSGIVEIARDVTFEETNGSQVEQVDSHVLGEEEDPSEAIKRLALGDVRPREPQQGVSSSTQVEPPTSTQANDPSISSLDQGEEGEQVPPSPINLARPRIHQSIQRDHPTDNILGDINKGVSTRSRIANFCEHYSFVSSLEPLRVEEALNDPDWVMAMQEELNNFTQNEVWNLVERARQNVIGTKWIFRNKQDEAGVVIRNKARLVAQGFTQIEGLDFGETFAPVARLESIRILLAFVTNLNFKLYQMDVKSTFLNGPMNELVYVEQPPGFEDPKYPNRVYKLHKALYGLKQAPRACEEFSRMMTKRFEMSMMGELKFFLVLQIKQLKEGTFICQTKYLKDMLKKFGMENAKPIHTPMPSNGHLDFNEQGKDVDQKVYRSIIGSLLYLCASRPDIMLSVCMCARFQAAPKECHLVAMKRILRYLVHTPNLGLWYPKGARFDLIGYANVDYAGCKVDRKSTSGTCQFLGRSLVSWSSKKQNSVVLSTTEAEYVSAGSCCAQLLWMKQTLRDYGLNVSKIPLLCDNESAIKIANNPIQHSRTKHIDIRHHFLRDHSIRGDIDIQHVRTDKQLADIFTKPLDEARMPPRKQTSHKSKRPRDRSPTPSSHDDSDSDWSGGEDAVPQVAWVARRSTQAHGGGGDGEGSSRQPQTPPHQPNVPIGPLRIHTPERDPAVIHQVYDWWRKSEVVAPRRDEDLRSFRRTATDLRFWTLFQQDFYESVIKSKTHPTVPMQWINWEELQAHNDPVIDSVIANCDLMGIRSFMTLQQNWCNEVIAQFYATVYFDRYRAMHWMTQGSWYSVSYQQLAEIWGFRLRSLLNLDDLHNLQILANTELLPLYTPNDPNVVLGKVDGLKPYFAYLNRMFRRSFVPKDGDASSINHLSRTVLLRFDPPPHRFHVYHFVWEEIRMASIQYKKGLVYAPHIMWMIETVTQLQFRHDVTHSQLQLRLLKAPRSSAARDIPSSSTQPPPAPERPASVARREPSPLFRILRSLFGLCSTEAKKNHRLRNSAKKTARDVKFLKARYYEDHHIDIPPSPPGFEAEPDEPEDEEIEDPFAGLPSDFDFFGYGHGYGYPPPRPSLESSSHRPLFLVS

SEQ ID NO: 18665 - protein, 1708 aa, Oryza sativa
  Clone ID: TF_OSC400615j.C1.p3.np
MSNEVNHVGKAPMFNGTNYSTWKIKMSTHLKAMSFHIWSIVDVGFAITGTPLTEIDHRNLQLNAQAMNALFNSLSQEEFDRVSNLETAYEIWNKLAEIHEGTSEYKDAKLHFLKIQYETFSMLPHESVNDMYGRLNVIVNDLKGLGANYTDLEVAQKMLRALPEKYETLVTMLINSDMSRMTPASLLGKINTNDMYKLKKKEMEEASPSKKCIALQAEVEDKGKGKVNEVNENLEEEIALLARRFNDFLGRRKERGKGSNSNRRRNRRPNKTLSNLRCFECGEKGYFASKCPSKDDDGDKSSKKKSGGYKLMKKLKKEGKKIEAFIGEWDSNEESSASSGSEEEDSDNASSKKKKMAVVAIKEAPSLFAPLCLMAKGSSKVTSLSDSESDDDCDDVSYDELVSMFEELHAYSEKEIVKFKALKKDHAFLEVLYEELKTSHERLTISHEKLKEAHDNLLSTTQHGALIDVGISCDLLDDSTTCHIAHVASSSISTSCDDLVDMSSSSSSSCVSICDASLVVENNELKEQVAKLNKSLERCFKGKNTLDKILSEQRCILNKEGLGFIPKKGKKPSHRATRFVKSNGKYCSKCREVGHLVNDCPGGKPPKTCMFDSHYMLRKAHDGSIVARYVGSPILGGKKNTIWVPKALVSNLQGPKQVWIILTILVFFLHDKSIVAELFKKFAKRAQNEFSCTLVKIRSDNGSEFKNSNIEDYCDDLGIKHELSATYSPQQNGVVERKNRTLIEMARTMLDEYGVSDSFWAEAINIACHATNRLYLYRLLKKTSYELIVGRKPNVAYFRVFGCKCYIYRKGVRLTKFESRCDEGFLLGYASNSKAYRVYNKNKGDEGLMRAMKDEGLMRAMKNMSIGDVKPIEVEDKPSTSTQDEPSTSASPSQAQVEVEEEKAQDPPIPPRIHTALSKDHPIDQVLGDISKGVQTRSRVASICEHYSFVSCLEPKHVDEALCDPDWMNAMHEELNNFARNKVWTLVERPRDHNVIGTKWIFRNKQDENGLVVRNKARLVAQGFTQVEGLDFGETFAPVARLEAIRILLAFASYFDIKLFQMDVKSAFLNGEIAELVFVEQPPGFEDPENPNHVYKLSKALYGLKQAPRAWYERLRDFLLSKDFKIGKVDTTLFTKIIGDDFFVCQIYVDDIIFGSTNEVFCKEFGDMMSREFEMSMIGELSFFLGLQIKQLKDGTFVSQTKYIKDLLKRFGLEDAKPIKTPMATNGHLDLDEGGKPVDLKLYRSMIGSLLYLTASRPDIMFSVCMCARFQAAPKECHLVAYPKGYPKGAKFKLVGYSDSDYAGCKVDRKSTSGSCQMLAPPHTRHGRREPTPDPVSKNEESSGDEYVQSDEDNMENVEGNELDVSDDGDDNGSGNSEDDEASDDGSPLDSTIQFVLNLRNAQQYTILHHHDQFRRPNDCNDPRFHTRFQKSVYEQVYANKAFAEHKWISWRHIGETPEFENLQEMFRTVGIDRIVTMKQPFDEDLIRQFYATVWVSGDCDAMKWMSGTLRCSINRREFKELLHIRFNNGDDLHDEHTHNPFPIDHFSQFYEEGGGYTYGKVAGLRALPSVINRRVRATILPRCGNNDDIRGVAWHVIDAIMDGRRFDVINLMMKEIAISKGTIGQGIYYAPYIMRLPPPRRLVEKLPGDLSEKIVEEARCQFVSGLEFTTFGVKEELPVIKAWVVLSVGRLPPCPPLDEGGVRRLRG

SEQ ID NO: 18666 - protein, 842 aa, Oryza sativa
  Clone ID: TF_OSC400752j.C1.p2.gm
MSGQAGDGIDGDKGAKIPYDYPPTSTSYNPEDPTKEDDENEHKNAQAANAILSALSGSEFNRVDGIESAKVIWDTLRNLHEGTDSVRESKVEILKGQFERFVMLDGESPSDMYDQLSKIVNEIKGLGSKDMTNDVVVKMMVRAITPRNSTLVIIIRERPDYKTLTPRDFLGRILAHDMLVQESKDVIQYINQSSTASIKKEDLALKAKEEEEENRKSKSKAEIDDEEMALFVKKFGKFMRRSGFFKGGSSKHYSNKSSGRHSARVCYVCKEPGHFIADCPHLKDGSHIKEDKKKGEKKDEKKEKHKHRKREHYGQAHLVMIFGSDSESSSSDEEGVVAFAVKPSSPPRLFDNSSDEDAPICLMAKEPKVPSPLKSFNVDLVSDEEDEAKSILTNDYASHGSFDASYVLRKNASGYVVANACQAGKQIGAHHPVKNVMTTTRPLELLHMDLFGPIAYLSIGGNKYGLVIVDDFSRFTDNGKEFKNTCIESFHDEEGIKHEFSAPYSPQQNGVAERKNRTLIEMAKIMLDEYKTSDRFWAEAVNTACHAINRLYLHRLLKKTPYELLTVNEGFLLGYGSNECTYRVFNKTSSIVEIARDGATTRSLFLNTSRTTYINPSRRSLYLKLESRVEEALNDPDWVMAMQEELNNFTWNEVWTLVERPRQNVIGTKWIFRNKQDEAGVVIRNKVRPINELVYVEQSPGFEDPKYPNHVSKLHKALYGLKQAPRACRMMTKRFEMSMMGELKFFLGLQIKQLKEGTFICQIKYLKDMLKKFGMENAKPIHTPMPSNGHLDLNEQGKDVDQKGARFDLIGYADADYAGFVSTCIISGSSLHHLLLLEVEDS

SEQ ID NO: 18667 - protein, 252 aa, Oryza sativa
  Clone ID: TF_OSC400773j.C1.p55.fg
MNRAEGQPITWEEFIEGFKKTHIPAGVVALKKREFRALKQKDRTVTEYLHEFNRLARYALEDVRTDEERQEKFLEGLKDELSVMLISHDYEDFQELVDKAIRLEDKKNRMDNRKRKMIVFQEAQDSSQRQRIKPLQIGESFSAGQEQSQQLGISGEINSETNASNEDNDEQATQSVSFQQDQSQEDNSNGREHRVCFNCYEPGHFVKECPKPKRQQPQGQVNNIVLTGANAVPVASQGIQLSHQFQSSSSFL

SEQ ID NO: 18668 - protein, 1715 aa, Oryza sativa
  Clone ID: TF_OSC400988j.C1.p4.fg
MSGQTGEGKHGDKGATFPYDYPPTSTSYVSTYSGKAPYFNGTDYAAWKHNMKMHLKSINPSIWRIVEKGYVLQNPENPTKEDDENEHKNAQAANAILSALSGSEFNRVDGIESAKVIWDTLRNLHEGTDSVRESKVEILKGQFERFVMLDGESPSDMYDRLSKIVNEIKGLGSKGMTDEVVVKKMVRAITPRNSTLVTIIRERPDFKTLTPHICSDSKDVIQYINQSSTTNIKKEDLALKAKEEEEENRKSKSKAEIDDEEMALFVKKFGKFMRRSGFFKGGSSKHYSIKSSGRHSARVCYVCKEPGHFIADCPHLKDGSHIKEDKKKGEKKDEKKEKHKHSKREHYGQAHLGMIFGSDSESSSSDEEGVATFAVKPSSPPRLFDYSSDEDAPICLMAKEPKEYVSGGRSWVIDSGCTNHMTGEESMFSSLDPNGSSQDNIDFEDDGKGKVIGLGKIAISNDLSIANVLLVKSLNYNLLSVSQLCSMGYNCLFTDVDVTVYRRNDSSIVFKGVLKGKLYLVDFSSSKAKHETCLVAKSNTGWLWHRRLAHVGMRNLHKLLKHDHILGLTNVQFEKDNVCSAYQAGKQIGAHHPVKNVMTTTRPLELLHIDLFGPIAYLSIGGNKYGLVIVDDFSRFTWVFFLHDKSETQAIFKKFARRAQNEFDLKIKNIRSDNGKEFKNTCIESFLDEEGIKHKFSAPYSPQQNGVTKRKNRTLIEMARTMLDEYKTSDRFWAEAKTPYELLTGNKPNVSYFRVFGSKCYILNKKARSSKFAPKVDEGFLLGYGSNECAYRVFNKTSGIVEIARDVTFDETNGSQVEQVDSHVLGEEEDPSEAIKTLALGDVRPREPQQGASSSTQVEPLTSTQADDPSISSLDQGEEGEQVPPSPIILARPRIHQSIQRDHPTDNILGDINKGVSTRSRIANFCEHYSFVSSLEPLRVEEALNDPDWVMAMQEELNNFTRQNVIGTKWIFRNKQDEAGVVIRNKARLVAQGFTQIEGLDFGETFAPVARLESIRILLAFATNLNFKLYQMDVKSAFLNGPINELVYVEQPPGFEDPKYPNHVYKLHKALYGLKQAPRAWYECLRNFLVKNGFEIGKADSTLFTKRHDNNIFVCQIYVDDIIFGSTNKSFSEEFSRMMTKRFEMSMMGELKFFLGLQIKQLKEGTFICQTKYLKDMLKKFGMENAKPIHTPMPSNGHLDLSEQGNNVDQKVYCSIIGSLLYLCASRPNIMLSVCMCARFQAAPKECHLVAVKRILRYLVHTPNLGLWYPKGARFDLIGYADADYAGCKVDRKSTLGTCQFLGRMPLHKQTSHKSKRPRDRSPTPSSHDDSDSDWSGGEDAVPQVARVARRSTHAHDGGGDGEGSSRQPQTPPHQPNVPIGPLRIHTPERDPAVIRQVYDWRRKSEVVAPRRDEDPRSLRRTATDPRFWTLFQQDFYESVIKSKAHPTVPMQWINWEELQAHNDLVINSVIANCDLMDIRSFMTLQQNWCNEIIAQFYATVYWMTQGSWYSVSYQQLSEIWGFRLRSLLNLDDLHNLQIPANTDLLPLYTQNDPNVVLGKVDGLKLYFAYLNRMFHRSFVPKDGDASSINHLSRTVLLRFDPPPHRFHVYHFVWEEIRMASIQYKKGLVYAPHIMRMIETVTQLQFRHDVTHSQLHLRLLKAPCSSAARDIPSSSTQPPPAPERPASVARREPSPLFRILRSLFGLCSEEAKKNR

SEQ ID NO: 18669 - protein, 365 aa, Oryza sativa
  Clone ID: TF_OSC401051j.C1.p10.fg
MVNTRASGSGNNNNEENPTLAQVLAQQTQLINMLVQQMQNQQGNNNVNPPPPQNKLADFLRVRPPTFSSTTNPVEAGDWLHAVEKKLELLQCTDQEKVVFASHQLQGSASEWWDHFRMNRAEGQPITWAEFTEAFKKTHIPAGVVALKKREFRALKQKDRTVTEYLHEFNRLARYAPEDVRTDEERQEKFLEGLKDELSVMLISHDYEDFQELVDKAIRLEDKKNRMDNRKRGRIVFQEAQDSSQRQRIKPLQIGEPSSASQGQSQQLNIAGEINSETNASNKDNDEQATQSVSVQQDQSQVNNSNGREQRVCFNCYEPGHFVKECPKPKRQQPQGQVNNIVFTGANAVPVVSSSVTAQRPVSKQ

SEQ ID NO: 18670 - protein, 1831 aa, Oryza sativa
  Clone ID: TF_OSC401179j.C1.p25.fg
MKMHLKSINPSIWRIVEKGYVLQNPEDPTKEDDENEHKNAQAANAILSALSGSEFNRVDGIESAKILKGQFERFVMLDGESPSDMYDRLSKIVNEIKGLGSKDMTDEVVVKKMEEEEDSHKSKSKEEIDDEEMALFVKKFGKFMRRSGFFKGNSSKHHSNKSSGRHSARVCYVCKEPGHFIADCPHLKDGSHIKEDKKKGEKKDEKKEKYKHSKREHYGQAHLGMIFGSDSESSSSYEEGVATFAVKPSSPPRLFDYSSDEDAPICLMAKEPKVPSPPKSFNVDLVSDEEDEVEDEVMDDKLFKSITKESLPHLSELLGRIEDQYATLERQEALLIHEKERSHELKSELAKEREKNEALARLYKQTKESHANLEVANAQLQERVDGLDKAYLSLEEKFETLKNSVSLPSEPSCSKIVPSNESCVRCKDIDIEACATNSISLSALQKQNEKLMGLLHNGLLKCHMDSKALKEYLGYQRDNFNHEGLGYVPPPKGKVDKSMMIKRPQGFSNFVKAKSILPNDSASHCSFDASYVLRKNASGRVVAKYVGPRDKNFSIKRVLWVPKALVTNMRGPKQVWEYLSGGRSWVIDSGCTNHMTGEESMFCSLDPNGSSQENIVFGDDGKGKVMGLENVSYFRVFGSKCYILNKKARSSKFAPKVDEGFLLGYVSNECAYRVFNKTSGIVEIARDVTFDETNGSQVEQVDSHVLGEEEDPSEAIKRLALGDVRPREPQQGVSSSTQVEPPTSTQADNPSTSSLDQGEEGEQVPLSPINLAHPKIHQSIQRDHPTDNILGDINKGVSTLCKFLVEEALNDPDWVMAMQEELNNFTRNEVWTLVERPRQNVISTKWIFRNKQDEAGVVIRNKARLVAQGFTQIEGLDFSETFAPIARLESIRILLAFATNLNFKLYQMDVKSAFLNGPINELVYVEQPPGFEDPKYPNHVYKLHKALYGLKQAPRAWYECLCNFFVKNGFEIGKADSTLFTKRHDNDIFVYQIYVDDIIFGSTNKSFSEEFSRMMTKRFEMSMMGELKFFLGLQIKQLKEGTFICQTKYLKDMLKKFGMENAKQSTLPCHQMATSTSTSKVKTSTKRPNIMLSVCICARFQAAPKECHLVAVKRILRYLVHTPNLGLWYPKGARFDLIGYADADYAGCKVDRKSTSGSCKFLGRSLVSWSSKKQNSVALSTAEAEYVSAGSCCAQLLWMKQTLRDYGLNVSKIPLLCDNESAIKLANNPVQHSRTKHIDIRHHFLRDHSTRGDIDIQHVRTDKQLADIFTKSLDEARFCELRRWFPSLNSFQITGSPVILLVVLECILMIRGQFKNQLYSRRGSMSSQGRSPSSKARHAIRRMSESRKDAIDAQAQASDQAAQVANVECGAPLPLRRSRVSGEGSSAPASKVRRGNPTDSSEPGHGSGSHAPSFEEEIQLEEDIAAQQAAQEEGPFFITAPSRDPNYHRRVVRWNRKWTEVEKECKKDPYKFQQLSTDPRFWNLFQQDYYEIVIAPKKGAILMQWVDWKYMEELHDPIIDEVIEACARQNLKELMGLQYPCVICQVCCHFGVSGSNRVKIHDEKPMDTNSLHFLYQDVDYELGTIKGLLPFYAYLNKLLRKTLNPKEGDASNVLAYTRNLLYKMKAHPQLFDAFDFIFEEIRLISMMPKRGLSYGPYITKMIEIVSKKKFHKEVAHTGYQVRPIKAAVVPAGRTTRASSRAGHSATVTKPDSNSSLRFFKSIFNLCKTISVRQAKERRARKKDTRRLKNLLRNAHLPCSPDGSEVEDSGEDVIEDPFAAEASSSHADRGKAPMEEEEEEKEGNLSPFVMASRILGFCVLLCAIIYYPCSNV

SEQ ID NO: 18671 - protein, 919 aa, Oryza sativa
  Clone ID: TF_OSC401834j.C1.p29.fg
MKCFWVSTGKPMGVLNVDQQKEFDEATTLFVGCILSVLGDRLVKVYMHMTDAKELWDALNTKFGATDASNDLYIMEQFHNYKMADNRSVVEQAHEIQTMVKELELLKCVLPDKFVVGCIIAKLPLSWRGFGTALNHKRQEYSVEGLIASLDVEEKAREKDAASKGDGGQSTANVVHKALNKSKGKYKAQQTTNFKKKNNNNNSNQDDRTCFVCGQPGHLARKYPQRKGMKAPAGQTSKSANVTIGNTGDGSGYGYECGGLFRFSLSDFCNKSVNHICGSVDDEANVWHSRLCHINFGLMSQLSSMCLIPKFSIVKGSKCHSCVQLKQPRKPHKAAEERNLAPLELLHSDLCEMNGVLTKGGKRYFMTLIDDATRFCYVNLLKTKDEALDYFKIYKAEVENQLDRKIKRVRSDRGGEFFSNEFDLFYEEHGIIHERTPPYSPESNGITERKNRTLTDLVNAVLDTVGLPKAWWGEALLTSNHMLNRVPNRNKNKTPYEIWIGRKPSLSYLRTWGCLVKVNVQITKKRKLGPKTVDCVFLGYAHHSIAYRFLIVKSEWKEAVHSEMDSIIANGTWEVTERPYGCKPVGCKWVFKKKLRPDGTIEKYKARLVAKGYTQKEGENFFDTYSPVARLTTSRVLLSLAASHGLLVHQMDVKTAFLNGELDEEIYMDQPDGFVVEGQEGKVCKLLKSLYGLKQTPKKWHEKFDKTLTSAGFAVNEANKCVYYRHGGGEGVILCLYVDDILIFGTNLEVINEVKSFLSQNFDMKDLGVADVILNIKLIRGENGITLLQSHYVEKILNRFGYIDIMEGYSDSNWISDVDEIKATSGYVFTLGGGAVSWRSCKQTILTRSTMEAELTALDTANVEAEWLRDLLMDLPIVEKPVPAILMNSDNQTTCEKTIEVCQEIEKLRSYNIGLHPNS

SEQ ID NO: 18672 - protein, 690 aa, Oryza sativa
  Clone ID: TF_OSC401856j.C1.p1.fg
MAGFADALRLDKFTGVHFKRWQIRVTLWLTAMKCFWVSNGKPEGILTADQQKQFEEATTLFVGCILSVLGDRLVEVYMHMTDAKELWDALNTKFGATDASNDLYIMEQFHDYKMADNRSVVEQAHEIQTMANELELLKCVLPDKFVAGCIIAKLPPSWRSFGTALKHKRPEYSVEGLIASLDVEEKAREKDAASQGDGGQSSANVVHKAQNKSKGKYKAQQTTNFKKQKKNNINPNQDERTCFVCGQPGHLARKYPQRKGMKAPAGQTSKSANVTIGNTGDGSGYGYECGGLFRFSLSDFCNKSVNHICGSVDDEANVWHSRLCHINFGLMSRLSSMCLIPKFSIFKGSKCHSCVQSKQPRMPHKAAEERNLAPLELLHSDLCEMNGVLTKGGKRYFMTLIDDATRFCYVYLLKTKDEALDYFKIYKAEVENQLDRKIKWLKSDRGGEFFSNEFDLFYEEHGIIHERTPPYSPESNGIAERKNRTLTDLVNAMLDTAGLPKAWWGEALLTSNHVLNRVPNRNKDKTPYEIWIGRKPSLSYLRTWGCLAKVNVPITKKRKLGPKTVDCVFLGYAHHSIAYRFLIVKSEVPDMHVGTIMESRDATFFESFFPMKDTHSSSSQPSEVIPSSITPPEQTEHTHEHVTEEDVSEAPRRSKRQRTAKSFGDDFTMYLVDDTPKSISEAYASPDADY

SEQ ID NO: 18673 - protein, 437 aa, Oryza sativa
  Clone ID: TF_OSC413011j.C1.p2.fg
MGRKPRIVEKGYVLQNLEDPTKEDDENEHKNAQAANAILSALSGSEFNRVDGIESAKVIWDTLRNLHEGTDSVRESKVEILKGQFERFVMLDGESPSGMYDRLSKIVNEIKRLGSKDMIDEVVVKKMVRAITPRNSTLVTIIRERPDYKTLTPHDLLGCILAHDMLVQESKDVIQYINQSSTASIKKEDLALKAKEEEEENRKSKSKSKAEIDDEEMALFVKKFGKFMRRSGFFKGHSSKHYSNKSSGKHSTRVCYVCKEPGHFIADCPHLKDGSHIKEDKKKGERKDEKKEKHKHSKQEHYGQAHLGMIFGSDSESSSSDEERVATFAVKPSSPPRLFDYSSDEDAPICLMAKEPKIHSPLKSFNVDLVSDEEDEVMDDELFKSITKESLPHLSELLGRIEDQYATLERQEALLIREKECRIEMSTRGGVNRRFKN

SEQ ID NO: 18674 - protein, 432 aa, Oryza sativa
  Clone ID: TF_OSC413746j.C1.p6.gm
MVVRSSGNTSGYSQTMGISSNFLKFFSTVTTGFPPNLIQGDPLLCAAATCSTPPSSPAELHPRRAAASVVAAGRRHRRKVRRGVEKPGRSLPAVAGHRSPVAAVDRSRAAARPRRRPSSFVVWFEGEYRWVRLVVLYVYMSSKVAADHPISGEVAILVRPLMSLTPLTIIMDVITGNNLLSSWFGVRSVQPGMVAFPSLEKFIDECVVALKKREFRALKQKDRTVTEYLHEFNRLARYALEDVRTDEERQEKFLEGLKDELSVMLISHDYVDFQQLVDKAIRLEDKNNRMDNRKRKMIVFQEAQDSSQRQRIKPLQIGESFSAGQEQSQQLGISGEINSETNASNEDNDEQATQSVSFQQDQSQEDNSNGREHRVCFNCYEPGHFVKECPKPKRQQPQGQVNNIVLTGANAVPVASQGIQLSHQFQSSSSFL

SEQ ID NO: 18675 - protein, 1556 aa, Oryza sativa
  Clone ID: TF_OSC414191j.C1.p11.fg
MASRPRRAARAPARFGFEDGRVEPEENHESANEQSHHSNRSHRTVSRNAEVGQPRRSNRSHRTVSHDAEMGQSHRSHRTASHNSGEERLPSPPHVENNMQHIMAVRKQILQGLTTAIASFQHNAHGNGHPHVGNNRSKLTDFLRSCPPEFSQTVEPVEADDWLKDVDRKLNFVQCTPVEKTLYASHQLRGPAADWWENYCNAHPEPTNIAWDEFATAFRAAHVPESTIDMKKEEFNRLKQGNSSVNEYLSQFNKLARYAPEEVDTDKKKIRKFLKGIAVGMRLQLLAHDFPTFQHMINKALLLEDARKEATEEYKKRKSNHQGNSSRGAPRPRYGQPMQYHQSVTQANHQPGYAPRPQMNRPAPQPQQRAPSGNTAPNSVTSFKSPQGPSAVQCFRCNRMGHYARQCPRNPTNTNSGHANGSTARTPAPAAAQSLPSSQASGQGSRASNHFGRGRVNHIQAETAQDAPDVVMGMFSVNSVPAIVLFDSGASHSFISQAFVKRNGWKTQNLRVPMIVHSPGRNIRATQICPEVNLRIEEVDFLAKPIVLDSQSLDIILGMDWLAKHKGQIDCAEKSITLQGPGGKQVRFTPNTPTASRSILTCLQVTSLESVPIVCEYPDVFPEELTRMPPDREIEFAIELAPGTAPIAKRPYRMAANELAEVKRQIEELESKGYVRPSSSPWGAPVLLVKKKDGSERMVIDYRALNEVTIKNKYPLPRIDDLFDQLKGARVFSKIDLRSGYHQLKIRSEDIPKTAFSTRYGLYEFTVMSFGLTNAPAFFMNLMNKIFMECLDQFVVVFIDDILIYSKNEEEHAEHLRLIMEKLRDHQLFAKFSKCEFWLDRVAFLGHVISPNGVEVDPSKVEAVLAWNPPKNVSEIRSFLGLAGYYRRFIEGFSKLARPMTELLKKEKKFQWSVACEDSFQEMKKRLTTAPVLTLPDIRKDFEIFCDASRQGLGCVLMQERKVVAYASRQLRPHEVNYPTHDLELAAVVHALKIWRHYLIGNRCEVYTDHKSLKYIFTQTELNMRQRRWLELIKDYDLGIHYHPGKANVVADALSRKAYCNVAQIRPDQDHLCRELEKLRLTVVQSGVPASLTVQPTLESQIREAQKDDEGIKELIKRIQEKKDTNFSIDDQGTVWCGPRICVPAKKELRDLILKEAHESAYSIHPGSTKMYQDIKAYFWWARMKRDVAEYVALCDICQRVKAEHQRPAGLLQPLPIPEWKWEEIGMDFITGLPRTPSGYDSIWVIVDRLTKSAHFVPVKTTYDGKKLAELYMTHVVCRFGCPKKIVSDRGTQFTSSTAYHPQTDGQTERVNQILEDMLRACALDFEGTWDRCLPYAEFSYNNSYQASIQMSPNEAMFGRKCRTPLCWDEVGEALVFGPDILKSAEEQVKLIRERLKTAQNRQKNYADNRRRDLEFEKGDHVYLRVSPLRGMRRFGMSGKLAPRYIGPYLITARRGEVAYQLELPEGLADVHNVFHVSQLKKCLRVPEEQVPLGNIELEKNLTYKERPIKVLEEAERQTRRKTIKFYKVQWSNHSEDEATWEREDLLRAEFPDLLP

SEQ ID NO: 18676 - protein, 258 aa, Oryza sativa
  Clone ID: TF_OSC8289j.C1.p1.fg
WWDHFRMNRAERQPITWEEFTEGFKKTHVPVGVVALKKREFRALKQKDRTVAEYLHEFNRLARYAPEDVRTDEERQEKFLEGPKDELSVMLISHDYEDFQELVDKAIRLEDKKNKMDNRKRKMTVSQEAQGSSQRQRIKPLQIGESFSAGQEQSQQLGISGEINSETNASNEDNDEQATQSVSFQQDQSQEDNSNGREHRVCFNCYEPGHFVKECPKPKRQQPQGQVNNIVLTGANAVPVASQGIQLSHQFQSSSSFL

SEQ ID NO: 18677 - protein, 1640 aa, Oryza sativa
  Clone ID: TF_OSC900097j.C1.p17.fg
MKMHLKSINPYIWRIVEKGYVLQNPEDPTKEDDENEHKNAQAANAILSALSGSEFNRVDGIESAKVIWDTLRNLHEGTDSVRESKGQFERFVMLDGESPSDMYDRLSKIVNEIKGLGSKDMTDEVVVKKMRPDYKTLTPHDLLGRILAYDMLVQESKDVIQYINQSSTASIKKEDLALKAKEEEEENRKSKSKAEIDDEEMALFVKKFGKFKRRSGFFKGGSSKHYSNKSSGRHSARVCYVCKEPGHFIADCPHLKDGSHIKEDKKKSEKKDEKKEKHKHSKREHYGQAHLGMIFGFNSESSSSDEEGVATFAVKPSSPPRLFDYSSDEDAPVCLMAKEPKVPSPHKSFNVDLVSDEEDEVEDEVMDDELFKSITKESLPHLSELLGRIEDQYATLKRQETLLIREKERSHKLKSELAKEREKNEALVRLYKQTKESHANLEVANAQLQERVDGLDKAYLTLEEKFETLKNSVSLPSEPSCSKIVPSNEPCVRCKDIDIEACATNSISLSTLQKQNEKLMGLLHNGLLKCHMGSKALKDYLGYQRDNFNHEGLGYIPPPKGKVDKSVMIKRPQGLSNFVKAKSILPNDYASHCSFDASYILRKNTSGRVVAKYVGPRGKNISIKRVLWVPKALVTNMRGPKQEYVSGGRSWVIDSGCTNHMTGEESMFSTLDPNGTSQDNIVFGDDGKGKVMGLGKIAISNDLSIANVLLVKSLNYNLLSVSQLCSMGYNCLFTDVGVTVYRRNDSSVVFEGVLKGKLYLVDFSSSTAKHETCIVAKSNTGWLWHRRLAHVGMRNLHKILKHDHILGLTNVQFEKDRVCSACQAGKQIGAHHPVKNVMTTTRPLELLHMDIFRPIAYLSIGGNKYGLVIVDDFSRFTWVFFLHDKSEIQAIFKKFARRAQNEFDLKIMNIRSDNGKEFKNTCIESFLDEEGIKHEFSAPYSPQQNGVAERKNRTLIKMARTMLDEYKTSDRFWAEAVNTACHAINRLYLHRLLKKIPYELFTGNKPNVSYFHVFGSKCYILNRKARSSKFAPKVDEGFLLGYGSNECAYRVFNKSSGIVEIARDVTFDETNGSQVEQVDSHVLGEEEDPSEAIKRLALGDVRPREPQQGASSSTQVEPPTSTQTDDPSISSLDQGEEGEQVPPSPIKLARPRIHQSIQRDHPTDNILETSTRVEQALNDPDWVMAMQEELNNFTRNEVWTLVERPRQNVIGTKWIFRNKQDEAGVIIRNKVRLVAQGFTQIEGLDFGETFAPVARLESIRILLAFATNLNFKLYQMDVKSAFLNGPINELVYVEEPPGFEDPKYPNHVYKLHEALYGLKQAPRAWYECLRNFLVKNGFEIGKADSTLFTKRHDNDIFVCQIYVDDIIFGSTNKSFSEEFSRMMTKRFEMFMMGELKFFLGLQIKQLKEGTFICQTKYLKDMLKKFGMENAKPIHTPMPSNSHLNLNAQGKDVDQKVYRSIIGSLLYLCASRPDIMLSVCMCARFQAAPKECHLVAVKRILRYLVHTPNLGLWYPKGARFDLIGYADADYAGCKVDRKSTSGTCQFLGRSLVSWSSKKQNSVALSTAEVEYVLAGSCCAQLLWMKQTLRDYGLNVSKIPLLCDNESAIKIANNPVQHSRTKHIDIRHHFLRDHSTRGDIDI

SEQ ID NO: 18678 - protein, 333 aa, Oryza sativa
  Clone ID: TF_OSC900176j.C1.p10.fg
MVNTRTSGSGNNNNEENPTLAQVLAQQTQLINMLVQQMQNQQGNNNVNPPPPQNKLADFLRVKPPTFSSTTNPVEAGDWLHAVEKKLELLQCTDQEKVVFASHQLQGRASEWWDHFRMNRAEGQPITWAEFTEAFKKTHIPTGVVSLKKREFRALKQKDRTVTEYLHEFNRLARYAPEDVRTDEERQEKFLEGLKDELSVMLISHDYEDFQELVDKAIRLEDKKNRMDNRQSQQLGISGEINSETNASNEGNDEQATQSVSFQQDQSQEDNSNGREQRVCFNCYEPGHFVKECPKPKRQQPQGQVNNIVLTGANAVPVVSSSVTTQPLVSKQQ

SEQ ID NO: 18679 - protein, 899 aa, Oryza sativa
  Clone ID: TF_OSC900258j.C1.p16.fg
MAGFADALRLDKFTGVHFKRWQIRVTLWLTAMKCFWVSNGKPEGILTADQQKQFEEATTLFVGCILSVLGDRLVEVYMHMTDAKELWDALNTKFGATDASNDLYIMEQFHDYKMADNRSVVEQAHEIQTMANELELLKCVLPDKFVAGCIIAKLPPSWRSFGTALKHKRPEYSVEGLIASLDVEEKAREKDAASQGDGGQSSANVVHKAQNKSKGKYKAQQTTNFKKQKKNNINPNQDERTCFVCGQPGHLARKYPQRKGMKAPAGQTSKSANVTIGNTGDGSGYGSKCHSCVQSKQPRMPHKAAEERNLAPLELLHSDLCEMNGVLTKGGKRYFMTLIDDATRFCYVYLLKTKDEALDYFKIYKAEVENQLDRKIKWLKSDRGGEFFSNEFDLFYEEHGIIHERTPPYSPESNGIAERKNRTLTDLVNAMLDTAGLPKAWWGEALLTSNHVLNRVPNRNKDKTPYEIWIGRKPSLSYLRTWGCLAKVNVPITKKRKLGPKTVDCVFLGYAHHSIAYRFLIVKSEVPDMHVGTIMESRDATFFESFFPMKDTHSSSSQPSEVIPSSITPPEQTEHTHEHVTEEDVSEAPRRTSHGLLVHQMDVKTAFLNGELDEEIYMHQPDGFVVEGQEDKVCKLLKSLYGLKQAPKQWHEKFDKTLTSAGFAVNEADKCVYYRHGGGEGVILCLYVDDILIFRTNLEVINEVKSFLSQNFDMKDLGVADVILNIKLIRGDDHWRALERVMRYLKGSMELGLHYTGYPAVLEGYSDSNWISDVDEIKETILMRSTMEAKLTALDTTTVEAEWLRDLLMDLPIVEKPVPAILMNCDNQTVIVKVNSSKDNMKSSRHVKRRLKSIRKLRNSGIITLDYIQTARNLADPFTKGLSRNVIDNASKEMGLRPM

SEQ ID NO: 18680 - protein, 562 aa, Oryza sativa
  Clone ID: TF_OSC900363j.C1.p1.fg
MKMHLKSINPSIWRIVEKGYVLQNPEDPTKEDDENEHKNVQAANAILSALSGSEFNRVDGIESAKVIWDTLRNLHEGTDSVRESKVEILKGPSDMYDRLSKIVNEIKGLGSKDMTDEVVVKKMVRAITPRNSNLVTIIRERPDYKTLTPHDLLGRIFAHDMLVQESKDVIQYINQSSTASIKKEDLALKAKEEEEENRKSKSKAEIDDEEMALFVKKFGKFMRRSGFFKGGFSKHYSNKSSGRHSARVCYVCKEPGHFIADCPHLKDGSHIKEDKKKSEKKDEKKEKHKHSKREHYGQSHLGMIFGSDSESSSSDEEGVATFAVKPSSPPRLFDYSSDEDAPVCLMAKEPKVPSPLKSFNVDLVSDEEDEVEDEIMDDELFKSITKESLPHLSELLGRIEDQYAILERQETLLIREKERSHELKSELVKEREKNEALVRLYKQTKESHANLDVANAQLQERVDGLDKAYLTLEEKFETLKNSVSLPSEPSCSKIVPSNEPCVRCKDIDINACATNSIALSGLQKQNEKLTGLLHNGLLKCYMGSKALNVATGKIAFSRTLVY

SEQ ID NO: 18681 - protein, 1270 aa, Oryza sativa
  Clone ID: TF_OSC900412j.C1.p1.fg
MSGQAGDGNDGDKGAKIPYDYPSTSTSYVSTYSGKAPYFNGTDYAAWKHKMKMHLKSINPSIWRIVKKGYVLQNPEDPTKEDDENEHKNAQAANAILSALSGSEFNRVDGIESAKVIWDTLRNLHEGTDSVRESKVEILKGQFERSVMLDGESPSDMYDRLSKIINEIKGLGSKDMTDEVVELYLERPDYKTLTPHDLLGCILALDMLVQESKDVIQYINQSSTASIKKEDLALKAKEEEEENRKSKSKAEIDDEEMAPFVKKFGKFMRRSGFFKGGSSKHYSNKSSGRHSARVCYVCKEPGHFIADCPHLKDGSHIKEDKKKDEKKEKHKHSKREHYGQAHLGMIFGSDSESSSSDEEGVATFAVKPSSPPRLFDYSSDEDAPVCLMAKEPKVPSLLKSFNVDLVSDEEDEVEDEVIDDELFKSITKESLPHLSELLERIEDQYATLERQETLLIREKERSHELKSELAKEREKNEALEYVSGGRSWVIDSGCTNHMTREESMFSTLDPNGTSQDNIVFGDDGKGKVMGLGKIAISNDLSIANILLVKSLNYNLLSVSQLCSMGYNCLFTDVDVTVYRRNDSSVVFKGVLKGKLYLVDFSSSKAKHETCLVAKSNTGWLWHQRLAHVGMRNLHKLLKHDHILGLTNVQFEKDRVCSACQAGKQIGAHHPVKNVMTTTRPLVLLHMDLFGPIAYLSIGGNKYGLVIVDDFSRFTWVFFLHDKSETQAIFKKFARRAQNEFDLKIKNIRSDNSKEFKNTCIESFLDEEGIKHEFSAAYSPQQNGVAERKNRTLNEMARTMLDEYKTSDNFWAEAVNTACHTINCLYLHRLLKKTPYELLTGNKPNVSYFRVFGSKCYILNKKARSSKFAPKVDEGFLLGYGSNECAYRVFNKTSSIVEIARDVTFDKINGSQVSERSNQKIGSWGREEGEQVPPSPINLARPRIHQSIQRDHPTDNILGDINKGVSTRSRIANFCEHYSFVSSLEPLRVEEALNDPDWVIAMQEELNNFTRNEVWTLVERPRQNVIGTKWIFCNKQDEAGVVIRNKARLVAQGFTQIEGLDFGQTFAPVARLESIRILLAFATNLNFKLYQMDVKSAFLNGPINELVYVEQPPGFEDPKYPNHVYKLHKALYGLKQAPRAWYECLRNFLVKRGFKIGKADSTLFTKRHNNDIFVCQIYVDDIIFGSTNKSFSEEFSRMMTKRFEMSMMGELKFFLGLQIKQLKEGTFICQSKYLKNMLKKFGMENAKPIHTPMPSNGHLDLNEQGKDVDQK

SEQ ID NO: 18682 - protein, 837 aa, Oryza sativa
  unsure (1)..(837): unsure at all Xaa locations
  Clone ID: TF_OSC400171j.C1.p2.np
MADFPPIHRAELANMTLVAGYIEASEYTVIEPLSGELLHRVRLEVHGSLGTPLVNMVVETSRGTIEHACQEAVYLVMTRIXEKFVFIFDGIAYRYHPSCSAGGIASSFSSASSENDTTFGRMRTVMRALDKMHQDLHRASETLNDKKLIQIARLQDEVDRLKVESAMLQGRPAPRRAKIRTMSRKRSTAPIRMQLASRPSRCPSRRPVPVPVRASSQLPMLSAAKAATVSDAVKWIVSISSSSSSSGDGNCFSPSLFLFSSSASDGETRTTRSGNNVNEEQLLGNGSGDISENPPLAXTIARQTQIMTTMINQMQQQYHQMMQHMMQQQXQNQQHNGPPQSKLPKFXCVRPLTFSSTSNPMEAYDWLYAIEKKLNLLKCTDQEKVAFATHQLQGLALAWWDNXMITYSAGIEVTWEFCRVFRKAQVPDGIVAXKKREFRSLHQGNMTVTEYLHEFNRLARYAPEDVRTDAERWEKFLAGLYDELTNELISRDYADFQRIVDKAIRQEDXRNKMDRKRKAIQFRSQQDGQXKLRYGPXQHNGPTTMIVRQHRPYQPGNFSQGNSGNQNNGPTTMIVRQHRPYQPGNFSQGNSGNQNNRNPVPRPPMKQSQASQPQQPKELGGKPLTCFNCGDPGHFAGKCPKRKRNGPKIVQARVNHVSTEEAQAALEVVLGTFPANSIPAIVFFSGATYSFISKRFVGVHGLRKVELSSPMKVNTPGNSSTLVSFCPSTMIEIQVSPFLANLILVECKDLDVILGMDWLTKHNGVIDCASRTVTLVNGKGEVVVMQSPLTQKKGVSLNQVESEHQVPLLTKNVQILHYKPYGTKYYHTCTFPYPCPT

SEQ ID NO: 18683 - protein, 659 aa, Oryza sativa
  Clone ID: TF_OSC400368j.C1.p20.gm
MRPDYSIPLASVHRRSGEQVSGTSAFDVLHREKAAIRHCDFTMAGFADALRLDKFTGVHFKRWQIRVTLWLIAMKCFWVSTGKPEGVLTAEQQKQFEEATTLFVRCILSVLGDRLVEVYMHMTDTKELWNALNTKFGATDASNDLYIMEQFHDYKMADNRSVVEQTHEIQTMAKELELLKCVLPDKFVAGCIIAKLPTSWRSFGTALKHKRQEYSVEGLIVSLDVEEKAREKDAASKGDGGQSSANVVHKAQNKSKGKYKAQQTTNFKNQKKNNNNLNQDERTCFVCGQVSHLARKCPQRKGMKASAGQTSKSANVTIGNTRDGSGYGNLPTVARGSTVLMGNGSHASVHGVGTVDLKFTSRKIVQLKNVQHVPSIDRNLVSGSRLTRDGFKLVFESNKVVVSKHGYFIGKGYECGGLFRFSLSDFCNKSVNHICGSVDDEANVWHSHYWKEAVRSEMDSIIANGTWEVTERPYGCKPVGCKWVFKKKLRPDDYSIPLTGVHRRSGEQVSGTSAFDVLHREKAAIRVGGERQEMMGMEGIGEGIGTAADEEDVGAGGGGKSAPAMADGAEVGTGRGGSGGGEEAAAPASGMRRQSTWGRSTSSGGRAESAAPAAAIHAGRISSEDAAARRQNMRGGGGEAKYQLDLDLVFITGHWEWEQ

SEQ ID NO: 18684 - protein, 124 aa, Oryza sativa
  unsure (1)..(124): unsure at all Xaa locations
  Clone ID: TF_OSC400628j.C1.p2.np
CKKVMVCYNCKEPRHYSRDCPXPRKKNRPPHFRQFTRSRHANRQVFTGANAVPVSLKGSRPKDLIARSTHNIRSEEYLVEKVDTKGMNYEKSSTETPSSSTAPQSKSAQGATKDKSGEKKIPSA

SEQ ID NO: 18685 - protein, 989 aa, Oryza sativa
  Clone ID: TF_OSC401122j.C1.p81.fg
MYAAAAPGDGTLGAGYGAANDNTNGGSSASQSSGGTFTGYNFSFGYESKNDKSHIYIENMEIMKSRQSRNRSDRADGGLTEPWTLVWHLIILGKHPRLVTLGGCRLLDGLCRCCPVTSPRRLWWKPGAVWKDMWDALEAKFGVPDAGNELYVMEQYYDYKMVNDRSVVEQAHEIQMLAKELENNNCELPDKFVAGGIIAKLPPSWSDFGTSLKHKRQEFSVSDLIGSLGVEEKARAKDIGGIKVERGSSANMVQKKNPHASHNNKKVKPDVKAKATANFKKKGKEKANGDCFVCGKFGHWAKDCLEHKDRKFANMVISEGGGTSGYDKLLPTVLSVFHSPDWWVDTGANIHVGRGSSLLMGNESLAVVHGVGLSKEWWGEAVLTACHVLNKIPMKHKEVTPFEEWERKKLNLSYLRTWGCLAKVNVPIAKKRKLGPNTVDCVFLGYAAIHSVGYRFLIVNSRVLDMRVSTIIESRDATFFENEFPMKNTPSTSSQETVIPHKHFALIEHNDQTPEGNPEEDNIVDTHKSKKLRVVKSFVDDYIVYLVDDTPRTIEEAYSPPDTDYWKEAVRSEMDSIMSNGTWEVVERPYGCKPVGCKWVFKKKLRPDGTIEKYKASLVAKGYTQKEGEDFFDTYSPVARLTTIRVLLALAASHGLLVHQMDVKTAFLNGELEEEIYMDQPDGLNVIEEVKDFLSKSFEMKDLGEADVILNIKLLRGDEGGITLVQSHYVDKVLSRFGYSDCKPAPTPYDPSVLLRKNRRIARDQLRYSQIIGSLMYLVSATRPDISFAVSKLSRFVSNPGDDHWQALERIMRYLKGTMSYGIHYTGYPKVLERYSDSNWISDADEIKAISGYMFTLGGGAGSWKSCKQTILTRSTMEAELTALDIATVEAEWLRELLMDLPVVEKPVPAILMNCDNQTVIIKVNSSKDNMKSSRHIKRRLKSVRKQKNSGVIALDYVQTAKNLADQFTKGLPRNVIDSASREMGLIPT

SEQ ID NO: 18686 - protein, 423 aa, Oryza sativa
  Clone ID: TF_OSC401126j.C1.p53.fg
MSGEEGAGATAHRHQRYDDKDEEQSVADDEEEDESVGNRRRRRIRDKDDPLSKVKFTMPSFDETYYQEMMIALSRCNLQETEDARISRFYGGLNREIRDILEYKEYNTMNRLFHFACKAEREVQGRNKHRSSFAGATSTRQSTPRQSTTAVRPPTSTPSHAQETSKNASVQTPAKSATSVDSTRRTRDITCHRCHGIGHIARDCPNRRALFVNADGEYTSASDYDDEYALAATDHAGGQDNDDIEEVQLHPESLDQYPSLIVKLALSAKEKCEEQNQRHNLFQSKVLVKGHTVKMIIDSGSCNNLASEEMVKKLGLTTHPHPHPYHIQWFNTCGKMKEYEDVFHDEIPPRMANGRESAHNQEDGIESRTTPILEEEDDEDITSLDTLITSHTPMIIPSPSPVRPPETALTSNGPSAFMPTRFG

SEQ ID NO: 18687 - protein, 1689 aa, Oryza sativa
  Clone ID: TF_OSC401435j.C1.p51.gm
MTKIGDSSPPKIGEGSSSGAAERVMANSSVVELPLLTRTNYHEWSLVMQVSLEALEQWDAVEAVSKDRGKDRRALATIIRAVPREMKAGLAVKKSAKEAWDVVKKMHAGDDRVKATSVQRLMKQFENMAFRDGENVGDFAMRINGLVASLRELGEEMEDSRVVKKVLRVVPKRLKQVAVAIEMLADIDTMEIEELVGRLQVAEDADAEDQAASSAEHAGQLLLTEEQWEARRRQRRGKEHAHGGVGEKGGGHDDDDDDGSSTSSGRGKKRYRGKCFDCGVRGHMARDCPKKKKERALLVDVDDEPTLLGRLLGINALSWPCLRFATARQWRMASGQVLAVERMQEHAMREGWRPVHVEEYVAHERVKPGRPGCHAYVRVKLAKWVRGRCVAVGAIGSAAFVAETPLFIFNLQPFLHGMEAPANVGVAMPPPKQVMAEPLPLTTPQRKSWPRAMREKSRPLSKLSPGHSQHVGSWASERPQTTTQRMAAWLPLGAMRPHKMLVPAAMAARSSTAAAALHSCSAAADALLHSASLLPRHLRRDRHRPAKEHALRENMTKIFCLCRHCKNQKLLVDPGEILGHIMEYGFTANYKVWTYHGEFANPEDDDEELSFEMSEAENFIIEDMSRERMVVDVSTDSDDFDGGFDLEDMLRHVEPEGKRGKIPSMVMWYLPIKDRLKRLYSNPTDAELMRWHQESRKIDGMIRHPADARQWKTFDAKHPEFAKDPRNVRFALSTDGMNPFVENDTAPVARGGTYVYEITKKIKVVYGKGKKKTVKRKKADGDNGTASPFKKHSIFFKYLDYWKDLEIRHAIDVMHLEKNVFDSTVGTLLDIPSPLQTFAVETVCQLEMYFPPSFLDMMEHLIVHIVPQIIELGPLYLHQMWAYERYMSILKGYVRNRAHPEGSMIEGYTTEEAVECCMDYIKDANAIGIPVHRHEGRLSGRGTVGRKQFFDNDYKKVSAAHNSVLQQLAIVEPFIERHLEEIKACFPGRSNDWISREHKRRFPLWLKDLNLPVGDSVEELTLQRLACGPSSIVNSWQGYDINGFTLSTTTKDMKSTTQNSGIRVEAIDTSGEKRSYYGTIQEIWELDYGLNIQIPVLRCEWVKDTIGVSVDDYGLTIVNHSKTSHKDDPWVLAERVAQVFYVKDPSDERKTIVISGKQQIVGIDNIEDPNDYNQFDDVPLFTDLPMRIKKVERTIDEANMSYVRADGVAKAAKISQVAVAVVPATAGSSPKSPRHRRLLPEVAPPLAVADATARTVALAVAVAAARWPSPPHGPLPPRRCHRRRQVVAAARSSPPSLGGSGKKRRGERSKNKLPKETYNVIALDQDGKPIEPPIVRSKFSNACGTLVRTRCPINVKLWETVDDNIKTLLWNELQKYFVFPPGSEADWDTFVADRTTAEALALRKKMSELAKKNRYPHRLGSSGYAGHVDQWREIEQRFAAAGKPLLVDPMVERSKNWVAKVHSDHVSLELDIPAPEGIELLGDAVNQFILWHRRDIILSAAVLAAGSLTPSSSQAMTAAAPAPPSPPEPPSPRHLPSPPPLRNSEKRKELAHVLSDSQKSVLAAQDEVQSWLSADVPKTYEYGKPFLPTYLMNKLPWEMRVMHECMQFHEADRTGAKVGYVDPTRICKTQHTVELRQDCEQLVGKTPEEKEEYVKTLHKRKKLEVATYLAIAMLAHADKDVLMVPYQFT

SEQ ID NO: 18688 - protein, 767 aa, Oryza sativa
  Clone ID: TF_OSC419986j.C1.p9.fg
MSGTSSDEPTLENLAHKLKGMENWYEELMRNSKSYKESTDKHLKTLSESLVKVVDQIEQMNRSHKQLTENIQNINIGHENIVRRIGLLEAVGEEGVGATAHRHQRYDDEDEEQSVADDEEEDESVGNRRRCRIRDKDDPLSKVKFTMPSFDGKFEPSVYLDWELAVEQKFSCYDFPDNKKVKAASSEFTSFASLWWNDICGRGLRPRTWDDMKRTMRSRFVPSYYARDMLNKLQLLRQGSNSVETYYQEMMIALSRCNLQETEDARISRFYGGLNREIRDILEYKEYNTMNRLFHFACKAEREVQGRNKHRSSLAGATSTRQSTPRQSTTVVRPPTSTPSHAQETSKNASVQTPAKSATSVDSTGRTRDITCHRCHGIGHIARDCPNRRALFVNADGEYTSASDCDDEYALAATDHAGGQDDEDIEEVHLHPESLDQYPSLIVKLALSAKEKCEEQNQRHNLFQSKVLVKGHTVKMIIDSGSCNNLASEEMVKKLGLTTHPHPHPYHIQWFHTCGKMKVTRLVKIPFSIGSYHDQIECDVVHMQACSVILGRPWQYDREVVFDGRTNTYKFMFDGKRVVLHSMTPAAALKDDLARLECEKKAKSENQIIAKHPASTSKIEPSTTKNEIKLKGALLASKYNICALDEPDSCCYALFCKDPILTLATAPSTLYSLPPAITNLLQEYEDVFHDEIPPRMANGRESAHNQEDGIESRTTPIQEGEDDEDITSSDMLITSHAPMIIPSPSPARPPETALTSNGPSAFMPTPI

SEQ ID NO: 18689 - protein, 256 aa, Oryza sativa
  Clone ID: TF_OSC102121j.C1.p11.np
DGFQGHGMRSKDQKRKAPMRTEDEVRKMIITSTEWPPPGMTKCQRRNSSRGAQQLTEHLLANGGRVSGSEDSDQVSSDDEDEKSPQGFNQNKIELKACSRCGEIGHVASSCASTCVHCEEDHPPDRCPTSRITCFFCEGTDHVPKDCRFSFLLTKKMANQPVSSNGEKHQGNTNPRQDYSKQCTNAPPAAPDSAINHSNHSLHRQPQQRIVVDGRSCVSPRPTPGRAKSNQPPEGDTKQKTVIRFNQQSEGSFSCE

SEQ ID NO: 18690 - protein, 257 aa, Oryza sativa
  unsure (1)..(257): unsure at all Xaa locations
  Clone ID: TF_OSC26158j.C1.p1.np
DRLYKITLGKNCPQQKRKAPMRTEDEVRKMIITSTEWPPPGMTKHQRRNSFRGAQQLTEHLLANGGRVSDSEDSDQVSSDDEGAKPPHFNQNKIELKACSRCGEIGHVASSCASICVHCEEDHPPDRCPTSRITCFFCEGTDHVPKDCRFSFLLTKKMANQPASSNGEKHQGNTNPRQDSSKQCTSAPPAAPDSAINHSNHSLHRQPXQRIVVDGRSCVSPLPTPGRAKGNQPPEGDTKQKTVIRFNQQSEGSFSCE

SEQ ID NO: 18691 - protein, 1541 aa, Oryza sativa
  Clone ID: TF_OSC400455j.C1.p1.fg
MDIVRSNDRKRFGIVRYQYFEKENRVGFEMAGVFASMAIEWAIDKLYSLLPACLVSTPASSSSSAAPAESEDLEVLKRLERTMHRIHATLHDAEEQWNIREETAKLRLKELKKVAYDAEDVVDEYGYEMTRHKVEAFEQSARANRSGKRRREEMQPSFAVLFCCKFGFVFVLETFRKIRSNDAFMLVFICNVMIYLWNRLNHYMSIISTIQKPYYRHCDFTMAGFADALRPDKFTGVHFKRWQIRVTLWLTAMKCFWVSTGKPVGVLTAEQQKQFEEATTLFVGCILSVLGDRLVEVYMHMTDAKELWDALNTKFGATDASNDLYIMEQFHDYKMADNRSVVEQAHEIQTMAKELELLKCVLPDKFVAGCIIAKLPPSWRSFGTAFKYKRQEYSVEGLIASLDVEEKAREKDAASKGDGGQSSANVVHKAQNKSKGKYKAQQTTNFKKQKKNNNNPNQDERTCFVCGQVRHLARKCPQRKGMKAPAGQTSKSANVTIGNTGDGSGYGNLPTVFSVNQSTNLWVDTGANVHVCADISLFSSYQVARGSTVLMGNGSHASVHGVGTVDLKFTSGKIVQLKNVQHVPSIDRNLVSGSRLTRDGFKLVFESNKVVVSKHGYFIGKGYECGGLFRFSLSDFCNKSVNHICGSVDDEANVWHSRLCHINFGLMSRLSSMCLIPKFSIVKGSKCHSCVQLKQPRKPHKAAEERNLAPLELLHSDLCEMNGVLTKGGKRYFMTLIDDATRFCYVYLLKTKDEALDYFKIYKAEVENQLDRKIKRLRSDRGGEFFSNEFDLFCEEHGIIHERTPPYSPESNGIAERKNRTLTDLVNAMLDTAGLPKAWWGEALLTSNHVLNRVPNRNKDKTPYEIWIGRKPSLSYLRTWGCLAKVNVPITKKRKLGPKTVDCVFLGYAHHSIAYRFLIVKSEVPDMHVGTIMESRDATFFESFFPMKDTHSGSNQPSEIIPSSITPPEQTEHTHELVSEEDVSEAPRRSKRQRTVKSFGDDFTVYLVDDTPKSISEAYASPDADYWKEAVRSEMDSIIANGTWEVTERPYGCKPVGCKWVFKKKLRPDGTIEKYKARLVAKGYTQKEGEDFFDTYSPVARLTTIRVLLSLAASHGLLVHQMDVKTAFLNGELDEEIYMDQPDGFVVEGQEGKVCKLLKSLYGLKQAPKQWHEKFDKTLTSAGFAVNEADKCMYYRHGGGEGVILCLYVDDILIFGTNLEVINEVKSFLSQNFDMKDLGVADVILNIKLIRGENGITLLQSHYVEKILNRFGYIDSKPSPTSYDPSLLLRKNKRIARNQLEYSQIIGSLMYLASATRPDISFAVSKLSRFTSNPGDDHWRALERVMRYLKGTVELGLHYTGYPAVLEGYSDSNWISDVDEIKATSGYVFTLGGGAVSWRSCKQTILTRSTMEAELTALDTATVEAEWLRDLLMDLPVVEKPVPAILMNCDNQTTCEKTIEVCQEIKKLQSYNVGLHPNSEKPGRSLHEGTITKCDKQCIEGDGFETHSILERTNLCELDCWSQSMKILGESSRKLTKDLGV

SEQ ID NO: 18692 - protein, 1522 aa, Oryza sativa
  Clone ID: TF_OSC401054j.C1.p38.fg
MSWHRAGVLLLGAQSCLPVPGVPAVGGIGSVLLSMARMGWKLCHVFRLYTVVPRPRLWASRAMYPNSGNGPPPLPENPTLAQVMAHQTQMMAAMIQQMQQQHQQMHQRMMQHVEQQHQQFGPPPPQSKLPEFLRVRPPTFSSTTNPMEANDWLHAIEKKLNLLQCNDQEKVAFATHQLQGPASAWWDNHMATRPPGTEVTWAEFCRSLRKAQVPDGVVAQKKREFRALHQGNRTVTQYLHEFNRLARYAPEDVRTDAEKQEKFMAGLDDELTNQLISGDYADFERLVDKAIRQEDQRNKMDRKRKAAQFRAPQGSHQRPRFAPGQQGGPTTMIVRQHRPFNPSNFPQGASGSQNHHGGQSNRGAASRPPMAPAQSGQPAQAKKETGAKPGSCFNCGKLGHFADKCPKPRRAGPRFIQARVNHASAEEAQAAPEVVLGTFPVNSIPATVLFDSGATHSFISKKFVGMHGLIREELSTPMRVHTPGNSSTSVQFSPSITIEIQRSPFLANLILLESKDLDVILGMDWLTKFKGVIDCANRTVTLTNEKGETVVYKSLVSPKKGVSLNQIEAEIPVDTVEKNSRKLEDIPIVCEYPEVFPEDLTTMPPKREIEFRIDLAPGTAPIYKRPYRMAANELAEVKKQVDKQLQKGYIRPSTSPWGAPVIFVEKKDKTKRMCVDYRALNELRIREEDIPKTAFTTRYGLYECTVMSFGLTNAPAFFMNLMNKVFMEFLDKFVVVFIDDILIYSKSEEEHEQHLRLVLEKLREHQLYAKFSKCDFWLTEVKFLGHVITAQGVAVDPSNVESVTKWTPPKTVSQIRSFLGLAGYYRRFIENFSRIARPMTQLLKKDEKFKWTAECDKSFEELKKKLVSAPVLILPDPMKDFQVYCDASRHGLGCVLMQEDRVVAYASRQLRPHEGNYPTHDLELAAVVHALKIWRHYLIGNRCEVYTDHKSLKYIFTQPDLNLRQRRWLELIKDYDMSIHYHPGKANVVADALSRKSYCTALCIEGMCEELRQEFEHLNVGIVELGFVAALEARPTLVDQVRAAQANDSEIAELKKNMRVGKARDFHEDEHGTIWLGERLCVPDDKELKDLILTEAHQTQYSIHPGSTKMYQDLKEKFWWVSMRREIAEFVALCDVCQRVKAEHQRPAGLLQPLQIPEWKWEEIGMDFITGLPRTSSGHDLIWVVVDRLTKVAHFIPVHTTYTGKRLAELYLSRIMCLHGVPKKIVSDRGSQFTSKFWQKLQEELGTRLNFSTAYHPQTDGQTERVNQILEDMLRACALDFGGAWDKSLPYAEFSYNNSYQASLQMAPFEALYGRKCRTPLFWDQTGERQLFGTEVLAEAEEKVRIIRERLRIAQSRQKSYADNRRRELTFEAGDYVYLRVTPLRGVHRFQTKGKLAPRFVGPYKILERRGEVAYQLELPSNMIGIHDVFHVSQLKKCLRVPEEQADSKHIDIQEDLTYVEKPVRILDTSERRTRNKVTRFCRVQWSHHSEEEATWEREDELKAAHPHLFTSSSESRGRDSV

SEQ ID NO: 18693 - protein, 1083 aa, Oryza sativa
  Clone ID: TF_OSC900367j.C1.p21.fg
MAGFADALRPDKFTGVHFKRWQIRVTLWLTAMKCFWVSTGKPEGVLTAEQQKQFEEATTLFVGCILSVLGDRLVEFHDYKMADNRSVVEQAHEIQTMAKELELLKCVLPDKFVAGCIIAKLPPSWRSFGTALKHKRQEYSVEGLIASLDVEEKAREKDAASKGDGGQSSANVVHKAQNKSKGKYKAQQTTNFKKQKKNNNNPNQDERTCFVCGQVGHLDRKCPQRKGMKAPAGQTSKSANVTIGNTGDGSGYGNLPTVFSVNQSTNWWVDTGANVARGSTVLMGNGSHASVHGVSTVDLKFTSGKIVQLKNVQHVPSIDRNLVSGSRLTRDGFKLVFESNKVVVSKHGYFIGKGSKCHSCVQSKQPRKPHKAVEERNLAPLELLHSDLCEMNGVLTKGGKRYFMTFIDDATRFCYVYLLKTKDEALDYFKIYKAEVENQLDRKIKRLRSDRGGEFFSNEFDLFCEEHGIIHERTPPYSPESNGIAERKNRTLTDLVNAMLDTAGLPKAWWGEALLTSNHVLNRVPNRNKDKTPYEIWIGRKPSLSYLRTWGCLAKVNVPITKKRKLGPKTVDCVFLGYAYHSIAYRFLIVKSEVPDMNVGTIMESRDAIFFESFFPMKDTHSGSNQPSEIIPSSITPPEQTEHTHELVSEEDVSEAPRRSKRQRTAKSFGDDFTVYLVDDTPKSISEAYASPDADYWKEAVRSEMDSIIANGTWEVTERPYGCKPVGCKWVFKKKLRPDGTIEKYKARLVAKGYTQKEGEDFFDTYSPVARLTIIRVLLSLAASHGLLVHQMDVKTAFLNGELDEEIYMDQPDGFVVEGQEGKVCKLLKSLYGLKQAPKQWHEKFDKTLTSAGFAVNEADKCVYYRHGGGEGVILCLYVDDILIFGTNLEVINEVKSFLSQNFDMKDLGVADVILNIKLIRGENGITLLQSHYVEKILNRFGYIDSKPSPTPYDPSLLLRKNKRIARNQLEYSQIIGSLMYLASATRPDISFAVSKLSRFTSNPGDDHWRALERVMRYLKGTVELGLHYTGYPAVLEGYSDSNWISDVDEIKATSAYVFTLGGGAVSWRSCKQTILTRSTMEA

SEQ ID NO: 18694 - protein, 449 aa, Oryza sativa
  Clone ID: TF_OSC101880j.C1.p3.fg
MGVPAFYRWLADRYPQTVSDAVEEEPVELEPGAFVPVDLRRPNPNGLEFDNLYLDMNGIIHPCFHPEGRPAPTTYDEVFKSIFAYIDHLFGLVRPRKLIYMAIDGVAPRAKMNQQRSRRFRAAKDAADAAAEEERLRKEFEAEGRTLVAKEKSEAIDSNVITPGTPFMFVLSSALQYYIQLRLNHTPGWQSVKVMLSDSNVPGEGEHKIMSYIRLQRNLPGFDPNTRHCLYGLDADLIMLSLATHEVHFSILREVITMPGQHEKCFLCGQVGHLAAECRGSGQADKTVELPPIHKKKYQFLNIWVLREYLEKDLEIVDPPFKINFERVVDDFVFMCFFVGNDFLPHMPTLEIREGAINLLMNIYRREFTSMGGYLTDGGEVLLDRVEHFIQSVAVHEEQIFQKRARIQKAIQNNEERNRVQTENSEDNQYVDKSMIYCPTVTVKYYKND

SEQ ID NO: 18695 - protein, 240 aa, Oryza sativa
  Clone ID: TF_OSC16994j.C1.p1.fg
MEQKKRSSQRPRIALGPQAAPYPQGGSSSVARPQRQFYNNNTSNHSNDNRNMVTRHVAAPTQNHPVRKEQGSKPGVCFNCGDPGHYADKCPMPRRVKNAPVQNNSNAPAPKARVNHVAAAEAQNAPDVVLESNDLDVILGMDWLTHHIGVIDCANRNVTLTSSNGQTVSFFVSSPKSHGLTLNQVALQEIPIVRDYPDVFPEDLPGMPPKRDIEFWIDLVPGTNPIHKRPYRMAANELAE

SEQ ID NO: 18696 - protein, 1839 aa, Oryza sativa
  unsure (1)..(1839): unsure at all Xaa locations
  Clone ID: TF_OSC400433j.C1.p6.np
MADHPPNHRGEGMDDFVAELACMTLVVGYPNAPEYSTVLLLSGELPHRVRLEVHGYVGTCLANMVVEASGGNRDHACQEAAYLMMARLRDRHNYIFYNTAYRFHPRRASGDDASTFRPTVGENHTTFGHMCTVMRGMDKMHSNLHKASKALNDGKLVRIIALKDEIARLKKENAQLKGLPAAGGVRIRTTPRKSTIAPVCIQLAPRNPAPTAPPTVPAAPPAAPPAPVPAPVPVLAPVSALSFAPASAARGPPAPVPAPVPVLAPVSALSFAPASAARGPASGNGGWLPATPSGSRDRSSSGSEPGSGETYLPDSRSCSEGPGLFLPMVNTRNGSRAAGEGSNDEERADGGYPNSASGNGPPPLPENSTLAQVMAHQTQMMAAMMQQQHXQMHQRMRXQAEQQQXQFGPPPPQSKLPKFPRVRPPTFSSTTNPMEANDWLHAIEKKLNLLQCNDQEKVAFATQQLQGPASAWWDNHMATHPPGTEVTWAEFCRSFRKVQVPDGVVAQKKREFRALHXGNRTVTEYLHEFNHLAXYAPEDVRTDAEKHEKFLAGLDDELTNQLIYGDYADFEKLVDKAIRQEDQRNKMDRKRKAAQFRSNQGSHQRPRFTSGQQGGPTTMIVXQHRPYNPSNFHPGSSGNHLGGQHNRGAAPHPPMAPVQQTAPAPKYTGGKPGACFNCGESGHFADKCPKLRRAGPKFVQAQVNHASAEETQAAPEVVLGTFPVNSIPATVLLYSGATHSFISKKFVGHGLIREELSTPMRVHTLGNSSTSVQFSPSVTIEIQRSPFLANLILLESKDLDDILGMDWLTKFKGVIDCANRTVTLTNEKGETVVXKSPVALKQGISLNQIEVENSVVTAEKSSRKLEDIPIVCEYSEVFPEDLTTMPPKREIEFRIDLAPGTAPIYKRPYKMAANELAEVKKQVDEQLXKRYIQPSTSPWGAPVIFVEKKDKTKRMCIDYRALNEVIKNKYPLPRIDDLFDQLKGARVFSKIDLRSGYHQLRIQEEDIPKTAFTTRYGLYERTVMSFGLTNAPAFFMNLMNKVFMEFLDKFVVVFIDDILIYSKSEEEHEQHLRLVLEKLKEHQLYAKFSKCDFWLSEVKFLGHVITAQGVVVDPSNVESVAKWTPPKTVSQIRSFLGLAGYYHRFIENFSRIARPMTQLLKKDEKFKWTAECDKSFEELKKKLVSAPVLILPDQTKDFQVYCDTFRHGLGCVLMQEGRVVAYASRQLRPHEGNYPTHDLKLAAVVHALKIWRHYLIGNCCEVYTDHKSLKYIFTQPDLNLRQRRWLELIKDYDMSIHYHPGKANVVADALSRKSYCNALCTEGMCKELQQVLEHLNLGIVEHRFMATLEARPTLVDQVRAAQVNDPEIAELKKNMRVGKARGFLEDEHGTIWMRERLCMPDDKELKDLILTEAHQTQYSIHPGSTKMYQDLKEKFWWASMRREIAEFVALCDVCQRVKAEHQRPAGLLQPLQIPKWKWEEIGMDFITGLPRTSSSHDSIWVVVDXLTKVAHFIPVHTTYTGKKLAELYLARIMCLHGVPKKIVSDRGSQFTXKFWQKLQEELGTRLNFSTAYHPQTDGQTERVNXILEDMLRACALDFGGAWDKSLPYAEFSYNNSYQASLQMAPFEALYGRKCRTPLFWDXTGERQLFGIEVLIEAEEKVRTVRERLRVAQSRQKSYANNRRRELTFEAGDYVYLRVTPLXGVHRFQTKGKLAPRFVGPYKILEXRGEVAYXLELPSNMIGIHDVFHVSQLKKCLRLPEEQADSEHIDIQEDLTYVEKPVRILETSERRTRNKVTRFYRVQWSHHSEEEATWEREDELKATHPHLFTSSSESRGRDSV

SEQ ID NO: 18697 - protein, 1604 aa, Oryza sativa
  Clone ID: TF_OSC400575j.C1.p14.gm
MAKEDEDKTAFITPFGVFCYVKMPFGLITTGNTFQRTVQGALSDQLGNNVEAYVDDIVVKTKTSDSLIDDLRETFDNLRRYRLMLNPEKCTFGVPSGKTPRALLYPSPPSPSPLVVGEALAPCALAQPSPPSLQPCAAAVPAVAVAREGHRWDRQVAAVLVRCFAAVGDRRSTIAVVEPKSSAASSSSPPPSVGFPPSFWSPMPRYKPEYLFGVEGFVQELRTMSFVIGFGTAPFYAQIPHDRHEEKCRVKVTLNSNSEDIPSVMFEAGGRNYIHASQEVARIAIGELRDRYSDQLADTEYRYHPRQPQGSDRGSYLETEGIENDATTRHLVEMLWAMDESRAETVLAAQDREDRNRGKICKLEDKVDRLEKELAALKGEAPPQKARIRLTARKRALFVPRYQLAPKVRVVEKEVAPTLADPPVNIISDDEEEESKRNHSKIEWVATQDDEDEPKEPSIDLRCSEELDKMVNTRSNGNGPNNPNNNNNEGNPTLAQVLAQQVQLMNMMMQQLQNQQNQGNNHAPPQNRLTDFLRVRPPTFSSTTNPVEAGDWLHAIEKKLDLLQCTDQEKVSFASHQLHGPASEWWDHFRLNRTTAEPITWLEFTAAFRKTHIPSGVVSLKKKEFRSLTQGSRSVTEYLHEFNRLARYAPEDVRNDEERQEKFLEGLNDELSYSLMIGDYPDFQKLVDKAIRQENKYNCMEQKKRRIAQFKTQQGNNQKPRLTLGPQSIPHGSSSSVVRPQRQFFNNNAGNNIRNQVPRPVAAPTQQQPIKREQGSKPAVCFNCGDPGHYADKCPKPRRVKVVPAQNNSTVPVSKARVNHVAAAEAQDAPDVILDKFVVVFIDDILIYSRTEEEHEEHLRLALEKLREHRLYAKFSKCEFWLSEVKFLGHVISAGGVAVDPSNVESVTNWKQPKTVSEIRSFLGLAGYYRSRAPPPFQPSPSLGKATVGIAKSPPSSSVASPPSETAGAPSPSSNRRAPPLLLRRRRRPLGFRRRFGRRLRSGGDKPTGVAGESITSGFEGEIMIQERCTVVDCVVRERNRSKSREDHGNREHEVAYKTQGSTEANRMHGSTKQEAEEAFIAFKRYLSNPHVLVAPQPNEELFLYIAATPYSVSTIIVVEREKVQLPVYYVSEALHDVMTRYPQIQKLLYAVIMTSRKLCQYFQAHRVTVVSSFPLGEVMRNKDVVSRIAKWVVELSQFDIHFVPRTAIKSQVLADFVADWTMPDNRSDNQIDNETWTMAFDGALNSKGAGAGFILTSPSGDQFKHAIHLNFRATNNTAEYEGLLAGIRVAAALVVRKLEKRFDGIEVRHVYRKDNIEPDDLARRASRREPLEPGTFLDVLTRPSVKEASGEDSPVAPDISSGAIEAERTVADIETTDDWRTPLIKFIGSEELPEDDAEVEKISRKAKVYCMIGNDLYKKAPNGVLLKCILSDDGRHLLLDIHEEICGSHAAGRTLVGKAFQQGFFWPNALKDACDMVQQCEACQFHSKHTKLPAQALQTIPFTWPLSCWGLDILRPFPRGQGGYRFLFVAIDKFTKWIEATPTGEIKADNAIKFIKGIFCKFGLPHRIITDNGSQFISADFQDYCIRLGVKICFASVSHPQSN

SEQ ID NO: 18698 - protein, 1813 aa, Oryza sativa
  unsure (1)..(1813): unsure at all Xaa locations
  Clone ID: TF_OSC401921j.C1.p15.np
MADHPPNHRGEGMDDFVAELARMTLVVGYPNAPEYSTVPPLSGELPHRVRLEVHGFVGTCLANMVVEASGGTVDHTCQEAAYLMMARLRDRHSXIFCNTAYRFHPRRASGDDVSTFRPTASENDTTFSHMCAVMRGMDTMHSDLHKASKASNDGKLVRIIALKDEIARQKKENAQLKGLPAPGGVRIRTTPRKSTTAPVRIQLAPRNPPPPAAPPAPPTVPAAPAVPAPAVPVSAPASALSFALASAARGPAIGNGGWLPATHSGSHDRSSSGSEPGNGETYLPDSRSRSEGPGLFLQMVNTRNGSHAAGEGSNGEERTDGGYPNSASGNSPPPLPKNPTLAQVMAHQTXMMAAMMQLMQHQPXQMHQRMQQQAEQQQQQFGPPPPQSKLPEFLRVRPPTFSSTTNPMEANDWFHAIEKKLNLLQCNDQEKVAFATHQLQGPTSAWWDNHMATRPPGTEVTCAEFCRSFQKAQVLDGVVAQKKREFQALHQGNRIVTEYLHEFNCLARYAPEDVHIDTLKQEKFLAGLDDELTNQLISGDYTDFEKLVDKAIRQEDQRNKMDRKRRFRQFRSNQGSHQRPRFTPGQQGGPTTMIVRQHRPYNPSNFHPGSSGSHGQGQHNRSAAPRPPMAPVQQTAPVPPKKDTGGKPGACFNCGESGHFADKCPKPRRAGPKFVQARVNHASAEEAQVAPEVVLGTFPVNSIPATVLFDSGATHSFISKKFVGVHGLIREELSTPMRVQTPGNSSTSIQFSPCVTIEIQRSPFLANLILLESKDLDVILGMDWLTKFKGVIDCVNRTVTLTNEKGETVVYKSPVVLKQGISLNQIEVENPMVTEEKSSRKLEDIPIVGEYPEVFPEDLTTMPPKREIEFQIDLAPGTAPIYKRPYRMAANELAEVKKQVDEQLQKGYIRPSTSPWGAPVIFVEKKDKTKRMCVDYRTLNEVTIKNKYPLPRIDDLFDQLKGAKVFSKTDLRSGYHQLRIQEEDIPKMAFTTRYGLYECTVMYFGLTNAPAFFMNLMNKVFMEFLDKFVVVFIDDILIYSKSEEEHEQHLRLVLEKLQEHQLYAKFSKCDFWLSEVKFLGHVITAQGVAVYPSNVESVTKWTPPKTVSQIRSFLGLAGYYRRFIENFSRIARPMTQLLKKDEKFRWTAECDKSFEELKKKLVPAPVLILPDQTKDFQVYCDTSRHGLGCVLKQESRVVAYASRQLRPHEGNYPTHAAVVHALKIWRHYLIGNRCEVYTDHKSLKYIFTQPDLNLRQRRWLELIKDYDMSIHYHPGKANVVANALSRKSYCNALCTEGMCKELQQELEHLNLGIVEHGFVAALKARPTLVDQVRAAQVNDPEIAELKKNMRVGKARDLLEDEHGTIWLGERLCIPDDKELKDLILTKAHQTQYSIHPGSTKMYQDLKEKFWXASMRREIAEFVALCDVCQRVKAEHQRPIGLLQPLQIPEWKWEEIGMDFITGLPTTSSGHDSIWVVVDRLTKVAHFIPVHTTYTGKRLAELYLSRIMCLHGVPKKIVSDRGSQFTSKFWQKLQEELGTRSNFSTAYHPQTDGQTERVNQILEDKLRACALDFGGAWDKSLPYAEFSYNNSYQASLQMAPFEALYGRKCRIPLFWDQIGERQLFGTEVLTEAEEKVRTVRERLRIAQSRQKSYADNRRRELTFEAGDYMYLRVTPLRGVHRFQTKGKLAPRFVGPYKILERRGEVAYQLELPSNMIGIHDVFHVSQLKKCLSLPEEQANSEHIDIQEDLTYVEKPVRILDTSERRTRNKVTRFCRVQWSHHSEEEATWEREDELKAAHPHLFTSSSESRGQDSV

SEQ ID NO: 18699 - protein, 1209 aa, Oryza sativa
  Clone ID: TF_OSC5141j.C1.p2.fg
MDAHPPKNLIEVLGFVRELRMMAFEVGYEVAPEYRQIPHDPNEEKCRVRVTLTSDREDLPSIKFEAEGKKYSHVCQETALVAIGELRHRFDEELESSAFQYHPHKPHGQDYRTYNCPEGEGSATVMHAVYMLSAMDAVGVEREKAAHDRENWNRGRICKLESKVYRLQKELAELKGEAPPPAPKLRLTARKRTSLPPRLQLASKTRVMVNTRTGSESGSGNGHNEGDPTLAQVLAQQTQLINLLVQQAQNQQANNNNQPPPPQNKLADFLRVRPPTFSSTTNPVEAGDWLHAVGKKLDLFQYTEQEKLVDKAIRQEDKYNRMEQKKRSSQRPRIALGPQAAPYPQGGSSSVARPQRQFYNNNTSNHSNDNRNMVTRHVAAPTQNHPVRKEQGSKPGVCFNCGDPGHYADKCPMPRRVKNAPVQNNSNAPAPKARVNHVAAAEAQNAPDVVLGTFPINSIPATVFFDSGATHSFLSKSFAGNHGMEVISLGRPLLVNTLGNQVSSTQYCPSVTIEIEEIPFPSSLIFLESNDLDVILGMDWLTHHIGVIDCANRNVTLTSSNGQTVSFFVSSPKSHGLTLNQVALQEIPIVRDYPDVFPEDLPGMPPKRDIEFWIDLVPGTNPIHKRPYRMAANELAEVKRQVDDLLQEGYIRPSTSPWGAPVIFVEKKDHTQRMCVDYRALNEVTIKNKYPLPRIDDLFDQLEGATVFSKIDLRSGYHQLRIREECTVMSFGLTNAPAFFMNLMNQVFMEYLDKFVVVFIDDILIYSKNKEEHEEHLRLALEKLHEHQLYAKFSKCEFWLPEVKFLGHVISTGGVAVDPSNVESVLNWKQPKTVSEIRSFLGLAGYYRRFIENFSKIARPMTRLLQKDVKYKWTEECEQSFQELKKRLAAAPVLVLPDPRKGFQIWRHYLFGNRTEMYTDHKSLKYIFTQPDLNMRQRRWLELIKDYHPEAQPTLFDQVREAQMNDPDIQEIKKNMRRASQGGASEASRSAATVEDSRVEMGGNRNGFYHRSTQNIDVGGSWDKNLSYAEFSYNNSYQASLQMAPYKALYGRKCRTPLLWDQTGERQVFGTDVLREAEEKVKIIQERLRVAQSRQKSYADNRRRDLTFEEGDYVYLRVTPLRGVHRFQTKEKLAPRFVGPFKILKKCLSVPTEEADPERLEIQEDLTYVEKPVRILEFPTFRRRAFTLRKVQKCLKKLKASHTDPKQRF

SEQ ID NO: 18700 - protein, 1643 aa, Oryza sativa
  unsure (1)..(1643): unsure at all Xaa locations
  Clone ID: TF_OSC900370j.C1.p6.np
VTSWYQSHLDLRTSQMVNPHPPKNLIEVLGFVRELRMMAFEVGYEVAPEYRQIPHDPNEEKCRVRVTLTSDREDLPSIKFEAEGKKYSHVCQETALVAIGELRHRFDEELESSAFQYHPHKPHGQDYRTYNCPEGEGSATVMHAVYMLSAMDAVGVEREKAAHDRENWNRGRICKLESKVYRLQKELAELKGEAPPPAPKLRLTARKRTSLPPRLQLASKTRVVGDAVPDHAEPVIHVLSDEEEEEDPKEREPATPEEEDPSLRSDARRTTNPVEAGDWLHAVGKKLDLFQYTEQEKVSFASHQLHGPAAERCDHFLLNRAEGQPITWREFTAAFKKTHIPSSVVALKKREFRALNXGSRSVREYLHDFNRLARYAPEDVRTDEERQEMFLEGLNDELSFALMAMDYRDFQXLVDKAIRQEDKYNRMEQKKRSSQRPRIALGPQAAPYPQGGSSSVARPQRQFYNNNTSNHSNDNRNMVTRHVAAPTQNHPVRKEQGSKPGVCFNCGDPGHYADKCPMPRRVKNAPVQNNSNAPAPKARVNHVAAAEAQNAPDVVLGTFPINSIPATVFFDSGATHSFLSKSFAGNHGMEVISLGRPLLVNTLGNQVSSTQYCPSVTIEIEEIPFPSSLIFLESNDLDVILGMDWLTHHIGVIDCANRNVTLTSSNGQTVSFFVSSPKSHGLTLNQVALQEIPIVRDYPDVFPEDLPGMPPKRDIEFWIDLVPGTNPIHKRPYRMAANELAEVKRQVDDLLQEGYIRPSTSPWGAPVIFVEKKDHTQRMCVDYRALNEVTIKNKYPLPRIDDLFDQLEGATVFSKIDLRSGYHQLRIREEIPKTAFTTRFGLLECTVMSFGLTNAPAFFMNLMNQVFMEYLDKFVVVFIDDILIYSKNKEEHEEHLRLALEKLHEHQLYAKFSKCEFWLPEVKFLGHVISTGGVAVDPSNVESVLNWKQPKTVSEIRSFLGLAGYYRRFIENFSKIARPMTRLLQKDVKYKWTEECEQSFQELKKRLAAAPVLVLPDPRKGFQVYCDASRHGLGCVLMQDGKVIAYASRQLRPHENNYPTHDLELASVVHALKIWRHYLFGNRTEMYTDHKSLKYIFTQPDLNMRQRRWLELIKDYHPGKANVVADALSKKSYCKMLEGRHLPWELCEEFEKLNLGIVNKGFVAALEAQPTLFDQVREAQMNDPDIQEIKKNMRRGKAIGYIEDEQGTVWLGERNCVPDNKELKDTIMKEAHETLYSIHPGSTKMYQDLKQQFXWASMRREIAEYVALCDVCQRVKAEHQKPAGLLQPLKIPEWKWEEIGMDFITGLPRTSVGHDSIWVVVDRRTKVAHFIPVKTTYMGNKLAELYMARVVCLHGVPKKIVLDRGSQFTSKFWQNLQEGMGTRLNFSAAYHPQTDGQTKRVNXILEDMLRACVLDVGGSWDKNLSYAEFSYNNSYQASLQMAPYKALYGRKCRTPLLWDQTGERQVFGTDVLREAEEKVKIIQERLRVAQSRQKSYADNRRRDLTFEEGDYVYLRVTPLRGVHRFQTKEKLAPRFVGPFKIVSRRGEVAYQVELPLSMEGIHDRFHVSQLKKCLSVPTEEADPERLEIQEDLTYVEKPVRILEFPTFRRRAFTLRKVQNRPCRAAQVRAGRAVSSFGVAASTS

SEQ ID NO: 18701 - protein, 173 aa, Oryza sativa
  Clone ID: TF_OSC9910j.C1.p4.fg
MTEYLHEFNRLARYALEDELVVKAIRLEYKKNRMDNRKRGRIVSQEAQGSSQRQRTKPLQIGESSSACQEQLQQLDISGEINSETNTRNEVNMEKATQLVLVQQDQSQEGNSNGREQQLCFNCYEPGHFARECSKPKHQHPQGQVNNIILTGANAVPVASSSDTAQRSVSKQQ

SEQ ID NO: 18702 - protein, 938 aa, Oryza sativa
  Clone ID: TF_OSC10744j.C1.p25.fg
MEALVGGYTPHLAEGRQAAQTLLDWDSTLELDDFRVASTVSIDIVITRTMAEGHEQKVIEIAITIHDNDYTDQLISLMTKLKINEKPEFYSHAYQWGERWECDMTVKINPPRGERDMYYFRTRHREAFLRLNHIYQDKLQHSRYSYHPMRKPGEDYCTLQDVDYHEQPVKATMSIWMEAADDMYEEALEHMDVQRKRLEEAERREAVLKHKYRILHELYEEREKHNSILNICVARAAFCLHQIPNMGSDDDDDDDGMEGHISPVREDEPHPQDNGEGVLQGLPPSPPPLYPIYSDDEAEEMHSAIDISEPSQEPEVLRPNRDIAKNQGNKGYSAHAEFLRIKPPVFSKSKEPMDAEDWLRAIEKKLTLVRTNEQEKVTFATHQLEGPANEWWEAYQASIEDPTHIITWMEFTIAFRNAFIPTAVIRMKKNEFRGLRQDIQDEKERIERFIEGLRDELRGPMISQDHESFQSLVNKVVRLENDRRMVEGFRKRRMNLQRQSPTRSSLQVRRPYPFKPSLSNARPGMPPILSRPGLRMEDSPCYVCGKFGHFARLCPNRQNMGGQTSYQKPSTTGFIKKNPPIIKSGPNLGRGQVHHIKAEQAQQDPNILMGIGLICTGKINNPRRVVELHLGFADWAFFYFGRACVVHERRKARVSRIRKIIGDSCAQHRHLRRDMRSDQYDHYEEVHNHEKEERDMKEPPVPLFTLKVEAPPSSEEGIKAEQPLVEPTAEIPLSQVDLFAVPCDKEELCDNASLISMPQLVNEHAIPTVNSYCADFKHVVHIANEVEKRELRSSLNTLGYVQFDDFCELDNLKEKLFAKSDLPYPTNIIFHIFGEYNDLGIYFVHRVYICSDLELPVHVDKTYKLERNVIANQIVSTLPCFDWKKQAQGAASPIMGLWACNFIWDPGPGGAHVGCAPTRNRVDLHRQDQQPTERCIDR

SEQ ID NO: 18703 - protein, 480 aa, Oryza sativa
  Clone ID: TF_OSC15148j.C1.p1.fg
MGKPSNVPKSVFQFLKFAQQLKCGVVGLGWLGTSWDPGSGCQFGLNHRRPWVKAGLKCLCNNMFNREKGKNVSGYASSNSSFQLNPPLASRELTRAHPWSIPSMLLSSQLPLVGSQDQNQYVFDRAFATQVNELPMPEEDVPFCHDCREQGHYALNCPWVYVKEAPSLGLAGQTSLNQPPHTKSSLQPSVQSRELNGENPLNPGKCFPPSLSYHVGSHTKQAKGKKSKNQKRKAPMRTEAEVRKMTITSTEWPPAGITIPRRQRGNTFRGAQQLTQHLLSHDGRVSDSEGSDQVSSDYEDESPRHLGEEEMESKACTRCGEIGHVASMCLTLCTHCEEDHPPGECLTRKVTCFLCEGANHVPKDCQLSVLLTKTVEIQRTTLRLSHQLVSSNSNIDDIIPSTNAPPAAPDFAINHSDNTFNTNHSLHRQPQQRIVVDERSCVSPRPTPGQAKGNQPPEGDTEQKTVIRLNQQSEGNFSGE

SEQ ID NO: 18704 - protein, 956 aa, Oryza sativa
  Clone ID: TF_OSC15235j.C1.p1.fg
MVGQLGGPSTLIVCQHHPYHPSNFNNDYNGGSHNNSKQHNHNSTPPPLMAPAQSDLPAMLAQLEQLKKESGGKPGPCFNCGELGHFADKCPKPRRAGPRFVQAHVNHASTEEAQAAQEVVRGTFPVKSIPATVLFDSGATHSFISKKFVGMHGLIREELSTPMRVHTPGNSSTSVQFSPSITIEIQRSPFLANLILLESKDLDVILGMDWLTKFKGVIDCANRTVTLTNEKGETVVYKSLVSPKQGVSLNQIEVEIPVVIEEKNSRKLEDIPIVCEYPEVFPEDLTTMSPKREIEFQIDLAPGTAPIYKRPYRMAANELAEGAPVIFVEKKDKTKRMCVDYRALNEVTIKNKYPLPRIDDLFDQLKGAKVFSKIDLRSGYYQLRIREEDIPKTAFTTRQLLKKDEKFKWTAECDKSFEELKKKLVSTPVLILHDQMKDFQVYCDASRHGLGCVLMQEGRVVAYASRQLRPHEGNYPTHDLELAAVVHALKIWRHYLISNRCEVYTDHKSLKYIFTQPDLNLRQRRWLELIKDYDMSIHYHPGKANVVADALSKKSYCNALCIEGMCEELQQELEHLNVGVIEHEFVAALEARPTLVDQVRAAQVNDPEIAELKKNMRVGKARDFHEDEHGTIWLGERLKRLAELYLSRIMCLLGVPKKIVSDRGSQFTSKFWQKLQEELGTRLNFSTAYHPQTDGQTERVNQILEDMLRAYALDFGGAWDKSLPYAEFSYNNSYQASLQMAPFEALYGRKCRTPLFWDQTGERQLFGTEVLTEAEEKVRTVRERLRIAQSRQKSYADNHRRELTFEAGDYVYLRVTPLRGVHRFQTKGKLTPRFVGPYKILERRGEVAYQLELPSNMLGIHSVFHVSQLKKCLRVPEEQASPDQIEIQEDLTYVEKPTRILETSERRTRNKVIRFCKVQWSHHSEEEATWEREDELKAAHPHLFASSSKSRGRDSV

SEQ ID NO: 18705 - protein, 235 aa, Oryza sativa
  Clone ID: TF_OSC26960j.C1.p1.fg
MRTEEEVRKMTITSTEWPPAGITIPRRQRGNTFRGARQLTQHLLSHGGRVSDSEGSDQVSSDVEDESPRHLGEEEMESKACTRCGEIGHIASRCLTLCPHCEEDHPPGECPTRKVTCFLCEGTNHVPKDCQLSVLLTKTAEIQRTTLRLSHQLVSSNSNLDDIIHSTNAPPAAPDSAVNHSNNTFNTNHSLHRRPQQRIVVDGRSCVSPRPTPGRAKGNQSQECDTKQKTVICFK

SEQ ID NO: 18706 - protein, 415 aa, Oryza sativa
  unsure (1)..(415): unsure at all Xaa locations
  Clone ID: TF_OSC32656j.C1.p2.np
HTITWDEFSSVFKRSHVPAGMITLRKREFRYLKQEDLTVTEYLHEFHRLAHYAPEDVENDEDKQEKYLQGLKDEITVQLLLEEYEDFEKLVDKAIQLESEHNRMKNCKRRIVSIPVFPCGNQRQRTEPLQITGSSVAHQEFPPQEDGHNADNNISNTNDDDTTNNHASCPISDHSNQACNVNIIHQGVDDSINDGTQNDNPSNCDSEKDSNGDSNYGTTDANVSKDFQPPIPTPSQNDRPQTDSSAKKTLICYNCKGPGHYSRDCLQPRQSRSPHYRQFTRSRHPNRIVVTGANAVPVSLKGSKPKDLIVPRSVRNPHKEYHLLEVDAKDMNDKKSRTEAPSSTTAAXSGSVRSSTRDKSGEEKIPSATGDRAKRSRVEKSCXASWLXKTERKKSDKKRSPTYLHASLLESRGPD

SEQ ID NO: 18707 - protein, 922 aa, Oryza sativa
  unsure (1)..(922): unsure at all Xaa locations
  Clone ID: TF_OSC404962j.C1.p3.np
LHAAAPRRCAMSDARSRRSVASSTRRQQDAELAAAEERRXATAHTAAAAARAARLAAAELAAARAEAEAAEDAARAAEVEVETLRSSINGSIAGDITADRELEELARGRARERAERWAAAHLHGGDGGPRDRAPADGNPDGRGLAGGRGLAGGSPEPARGPRRQHGSLSPDRRHGHHGVQMVVRDFGPGGGWPTLTKTNYIEWAAVMRVRLQVRHMWDAVRYGDVDYDEDRRALDALIAAVPPEMQFSLSQKRTAKEAXDAIAAARIGSDRARKSTLQALRKEWENLAFKPGEDVDDLQKMVQYGDDTYDEERAVEKLFRCVPEKYRQIARSIESLLDLSTMSIEEALGRLKVVDGDEPQPLSGPITIGGKLHLTQEQWEASQGDGRKGESSSPTGGHKPRKARGGVQLWWARRRAEGGARRGAQGVATGNHKPARDDACRNCDKLGHWAKDCRQPRRGQAHVARVEEEALLLAHASIELPPAAPAAAAFLHLDEPKVLVSLCNGSSNDKADGWYLDTGATHHMTGRREFFTEFDSSVRGSIKFGDASGVEIKGVGFVTFTAKSGEHRLLTRVYYIPALRNSIISVGQLDENGSRVLVEDGLMRIWDRRRRLLAKVTRGTNRLYILSAQVAQPVCLAARRDDEAWQWHERFGHLHFEALKQLSAKEMVXGMLCLDHVEQLCDVCVVTKQRRLPFPQQTSFRANERLELVHGDLCGPVTPATPGGVHGDLCGPVTPATPGGRRYFLLLVDDLSRYMWVMVLGSKGEATDAIRHEQAAAEAECGRKLCVLRTDNGGEFTAAEFASYCADEGIQRHYTTPYSPQXNGVVERRNQTVMGMARALLKQRGMPVIFWGEAVVTAAYILNRSPTKALDGRTPYEAWHGRKPAVSHLRVFGCLAFAKELGHIGNGQYRYRHSFCFAYAMK

SEQ ID NO: 18708 - protein, 440 aa, Oryza sativa
  Clone ID: TF_OSC417494j.C1.p3.fg
MDEVGCRWTFSRANEGYTSCGPMFNREKGKNVSGYASSNLSFQLNPPLASRELTRAHPWSIPSMLLSSQLSLVGSQDQNQYVFDRAFGTQVNELPMPEEQVPFCHDCREQGHYALNCPWVYVKEAPSLGLAGQTSLNQPPHTKSSLQPSVQSRELNGENPLNPRKCFPPSLSHHVGSRTKQAKGKKSKNQKRKAPMRTEEEVRKMTITSTEWPPAGITIPRRQRGNTFRGARQLTQHLLSHGGRVSDSEGSDQVSSDVEDESPRHLGEEGMESKACTRCGEIGHVASRCLTLCPHCEEDHPPGECPTRKVTCFLCEGTNHVPKDCQLSVLLTKTAEIQRTTLRLSHQLVSSNSNIDDIIPSTNAPPAAPDSAINHSNNTFSTNHSLHRQPQQRIVVDGRSCVSPRPTPGRAKGNQPQEGDTKQKTVIRLKQQSEGSFSCE

SEQ ID NO: 18709 - protein, 470 aa, Oryza sativa
  Clone ID: TF_OSC900108j.C1.p26.fg
MSWHRVGALLLGAQSCLPVPEVPAVGGIGSVLLSMARMGWKLCHVFRLYTVVMFNREKGKNVSGHASSNSSFQLNPPLASRELTRAHPWSIPSMLLSSQLPLVGSQDQNQYVFDRAFATQVNELPMPEEHVPFCHDCREQGHYALNCPWVYVKEAPSFGLAGQTSLNQPPRTKSSLQPSVQSEEPNEDNPLNPRKCFPPSLSHHVGSRTKQAKGKKSKNQKRKAPMRTEEEVRKMTITSTEWPPAGITIPRRQRGNTFRGARQLTQHLLSHGGRVSDSEGSDQVSSDVEDESPRHLGEEEMESKACTRCGEIGHVASRCLTLCPHCEEDHPPGECPTRKVTCFLCEGTNHVPKDCQLSVLLTKTAEIQRTTLRLSHQLVSSNSNLDDIIHSTNAPPAAPDSAINHSNNTFSTNHSLHRQPQQRIVIDRRSCVSPRPTPGRAKGNQPQEGDTKQKTVIRFNQQSEGSFPCE

SEQ ID NO: 18710 - protein, 1530 aa, Oryza sativa
  Clone ID: TF_OSC10731j.C1.p5.fg
MPRYKPKYLFGVEGFVQELRTMSFAIGFGTAPLYAQIPHDRHEEKCRVKVTLNSNSEDIPSVMFEAGEGNYIHACQEVARIAIGELRDRYSDQLADTEYRYHPRQPQGSNHGSYLETEGIENDATTRHLVEMLWAMDETRAEVVLAAQDREDWNRGKICRLEDKVDRLEKELAALKGEEPPQKARIRLTARKRALFVPRYQLAPKVRVVEKEVTPALADPPVVNMVHTRSNGNGPNNNNNNNNNGENPTLAQVLAQQAQLMNMMMQQLQNQQNQGNNHAPPQNKLAEFLRVRPPTFSRTTNPVEASDWLHAIEKKLDLLQCTDQEKVSFASHQLHGPASEWWDHFRLNRTSAEPITWLEFTAAFRKTHIPSGVRQFFNNNAGNNIRNQAPRPVAAPTQQQPAKREQGSKPGVCFNCGDPGHYSDKCPKPRRVKVVPAQSNSTTPASKARVNHVAAAEAQGAPDVILGTFLVNSVPATVLFDSGATHSFLSMSFAGNHGMEVEDLRRPLMVSTPSNQALSLQRSPSVRIEIQEVPFLANLILLESKDLDVILGMDWLARYKGVIDCANRKVTLTSNDGRVVTVHALSSESLRSRLNQMTLEEIPIVREYPDVFPDNLPGMPPKRDIEFRIDLVPGTTPIHKRPYIMAANELAVVKRQVDDLLQKGYIRPSSSPWGAPVIFVEKKDHTQRMCVDYRALNDVTIKNKYPLPRIDDLFDQLKGATVFSKIDLRSGYHQLRIKEEDIPKTAFTTRYGLFECTVMSFGLTNYPAFFMNLMNKVFMEYLDKFVVVFIDDILIYSRTKEEHEEHLHLALEKLREHQLYAKFSKCEFWLSEVKFLGHVISAGGVAVDPSNVESVINWKQPKTVSEVHSFLGLAGYYRRFIENFSKIAKPMTRLLQKDVKYKWSEECEQSFQELKNRLISAPILILPYPKKGFQVYCDASKLGLGCVLMQDGKVVAYASRQLRPHEKNYPTHDLELAAVVHALKIWRHYLFGTRTKVYTDHKSLKYIFTQPDLNMRQRRWLELIKDYDVGIHYHPGKANVVADALSRKGYCNATEGRQLPLELCKEFERLNLGIVSRGFVVALEAKPTLIDQVREAQINDPDIHEIKKNMRRGKAIGFLEDEQGTVWLGKRICVPDNKDLKDAILKEAHDTLYSIHPGSTKMYQDLKERFWWASMKREIAEYIAVCDVCQRVKAEHQKPAGLLQPLKIPEWKWEEIGMDLITGLPRTSLGHDSIWVIDDRLTKVAHFIPVKTTYSGSRLAELYMARIVCLHRVPKKIVSDRGSQFTSKFWKKLQEEMGSKLNFSTAYHPQTDGQTERVNQILEDMLRACALDFGGSWDKNLPYAEFSYNNSYQASLQMAPYEALYGRKCRTLLLWDQTGERQVFGTDILREAEEKVKIIQERLCVAQSRHKSYADNRRRDLSFDEGDYVYFRGTPLRGVHRFHTKGKLAPRFVGPYKIVSRRGEVAYQLELPQSLAGVHNVFHVSQLKKCLRIPTFPESPFLQEKNLKSSKASKASHTDPKQPFEHVDPV

SEQ ID NO: 18711 - protein, 588 aa, Oryza sativa
  Clone ID: TF_OSC401125j.C1.p1.fg
MPRYKPEYLFGVEGFVQELRTMSFAIGFGTAPLYAQIPHDRHEEKCRVKVTLNSNSEDIPSVMFEAGGGNYIHACQEVARIAIGELRDRYSDQLADTEYRYHPRQPQGSDRGGYLETEEIENDATTRHLVEMLWAMDETRAEVVLAAQDREDRNRGKICRLEDKVDRLEKELAALKGEAPPQKARIRLTARKRALFVPRYQLAPKVRVVEKEVTPALADPPVVNHTNPGEAGDWLHAIEKKLDLLQCIDQEKVSFASHQLHGPASEWWDHFRLNRTTAEPITWLEFTAAFRKTHIPSGVVSLKKKEFRSLTQGSRTVTEYLHEFNRLARYAPEDVRTDEERQERFLEGLNDELSYPLMTGDYHDFQKLVDKAIRQEDKYNRMEQKKRRIAHFKAQQGNSQRPRLTLGPQSMPQGGSSSVVRPQHQFFNNNAGNNIRNQAPRPVAAPTQQQPAKREQGSKPGVCFNCGDPGHYSDKCPKPRRVKVVPAQNNSTAPASKARVNHVAAAEAQGAPDVILGTFLVNSVPATVLFDSGATHSFLSMSFAGNHGMEVEDLRRPLMVSTPSNNCTLLSICYCVPRLIPGRGFTHM

SEQ ID NO: 18712 - protein, 690 aa, Oryza sativa
  Clone ID: TF_OSC401249j.C1.p59.np
KVRCGGLCCARGTVTAPFRALGLEWYIPGLEIDLYSRMPRYKPEYLFGVEGFVQELRTMSFAIGFGTAPLYAQIPHDRHEEKCRVKVTLNSNSEDIPSVMFEAGGGNYIHACQEVARIAIGELRDRYSDQLADTEYRYHPRQPQGSDRGGYLETEEIENDATTRHLVEMLWAMDETRAEVVLAAQDREDRNRGKICRLEDKVDRLEKELAALKGEAPPQKARIRLTARKRALFVPRYQLAPKVRVVEKEVTPALADPPVVNMVLTRSNGNGPNINNNNNNNNGENPTLAQVLAQQAQLMNMMMQQLQNQQNQGNNHAPPQNKLAEFLRVRPPTFSSTTNPVEAGDWLHAIEKKLDLLQCIDQEKVSFASHQLHGPASEWWDHFRLNRTTAEPITWLEFTAAFRKTHIPSGVVSLKKKEFRSLTQGSRTVTEYLHEFNRLARYAPEDVRTDEERQERFLEGLNDELSYPLMTGDYHDFQKLVDKAIRQEDKYNRMEQKKRRIAHFKAQQGNSQRPRLTLGPQSMPQGGSSSVVRPQHQFFNNNAGNNIRNQAPRPVAAPTQQQPAKREQGSKPGVCFNCGDPGHYSDKCPKPRRVKVVPAQNNSTAPASKARVNHVAAAEAQGAPDVILGTFLVNSVPATVLFDSGATHSFLSMSFAGNHGMEVEDLRRPLMVSTPSNNCTLLRSDPPDRW

SEQ ID NO: 18713 - protein, 1633 aa, Oryza sativa
  Clone ID: TF_OSC401778j.C1.p1.fg
MHARAAAGGDVTANVIVVVPRGPVPTFLESLSLQEKILKSSKASKASHTDPKQPLSMLIPFKAIVSIQLLHLFSNMPRYKPEYLFGVEGFVQELRTMSFAIGFGTAPLYAQIPHDRHEEKCRDKVTLNSNSEDIPSVMFEAGGGNYIHACQEVARIAIGELRDRYSDQLADTEYRYHPRQPQGSDCGSYLETEGIENDATTRHLVEMLWAMDETRAEVVLAAQDREDRNRGKICRLEDKVDRLEKELAVLKGEAPPQKARVRLTARKRALFIPRYQLVPKVRVVEKEVTPALADPPVVNMVLTHSNGNGPNINNNNNNNGENPTLAQVLAQQAQLMNMMMQQLQNQQNQGNNHAPPQNKLAEFLRVRPPTFSSTTNPVEARDWLHAIEKKLDLLQCTDQEKVSFASHQLHGPASEWWDHFRLNRTTAEPITWLEFTAAFRKTHIPSGVVSLKKKEFRSLTQGSRTVTEYLHEFNRLARYAPEDVRTDEESQERFLEGLNDELSYQLMTGDYHDFQKLVDKAIRHEDKYNRMEQKKRRIAQFKAQQGNSQRPRLTLGPQSMPQGGSSSIVRLQRQFFNNNAGNNIRNQAPRPVAAPTQQQPAKREQGSKPGVCFNCGDPGHYSDKCPKPRRVKVVSAQSNSTAPASKAHVNHVAAAEDQGAPDVILGTFLVNSVPATVLFDSGATHSFLSMSFAGNHGMEVEDLRRPLMVSTPSNQALSLQRSPSVRIEIQEVPFLANLILLESKDLDVILGMDWLARYKSVIVCANRKVKSEPIASEEIPIVQEYPDVFPDDLPGMPPKRDIEFRIDLKDHTQRMCVDYRALNDVTIKNKYPLPRIGDLFDQLKGATVFSKIDLRSGYHQLRIKEEDIPKTTFTTRYGLFECTVMSFGLTNAPAFFMNLMNKFSKCEFWLSEVKFLGHVISAGGVAIDPSNVESVTNWKQPKTVSEIRSFLGLAGYYRRFIENFSKIAKPMTRLLQKDVKYKWSEECEQSFQELKNRLISAPILILPDPKKGFQVYCDASKLGLGCVLMQDGKVVAYASRQLRPHEKNYPTHDLELAAVVHALKIWRHYLFGTRTEVYTDHKSLKYIFTQPDLNMRQQRWLELIKDYDMGIHYHPGKANVVADALSRKGYCNATEGRQLPLELCKEFERLNLGIISRGFVAALEAKPTLIDQVREAQINDPDIQEIKKNMRRGKAIGFVEDGQGTVWLGERICVPDNKDLKDAILKEAHDTLYSIHPGSTKMYQDLKERFWWASMKREIAEYVAVCDVCQRVKAEHQKPAGLLQPLKIPEWKWEEIGMDFITGLPRTSSGHDSIWVIVDRLTKVAHFILVKTTYSGSRLAELYMARIVCLHGVPKKIVSDRGSQFTSKFWKKLQEEMGSKLNFSTAYHPQTDGQAERVNQILEDMLRACALDFGGSWDKNLPYAEFSYNSSYQASLQMAPYEALYNRKCRTPLLWDQTGERQVFRMDILREAEEKVKIIQERLRVAQSRHKSYADNRRRDLSFDEGDYVYLRVTPLRGVHRFHTRGKLAPRFVGPYKIVSRRGEVAYQLELPQSLAGVHNVFHVSQLKKCLRVPTEEANLEQIEVQEDLTYVEKPIRILEIDERRTRNRVIRFCKVHGVITRKKNQLGNEKMN

SEQ ID NO: 18714 - protein, 440 aa, Oryza sativa
  Clone ID: TF_OSC401829j.C1.p8.fg
MDEVGGRWTFSRANEGYTSCGPMFNREKGKNVSGYASSNPSFQLNPPLASRELTRAYPWSIPSMLLSSQLPLVGSQDQNQYVFDRAFATQVNELPMLEEDVPFCHDCREQGHYALNCPWVYAKEAPSFGLAGQTSLNQPPRTKSSLQPSVQRREPNGENPLNPGNCFPPSPSYHVGSRAKQAKGKKSKNQKRKAPMRTEEEVRKMTITSTEWPPAGITIPRRQRGNTFRGARQLTQHLLSHGGRVSDSEGSDQVSSDYEDESLRHLGEEEMESKACPRCGEIGHVASLCFTLCPYCEEDHPPGKCPTRKVTCFLCEGTNHVPKDCQLSVLLTKTAEIQRTTLRLSHQLVSSNINIDDIIPSTNAPPAAPDSAVNHSNNTFNTNHSLHRRPQQRIVVDGRSCVSPRPTPGRAKGNQSQECDTKQKTVIRLNQQSEGNFSCE

SEQ ID NO: 18715 - protein, 1370 aa, Oryza sativa
  Clone ID: TF_OSC900386j.C1.p22.fg
MFEAGGGNYIHACQEVARIAIGELRDRYSDQLADTEYRYHPRQPQGSDRGSYLETERIENDATTRHLVEMLWAMDETRAETVLAAQDREDRNRGKICKLEDKVDRLEKELAALKGEAPPQKARIRLTARKRALFVPRYQMAPKVRVAEKEVTLALADPPVVNMVLTRSNGNSPNINNNNNNNGENPTLAQVLAQQAQLMNMMMQQLQNQQNQGNNHAPPQNKLAEFLRVRPPTFSSTTSPVEPGDWLHAIEKKLDLLQCTDQEKVSFASHQLHGPASEWWDHFRLNRTTVEPITWLEFTAAFRKMHIPSGVLSLKKKEFRSLTQGSRSVTEYLHEFNRLARYAPEDVRTDKQRQERFLEGLNDELSYPLMTGDYHDFQKLVDKAIRQEDNQRPHLTLGPQSLPQGGSSSVVRPQRQFFNNNAGNNIRNQAPRPVAAPTQQQPAKREQGSKPGVCFNCGDPGHYSDKCPKPRRVKVVPAQSNSTAPALKARVNHVAAAEAQGAPDVILESKDLDVILGMDWLARYKGVIDCANRKVTLTSNDGQVVIVHALSSESLRSSLNQMTLEEIPIVREYPDVFPDDLPGMPPKRDIEFRIDLVLGTIPIHKRPYRMAANELAEVKRQVDDLLQKGYIRPSSSPWGAPVIFVEKKDHTQRMCVDYRALNDVTIKNKYPLPRIDDLFDQLKGATVFSKIDLRSGYHQLRIKEEDIPKTAFTTRYGLFECTVISFGLTNAPAFFMNLMNKVFMEYLDKCVVVFIDDILIYSRTKEEHEEHLRLALKKLREHQLYAKFSKCEFWLSEVKFLGHVISAGGVAVDPSNVESVTNWKQPKTVSEIRSFLGLAGYYRRFIENFSKIAKPMTRLLQKDVKYKWSEEYEQSFQELKNRLILAPILILPDPKKSFQVYCDASKIGLGCVLMQDGKVVAYASRQLRPHEKNYPTHDLELTAVVHALKIWRHYLFGTRTEVYTDHKSLKYIFTQPDLNMRQRRWLELIKDYDMGIHYHPGKANVVADALSRKGYCNATEGRLPLELCKEFERLNLGIVSRGFVAALEAKPTLIDQVREAQINDPDIQEIKKNMRRGKAIGFLEDEQGTVWLGERICVPDNKDLKDAILREAHDTLYSIHPGSTKMYQDLKERFWWASMKREIAEYVAVCDVCQRVKAEHQKPAGLLQPLKIPEWKWEEIDGQTERVNKILEDMLRACALDFGGSWDKNLPYAEFSYNNSYQASLQMAPYEALYGRKCRTPLLWDQTGERQVFGMDILREAEEKVKIIQERLRVAQSRHKSYADNRRRDLSFEEGDHVYLRVTPLRGVHRFHTKGKLAPRFVGPYKIVSRRGEVAYQLELPQSLAGVHNVFHVSQLKKCLRVPTEEANLE

SEQ ID NO: 18716 - protein, 1045 aa, Oryza sativa
  Clone ID: TF_OSC30542j.C1.p1.fg
MSYTPPGRRGGGGGGGSGNGRGSASGSGVGNCADGASLPLVPQGRDAGHTARLPILSRTNYPDWALLMRVNLQAQGLWTAIDPGYAEYREDRAALSAILQAVPREMLRGLAKHNSAKATWDAIKTMRVSVDRVREAKEQGFRRQFEAMRFKDGETPEEFAMRLTAVVADIRDMGGVMEDEHINKKLLRVVPKKYKPVAISLEQLLDVKTMALEELVGRLSTVDSYSDDEEASDGSKLYLTEEQWQARVKQREQEGSSSSNKGRAGSSNQNRRGKAGDSPKGKKMATGGHGRRDISKVKCFNCDEYGHYSKQCRKPRRQRRGEANANLVQAEEEPTLLMAHVMGVSLAGEAAIGRTPCVQEVHLTEKKVVLDREDGREEEKTSEWFLDTGATNHMTGARSAFAELDTGVVGTVKFGDGSVIDIQGHGTVVFQCKNGDHRSLEAVYYIPKLRKNIVSVGRLDARGYDAHIWHGVFTLRYPEGMLLAKALRRLAQGGMVRGLQQIDHNDQLCDGAQTALELVHGDLCGPITPATPGGKKYFLLLVDDMSRHMWIRLLSAKHEASAAIKQFQAGVEKESNRKLMALRIDRGGEFTSVEFMEYCADTGVKRQLTAPYSPQQNGVVERRNQTVVAAARSMLKAANMPAYFWGEVVVAAVYVLNRSPTKSLDGVTPYEAWHGRRPTVEHLRVFGCVGYVKTAKPNLRKLDDHGTRMVFIGYEQGSKAYRMYDPVARRLCVSRDVIFDGTTFWDWGSNTDEEGDQDAYVEFTVENFTVPVQGGETHAQDAAVTPTMLATSPTSSTGTAITLPSGVEFCSSPTDASEGTNEGPRRYRTVANTLATTAPILDFDYSDQCLMAAEEPANFLEAEQESCWRKAMLEEMDSIEGNNTWFLCDLPSSHRAIGLEWVYKIKRDAKDAIVKYKARLVAKGYVQQHGVDFDEVFAPVARMETVRLLIAMAAHQGWEVHHMDVKSAFLNRELEKDVYVVQPPGFVVDGKEDKVLKLKKALYGLKQAPRAWYAKLDSSLVSLNFVKSGVESAVYIQGEKNSRLV

SEQ ID NO: 18717 - protein, 1282 aa, Oryza sativa
  Clone ID: TF_OSC900297j.C1.p6.fg
MSYTPPGRRGGGGGGGSGNGRGSASGSGVGNCADGASLPLVPQGRDAGHTARLPILSRTNYPDWALLMRVNLQAQGLWTAIDPGYAEYREDRAALSAILQAVPREMLRGLAKHNSAKATWDAIKTMRVSVDRVREAKEQGFRRQFEAMRFKDGETPEEFAMRLTAVVADIRDMGGVMEDEHINKKLLRVVPKKYKPVAISLEQLLDVKTMALEELVGRLSTVDSYSDDEEASDGSKLYLTEEQWQARVKQREQEGSSSSNKGRAGSSNQNRRGKAGDSPKGKKMATGGHGRRDISKVKCFNCDEYGHYSKQCRKPRRQRRGEANANLVQAEEEPTLLMAHVMGVSLAGEAAIGRTPCVQEVHLTEKKVVLDREDGREEEKTSEWFLDTGATNHMTGARSAFAELDTGVVGTVKFGDGSVIDIQGHGTVVFQCKNGDHRSLEAVYYIPKLRKNIVSVGRLDARGYDAHIWHGVFTLRYPEGMLLAKFQAGVEKESNRKLMALRIDRGGEFTSVEFMEYCADTGVKRQLTAPYSPQQNGVVERRNQTVVAAARSMLKAANMPAYFWGEVVVAAVYVLNRSPTKSLDGVTPYEAWHGRRPTVEHLRVFGCVGYVKTAKPNLRKLDDHGTRMVFIGYEQGSKAYRMYDPVARRLCVSRDVIFDGTTFWDWGSNTDEEGDQDAYVEFTVENFTVPVQGGETHAQDAAVTPTMLATSPTSSTGTAITLPSGVEFCSSPTDASEGTNEGPRRYRTVANTLATTAPILDFDYSDQCLMAAEEPANFLEAEQESCWRKAMLEEMDSIEGNNTWFLCDLPSSHRAIGLEWVYKIKRDAKDAIVKYKARLVAKGYVQQHGVDFDEVFAPVARMETVRLLIAMAAHQGWEVHHMDVKSAFLNRELEKDVYVVQPPGFVVDGKEDKVLKLKKALYGLKQAPRAWYAKLDSSLVSLNFVKSGVESAVYTQGEKNSRLVVGVYVDDLIITGASLMEINKFKEQMQALFKMSDLGLLSYYLGMEVKQGKEGITVSQGAYAAKILDKAGMRDCNPCQTPMDARLKLSKEGGECVEETQFRSIIGSLRYLVNTRPDLSYSVGYVSRFMEKPTSEHWAAMKHILRYVAGTLNLGVEFRKKQHQVPQLNGYSDSDMAGDIDDRKSTTGVLFKLGDSLISWQSQKQKVVALSSCEAEYIAAATAAVQGVWLARPIGELEGQEPGCALIKVDNKSAISLCKNPVLHDRSKHIDTKFHFIRDCVDQKRVEVEYIRSEDQLADILTKPLGKIRFLELRGKLGLVPV

SEQ ID NO: 18718 - protein, 435 aa, Oryza sativa
  unsure (1)..(435): unsure at all Xaa locations
  Clone ID: TF_OSC23022j.C1.p3.np
MSWQRVGALLLGSVLPACPGYPGRRGIGSVLLSKARMGWKLCHIFTTGSKAMMRSKDVSWVKMYTSDQSKSIRIAEPSDMGKPSNVPKSVLSKPLQQMADNEKGNKVRSQDIGTSSSRVNEAPDTSCVTLVQHLINQNRLLIEILQQHQTPILNLSNTTSSAVGGSPSTHTTSQHAASIPKDPWXRATCXPKRSKXHLLMCDEQGHYARERPQQKRKTPMRTEDEVRKMIITSTEWPPPGMTRRQRRNTFRGAPQLTEHLLANGGRVSDSEDSDQVSSDDEDEMERKACSRFFGSKACTRCGEIGHVASMCLTLCTHCEEDHPPGECPTRKVTCFLCEGTNHVPKDCQLSVLLTKTAEIQRTTLRLSRQLVSSNSNIDDIIHSTNAPLAAPDSAVNHSNNTFSTNHSLHRQPQQRIVVDGRSCFSPRPTPGRAKG

SEQ ID NO: 18719 - protein, 165 aa, Oryza sativa
  unsure (1)..(165): unsure at all Xaa locations
  Clone ID: TF_OSC25029j.C1.p1.np
SKACTRCGEIGHVASMCLTLCTHXEEDHPPGECPTRKVTCFLCEGTNHVPKDCQLSVLLTKTAEIQRTTLRLSHQLVSSNSNIDDIIHSTNAPPSSAINHSNNTFSTNHSLHRQPQQRIVVDGRSCVSPRPTPGRAKGNQPPEGDTKQKTVIRFNPQSEGSFSCE

SEQ ID NO: 18720 - protein, 211 aa, Oryza sativa
  unsure (1)..(211): unsure at all Xaa locations
  Clone ID: TF_OSC32065j.C1.p1.np
TLEDPLVSSXSIMNQPSDXWRLKSSDQPKRHLFGPRVSDMSSLSKACTRCGEIGHVASMCLTLCPHCEEDHPPGECPIRKVTCFLCEGTNHVPKDCQLSVLLTKTAEIQRTTLRLSRQLVSSNNNIDDIIHSTNAPLAPPNSAINHGNNTFSTNHSLHRQPQQRIVVDGRSCVSPRPTPGQAKGNQPPEGDTKQKTVIRFNQQSEGSFSCE

SEQ ID NO: 18721 - protein, 1109 aa, Oryza sativa
  Clone ID: TF_OSC400192j.C1.p34.fg
MEANDWLHAIEKKLNLLQCNDQEKVAFATHQLQGPASAWWDNHMATRPPDDVRTDAEKQEKFMAGLDDELTNQLISGDYADFERLVDKAIRQEDQRNKMDRKRKAAQFRAHQGSHQRPRFTPGQQGGPTTMIVRQYRPFNPSNFHQGASGSQDQHGGQLNRGAAPRPPVAPAQSGPSAQAKKETGTKPGSCFNCGELGHLADKCPKPRRAGPRFVQARVNHASAEEAQAAPEVVLGTFPVNSIPATVLFDSGATHSFISKKFVGMHGLVREELSTPMRVHTPGNSSTSVQFSPSITIEIQRSPFLANLILLESKDLDVILGMDWLTKFKGVINCANRTVTLTNEKGETVVYKSPDSPKQGVPLNQIEVEIPVVTEEKNSRKLEEIPIVCEYPEVFPEDLTTMPPKREIEFRIDLAPGTAPIYKRPYIMAANELAEVKKQVDEQLQKGYIRPSTSPWGASVIFVEKKDKTKRMCVDYRALNEVTIKNKYPLPRIDDLFDQLKGAKVFSKIDLRSGYHQLRIREEDIPKTAFTTRYELYECTVMSFGLTNAPAFFMNLMNKVFMEFLDKFVVVFIDDILIYSKSEEEHEQHLRLVLEKLKEHQLYAKFSKCDFWLTEVKFLGHVITAQGYYRRFIENFSRIARPMTQLLKKDEKFKWTAECDKSFEELKKKLVSAAVLILPDQMKDFQVYCDASRHGLGCVLMQEGRVVAYASWLLRPHEGNYPTHDLELAAVVHALKIWRHYLIGNRCEVYTDHKSLKYIFTQPDLNLRQRRWLELIKDYDMSIHYHPGKANVVADALSRKSYCTALCIEGMCEELQQEFEHLNVGIVEQGFVAALEARPTLVDQVRAAQVNDPEIAELKKNMRVGKARDFLEDEHGTIWLRERLCVPDDKELKDLILTEAHQTQYSIHLGSTKMRASTVRDRGISGSRRESQNHQERLRIAQSRQKSYADNCRRELTFEVGDYVYLRVTPLWGVHRFQTKGKLAPRFVGPYKILERRGEVAYQLELPSNMIDIHDVFHMSQLKKCLRVPEEQADSEHIDIQEDLTYVEKPVRILDTSERRTRNKVTRFCRVQWSHHSEEEATWEREDELKAAHPHLFASSSESRGRDSV

SEQ ID NO: 18722 - protein, 1662 aa, Oryza sativa
  unsure (1)..(1662): unsure at all Xaa locations
  Clone ID: TF_OSC100051j.C1.p6.np
IKYDCHVALKASNNGKLVRIIALKDEIARLKKENAQLKGLPAPGGVRIRTTPRKTATAPVRIQLAPRNPPPPAILAAPAPTPAVPVPAPASALSFAPASAARGPASGNGGWLSATPSGSRDRSSSGSEPGSRETYLPDSRSRXEGSGLFLKMVYTRNGNRAIGEGSNGEERTNGVHPNRDSGNGPPPLPENPTLAQVMAHQTQMMTAMMQQMQQQHQQMYQRMQQQAEXQFGPPPPQSKLPEFLRVRPPTFSSTTNPMEVNDWLHAIEKKLNLLQCNDLEKVAFATHQLQGPASAWWDNHMATRPPGTEVTWAEFCRSFRKAQVPDGVVAQKKREFRALHQGNRTVTEYLHEFNRLARYAPEDVRTDAEKQEKFLAGLDDELTNQLISGDYADFERLVDKAIRQDQRNXMERKRKAAQFRSNQGSHQRPRFTPGQQGGPTTLIVRQHRPFSASNFHQGASGSQNHHGGQPNRSAAPLPPMAPAQSAPSAQAKKETGTKPGSCFNCGELGHFADKCPKPRRVGPRFVQARVNHASAEEAQAAPEVVLGTFPVNSVPATVLFDSGATHSFISKKFVGMYGLRKKELSTPMKVHTPGNSSTSVSYSPSVLIEIQRSPFLANLILLESKDLDVILGMDWLTKFKGVIDCANHTVTLTNEKGETVVYKSPVSPKQGISLNQIKVENPVTTGEKSSRKLDDIPIVCEYPEVFPKDLTTMPPKREIEFRIDLAPGTAPIYKRPYRMTANELAEVKKQVDEXLQKGYIRPSTSPWGAPVIFVEKKDKTKRMCVDYRVLNEVTIKNKYPLPRIDDLFDQLKGAKVFSKIDLRSGYHXLRIREEDIPKTAFTTRYGLYECTVMSFGLTNTPAFFMNLMNKVFMEFLDKFVVVFIDDILIYSKSEEEHEQHLRLVLEKLKEHRLYAKFSKCDFWLSEVKFLGHVITAQGVAVDPSNVESVTKWTPPKTVSQIQSFLGLAGYYRRFIENFSRIARPMTXLLKKDEFKWTAECDKSFEELKKKLVSAPVLILPDQMKDFQVCCDASRHGLGCVLMQEGRVVAYALRQLHPHEGNYPTHDLELAAVVHALKIWRHYLIGNHCEVYTDHKSLKYIFTQPDLNLXQRRWLELIKDYDMSIHYHPGKANVVADALSRKSYCNALCIEGMCEELQQELEHLNVGVVEHGFVAALEARPTLVDQVRAVNDLEIAELKKNMRVGKARDFLEDEHGTIWLAERLCVPDDKELKDLILTEAHQTHYSIHPGSIKMYQDLKEKFWWVSMRREIAEFIALCDVCQXVKAEHQRPAGLLQPLQIPEWKWEEIGMDFITGLPRTSSGHDSIWVVVDRLTKVAHFIPVHTTYTGKRLAELYLSRIMCLHGVPKKIVSDRGSQFTSKFXQKLQEELGTRLNFSTAYHPQTDGQTERVNQILEDMLRACALDFGGAWDKSLPYAEFSYNNSYQASLQMAPFEALYGRKCRTPLFWDQTGEFGTEVLREAEEKVRTIRERLRIAQSRQKNYADNRRRELTFETGDYVYLRVTPLRGVHRFQTKGKLAPRFVGPYKILERRGEVAYQLELPSNMIGIHDVFHVSQLKKCLRVPEEQANSEHIDIQEDLTYVERPLRILKTSERRTRNKVTRFCRVQWSHHSEEEATWEREDELKAAHPHLFASSSESRGRDSV

SEQ ID NO: 18723 - protein, 1185 aa, Oryza sativa
  unsure (1)..(1185): unsure at all Xaa locations
  Clone ID: TF_OSC100217j.C1.p1.np
MADHPPNHRGEAMDDFVAELARMTLVVGYPNVPEYSTVLPLSGEFPHRVRPEVHGYVGTCLANMVVEASGGTADHTCQEAAXLMMARLRKRHNYIFCNTAYRFHPRRASGDDVSTFRPTAGENDTTFGHMCAVMRGMDRMHSDLRKASKALNDGKLVRIIALKDEIARLKKENAQLKGLPIPGGVRIRNTPRKSTTAPVRIQLAPRNPPPPAPPAAPPVPPAVSEVPVSAPTSALSFAPASAVRGPASGNEVPVSAPTSALSFAPASAVRGPASGNGGCFLQMVYTRNGSRTTGEGSNGEERTDGVHPNSNSGNGPPPLPKNLTLAQVMAHQTQMMAAMMQQMHQRMQQQAEQQQQQFGPPRPQSKLPEFLRVRPPTFSSTTNPMEANDWLHAIEKKLNLLQYNDQEKVAFATHQLQGPASAWWDNHMATRPLGTEVTWAEFCRSFRKAQVPDGVVAQKKREFRALHQGNRTVIKYLHEFNRLARYAPEDVRTDAEKQEKFLAGLDDELTNQLISGDYADFEKLVDKAIRQEDQRNKMDRKRKAAQFRSNQGSHPXPRVTSGQQSGPTTMIVRQHRPFNSSNFHHGTSGSQNHHGGQPNRSAAPRPPMAPAQSAPSAQVKKETGTKPGSCFNCGELGHFADKCPKPRRAGPRFVXARVNHASAEEAQAAPEVVLGTFSVNSVPATVLFDSGATHSFISKKFVGMHGLRKEELSTPMRVHTPGNSSTSVSYSPSVLIEIQRSPFLANLILLESKDLDVILGMDWLTKFKRVIDCANRTVTLTNEKGETVVYKSPASPKQRISLNQIEVEEPVTTEQKSSPKLEDIPIVCEYPEVFPEDLTTMPPKREFEFRIDLAPGTAPIYKRPXRMAANELAEVKKQVDEQLQKGYTRPSTSPWGAPVIFVEKKDKAKRMCVDYRALNEVTIKNKYPLPRIDDLFNQLKGAKVFSKIDLRSGYHXLRIREEDIPKTAFTTRYGLYECMVMSFGLTNAPAFFMNLMNKVFMEFLDKFVVVFIDDILIYSKSEEEHEQHLRLVLEKLKEHQLYAKFSKFDFWLLEVKFLGHVITAQGVAVDPSNVESVTKWTPPKTVSXIRSFLGLAGYYRRFIENFSSIARPMTQLLKKDEKFKWTAEFDKSFEELKKKLVSAPVLILPDQRKDFQVYCDASRHGLGCVLVQEARVSSSVQQPRR

SEQ ID NO: 18724 - protein, 1571 aa, Oryza sativa
  Clone ID: TF_OSC101121j.C1.p1.fg
MGCKMAGHPPNHRGEGMINFVAELARMTLVVGYPNAPEYTTIPPLSGELPHRVRLEVHGYVGTCLANMVVEASGGSTDHACQEAAYLMMARLRERHNYIFHDTAYRFHPRRASGDDISTFRPTAGENDTTFSHMCAVMRGLDRMHSDLHKATKALNDGKLMRIVTLKDEIARLKRENAQLKGLPAPGGVRIRTTPARRRRHPCASSLRPGTHLHQQLPQHLQFRPQFLQLQLQLPRPLSPSLQHQPPEVQPVAPEVGCLLLPVAAAISVAAAPVAHSQAAARLTCQAPGVAQRYRMVYTRNGSRATGEGSNGEERTDGAHPHSDSGNGPPPLPENPTLAQVMAHQTQMMAAMMQQMQQQHQQMHQRMLQHAEQQHQQFGPPPPQSKLPEFLRVRPPTFSSTTNPMEANDWLHAIEKKLNLLQCNDQEKVAFATHQLQGPASAWWDNHMATRPPDGVVAQKKREFRALHQGNRTVTEYLHEFNRLARYAPEDVRTDAEKQEKFMAGLDDELTNQLISGDYADFERLVDKAIRQEDQRNKMDRKRKAAQFRAPQGSHQRPRFTPGQQGGPTTMIVRQYRPFNPSNFPQGASGSQNHHGGQPNRGAAPRPPMAPAQSGPPAQAKKETGAKPGSCFNCGELGHFADKCPKPRRAGPRFIQARVNHASAEEAQAAPEVVLDLDVILGMDWLTKFKGVIDCANHTVTLTNEKGETVVYKSLVSPKQGVSLNQIETEIPVDTVEKNLRKLEYIPIVCEYPEVFPEDLTTMPPKREIEFRIDLAPGTAPIYKRPYRMAANELAEVKKQVDEQLQKGYIRPSTSPWGAPVIFVEKKDKTKRMCVDYCALNEVTIKNKYPLLRIDDLFDQLKGAEVFSKIDLRSGYHQLRIQEEDIPKTAFTTRYGLYECTVMSFGLTNAPAFFMNLMNKVFMEFLDKFVVVFIDDILIYSKSEEEHEQHLRLVLEKLKEHQLYAKFSKCDFWLTEVKFLGHVITAQGVAVDPSNLLKKDEKFKWTAECDKSIEELKKKLVSAPVLILPDQMKDFQVYCDASRHGLGCVLMQEGRVVAYASRQLRPHEGNYPTHDLELAAVVHALKIWRHYLIGNRCEVYTDHKSLKYIFTQPDLNLRQRRWLELIKDYDMSIHYHPGKANVVADALSRKSYCTALCIEGMCEELRQEFEHLNVGIVEHGFVAALEARPTLVDQVRAAQVNDSEIAELKKNMRVGKARDFHEDEHGTIWLGERLCVPDDKELKDLILTEAHQTQYSIHPGSTKMYQDLKEKFWWAEHQRPAGLLQPLQIPEWKWEEIGMDIITGLPRTSSGHDSIWVVVDRLTKVAHFIPVHTTYTGKRLAELYLSRIMCLHGVPKKIVSDRGSQFTSKFWQKLQEKLGTRLNFSTAYHPQTDGQTERVNQILEDMLRACALDFGGAWDKNLPYAEFSYNNSYQASLQMAPFEALYGRKCRTPLFWDQTGERQLFGTEVLAEAEEKVRIIRERLRIAQSRQKSYADNRRRKLTFEAGDYVYLRVTPLRGVHRFQTKGKLAPRFVGPYKILERRGEVAYQLELPSNMIGIHDVFHVSQLKKC

SEQ ID NO: 18725 - protein, 1473 aa, Oryza sativa
  Clone ID: TF_OSC102114j.C1.p1.fg
MSTTAPVRIQLAPRNPPPPAAPAAPPVPPAVPAAPAPAPAPVHMSAPASALSFAPASAARGPASGNGGCLFGMVYTRNGSRATGEGSNGEERTEGVHPNSNSGNVPPPLPENPTLAQVMAHQTQMMAAMMQQMQQQHQQMYQRMLQHAEQQHQQFGPPPPQSKLPEFLRVRPPTFSSTTNPMEANDWLHAIEKKLNLLQCNDQEKVAFTTHQLQGPASAWWDNHMATRPPGTEVTWAEFCRSFRKAQVPDGVVAQKKREFRALHQGNRTVTEYLHEFNRLARYAPEDVRTDAEKQERFMAGLDDELTNQLISGDYADFERLVDKAIRQEDQRNKMDRKRKAAQFRAPQGSHQRPRFAPGQQGGPTTMIVRQYRPFHPSNFPQGASGSQNHHGGQPNRGAAPRPPMAPAQSGPSAQARKETGAKPGSCFNCGELGHFADKCPKPRRAGPRFIQARVNHASAEEAQAAPEVVLGTFPVNSIPTTVLFDSGATHSFISKKFVGMHGLIREELSTPMRLTKFKGVIDCVNRTVTLTNEKGETVVYKSPNSPKQGVSLNQIEAEIPVVTMEKNLRKLEDIPIVYEYPEVFPEDLTTMPPKREIEFRINLAPGTAPIYKRPYRMAANELAEVKKQVDEQLQKGYIRPSTSPWGAPVIFVEKKDKTKRMCVDYRALNEVTIKNKYPLPRIDDLFDQLKGAKVFSKIDLRSAYHQLIIREEDIPKTAFTTRKCDFWLTEVKFLGHVITAQGVAVDPSNVESVTKWTPPKTVSQIQSFLGLAGYYRRFIENFSRIARPMTQLLKKDEKFKWTAECDKSFEELKKKLVSAPVLILPDQMKDFQVYCDASRHGLGCVLMQEGRVVAYASRQLRPHEGNYPTHDLELAAVVHALKIWRHYLIGNRCEVYTDHKNLKYIFTQPDLNLRQRRWLELIKDYNMSIHYHPGKANVVADALSRKSHCTALCIEGMCEELRQDFEHLNMGIVEYGFVAALEARPTLVDKVRVAQVNDSEIAELKKNMRVGKARDFHEDEHGTIWLGERLCVPDDKELKDLILTEAHQTQYSIHPGSTKMYQDLKEKFWWVSMRREIAEFVALCDVCQRVKAEHQRPAGLLQPLQIPEWKWEEIGMDFIIGLPWTSSGHDSIWIVMDRLTKVAHFIPVHTTYTGKRLAELYLSRIMCLHRVPKKIVSNRGSQFTSKFWQKLQEELGTRLNFSTAYHPQTDGQTERVNQILEDILRACALDFGGAWDKSLPYAEFSYNNSYQASLQMAPFEALYGRKCRTPLFWDQTGERQLFGTEVLAEAEEKVRIIKERLRIAQSRQKSYADNRRRELTFEAGDYVYLRVTPLRGVHRFQTKGKLVPRFVGPYKILERRGEVAYQLELPSNMIGIHDVFHVSQLKKCLRVPEEQADSEHIDFQEDLTYVEKPVHILDTSERRTRNKVTRFCRVQWSHHSEEEATWEREDELKAAHPHLFASSSESRGQDSV

SEQ ID NO: 18726 - protein, 1495 aa, Oryza sativa
  Clone ID: TF_OSC102349j.C1.p22.fg
MVYTRNGSRATGEGSNGEERTDGAHPHSDSGNGPPPLPENPTLAHVMAHQTQMMAAMMQQMQQHQQMHQRMLQHAEQQHQQFGPPPPQSKLPEFLRVRPPTFSSTTNHMEANDWLHAIEKKLNLLQCNDQEKVAFATHQLQGPASAWWDNHMATRPPGTEVTWAEFCRSFRKAQVPDGVVAQKKREFRALHQGNGTVTEYLHEFNRLARYAPEDVHTDAEKQEKFMAGLDDELTNQLISGDYADFERLVDKAIRQEDQRNKMDRKRKAAQFRAPQGSHQRPRFASGQQGGPTTMIVRQYRPFNPSNFPQGARGSQNHHGGQPSRGAAPRPPTAPAQSGPSAQAKKETGTKPGSCFNCGELGHFADKCPKPRRAGTRFIQARVNHASAEEAQAAPEVVLGTFPVNSIPATVLFDSGATHSFISKKFVEMHGLIREELSTPMRVHTPGNSSTSVQFSPSITIEIQGSPFLANLILLESKDLDVILGMDWLTKFKGVIDCANRTVTLTNEKGETVVYESPDAPKRGVSLNQIEAEIPVDTVEKNLRKLEDIPIVCEYPEVFPEDLTTIAPKREIEFRIDLAPGTAPIYKRPYRMAANELAEVKKQKKDKTKRMCVDYRALNEVTIKNKYPLPRIDDLFDQLKGAKVFSKIDLRSSYHQLRIREEDIPKTAFTTRYGLYECTVMSFGLTNAPAFFMNLMNKVFMKFLDKFVVVFIDDILIYSKSKEEHEQHLRLVLEKLKEHQLYAKFSKCDFWLTEVKFLGHVITAQGVAVDPSNVESVTKWTPPKTVSQIRSFLGLAGYYRRFIENFSRIARPMTQLLKKDEKFKWTVECDKSFEELKKKLVSAPVLILPDQMKDFQVYCDASRHGLGCVLMQEGKVVAYASRQLRPHEGNYPTHDLELAAVVHALKIWRHYLIGNRCKVYTDHKSLKYIFTQPDLNLRQRRWLELIKDYDMSIHYHPGKANVVADALSRKSYCTALCIESMCEELRQEFEHLNVGIVEHGFVAALEARPMLVDQVRAAQVNDSEIAELKKNMRVGKARDFHEDEHGTIWLGERLCVPDDKELKDLILTEAHQAQYSIHPGSTKMYQDLKEKFWWVSMSKEIAEFVALCDVCQRVKAEHQRPAGLLQPLQIPEWKWEEIGMDFITGLPRTSSGHDSIWVVVDRLTKVAHFIPVHTTYTGKRLAELYLSRIMCLHGVPKKIVSDRGSQFTSKFWQKLQEELGTRLNFSTAYHPQTDGQTERVNQILEDMLRACALDFGGAWDKSLPYTEFSYNNSYQASLQVAPFEALYGRKCRTPLFWEQTGERQLFGTEVLAEAEEKVRTIRERLRIAQSRQKSYADNRRRELIFEAGDYVYLRVTPLWGVHRFQTKGKLVPRFVGPYKILERRGEVAYQLELPSNMIGIHDVFHVSQLKKCLRVPEEQADSEHIDIQEDLTYVEKPVRILDTSERRTRNKVTKFCRIQWSHHSKEEATWEREDELKAAHLHLFTSSSESRGRDSV

SEQ ID NO: 18727 - protein, 1133 aa, Oryza sativa
  Clone ID: TF_OSC11733j.C1.p1.gm
MVYTRNGSRTAGEGSNGEERIDGVHPNSDSGNGPPLLPENPTLAQSKLPEFLHVRPPTFSSTTNPMEANDWLHAIEKKLNLLQCNDQEKVAFATHQLQGPASAWWDNHMATRPPGTEVTWAEFCRNFRKAQVPDGVVAQKKREFQALHQGNRTVTEYLHEFNRLARYASEDVRTDAEKQEKFLAGLDDELTNQLISGGYADFEKLVDKAIHQEDQCNKMDRKRKAAQFRSNQGSHPRPRFTPRQQSGPTTMIVRQHRPFNSSSFHQGASGSQNHHGGQPNRRAAPRPPITPAQSAPSAQAKKETGTKPGSCFNCGELGHFADKCPKPRRVGPRFVQARDNHASAEEARAAPEVVLVTLTNEKGETVVYMSPVSPKQRISLNQIEVENPVTTEQKGLQKLEDIPIVCEYPEVFLEDLTTMPPKRELEFRIDLAPGTAPIYKKPYRMATNKLAQVKKQVDEQLQKGYIRPSTLPWGAPVIFVEKKDKTKRMCVDYRALNEVTIKNKYPLPRIDDLFDQLKGAKVFSKIDLRSGYHQLRIREEDIPKTAFTTRYGLYECTVMSFRLTNAPAFFMNLMNKVFMEFLDKFVVEHQLYAKFSKCDFWLLEVKFLGHVITAQCVAIDPSNVESVTKWTPPKTVSQIRSFLGLAAECDQSFEKLKKKLVTAPVLILPDQTKDFQVYYDASRHGLGCVLMQEGRVVAYASRQLRPHEGNYPTHDLELAAVVHALKIWRHYLIGNRCEVYTDHKSLKKSYCNALCTEGMCKELQQELEHLNLGLVEYGYVAVLEARPTLVDQVRAAQVNDPEIAELKKNMRVGKAQDFHEDEHGTIWFGERLCVPDDKELKDLILTEAHQTQYSIHPGSTKMYQDLKEKFCAYHIYGEEIGRAVPDKDHVSAWGDYMYLRVTPLRGVHRFQTKGKLAPRFVGPYKILERRGEVAYQLELPSNMIGIHDVFHVSQLKKCLRVLEEQADSEHIDIQEDLTYVEKPVRILETSERRTRNKVTRFCRADAQPSRPTGRGPAEPAASLLSPGVADRWGPPIGPIPFLQPAPTRSTTTAAPTTTATPSLFFPISSSPPEPSNALAPSPFFLTTTPPFRSSVADTPSRADNAVAFAVVRATPVTPFSLDPAAGTQLRAGH

SEQ ID NO: 18728 - protein, 1230 aa, Oryza sativa
  Clone ID: TF_OSC12096j.C1.p12.fg
MEANDWLHAIEKKLNLLQCNDQEKVAFATHQLQGPASAWWDNHMATRPPGTEVTWAEFCRSFRKAQVPDGVVAQKKRKFRALHQGNRTVTEYLHEFNRLARYASEDVRTDAEKQEKFMAGLDDELTNQLISGDYADFERLVDKAICQEDQRNKMDRKRKAAQFRSNQGNHQRPRFAPGQQGGPTTMIVRQYRPFNSSNFHQGASGSQNHHGGQPNRGAAPRPPVAPAQSGPSAQAKKETGTKPGSCFNCGELGHFADKCPKPRRAGPRFVQARVNHASAEEAQAEPKVVLGTFPVNSIPAIVLFDSGATHSFISKKFVGMHGLRKEELNTPMRVHTPGNSSTSVSFSPSVLIEIQRSPFLANLILPESKDLDVILGMDWLTKIKGVIDCANRTVTLTNEKGETVVYKSLVSPKQGVSLNQIEAEIPVVTKEKNPRKLEEIPIVCEYPEVFPEDLTTMPPKREIEFRIDLAPGTAPIYKRPYRMAANELAEVKKQVDEQLQKGYIRPSTSPWGAPVIFVEKKDKTKRMCVDYRALNEFVVVFIDDILIYSKSEEEHEQHLRLVLEKLKEHQLYAKFSKCDFWLTEVKLLGHVITAQGVAVDPSNVELVTKWTPLKTVSQIRSFLGLADERLPSLLRCIPPRTWMCPNARGQSGCVCSRQLRPHEGNYPTHDLELAAVVHALKIWRHYLIGNRCEVYTDHKSLKYIFTQPDLNLRQRRWLELIKDYDMSIHYHPGKANMVADTLSRKSYCTALCIEGMCEELRQEFEHLNVGIVEHGFVATLDARPTLVDQVRAAQELKDLILTEAHQTQYSIHPGSTKMYQDLKEKFWWVSMRREIAEFVALCDVCQRVKAEHQRLAGLLQPLQIPEWKWEEIGMDFITGLPRTSSGHDSIWVVVDRLTKVSHFIPVHTTYTGKRLVELYLSRIMCLHGVPKKIVTDRGSQFTSKFWQKLQEELGTRLNFSTAYHPQTDGQTKRVNQILEDMLRASALDFGGAWDKSLPYAEFSYNNSYQASLQMAPFKALYDRKCRTPLFWDQIGEHQLFGTEVLAEAEEKVRTIRERLRIAQSRQKSYADNRRRELTFEAGDYVYLRVTPLRRVHRFQTKGKLAPRFVGPYKILERRGEVAYQLELPSNMIGIHDVFHVSQLKKCLRVPKEQADSEHIDIQEDLTYVEKPVHILDTSKRRTRNKVTRFCRVQWSHHSEEEATWEREDELKAAHPHLFTSSSESRGRDSV

SEQ ID NO: 18729 - protein, 640 aa, Oryza sativa
  Clone ID: TF_OSC12096j.C1.p15.gm
MVYTRNGSRTTGEGTNDEERTDGMHQRMLQHAEQQHQQFGPPPPQSKLPEFLRVRPPTFSSTTNPMEANDWLHAIEKKLNLLQCNDQEKVAFATHQLQGPASAWWDNHMATRPPGTEVTWAEFCRSFRKAQVPDGVVAQKKRKFRALHQGNRTVTEYLHEFNRLARYASEDVRTDAEKQEKFMAGLDDELTNQLISGDYADFERLVDKAICQEDQRNKMDRKRKAAQFRSNQGNHQRPRFAPGQQGGPTTMIVRQYRPFNSSNFHQGASGSQNHHGGQPNRGAAPRPPVAPAQSGPSAQAKKETGTKPGSCFNCGELGHFADKCPKPRRAGPRMAANELAEVKKQVDEQLQKGYIRPSTSPWGAPVIFVEKKDKTKRMCVDYRALNEEHQLYAKFSKCDFWLTEVKLLGHVITAQGYYRRFIENFSRIARPMTQLLKKDEKFKWTVECDKSFEELKKKLVSAPVLILPDQMKDFQLRPHEGNYPTHDLELAAVVHALKIWRHYLIGNRCEVYTDHKSLKYIFTQPDLNLRQRRWLELIKDYDMSIHYHPGKANMVADTLSRKSYCTALCIEGMCEELRQEFEHLNVGIVEHGFVATLDARPTLVDQVRAAQVNDPEIAELKKNMRVGKARDFHEDEHGTI

SEQ ID NO: 18730 - protein, 1347 aa, Oryza sativa
  Clone ID: TF_OSC12919j.C1.p2.gm
MVYTRTGNRTTGEGSNGEERVDGVHPNSDSGNGPPPLPENPTLAQVMAHQTQMMAAMMQQMQQQHQQMHQRMMQHAEQQHQQFGPPPPQSKLPEFLRVRPPTFSSTTNPMEANDWLHAIEKKLNLLQCNDQEKVAFATHQLQGPASAWWDNHMATRPPGTEVTWAEFCRSFRKAQVPDGVVAQKKREFRALHQGNRTVTEYLHEFNRLARYAPEDVRTDAEKQEKFMAGLDDELTNQLISGDYADFERLVDKAIRQENQRNKMDRKRKAAQFRAPQESHQRSRFTPGQQGGPTTMIVRQHRPFNPSNFHQGSSGSQNHHGSQPNRGTAPRPPMAPAQSGQPAQAKKETGAKPGSCFNCGELGHFADKCPKPRRAGPRFIQARVNHASAEEAQAAPEVVLVTLTNEKGETVVYKSLVSPKKGASLNQIETEIPVDAEEKNLRKLEDIPIVCEYPEVFPEDLTTMPPKREIEFRIDLAPGTAPIYKRPYRMAANELAEVKKQVDEQLQKGYIRPSTSPWGAPVIFVEKKDKTKRMCVDYRALNEVTIKNKYPLPRIDDLFDQLKGAKVFSKIDLRSGYHQLRIREEDIPKTAFTTRYGLYECTVMSFGLTNAPAFFMNLMNKVFMEFLDKFVVVFIDDILIYSKSEEEHEQHLRLVLEKLKEHQLYAKFSKCDFWLTEVKFLGHVITAQGVAVDPSNVESVTKWTPPKTVSQIRSFLGLAGYYRRFIENFSRIARPMTQLLKKDEKFKWTAECDKSFEELKRKLVSAPVLILPDQTKDFQVYCDASRHGLGCVLMQEGRVVAYASRQLRPHEGNYPTHDLELAAVVHALKIWRHYLIGNRCEVYTDHKSLKYIFTQPDLNLRQRRWLELIKDYDMSIHYHPGKANVVADALSRKSYCTALCIEGMCEELRQELEHLNMGIVEHGFVAALEARPTLVDQVRAAQVNDPEIAELKKNMRVGKARDFLEDEHGTIWMGERLCVPDDKELKDLILTEAHQTQYSIHPGSTKMYQDLKEKFWWVSMRREIAEFVALCDVCQRVKAEHQRPAGLLQPLQIPEWKWEEIGMDFITGLPRTSSGHDSIWEELGTRLNFSTAYHPQTDGQTERVNQILEDMLRACALDFGGAWDKSLPYAEFSYNNSYQASLQMAPFEALYGRKCRTPLFWDQTGERQLFGTEVLAGAEEKVRIIRERLRIAQSRQKSYADNRRRELTFEAGDYVYLRVTPLRGVHRFQTKGKLAPRFVGPYRILERRGEVAYQLELPSNMIGIHDVFHVSQLKKCLRVPEEQADSEHIDIQEDLTYVEKPEVPELVPPSSSSSVGRRRRPLSPPLPAAGRSPSVAALRRCRMRAAAV

SEQ ID NO: 18731 - protein, 1113 aa, Oryza sativa
  Clone ID: TF_OSC13101j.C1.p3.fg
MAIRPPGMEVTWAEFCRSFRKAQVPDGVVAQKKREFRALHQGNRTVTEYLHEFNRLARYAPEDVRTDAEKQEKFLAGLDDELTNQLISGGYTDFERLVDKAIRQEDQRNKMDRKRKVAQFWSNQGSHQRPRFTPGQQGGPTTMIVRQHRPFNASNFHQGASSSQNHHGGQPNRGAAPRPPMQPAQSAPSAQAKKETGAKPGSCFNCGELGHFADKCPKPKRAGPSFSPSVLIEIQRSPFLANLILLESKDLDVILGMDWLTKFKGVIDCANRTVTLTNEKGETVVYKSLVSPKQGVSLNQIEVEIPVVTEERNSRKLEEIPIVCEYPEVFPEDLTTKPPKREIEFRIDLAPGTAPIYKRPYRMAANELAEVKKQVDEQLQKRYIRPSTSPWGAPVIFVEKKDKTKRMCVDYRALNEVTIKNKYPLPRIDDLFDQLKGAKLRIREEDIPKTAFTTRYGLYECTVMSFGLTNAPVFFMNLMNKVFMEFLDKFVAVFIDDILIYSKSEEEHEQHLRLVLEKLKEHQLYAKFSKCDFWLSEVKFLGHVITAQGVAVDPANVESVTKWTPPKTVSQIRSFLGLQGYYRRFIENFSRIARPMTQLLKKDEKFKWIAECDKNFEELKKKLVSAPVLVLPNQMKDFQVYCDASRHGLEWNYPTHDLELAAVVHALKIWRHYLIGNRCEVYTDHKSLKYIFTQPDLNLRQRRWLELIKDYDMSIHYHPGKANVVADALSRKSYCNALCIEGMCEELQQELERLKVGIVEHGFVAALEARPTLVDQVRAAQVNDPEIAELKKNMRVGKARDFLEDEHGTIWMGERLCVPDDKELKDLILTEAHQTQYSIHPGSTKMYQDLKEKFWWDSMRREIAEFIALCDVCQRVKAEHQRPAGLLQPLQIPEWKWEEIGMDFIAGLPQTSSGHDSIWVVVDRLTKVAHFIPVHTTYTGKKLAELYLGRIMCLHGVPRKIISDRGSQFTSKFWQKLQKELGTRLNFSTAYHLRTDGQTERVNQILEDMLRACALDFGGAWDKSLPYAEFSYNNSYQVSLQMAPFEALYGRKCRTPLFWDQTGERQLFGTEVLTEAEEKVRTIRERLRIAQSRQKSYTDNRRRELTFEAGDYV

SEQ ID NO: 18732 - protein, 1779 aa, Oryza sativa
  unsure (1)..(1779): unsure at all Xaa locations
  Clone ID: TF_OSC13598j.C1.p1.np
MAGHPPNHRGEGMIDFVAELARMTLVVGYPNAPEYTTIPPLSGELPHRVRLEVHGYVGTCLANMAVEASGGTADHACQEAAYLMMARLRERHDYIFHDTAYRYHPRRAHGDGVSSFRPTAGENDTTFGHMCAVMRGLDRMHSDLHKATKALNDGKLMRIVALKDEIARLKKENAQLKGLPAPGGVRIRTTPRKRTTAPVRIQLAPRNPPPAAAAPAVPPAPAPAPAPAPAPAPAFTLSFAPASAARGPASGTGGCPLQMVYTRTGSRATGEGSNGEERADGVHPNSESGNGPPPLPENPTLAQVMAHQTQMMAAMMQQMQQQHQQMHQRMMQHAEQQHQQFGPPPPQSKLPEFLRVRLPTFSSTTNPMEANDWLHAIEKKLNLLQCNDQEKVAFATHQLQGPASAWWDNHMATRPPGTEVTWAEFCRSFRKAQVPDGVVAQKKREFRALHQGNRTVTEYLHEFNRLARYAPEDVRTDAEKQEKFMAGLDDELTNQLISGDYVDFERLVDKAIRQEDQRNKMDRKRKAAQFRAPQGSHQRPRFTPGQQGGPTTMIVRQHRPFNPSNFHQGTSGSQNHHGSQPNRGTAPRPPMAPAQSGQPAQAKKETGAKPGSCFNCGELGHFADKCPKPRRAGPRFIQARVNHASAEEAQAAPEVVLGTFPVNSIPATVLFDSGATHSFISKKFVGMHGLIREELSTPMRVHTPGNSSTSVQFSPSITIEIQRSPFLANLILLESKDLDVILGMDWLTKFKGVIDCASRTVTLTNEKGETVVYKSLVSPKKGVSLNQIETEIPVDTVEKNLRKLEDIPIVCEYPEVFPEDLTTMPPKREIEFRIDLAPGTAPIYKRPYRMAANELAEVKKQVDEQLQKGYIRPSTSPWGAPVIFVEKKDKTKRMCVDYRALNEVTIKNKYPLPRIDDLFDQLKGAKVFSKIDLRSGYHQLRIREEDIPKTAFTTRYGLYECTVMSFGLTNAPAFFMNLMNKVFMEFLDKFVVVFIDDILIYSKSGEEHEQHLRLVLEKLKEHQLYAKFSKCDFWLTEVKFLGHVITTQGVAVDPSNVESVTKWTPPKTVSQIRSFLGLAGYYRRFIENFSRIARPMTQLLKKDEKFKWTAECDKSFEELKKKLVSAPVLILPDPTKDFQVYCDASRHGLGCVLMQEGRVVAYASRQLRPHEGNYPTHDLELAAVVHALKIWRHYLIGNRCEVYTDHKSLKYIFTQPDLNLRQRRWLELIKDYDMSIHYHPGKANVVADALSRKSYCTALCIEGMCEELRQEFEHLNVGIVEHGFVAALEARPTLVDQVRAAQVNDPEIAELKKNMRVGKARDFHEDEHGTIWMGERLCVPDDKELKDLILTEAHHTQYSIHPGSTKMYQDLKEKFWWVSMRREIAEFVALCDVCQRVKAEHQRPAGLLQPLQIPEWKWEEIGMDFITGLPRTSSGHDSIWVVVDRLTKVAHFIPVHTTYTGKRLAELYLARIMCLHGVPRKIVSDRGSQFTSKFWQKLQEELGTRLNFSTAYHPQTDGQTERVNQILEDMLRACALDFGGAWDKSLPYAEFSYNNSYQASLQMAPFEALYGRKCRTPLFWDQTGERQLFGTEVLAEAEEKVRIIRERLRIAQSRQKSYADNRRRELIFEAGDYVYLRVTPLRGVHRFQTKGXLAPRFVGPYKILERRGEVAYQLELPSNMIGIHDVFHVSQLKKCLRVPEEQADSEHIDIQEDLTYVEKPVRILDTSERRTRNKVTRFCRVQWSHHSEEEATWEREDELKAAHPHLFTSSSESRGRDSV

SEQ ID NO: 18733 - protein, 622 aa, Oryza sativa
  Clone ID: TF_OSC1567j.C1.p2.fg
MAVEASGGTADHACQEAAYLMMARLRERHDYIFHDTAYRYHPRRAHGDGVSSFRPTAGENDTTFGHMCAVMRGLDQMHSDLHKATKALNDGKLMRIVALKDEIARLKKENAQLKGLPAPGGVRIRTTPRCLFGMVYTRTGNRTTGEGSNGEERADGVHPNSDSGNGPPPLPENPTLAQVMAHQTQMMAAMMQQMQQQHQQMHQRMMQHAEQQHQQFGPPPPQSKLPEFLRVRPPTFSSTTNTMEANDWLHAIEKKLNLLQCNDQEKVAFATHQLQGPASAWWDNHMATRPPGTEVTWAEFCRSFRKAQVPDGVVAQKKREFRALHQGSRTVTEYLHEFNRLARYAPEDVRTDAEKQEKFMAGLDDELTNQLISGDYADFERLVDKAIRQEDQRNKMDRKRKAAQFRAHQGSHQRPRFTPGQQGGPTTMIVRQHRPFNPSNFHQGSSGSQNHHGSQPNRGTAPRPPMAPAQSGQPAQAKKETGAKPGSCFNCGELGHFADKCPKPRRAGPRFIQARVNHASAEEAQAAPEVVLGTFPVNSIPATVLFDSGATHSFISKKFVGMHGLIREELSTPMRVHTPGNSSTSVQFSPSITIEIQRSPGFAEFSGVIIRKRKRPGKGKMS

SEQ ID NO: 18734 - protein, 662 aa, Oryza sativa
  Clone ID: TF_OSC16992j.C1.p1.gm
MVYTRNGTRTTSEGSNGEERADGVHPNSDSGNGPPPFPENLTLAQVMAHQTQMMAAMMQQMQQQHQQMHQRMLQHAEQQHQQFGPPPPQSKLPEFLRVRPPTFSSTTNPMEANDWLHAIEKKLNLLQCNDQEKVAFATHQLQGPASAWWDNHVATRPPGTEVTWAEFCRSFRKAQVPDGVVAQKKRGFRALHQGNRTVTEYLHEFNRLARYAPEDVCTDAEKQEKFLAGLDDELTNQLISGDYADFERLVDKAIRQEDQRNKMDRKRKAAQFRSNQGNHQRPRFTLGQQGGPTTMIVRQHRTFKSSNFHQGASGSQNHHGGQPNHGAAPHPPVAPAQSGPSAQAKETGAKPGSCFNCGELGHFADKCPKPRRAGSKFVQARVNHASAKEAQAAPEVVLANELAEVKKQVDEQLQKGYIRPSTSPWGAPVIFVEKKDKTKRMCVDYRALNEVTIKNKYPLPRIDDLFDQLKGAKVFSKIDLRSGYHQLRIREEDIPKTAFTTRYGLHECTVMSFGLTNAPAFFMNLMNKVFMEFLDKFVVVFIDDILIYSKSEEEHEQHLRLVLEKLKEHQLYAKFSKCDFWLTEGMAVDPSNVESVTKWTPPKTVSQIRSFLRLAAECDKSFEELKKKLVSAPVLILPDQMKDFQDRFAPASSPEKDDFART

SEQ ID NO: 18735 - protein, 672 aa, Oryza sativa
  Clone ID: TF_OSC16992j.C1.p2.gm
MVYTRNGTRTTSEGSNGEERADGVHPNSDSGNGPPPFPENLTLAQVMAHQTQMMAAMMQQMQQQHQQMHQRMLQHAEQQHQQFGPPPPQSKLPEFLRVRPPTFSSTTNPMEANDWLHAIEKKLNLLQCNDQEKVAFATHQLQGPASAWWDNHVATRPPGTEVTWAEFCRSFRKAQVPDGVVAQKKRGFRALHQGNRTVTEYLHEFNRLARYAPEDVCTDAEKQEKFLAGLDDELTNQLISGDYADFERLVDKAIRQEDQRNKMDRKRKAAQFRSNQGNHQRPRFTLGQQGGPTTMIVRQHRTFKSSNFHQGASGSQNHHGGQPNHGAAPHPPVAPAQSGPSAQAKETGAKPGSCFNCGELGHFADKCPKPRRAGSKFVQARVNHASAKEAQAAPEVVLANELAEVKKQVDEQLQKGYIRPSTSPWGAPVIFVEKKDKTKRMCVDYRALNEVTIKNKYPLPRIDDLFDQLKGAKVFSKIDLRSGYHQLRIREEDIPKTAFTTRYGLHECTVMSFGLTNAPAFFMNLMNKVFMEFLDKFVVVFIDDILIYSKSEEEHEQHLRLVLEKLKEHQLYAKFSKCDFWLTEGMAVDPSNVESVTKWTPPKTVSQIRSFLRLAAECDKSFEELKKKLVSAPVLILPDQMKDFQVYCDASRHGLGGSCFEDLEALSDWQPL

SEQ ID NO: 18736 - protein, 1777 aa, Oryza sativa
  Clone ID: TF_OSC18057j.C1.p2.fg
MAGHPPNHRGEGMIDFVAELARMTLVVGYPNAPEYTTIPPLSGELPHRVSLEVHGYVGTCLANMAVEASGGTADHACQEAAYLMMARLRERHNYIFHDTAYRFHPRRANGDDVSSFRPTAGENDTTFGHMCAVMRGLDRMHSDLHKATKALNDGKLMRIVALKDEIARLKRENAQLKGLPAPGGVRIRTTPRKTMTAPVRIQLAPRNPPPAAAPAAPPVPPAVPAAPAPAPASALSFAPASAARGPASGTGGCLFGMVYTRTGTRTIGEGSNGEERADGVHPSSDSGNGLPPLPENPTLAQVMAHQTQMMAAMMQQMQQQHQQMHQRMMQHAEQQHQQFGPPPPQSKLPEFLRVRPPTFSSTTNPMEANDWLHAIEKKLNLLQCNDQEKVAFATHQLQGPASAWWDNHMATRPPGTEVTWAEFCRSFRKAQVPDGVVAQKKREFRALHQGNRTVTEYLHEFNRLARYAPEDVRTDAEKQEKFMAGLDDELTNQLISGDYADFERLVDKAIRQEDQRNKMDRKRKAAQFRAPQGSRQRPRFTPGQQGGPTTMIVRQYRPFNPSNFPQGASGSQNHHGGQSNRGAAPRPPMAPAQSGPPAQAKKETGAKTGSCFNCGELGHFADKCPKPRRAGPRFIQARVNHASAEEAQAAPEVVLGTFPVNSIPATVLFDSGATHSFISKKFVGRYGLRKEELSTPMRVHTPGNSSTSVSFSPSVLIEIQRSPFLANLILLESKDLDVILGMDWLTKFKGVIDCANRTVTLTNEKGETVAYKSLVSPKQGVSLNQIEAEIPVDTVEKNLRKMEYIPIVCEYPEVFPEDLTTMPPKREIEFRIDLAPGTAPIYKRPYRMAANELAEVKKQVDEQLQKGYIRPSTSPWGAPVIFVEKKDKTKRMCVDYRALNEVTIKNKYPLPRIDDLFDQLKGAKVFSKIDLRSGYHQLRIREEDIPKTAFTTRYGLYECTVMSFGPTNAPAFFMNLMNKVFMEFLDKFVVVFIDDILIYSKSEEEHEQHLRLVLEKLKEHQLYAKFSKCDFWLTEVKFLGHVITAQGVAVDPSNVESVTKWIPPKTVSQIRSFLGLAGYYRRFIENFSRIARPMTQLLKKDEKFKWTAECDKSFEELKKKLVSAPVLILPDQMKDFQVYCDASRHGLGCVLMQEGRVVAYASRQLRPHEGNYPTHDLELAAVVHALKIWRHYLIGNRCEVYTDHKSLKYIFTQPDLNLRQRRWLELIKDYDMSIHYHPGKANVVADALSRKSYCTALCIEGMCEELRQEFEHLNVGIVEHGFVAALEARPTLVDQVRVAQVNDSEIAELKKNMRVGKARDFHEDEHGTIWLGERLCVPDDKELKDLILTEAHQTQYSIHPGSTKMYQDLKEKFWWVSMRREIAEFVALCDVCQRVKAEHQRPAGLLQPLQIPEWKWEEIGIYFITGLPRTSSGHDSIWVVVDRLTKVAHFIPVHTTYTGKRLAELYLSRIMCLHGVPKKIVSDRGSQFTSKFWQKLQEEMGTRLNFSTAYHPQTDGQTERVNQILEDMLRACALDFGGAWDKSLPYAEFSYNNNYQASLQMAPFEALYGRKCRTPLFWDQTGERQLFGTEVLAEAEEKVRIIRERLRIAQSRQKSYADNRRRELTFEVGDYVYLRVTPLRGVHRFQTKGKLAPRFVGPYKILERRGEVAYQLELPSNMIGIHDVFHVSQLKKCLRVPEEQADSEHIDIQEDLTYVEKPVRILDTSERRTRNKVTRFCRVQWSHHSEEEATWEREDELKAAHPHLFTSSSESRGRDSV

SEQ ID NO: 18737 - protein, 1308 aa, Oryza sativa
  Clone ID: TF_OSC18656j.C1.p6.gm
MVYTRTGNRTTGEGSNGEERADGVHPNSDSGNGPPPLPENPTLAQVMAHQTQMMAAMMQQMQQQHQQMHQRMMQHAEQQHQQFGPPPPQSKLPEFLRVRPPTFSSTTNPMEANDWLHAIEKKLNLLQCNDQEKVAFATHQLQGPASAWWDNHMATRPPGTEVTWAEFCRSFRKAQVPDGVVAQKKREFRALHQGNRTVTEYLHEFNRLARYAPEDVRTDAEKQEKFMAGLDDELTNQLISGDYADFERLVDKAIRQEDQRNKMDRKRKAAQFRSNQGSQHRPRFTPGQQGGPTTMIVRQHRPFNSSNFHQGTSGSQNHQGGQPNRGAAPRPPMAPAQSGQPAQAKKETGAKPGSCFNCGELGHFADKCPKPRRAGPRFIQARVNHASAEEAQAAPEVVLVTLTNEKGETVVYKSPDSPKQGVSLNQIETEIPVDTVEKNLRKLEDIPIVCEYPEVFPEDLTTMPPKREIEFRIDLAPGTAPIYKRPYRMAANELAEVKKQVDEQLQKGYVRPSTSPWGAPVIFVEKKDKTKRMCVDYRALNEVTIKNKYPLPRIDDLFDQLKGAKVFSKIDLRSGYHQLRIREEDIPKTAFTTRYGLYECTVMSFRLTNAPAFFMNLMNKVFMEFLDKFVVVFIDDILIYSKSGEEHEQHLRLVLEKLKEHQLYAKFSKCDFWLTEVKFLGHVITAQGVAVDPSNVESVTKWTPPKTVSQIRSFLGLAGYYRRFIENFSRIARPMTQLLKKDEKFKWTAECDKSFEELKKKLVSAPVLILPDPTKDFQVYCDASRHGLGCVLMQEGRVVAYASRQLRPHEGNYPTHDLELAAVVHALKIWRHYLIGNRCEVYTDHKSLKYIFTQPDLNLRQRRWLELIKDYDMSIHYHPGKANVVADALSRKSYCTALCIEGMCEELRQEFEHLNVGIVEHGFVAALEARPTLVDQVRAAQVNDPEIAELKKNMRVGKARDFFEDEHGTIWMGERLCVPDDKELKDLILTEAHQTQYSIHPGSTKMYQDLKEKFWWVSMRREIAEFVALCDVCQRVKAEHQRPAGLLQPLQIPEWKWEEIGMDFITGLPRTSSGHDSIWVVVDRLTKEELGTRLNFSTAYHPQTDGQTERVNQILEDMLRACALDFGGAWDKSLPYAEFSYNNSYQASLQMAPFEALYGRKCRTPLFWDQTGERQLFGTEVLAEAEEKVRTIRERLRIAQSRQKSYADNRRRELTFEAGDYVYLRVTPLRGVHRFQTKGKLAPRFVGPYKILERRGEVAYQLELPSNMIGIHDVFHVSQLKKCLRVPEEQADSEHIDIQEDLTYVEKP

SEQ ID NO: 18738 - protein, 1360 aa, Oryza sativa
  Clone ID: TF_OSC18884j.C1.p4.gm
MVYTRNGTRTTGEGSNGEERTDGVHPNSDSGNGPPPLPENPTLAQVMAHQTQMMTAMMQQMQQQHQQMYQRMQQQAEQHQQQFGPPPPQSKLPEFLRVRPPTFSSTTNPMKANDWLHAIEKKLNLLQCNDQEKVAFATHQLQGPASAWWDNHMTTRPPGTEVTWAEFCRNFRKAQVLDGVVAQKKREFRALHQGNRTVTEYLHEFDRLARYAPEDVRTDAKKQEKFLAGLDDELTNQLISGDYADFERLVDKAIRQEDQHNKMDRKRKAAQFRSNQASHQRPRFIPRQQGEPTTMIVRQHRPFNSSNFHQGASGSQNHRGGQPNRSATPRPPMAPAQSAPSVQAKKETGAKPGSCFNCGELGHFADKCPKPRRAGPRFVQARVNHASTEEAQAAPEVVLVTLINEKGETVVYKSLVSPKQGVSLNQIEVEIPVVTEEKNSRKLEEIPIVCEYPEVFPEDLTTMPPKREIEFRIDLAPGTAPIYKRPYRMAANELAEVKKQVDEQLQKGYIRPSTSPWGAPVIFVEKKDKTKRMCVDYRALNEVTIKNKYPLPRIDDLFDQLKGAKVFSKIDLRSGYHQLRIREEDIPKTAFTTQYGLYECTVMSFGLTNAPAFFMNLMNKVFMEFLDKFVVVFIDDILIYSKLEEEHEQHLRLVLEKLKEHQLYAKFSKCDFWLSEVKFLGHIITAQGVAVDSSNVESVTKWTPPKTVSQIRSFLGLAGYYRRFIENFSRIARPMTQLLKKDEKFKWTAECDKSFEELKKKLVSAPVLILPDQMKDFQVYCDASRHGLGCVLMQEGRVVAYASRQLRPHEGNYPTHDLELAVVVHALKIWRHYLIGNRCEVYTDHKSLKYIFTQPDLNLRQRRWLELIKDYDMSIHYHPGKANVVADALSRKSYCNALCTEDMCEELQQELERLNVGIVEHRFVAALEARPTLVDQFRAAQVNDPEIVELKKNMRVGKARDFLEDEHRTIWMGERLCVPDDKELKDLILTEAHQTQYSIHPGSTKMYQDLKEKFWWVSMRREIAEFVALCDVCQRVKAEHQRPVGLFQPLQIPKWKWEEIGMDFITGLPRTSSGSVKGKLPKPGLTDIIDDNVLPIDPEKFTPDQKQKFEAMMQQARDQYLSSFMQTRKGMLVQKYKLKLVADNPGTGSSKDGEVKQAPDGSAQPSNKGATSGSIGNQGDNPQEVHGAPGDSICRTHDSTNSASINALTCYIGHGCSSSRSSRRHQFSRLYSRSNNRSRSQLSKHHQFSRWYGRSNNRSCSQFSKHHQRSSISNQSSKHRQGNAFSRSNGLRYDSRSFSRFSTWGQPMHRLDLQHMGGNLRSSSPPHRAVAAVGFAWSRSTQSAPPPSRSVAGARIPSHS

SEQ ID NO: 18739 - protein, 1827 aa, Oryza sativa
  Clone ID: TF_OSC19176j.C1.p1.fg
MEKPKSPLNPFSLHMFFAIGFVPGKWGSVLVVQGKNLGRSFKMAGHPPNHRGEGMIDFVAELARMTLVVGYPDAPEYTTIPPLSGELPYRVRLEVHGYVGTCLANMAVEASGGTADHACQEAAYLMMARLRERHDYIFHDTAYRYHPRRAHGDGVSSFRPTAGENDTTFGHMCAVMRGLDRMHSDLHKATKALNDGKLMRIVALKDEIARLKKENAQLKGLPAPGGVRIRTTPRKRTTAPVRIQLAPRNPPPPAAPAAPPVPPAAPAVPAVPPAPAPAPTPAFTLSFAPASAARGSASGTGGCLFGMVYTRTGSRATGEGSNGEERADGVHPNGDSGNGPPPLPENPTLAQVMAHQTQMMAAMMQQMQQQHQQMHQRMMQHAEQQHQQFGPPPPQSKLPEFLRVRPPTFSSTTNPMEANDWLHAIEKKLNLLQCNDQEKVAFATHQLQGPASAWWDNHMATRPPGTEVTWAEFCRSFRKAQVPDGVVAQKKREFRALHQGNMTVTEYLHEFNRLARYAPEDVRTDAEKQEKFMAGLDDELTNQLISGDYADFERLVDKAIRQEDQRNKMDRKRKAAQFRSNQGSQHRPRFTPGQQGGPTTMIVRQHRPFNSSNFHQGTSGSQNHQGGQPNRGAAPRPPMAPAQSAQPAQAKKETGAKPGSCFNCGELGHFADKCPKPRRAGPRFIQARVNHASAEEAQAAPEVVLGTFPVNSIPATVLFDSGATHSFISKKFVGMYGLRKDELSTPMRVRTPGNSSTSVSFSPSVLIEIQRSPFLANLILLESKDLDVILGMDWLTKFKGVIDCASRTVTLTNEKGETVVYKSPDSPKQGVSLNQIETEIPVDTVGKNLRKLEDIPIVCEYPEVFPEDLTTMPPKREIEFRIDLAPGTAPIYKRPYRMAANELAEVKKQVDEQLQKGYIRPSTSPWGAPVIFVEKKDKTKRMCVDYRALNEVTIKNKYPLPRIDDLFDQLKGAKVFSKIDLRSGYHQLRIREEDIPKTAFTTRYGLYECTVMSFGLTNAPAFFMNLMNKVFIEFLDKFVVVFIDDILIYSKSEEEHEQHLRLVLEKLKEHQLYAKFSKCDFWLTEVKFLGHVITAQGVAVDPSNVESVTKWTPPKTVSQIRSFLGLASYYRRFIENFSRIARPMTQLLKKDEKFKWTAECDKSFEELKRKLVSAPVLILPDQTKDFQVYCDASRHGLGCVLMQEGRVVAYASRQLRPHEGNYPTHDLELAAVVHALKIWRHYLIGNRCEVYTDHKSLKYIFTQPDLNLRQRRWLELIKDYDMSIHYHPGKANVVADALSRKSYCTALCIEGMCEELRQEFEHLNMGIVEHGFVAALEARPTLVDQVRAAQVNDPEIAELKKNMRVGKARDFHEDEHGTIWMGERLCVPDDKELKDLILTEAHQTQYSIHPGSTKMYQDLKEKFWWVSMRREIAEFVALCDVCQRVKAEHQRPAGLLQPLQIPEWKWEEIGMDFITGLPRTSSGHDSIWVVVDRLTKVAHFIPVHTTYTGKRLAELYLARIMCLHGVPKKIVSDRGSQFTSKFWQKLQEEMGTRLNFSTAYHPQTDGQTERVNQILEDMLRACALDFGGAWDKSLPYAEFSYNNSYQASLQMAPFEALYGRKCRTPLFWDQTGERQLFGTEVLAEAEEKVRIIRERLRIAQSRQKSYADNRRRELTFEAGDYVYLRVTPLRGVHRFQTKGKLAPRFVGPYKILERRGEVAYQLELPSTMIGIHDVFHVSQLKKCLRVPEEQADSEHIDIQEDLTYVEKPVHILDTSERRTRNKVTRFCRVQWSHHSEEEATWEREDELKAAHPYLFTSSTESRGRDSV

SEQ ID NO: 18740 - protein, 822 aa, Oryza sativa
  Clone ID: TF_OSC20350j.C1.p1.gm
GNRTMTEYLHEFNRLARYAPEDVRTDAEKQEKFMAGLDDELTNQLISGDYADFERLVDKAIRQEDQRNKMDRKRKAAQFRAPQGSHQRPRFASGQQGGPTTMIVRQYRPFNPSNFPQGARGSQNHHGGQPSSGAAPRPPTASAQSGPSAQAKKETGTKPGSCFNCGELGHFADKCPKPRRAGPRFIQARVNHASAEEAQAAPEVVLAEIPVDTVEKNLRELEDIPIVCEYPEVFPEDLTTMPPKREIEFRIDLAPGTAPIYKRPYRMAANELAEVKKQVDEQLQKGYIRPSTSPWGAPVIFVEKKDKTKRMCVDYRALNEVTIKNKYPLPRIDDLFDQLKGAKVFSKIDLRSGYHQLRIREEDIPKTAFTTRYGLYECTVMSFGLTNAPAFFMNLMNKVFMEFLDKFVVVFIDDILIYSKSKEEHEQHLRLVLEKLKEHQLYAKFSKCDFWLTEVKFLGHVITAQGVAVDPSNVESVTKWTPPKTVSQIRSFLGLAGYYRRFIENFSRIARPMTQLLKKDEKFKWTVECDKSFEELKKKLVSAPVLILPDQMKDFQVYCDASRHGLGCVLMQEGRVVAYASRLLRPHEGNYPTHDLELAAVVHALKIWRHYLIGNRCKVYTDHKSLKYIFTQPDLNLRQRRWLELIKDYDMSIHYHPGKANVVADALSRKSYCTALCIEGMCEELRQEFEHLNVGIVEHGFVAALEAWPTLVDQVRAAQVNDSEIAELKKNMRVGKARDFHEDEHGTIWLGERLCVPDDKELKDLILTEAHQTQYSIHPGSTKMYQDLKEKFWWVSMRREIAEFVALCDVCQRVKAEHQRPA

SEQ ID NO: 18741 - protein, 1461 aa, Oryza sativa
  Clone ID: TF_OSC25185j.C1.p3.fg
MVYTRNGSRATGEGSNGEERADGVHPSSDSGNGPPPLPENPTLAQVMAHQTQMMAAMMQQMQQQHQQMHQRMMQHVEQQHQQFGPPPPQSKLPEFLRVRPPTFSSTTNPMEANDWLHAIEKKLNRLQCNDQEKVAFATHQLQGPASAWWDNHMATRPPGTEVTWAEFCRSFWKAQVPDGVVAQKKREFRALHQGNRTVTEYLHEFNRLARYAPEDVRTDAEKQEKFMAGLDDELTNQLISGDYADFERLVDKAIRQEDQRNKMDRKRKAAQFRAPQGSHQRPRFAPGQQGGPTTMIVRQHRPFNPSNFPQGASGSQNHHGGQSNRGAASRPPMAPAQSGPPAQAKKETGAKPGSCFNCGELGHFADKCPKPRRAGPRFIQARVNHASAEEAQAAPEVVLGTFPVNSIPATVLFDSGATHSFISKKFVGMHLLIREELSTPMRVHTPGNSSTSVQFSPSITIEIQRSPFLANLILLESKDLDVILGMDWLTKFKGVIDCANRTVTLINEKGETVVYKSLVSPKKGVSLNQIEAEIPVDTVEKNSRKLEDIPIVCEYPEVFPEDLTTMPPKREIEFRIDLAPGTAPIYKRPYRMAANELAEVKKQVDEQLQKGYIRPSTSPLGAPVIFVEKKDKTKRMCVDYHALNEVTIKNKYPLPRIDDLFDQLKGAKVFSKIDLRSGYHQLRIREEDIPKTAFTTRYGLYECTVMSFGLTNAPAFFMNLMNKVFMEFLDKFVVVFIDDILIYSKSEEKHEQHFRLVLEKLREHQLYAKFSKCDFWLTEVKFLGHVITAQGYYRRFIENFSRIARPMTQLLKKDEKFKWTAECDKSFEELKKKLVSAPVLILPDPMKDFQVYCDASRHGLGCVLMQEGRVVAYASRQLRPHEGNYPTHDLELAAVVHALKIWRHYLIGNRCEVYTDHKSLKYIFTQPDLNLRQRRWLELIKDYDMSIHYHPGKANVVADALSRKSYCTALCIEGIRSGGTAYAQANDSEIAELKKNMSVGKARDFHEDEHGTIWLGERLCVPDDKELKDLILTEAHQTQYSIHPGSTKMYQDLKEKFWWVSMRREIAEFVALCDVCQRVKAEHQRPAGLLQPLQIPEWKWEEIGMDFITGLPRTSSGHESIWVVVDRLTKVAHFIPVHTTYTGKRLAELYLSRIMCLHGVPKKIVSDRGSQFTSKFWQKLQEELGTRLNFSTAYHPQTDGQTERVNQILEDMLRACALDFGGAWDKSLPYAEFSYNNSYQASLQMAPFEALYGRKCRTPLFWDQTGERQLFGTEVLAEAEEKVRIIRERLRIAQSRQKSYADNRRRELTFEAGDYVYLRVTPLRGVHWFQTKGKLAPRFVGLYKILERRGEVAYQLELPSNMIGTHDVFHVSQLKKCLRVPEEQADSEHIDIQEDLTYVEKPVRILDTSERRTRNKVTRFCRVQWSHHSEEEATWEREDELKAAHPHLFSSSSESRGRDSV

SEQ ID NO: 18742 - protein, 1724 aa, Oryza sativa
  Clone ID: TF_OSC25593j.C1.p1.fg
MSLQRVGALLLGAQSCLPVPGVPAVGGIGSVLLSMARMGWKLCHVFRLYTVVMAGHPPNHRGEGMIDFVAELARMTLVVGYPNAPEYTTIPPLSGELPHRVRLEVHGYVGTCLANMAVEASGGTADHACQEAAYLMMARLRERHNYIFHDTAYRFHPRRAHGDDVSSFRPTAGENDTTFGHMCTVMRGLDRMHSDLHKATKALNDGKLMRIVALKDEIARLKKENAQLKGLPAPGGVRIRTTPRKRTTAPVRIQLAPRNPVPTAAPAAPPVPPAAPAVPAAPAPAPAFDLSFALASAARGPASGTGGCLFGMVYTRTGNRTTGEGSNGEERVDGVHPNSDSGNGPPPLPENPTLAQVMAHQTQMMAAMMQQMQQQHQQMHQRMMQHAEQQHQQFGPPPPQSKLPEFLREKVAFATHQLQGPASAWWDNHMATRPPGTEVTWAEFCRSFRKAQVPDGVVAQKKREFRALHQGNRTVTEYLHEFNRLARYAPEDVRTDAEKQEKFMAGLDDELTNQLISGDYADFERLVDKAIRQEDQRNKMDRKRKAAQFRAPQGSHQRPRFTPGQQGGPTTMIVRQHRPFNSSNFHQGSSGSQNHHGGQPNRGAAPRPPMAPAQSGPPAQAKKETGAKPGSCFNCGELGHFADKCPKPRRAGPRFIQARVNHASAEEAQTAPEVVLVLFDSGATHSFISKKFVGRYGLRKEELSTPMRVHTPRNSSTSVSFSPSVLIEIQRSPFLANLILLESKDLDVILGMDWLTKFKGVIDCANRTVTLTNEKGETVVYKSPDSPKQGVSLNQIEAEIPVDTVEKNLRKLEDIPIVCEYPEVFPEDLTTMPPKREIEFRIDLAPGTAPIYKRPYRMAANELAEVKKQVDEQLQKGYIRPSTSPWGAPVIFVEKKDKTKRMCVDYRALNEVTIKNKYPLPRIDDLFDQLKGARVFSKIDLRSGYHQLRIREEDIPKTAFTTRYGLYECTVMSFGLTNAPAFFMNLMNKVFMEFLDKFIVVFIDDILIYSKSEEEHEQHLRLVLEKLKEHQLYAKFSKCDFWLTEVKFLGHVITAQGVAVDPSNVESVTKWTPPKTVSQIRSFLGLAGYYRRFIENFSRIARPMTQLLKKDEKFKWTAECDKSFEELKKKLVSAPVLILPDPTKDFQVYCDASRHGLGCVLMQEGRVVAYASRQLRPHEGNYPTHDLELAAVVHALKIWRHYLIGNRCEVYTDHKNYDMSIHYHPGKANVVADALSRKSYCTALCTEGMCEELRQEFEHLNVGIVEHGFVAALEARPTLVDQVRAAQVNDSEIVELKKNMRVGKARDFHEDEHGTIRMGERLCVPDDKELKDLILTEAHQTQYSIHPGSTKMYQDLKEKFWWVSMRREIAEFVALCDVCQRVKAEHQRPAGLLQPLQIPEWKWEEIGMDFITGLPRTSSGHDSIWVVVDRLTKVAHFIPVHTTYTGKRLAELYLARIMCLHGVPKKIVSNRGSQFTSKFWQILQEELGTRLNFSTAYHPQTDGQTERVNQILEDMLRACALDFGGAWDKSLPYAEFSYNNSYQASLQMAPFEALYGRKCRTPLFWDQTGERQLFGIEVLAEAEQKVRIIRERLRIAQSRQKSYADNRRRELTFEAGDYVYLRVTPLRGVHRFQTKGKLAPRFVGPYKILERRGEVAYQLELPSNMIGIHDVFHVSQLKKCLRVPEEQADSEHIDIQEDLTYVEKPVRILDTSERRTRNKVTRFC

SEQ ID NO: 18743 - protein, 441 aa, Oryza sativa
  Clone ID: TF_OSC26672j.C1.p1.fg
MVYTRNGTRTTGEGSNGEERTDGVHPNSDSDNSPPPLPENPTLAQVMAHQTQMMAAMMQQMQQQHQQMHQRMQQHAEQHHQQFGPPPPQSKLPEFLRVRPPTFSSTTNPMEANDWVHAIEKKLNLLQCNDQEKVAFATHQLQGPASARWDNHMATRPPGTEVTWAKFCRSFRKAQKQEKFLAGLDDELTNQLISGDYADFERLVDKAIRQEDQRNKMDRKRKAAQFRSSQGNHQRPRFTPGQQGGPTTMIVRQHRPFNSSNFHQGASGSQNHHGGQPHRGVAPRPLVAPAQSAPPAQAKKETRTKPGSCFNCGELGHFADKCPKPRRAGPRFVQARVNHASAEEAQAAPEVVLGTFPVNSIPATVLFDSGATHSFISKKFVGMNGLRKEELSTPMRVHTPGNSSTSVNFSPSVLIEIQISPFLANLILLNSKDLDVILGMD

SEQ ID NO: 18744 - protein, 460 aa, Oryza sativa
  Clone ID: TF_OSC26672j.C1.p4.gm
MVYTRNGTRTTGEGSNGEERTDGVHPNSDSDNSPPPLPENPTLAQVMAHQTQMMAAMMQQMQQQHQQMHQRMQQHAEQHHQQFGPPPPQSKLPEFLRVRPPTFSSTTNPMEANDWVHAIEKKLNLLQCNDQEKVAFATHQLQGPAKAQVPDGVVAQKKREFRALHQSNRTEKFLAGLDDELTNQLISGDYADFERLVDKAIRQEDQRNKMDRKRKAAQFRSSQGNHQRPRFTPGQQGGPTTMIVRQHRPFNSSNFHQGASGSQNHHGGQPHRGVAPRPLVAPAQSAPPAQAKKETRTKPGSCFNCGELGHFADKCPKPRRAGPRFVQARVNHASAEEAQAAPEVVLGGAHLSDPSPTSRPRRRAGNRRRAHASASSGPRSSPHRTVAADGFARPNSTPSAPPPSRSVAGTRIPSHSGELYPYRRLRPWIPAAVLVRRLPSSSRGSPSPFDVVFLRAGHPR

SEQ ID NO: 18745 - protein, 1798 aa, Oryza sativa
  Clone ID: TF_OSC26865j.C1.p1.fg
MAGHPPNHRGEGMIDFVAELARMTLVVGYPDAPEYTTIPPLSGELPHRVRLEVHGYVGTCLANMAVEASGGTADHACQEAAYLMMARLRERHNYIFHDTAYRYHPSRAHGDGVSSFRPTAGENDTTFGHMCAVMRGLDRMHSDLHKATKALNDGKLMRIVALKDEIARLKKENAQLKGLPAPGGVRIRTTPRKTTKAPVRIQLAPRNPPPAAAPAAPPVPPAAPAAPVPAAPAPAPAFVLSFAPASAVRGPASGIGGWLPATPSGSRDRSSSGSQTGSSETYLPGSRSRSEGPGCLFGMVNTRTGNRTTGEGSNGEERVDGMHPNGDPGNGPPPLPENPTLAQVMAHQTQMMAAMMQQMQQQHQQMHQRMMQYAEQQHQQFGPPPPQSKLPEFLRVRPPTFSSTTNPMEANDWLHAIEKKLNLLQCNDQEKVAFATHQLQGPASAWWDNHMATRPPGTEVTWAEFCRSFRKAQVPDGVVAQKKREFRALHQGNRTVTEYLHEFNRLARYAPEDVRTDAEKQEKFMAGLDDELTNQLISGDYADFERLVDKAIRQEDQRNKMDRKRKAAQFRAHQGSHQRPRFTPGQQGGPTTMIVRQHRPFNPSNFHQGTSGSQNHHGGQPNRGAAPRPPMAPAQSGQPTQAKKETGAKPGSCFNCGELGHFADKCPKPRRAGPRFIQARVNHASAEEAQAAPEVVLGTFPVNSIPATVLFDSGATHSFISKKFVGMHGLIREELSTPMRVHTPGNSSTSVQFSPSITIEIQRSPFLANLILLDSKGLDVILGMDWLTKFKGVIDCANRTVTLTNEKGETVVYKSLVSPRKGVSLNQIETEIPVDTVEKNSRKLDDIPIVCEYPEVFPEDLTTMPPKREIEFRIDLAPGTAPIYKRPYRMAANELAEVKKQVDEQLQKGYIRPSTSPWGAPVIFVEKKDKTKRMCVDYRALNEVTIKNKYPLPRIDDLFDQLKGAKVFSKIDLRSGYHQLRIREEDIPKTAFTTRYGLYECTVMSFGLTNAPAFFMNLMNKVFMEFLDKFVVVFIDDILIYSKSEEEHEQHLRLVLEKLKEHQLYAKFSKCDFWLTEVKFLGHVITAQGVAVDPSNVESVTKWTPPKTVSQIRSFLGLAGYYRRFIENFSRIARPMTQLLKKDEKFKWTAECDKSFEELKKKLVSAPVLILPDQMKDFQVYCDASRHGLGCVLMQEGRVVAYASRQLRPHEGNYPTHDLELAAVVHALKIWRHYLIGNRCEVYTDHKSLKYIFTQPDLNLRQRRWLELIKDYDMSIHYHPGKANVVADALSRKSYCTALCTEGMCEELRQEFEHLNIGIVEHGFVAALEARPTLVDQVRAAQVNDPEIAELKKNMRVGKARDFLEDEHGTIWMGERLCVPDDKELKDLILTEAHQTQYSIHPGSTKMYQDLKEKFWWVSMRREIAEFVALCDVCQRVKAEHQRPAGLLQPLQIPEWKWEEIGMDFITGLPRTSSGHDSIWVVVDRLTKVAHFIPVHTTYTGKRLAELYLARIMCLHGVPRKIVSDRGSQFTSKFWQKLQEELGTRLNFSTAYHPQTDGQTERVNQILEDMLRACALDFGGAWDKSLPYAEFSYNNSYQASLQMAPFEALYGRKCRTPLFWDQTGERQLFGTEVLAEAEEKVRIIRERLRIAQSRQKSYADNRRRELTFEAGDYVYLRVTPLRGVHRFQTKGKLAPRFVGPYKILERRGEVAYQLELPSNMIGIHDVFHVSQLKKCLRVPEEQADSEHIDIQEDLTYVEKPVRILDTSERRTRNKVTRFCRVQWSHHPKRKQPGKGKMS

SEQ ID NO: 18746 - protein, 1158 aa, Oryza sativa
  Clone ID: TF_OSC26925j.C1.p1.fg
MAPAQSGPSVQAKKETGAKPGSCFNCGELGHFADKCPKPRRAGPRFVQARVNHASAEEAQAAPEVVLGTFPVNSIPATVLFDSGATHSFISKKFVGMHGLRKEELSTPMRVHTPGNSSTLVSFSPSVLIEIQRSPFLANLILLESKDLDVILGMDWLTKFKGVIDCANRTVTLTNEKGEAVVYKSLVSPKQGVSLNQIEAEIPVDTVEKNLRKLEDIPIVCEYPEVFPEDLTTMPPKREIEFRIDLAPGTAPIYKRPYRMAANELAEVKKQVDEQLQKGYIRPSTSPWGAPVIFVEKKDKTKRMCVDYRALNEVTIKNKYPLPRIDDLFDQLKGAKVFSKIDLRSGYHQLRIREEDIPKTAFTTRYGLYECTVMSFGLTNAPAFFMNLMNKVFMEFLDKFVVVFIDDILIYSKSEEEHEQHLRLVLEKLKEHQLYAKFSKCDFWLTEVKFLGHVITAQGYYRRFIENFSRIARPMTQLLKKDEKFKWTAECGKSFEELKKKLVSAPVLILPDQMKDFQVYCDASRHGLGCVLMQEGRVVAYASRQLRPHEGNYPTHDLELAAVVHALKIWRHYLIGNRCEVYTDHKSLKYIFTQPDLNLRQRRWLELIKDYDMSIHYHPGEANVVADALSRKSYCTALCIEGMCEELRQEFEHLNVGIVEHRFVAALEARPTLVDQVRAAQVNDAEIAELKKNMRVGKARNFLEDEHGTIWLGERLCVPDDKELKDLILTEAHQTQYSIHPGSTKMYQDLKEKFWLVSMRREIAEFVALYDVCQRVKAGHQRPAGLLQPLQIPEWKWEEIGMDFITGLPRTSSGHDSIWVVVDRLTKVAHFIPVHTTYTGKRLVELYLSRIMCLHGVPKKIVSDRGSQFTSKFWQKLQEELGTHLNFSTAYHPQTDGQTERVNQILEDMLRACALDFGGAWDKNLPYAEFSYNNSYQASLQMAPFEALYGRKCRTPLFWDQTGERQLFGTEVLTEAEEKVRIIRERLRIAQSRQKSYADNRRRELTFEAGDYVYLRVTPLRGVHRFQTKGKLAPCFVGPYKILERRGEVAYQLELPSNMIGIHDVFHVSQLKKCLRVLEEQADSEHIDIQEDLTYVEKPVRILDTSERRTRNKVTRFCRVQWSHHSEEEATWEREDELKAAHPHLFASSSESRGRDSV

SEQ ID NO: 18747 - protein, 569 aa, Oryza sativa
  Clone ID: TF_OSC27102j.C1.p1.gm
MAHQTQMMAAMMQHQHQQMHQRMLQHAEQQHQQFGPPPPQSKLPEFLRVRPPTFSSTTNPMEANDWLHAIEKKLNLLQCNDQEKVAFATHQLQGPASAWWDNHMATRPPGNRTVTEYLHEFNRLARYAPENVRTDAQKQEKFMAEIHATKMDRKKKAAQFRAPQGSHQRPRFAPRQQGGPTTMIVGQHRPFNPSNFPQGASGSQNHHGGQSNRGAAPRPPMAPAQSGPPAQAKKETGAKPGSCFNCGELGHFADKCPKPRRAGPRFIQARVNHASAEEAQAAPEVVLVTLTNEKGETVVYKSLVSPKQGVSLNQIEAEIPVDTVEKNLRKLEDIPIVCEMAANELAEVKKQVDEQLQKGYIRPSTSPWGAPVIFVEKKDKTKRMCVDYRALNEVTIKNKYPLPRIDDLFDQLKGAKVFSKIDLRSGYHQLRIREEDIPKTAFTTRYGLYECTVMSFGLTNAPAFFMNLMNKVLMEFLDKFVVVFIDDILIYSTSEEEHEQHLRLVLEKLKEHQLYAKFSKCDFWLTEVKFLGHVITAQGVAVDPSNVESVTKWTPPKTVSQIRSFLGLA

SEQ ID NO: 18748 - protein, 874 aa, Oryza sativa
  Clone ID: TF_OSC27726j.C1.p2.gm
MVYTRNGTRTTGEGSNGEERTDGVHPNSDSDNSPPPLPENPTLAQVMAHQTQMMAAMMQQMQQQHQQMHQRMQQHAEQHHQQFGPPPPQSKLPEFLRVRPPTFSSTTNPMEANDWVHAIEKKLNLLQCNDQEKVAFATHQLQGPAKAQVPDGVVAQKKREFRALHQSNRTEKFLAGLDDELTNQLISGDYADFERLVDKAIRQEDQRNKMDRKRKAAQFRSSQGNHQRPRFTPGQQGGPTTMIVRQHRPFNSSNFHQGASGSQNHHGGQPHRGVAPRPLVAPAQSAPPAQAKKETRTKPGSCFNCGELGHFADKCPKPRRAGPRFVQARVNHASAEEAQAAPEVVLEVKKQVDEQLQKWCIRTSTSPWGAPVIFVEKKDKTKRMCVDYRALNEVTIKNKYPLPRIDDLFDQLKGAKEHELYAKFSKCDFWLTEVKFLGHVITAQGVAVDPSNVESVTKWTPPKTVSQIRSFLGLAGYYRRFIENFSRIARPMTQLLKKDEKFKWTAECDKSFEELKKKLVSAPVLILPDQMKDFQVYCDASRHGLGWKANVVADALSRKSYCTALCIEGMCEELQQLFERLNVGIVEQGFVAALETRPTLVDQVRAAQVNDPEIAELKKNMRVGKARDFLEDEHGTIWMGERLCVPDDKELKDMILTEAHQTQYSIHPGSTKMYQDLKEKLWWVSMRREIVEFVALCDVCQRVKAEHQRPAGLLQPLKIPEWKWEEIGMDFITRLPRTSSEVLAEAEEKVITIRERLRIAQSRQKSYADNRRRELTFEAGDYANSEHIDIQEDLTYVEKPIRILKTSERRTRNKVTRVVATPHRRRRRVREAELHPVRPSSVEGIPKLVRRLPSSSRGSPSPFDVVFLRAGHPR

SEQ ID NO: 18749 - protein, 1777 aa, Oryza sativa
  unsure (1)..(1777): unsure at all Xaa locations
  Clone ID: TF_OSC27726j.C1.p2.np
MAEHPPNHRGEGMDDFVAELARMTLVVGYPNAPEYTTVPPLSGELPHRVRLEVHGYVGTCLANMVVEASGGTADHACQEAAYLMMARVRERHNYIFHDTAYRIHPRRASGSDVSSFRPTAGKNDTTFVHMCAVMRGMDRMHSDLHKASKALNDGKLVRIIALKDEIARLKRENAQLKGLPTPRGVRIRTTPRKSTTAPMRIQLAPRYPPPSAAPAAPPAPPAAPAAPAPVPVSAPASALSFAPASAVRGPASGNGGCFLXMVYTRNGTRTTGEGSNGEERTDGVHPNSDSDNSPPPLPENPTLAQVMAHQTQMMAAMMQQMQQQHQQMHQRMQQHAEQHHQQFGPPPPQSKLPEFLRVRPPTFSSTTNPMEANDWVHAIEKKLNLLQCNDQEKVAFATHQLQGPASARWDNHMATRPPGTEVTWAKFCRSFRKAQVPDGVVAQKKREFRALHQSNRTVTEYLHEFNRLARYAPEDVRTDAXKQEKFLAGLDDELTNQLISGDYADFERLVDKAIRQEDQRNKMDRKRKAAQFRSSQGNHQRPRFTPGQQGGPTTMIVRQHRPFNSSNFHQGASGSQNHHGGQPHRGVAPRPLVAPAQSAPPAQAKKETRTKPGSCFNCGELGHFADKCPKPRRAGPRFVQARVNHASAEEAQAAPEVVLGTFPVNSIPATVLFDSGATHSFISKKFVGMNGLRKEELSTPMRVHTPGNSSTSVNFSPSVLIEIQISPFLANLILLNSKDLDVILGMDXLTKFKGVIDCANRTVALTNEKGETVVFKSLVSPKQGVSLNXIEAEIPVVTVEKNSRKLDEIPIAGEYPKVFPEDLTTMPPKREIEFWIDLAPGTTPIYKRPXRMAANELAEVKKQVDEQLQKWCIRTSTSPWGAPVIFVEKKDKTKRMCVDYRALNEVTIKNKYPLPRIDDLFDQLKGAKVFSKIDLRSGYHXLRIREEDIPKTTFTTRYGLYECTVMSFGLTNAPAFFMNLMNKVFMEFLDKFVVVFIDDILIYSKSEEEHEQHLRLVLEKLKEHELYAKFSKCDFWLTEVKFLGHVITAQGVAVDPSNVESVTKWTPPKTVSQIRSFLGLAGYYRRFIENFSRIARPMTQLLKKDEKFKWTAECDKSFEELKKKLVSAPVLILPDQMKDFQVYCDASRHGLGCVLMQEGRVVAYASRQLRPHEGNYPTHDLQLAAVVHALNIXRHYLIGNRCEVYTDHKSLKYIFTQPDLNLRQRRXLELIKDYDMSIHYHPGKANVVADALSRKSYCTALCIEGMCEELQQLFERLNVGIVEQGFVAALETRPTLVDQVRAAQVNDPEIAELKKNMRVGKARDFLEDEHGTIWMGERLCVPDDKELKDMILTEAHQTQYSIHPGSTKMYQDLKEKLWWVSMRREIVEFVALCDVCQRVKAEHQRPAGLLQPLKIPEWKWEEIGMDFITRLPRTSSGHDSIWVVVDRLTKVAHFIPVHTTYTGKKLAELYLARIMCLHGVPKKIVSDRGSQFTSKFWQKLQEELGTRLNFSTANHPXTDGQTERVSQILEDMLRACALDFGGAWDKSLPYAEFSYNNSYQASLQMAPFEALYGRKCRTPLFWDQTGERQLFGTEVLAEAEEKVITIRERLRIAQSRQKSYADNRRRELTFEAGDYVYLRVTPLRGVHRFQTKGKLAPRFVGPYKILERRGEVAYQLELPSNMIGIHDVFHVSQLKKCLRVPEEQANSEHIDIQEDLTYVEKPIRILKTSERRTRNKVTRFCRVQWSHHSEEEATWKREDELKVAHPHLFANSSESRG

SEQ ID NO: 18750 - protein, 1128 aa, Oryza sativa
  Clone ID: TF_OSC29445j.C1.p1.fg
MIVRQHRPFNPSNFHQGTSGSQNHHGGQPNRGAAPRPPMAPAQSGQPAQAKKETGAKPGSCFNCGELGHFADKCPKPRRAGPRFIQARVNHASAEEAQAAPEVVLGTFPVNSIPATVLFDSGATHSFISKKFVGMHGLIREELSTPMRVHTPGNSSTSVQFSPSITIEIQRSPFLANLILLESKDLDVILGMDWLTKFKGVIDCANRTVTLTNEKGETVEPLQSIRDRIEWRLNELAEVKKQVDEQLQKGYIRPSTSPWGAPVIFVDKKDKTKRMCVDYRALNEVTIKNKYPLPRIDDLFDQLKGAKVFYKIDLRSGYHHLRIREEDIPKTAFTTRYGLYECTVMSFGLTNAPAFFMNLMNKVFMEFLDKFVVVFIDDILIYSKSEEEHEQHLRLPQGVAVDPSNVESVTKWTPPKTVSQIRSFLGLAGYYRRFIENFSRIARPMTQLLKKDEKFKWTAECDKNFEELKRKLVSAPVLILPDQTKDFQVYCDASRHGLGCVLMQEGRVVAYASRQLRPHEGNYPTHDLELAAVVHALKIWRHYLIGNRCEVYTDHKSLKYIFTQPDLNLRQRRWLELIKDYDMSIHYHPGKANVVADALSRKSYCTALCIEDMCEELRQELEHLNMGIVEHGFVAALEARPTLVDQVRAAQVNDPEIAELKKNMRVGKARDFLEDEHGTIWMGERLCVPDDKELKDLILTEAHQTQYSIHPGSTKMYQDLKEKFWWVSMRREIAEFVALCDVCQRVKAEHQRPAGLLQPLQIPEWKWEEIGMDFITGLPRTSSGHDSIWVVVDRLTKVAHFIPVHTTYTGKRLAELYLARIMCLHGVPKKIVSDRGSQFTSKFWQKLQEELGTRLNFSTAYHPQTDGQTERVNQILEDMLRACALDFGGAWDKSLPYAEFSYNNSYQASLQMAPFEALYGRKCRTPLFWDQTGERQLFGTEVLAEAEEKVRIIRERLRIAQSRQKSYADNRRRELTFEAGDYVYLRVTPLRGVHRFQTKGKLAPRFVGPYKILERRGEVAYQLELPSNMIGIHDVFHVSQLKKCLRVPEEQADSEHIDIQEDLTYVEKPVRILDTSERRTRNKVTRFCRVQWSHHSEEEATWEREDELKAAHPHLFTSSSESRGRDSV

SEQ ID NO: 18751 - protein, 1064 aa, Oryza sativa
  Clone ID: TF_OSC30155j.C1.p4.gm
MVYTRTGSRATGEGSNGEERADGVHPNGDSGNGPPPLPENPTLAQVMAHQTQMMAAMMQQMQQQHQQMHQRMMQHAEQQHQQFGPPPPQSKLPEFLRVRPPTFSSTTNPMEANDWLHAIEKKLNLLQCNDQEKVAFATHQLQEFCRSFRKAQVPDGVVAQKKREFRALHQGNRTVTEYLHEFNRLARYAPEDVRTDAEKQEKFMAGLDDELTNQLISGDYADFERLVDKAIRQEDQRNKMDRKRKAAQFRSNQGSQHRPRFTPGQQGGPTTMIVRQHRPFHSSNFHQGASGSQNHQGGQPNRGAAPRPPMAPAQSAQPAQAKKETGAKPGSCFNCGELGHFADKCPKPRRAGLRFIQARVNHASAEEAQAAPEVVLVTLTNEKGETVVYKSLVSPKKGASLNQIETEIPVDTEEKNLRKLEDIPIVCEYPEVFPEDLTTMPPKREIEFRIDLAPGTAPIYKRPYRMAANELAEVKKQVDEQLQKGYIRPSTSPWGAPVIFVEKKDKTKRMCVDYRALNEVTIKNKYPLPRIDDLFDQLKGAKVFSKIDLRSGYHQLRIREEDIPKTAFTTRYGLYECTVMSFGLTNAPAFFMNLMNKVFMEFLDKFVVVFIDDILIYSKSEEEHEQHLRLVLEKLKEHQLYAKFSKCDFWLTEVKFLGHVITAQGVAVDPSNVESVTKWTPPKTVSQIRSFLGLAGYYRRFIENFSRIARPMTQLLKKDEKFKWTAECDKSFEELKRKLVSAPVLILPDQTKDFQVYCDASRHGLGCVLMQEGRVVAYASRQLRPHEGNYPTHDLELAAVVHALKIWRHYLIGNRCEVYTDHKSLKYIFTQPDLNLRQRRWLELIKDYDMSIHYHPGKANVVADALSRKSYCTALCIEGMCEELRQEFEHLNVGIVEHGFVAALEARPTLVDQVRAAQVNDPEIAELKKNMRVGKARDFHEDEHGTIWMGERLCVPDDKELKDLILTEAHQTQYSIHPGSTKMYQDLKEKFWWVSMRREIAEFVALCDVCQRVKAEHQRPAGLLQPLQIPEWKWEEIGMDFITGLPRTSSGHDSIWVVVDRLTK

SEQ ID NO: 18752 - protein, 1777 aa, Oryza sativa
  unsure (1)..(1777): unsure at all Xaa locations
  Clone ID: TF_OSC32699j.C1.p2.np
MAGHPPNHRGEGMIDFVAELARMTLVVGYPDAPEYTTIPPLSGELPHRVRLEVHGYVGTCLANMAVEASGGTADHACQEAAYLMMARLRERHNYIFHGTAYRYHPSRAHGDGVSSFRPTAGENDTTFGHMCAVMRGLDRMHSDLHKATKALNDGKLMRIVALKDEIARLKKENAQLKGLPAPGGVRIRTTPRKRTTAPVRIQLAPRNPPPPAAPAAAPAPPAVPAAPAPAPAFTLSFAPASAARGSASGTGGWLFQMVYTRTGNRTTGEGSNGEERVDGVHPNGDPGNGPPPPPENPTLAQVMAHQTQMMAAMMQQMQQQHQQMHQRMMQYAEQQHQQFGPPPPQSKLPEFLRVRPPTFSSTTNPMEANDWLHAIEKKLNLLQCNDQEKVAFATHQLQGPASAWWDNHMATRPPGTEVTWAEFCRSFRKAQVPDGVVAQKKREFRALHQGNRTVTEYLHEFNRLARYAPEDVRTDAEKQEKFMAGLDDELTNQLISGDYADFERLVDKAIRQEDQRNKMDRKRKAAQFRSNQGSQHRPRFTPGQQGGPTTMIVRQHRPFHSGNFHQGASGSQNHQGGQPNRGAAPRPPMAPAQSAQPAQAKKETGAKPGSCFNCGELGHFADKCPKPRRAGPRFIQARVNHASAEEAQAAPEVVLGTFPVNSIPATVLFDSGATHSFISKKFVGVHGLIREELSTPMRVHTPGNSSSSVQFSPSITIEIQGSPFLANLILLESKDLDVILGMDWLTKFKGVIDCANRTVTLTNEKGETVVYKSLVSPKKGASLNQIETEIPVDTEEKNLRKLEDIPIVCEYPEVFPEDLTTMPPKREIEFRIDLAPGTAPIYKRPYRMAANELAEVKKQVDEQLQKGYIRPSTSPWGAPVIFVEKKDKTKRMCVDYRALNEVTIKNKYPLPRIDDLFDQLKGAKVFSKIDLRSGYHQLRIREEDIPKTAFTTRYGLYECTVMSFGLTNAPAFFMNLMNKVFMEFLDKFVVVFIDDILIYSKSEEEHEQHLRLVLEKLKEHQLYAKFSKCDFWLTEVKFLGHVITAQGVAVDPSNVESVTKWTPPKTVSQIRSFLGLAGYYRRFIENFSRIARPMTQLLKKDEKFKWTAECDKSFEELKRKLVSAPVLILPDQTKDFQVYCDASRHGLGCVLMQEGRVVAYASRQLRPHEGNYPTHDLELAAVVHALKIWRHYLIGNRCEVYTDHKSLKYIFTQPDLNLRQRRWLELIKDYDMSIHYHPGKANVVADALSRKSYCTALCIEGMCEELRQELEHLNMGIVEHGFVAALEARPTLVDQVRAAQVNDPEIAELKKNMRVGKARDFLEDEHGTIWMGERLCVPDDKELKDLILTEAHQTQYSIHPGSTKMYQDLKEKFWWVSMRREIAEFVALCDVCQRVKAEHQRPAGLLQPLQIPEWKWEEIGMDFITGLPRTSSGHDSIWVVVDRLTKVAHFIPVHTTYTGKRLAELYLARIMCLHGVPKKIVSDRGSQFTSKFWQKLQEELGTRLNFSTAYHPQTDGQTERVNQILEDMLRACALDFGGAWDKSLPYAEFSYNNSYXASLQMAPFEALYGRKCRTPLFWDQTGERQLFGTEVLAEAEEKVRIIRERLRIAQSRQKSYADNRRRELTFEAGDYVYLRVTPLRGVHRFQTKGKLAPRFVGPYKILERRGEVAYQLELPSNMIGIHDVFHVSQLKKCLRVPEEQADSEHIDIQEDLTYVEKPVRILDTSERRTRNKVTRFCRVQWSHHSEEEATWEREDELKAAHPYLFTSSSESRGRDSV

SEQ ID NO: 18753 - protein, 1568 aa, Oryza sativa
  Clone ID: TF_OSC32884j.C1.p1.fg
MRGLDRMHSDLHKATKALNDGKLMRIVALKDEIARLKKENAQLKGLPAPGGVRIRTTPRKTTTAPVRIQLAPRNPPPAATPAAPPVPPAVPAAPAPAPESALSFAPASAARGPASGTGGCLFGMVYTRTGSRATGEGSNGEERANGVHPSSDSGNGPPPLPENPTLAQVMAHQTQMMAAMMQQMQQQHQQMHQRMMQHAEQQHQQFGPPPPQSKLPEFLRVRPPTFSSTTNPMEANDWLHAIEKKLNLLQCNDQEKVAFATHQLQGPASAWWDNHMATRPPGTEVTWVEFCRSFRKAQVPDGVMAQKKREFRALHQGNRTVTEYLHEFNRLARYATENVRTDAEKQEKFMAGLDDELTNQLISGDYADFEWLVDKAIRQEDQRNKMDRKRKAAQFRAPQGSHQRPRFTPGQQGGPTTMIVRQHRPFNSSNFHQGSSGSQNHHGGQPNRGAAPRPPMAPAQSGPPAQAKKETGAKPGSCFNCGELGHFADKCPKPRRAGPRFIQARVNHASAEEAQTAPEVVLGTFPVNSIPATVLFDSGATHSFISKKFVGMYGLRKEELSTPMRVHTPGNSSTSVSFSPSVLIEIQRLPFLANLILLESKYLDVILGMDWLTKFKGVIDCANRTVTLTNEKGETVVYKSLAPPKQGVSLNQIEMEVPVVTEEKNLKKLEDIPIVSEYPEVFPEDLTTIPPKREIEFRIDLAPGTAPIYKRPYRMAANELAEVKKQVDEQLQKGYIRPSTSPWGAPVIFVEKKDKTKRMCVDYRALNELRIREEDIPKTAFTTRYGLYECTVMSFGLTNAPAFFMNLMNKVFMEFLDKFVVVFIDDILIYSKSEEEHEQHLRLVLEKLKEHQLYAKFNKCDFWLTEVKFLGHVITAQGVAVDPSNVESVTKWTPPKTVSQIRSFLGLAGYYRRFIENFSRIARPMTQLLKKDEKFKWTAECDKSFEELKKKLVSAPVLILPDPTKDFQVYCDASRHGLGCVLMQEGRVVAYASRQLRPHEGNYPTHDLELAAVVHALKIWRHYLIGNRCEIYTDHKSLKYIFTQPDLNLRQRRWLELIKDYDMSIHYHPGKANVVADALSRKSYCTALCIEGMCEELRQEFGHLNVGIVEHRFVAALEARPTLVDQVRAAQVNDPEIAELKKNMRVGKARDFLEDEHGTIWMVERLCVPDDKELKDLILTEAHQTQYSIHPGSTKMYQDLKEKFWWVSMRREIAEFVALCDVCQRVKAEHQRPAGGSLYTSAYHLYGKRLAELYLARIMCLHGVPKKIVSDRGSQFTSKFWQKLQEELGTRLNFSTAYHPQTDGQTERVNLILEDMLRACALDFGGAWDKSLPYAEFSYNNSYQASLQMAPFEALYGRKLYTAICALFWDQTGERQLFGTEVLAEVEEKVRIIRERLRIAQSRQKSYADNRRRELTFEEGDYVYLRVTPLRGVHHFQTKGKLAPRFVGPYKILERRGEVAYQLELPSNMIGIHDVFHVSQLKKCLRVPEEQVDSEHIDIQEDLTYVEKPVRILDTSERRTRNKVTRFCRVQWNHHSEEEATWEREDELKAAHPHLFTSSSESRGRDSV

SEQ ID NO: 18754 - protein, 1719 aa, Oryza sativa
  Clone ID: TF_OSC34305j.C1.p1.fg
MAVEASGGTADHACQEAAYLMMARLRERHNYIFHDTAYRYHPSRANGDGVSSFRPTAGENDTTFGHMCAVMRGLDRMHSDLHKATKALNDGKLMRIVALKDEIARLKKENAQLKGLPAPGGVRIRTTPRKTTTAPVRIQLAPRNPPPAAAPAAPPVPPAVPAAPAPAPAPAPASALSFAPASAARGPASGTGGWLSATPSGSRDLSSSSSSGSQSGSGETYLPGSRSRSEGPGCLFGSDDGRYHVPMMVYTRTGNRTTGEGSNGEERVDGVHPNSDSGNGPPPLPENPTLAQVMAHQTQMMAAMMQQMQQQHQQMHQRMMQHVEQQHQHFGPPPPQSKLPEFLGVRPPTFSSTTNPMEANDWLHAIEKKLNLLQCNDQEKVAFATHQLQGPASAWWDNHMATRPPGTEVTWAEFCRSFRKAQVPDGVVAQKKREFRALHQGNRTVTEYLHEFNRLTRYAPEDVRTDAEKQEKFMAGLDDELTNQLISGYYADFERLVDKAIRQEDQRNKMDRKRKAAQFRAHQGSHQRPRFTPGQQGGPTTMIVRQHRPFNPSNFYQGTSDSQNHHGGQPNRGAAPRPPVASAQSGQPAQAKKETEAKPGSCFNCGELGHFADKCPKPRRAGPRFIQARVNHASAEEAQAAPEVVLGTFPVNSIPATVLFDSGATHSFISKKFVGMHGLIREELSTPMRVHTPGNSSTSVQFSPSITIEIQRSPVLANLILLESKDLDVILGMDWLTKFKGVIDCANRTVTLTNEKGETVVYKSLVSPKKGVSLNQIETEIPVDTVEKNLRKLDDIPIVCEYPEVFPEDLTTMPPKREIEFRIDLAPGTAPIYKRPYRMAANELTEVKKQVDEQLQKGYIRPSTSPWGAPVIFVEKKDKTKRMCVDYRALNEVTIKNKYPLPRIDDLFDQLKGAKVFSKIDLRSGYHQLRIREEDIPKTAFTTRYGLYECTVMSFGLTNAPAFFMNLMNKVFIEFLDKFVVVFIDDILIYSKSEEEHEQHLRLVLEKLKEHQLYAKFSKCDFWLTEVKFLGHVITAQGVAVDPSNVESVTKWTPPKTVSQIRSFLGLAGYYRRFIGNFSRIARPMTQLLKKDEKFKWTAECDKSFEELKKKLVSAPVLILPDQMKDFQVYCDASRHGLGCVLMQEGRVVAYASRQLRPHEGNYPTHDLELAAVVHALKIWRHYLIGNRCEVYTDHKSLKYIFTQPDLNFRQRRWLELIKDYDMSIHYHPGKANVVADALSRKSYCTALCIESMCEELRQEFEHLNIGIVEHGFVAALEARPTLVDQVRAAQVNDPEIAELKKNMRVGKARDFLKDEHGTIWMGERLCVPDDKELKDLILTEAHQTQYSIHPGSTKMYQDLKEKFWWVSMRREIAEFVALCDVCQRVKAEHQRPTVHTTYTGKRLAELYLSRIMCLHGVLKKIVSDRGSQFTSKFWQKLQEELGTRLNFSTAYHPQTDGQTERVNQILEDMLRACALDFGGAWDKSLPYAEFSYNNSYQASLQMAPFEALYGRKCRTPLFWDQTGERQLFGTEVLAEAEEKVRIIRERLRIAQSRQKSYADNRRRELTFEAGDHVYLRVTPLRGVHRFQTKGKLAPRFVGPYKILERRGEVAYQLELPSNMIGIHDVFHVSQLKKCLRVPEEQADSEHIDIQEDLTYVEKPVRILDTSERRTRNKVTRFCRVQWSHHSEEEATWEREDELKAAHPHLFTSSSESRGRDSV

SEQ ID NO: 18755 - protein, 1084 aa, Oryza sativa
  Clone ID: TF_OSC34569j.C1.p1.gm
MVYTRTGNRTTGEGSNGEERADGVHPNSDSGNGPPPLPENPTLAQVMAHQTQMMAAMMQQMQQQHQQMHQRMMQHAEQQHQQFGPPPPQSKLPEFLRVRPPTFSSTTNPMEANDWLHAIEKKLNLLQCNDQEKVAFATHQLQGPASAWWDNHMATRPPGTEVTWAEFCRSFRKAQVPDGVVAQKKREFRELHQGNRTVTEYLHEFNRLARYAPEDVRTDAEKQEKFMAGLDDELTNQLISGDYADFERLVDKAIRQEDQRNKMDRKRKAAQFRAHQGSHQRLRFTPGQQGGPTTMIVRQHRPFNPSNFHQGSSGSQNHHGSQPNRGTAPRPPMAPAQSGPPAQAKKETGAKPGSCFNCGELGHFADKCPKPRRAGPRFIQARVNHASAEEAQAAPEVVLVTLTNEKGETVVYKSLVSPKKGASLNQIETEIPVDIEEKNLRKLEDIPIVCEYPEVFPEDLTTMPPKREIEFRIDLAPGTAPIYKRPYRMAANELAEVKKQVDEQLQKGYIRPSTSPWGAPVIFVEKKDKTKRMCVDYRALNEVTIKNKYPLPRIDDLFDQLKGAKVFSKIDLRSGYHQLRTREEDIPKTAFTTRYGLYECTVMSFGLTNAPAFFMNLMNKVFMEFLDKFVVVFIDDILIYSKSEEEHEQHLRLVLEKLKEHQLYAKFSKCDFWLTEVKFLGHVITAQGVAVDPSNVESVTKWTPPKTVSQIRSFLGLAGYYRRFIENFSRIARPMTQLLKKDEKFKWTAECDKSFEELKRKLVSAPVLILPDQTKDFQVYCDASRHGLGCVLMQEGRVVAYASRQLRPHEGNYPTHDLELAAVVHALKIWRHYLIGNRCEVYTDHKSLKYIFTQPDLNLRQRRWLELIKDYDMSIHYHPGKANVVADALSRKSYCTALCIEGMCEELRQEFEHLNVGIVEHGFVAALEARPTLVDQVRAAQVNDPEIAELKKNMRVGKARDFLEDEHGTIWMGERLCVPDDKELKDLILTEAHQTQYSIHPGSTKMYQDLKEKFWWVSMRREIAEFVALCDVCQRVKAEHQRPAGGGPTLSDPGFPPSRRSPLAASHPALPDAVAGGLRFLPGH

SEQ ID NO: 18756 - protein, 1785 aa, Oryza sativa
  Clone ID: TF_OSC400177j.C1.p45.fg
MAGHPPNHRGEGMIDFVAELARMTLVVGYPDAPEYTTIPPLSGELPHRVRLEVHGYVGTCLANMAVEASGGTADHACQEAAYLMMARLRERHDYIFHDTAYRYHPRRAHGDGVSSFRPTAGENDTTFGHMCAVMRGLDRMHSDLHKATKALNDGKLMRIVALKDEIARLKKENAQLKGLPAPGGVRIRTTPRKRTTAPVRIQLAPRNPPPPAAPAAPPVPPAAPAVPAVPPAPAPAPAPAFTLSFAPASAARGPASGTGGCLFGMVYTRTGNRTTGEGSNGEERVDGVHPNSDSGNGPPPLPENPTLAQVMAHQTQMMAAMMQQMQQQHQQMHQRMMQHAEQQHQQFGPPPPQSKLPEFLRVRPPTFSSTTNPMEANDWLHAIEKKLNLLQCNDQEKVAFATHQLQGPASAWWDNHMATRPPGTEVTWAEFCRSFRKAQVPDGVVAQKKREFRALHQGNRTVTEYLHEFNRLARYAPEDVRTDAEKQEKFMAGLDDELTNQLISGDYADFERLVDKAIRQENQRNKMDRKRKAAQFRAPQESHQRSRFTPGQQGGPTTMIVRQHRPFNPSNFHQGSSGSQNHHGSQPNRGTAPRPPMAPAQSGQPAQAKKETGAKPGSCFNCGELGHFADKCPKPRRAGPRFIQARVNHASAEEAQAAPEVVLGTFPVNSIPATVLFDSGATHSFISKKFVGMHGLIREELSTPMRVHTPGNSSTSVQFSPSITIEIQRSPFLANLILLESKDLDVILGMDWLTKFKGVIDCANRTVTLTNEKGETVVYKSLVSPKKGASLNQIETEIPVDAEEKNLRKLEDIPIVCEYPEVFPEDLTTMPPKREIEFRIDLAPGTAPIYKRPYRMAANELAEVKKQVDEQLQKGYIRPSTSPWGAPVIFVEKKDKTKRMCVDYRALNEVTIKNKYPLPRIDDLFDQLKGAKVFSKIDLRSGYHQLRIREEDIPKTAFTTRYGLYECTVMSFGLTNAPAFFMNLMNKVFMEFLDKFVVVFIDDILIYSKSEEEHEQHLRLVLEKLKEHQLYAKFSKCDFWLTEVKFLGHVITAQGVAVDPSNVESVTKWTPPKTVSQIRSFLGLAGYYRRFIENFSRIARPMTQLLKKDEKFKWTAECDKSFEELKRKLVSAPVLILPDQTKDFQVYCDASRHGLGCVLMQEGRVVAYASRQLRPHEGNYPTHDLELAAVVHALKIWRHYLIGNRCEVYTDHKSLKYIFTQPDLNLRQRRWLELIKDYDMSIHYHPGKANVVADALSRKSYCTALCIEGMCEELRQELEHLNMGIVEHGFVAALEARPTLVDQVRAAQVNDPEIAELKKNMRVGKARDFLEDEHGTIWMGERLCVPDDKELKDLILTEAHQTQYSIHPGSTKMYQDLKEKFWWVSMRREIAEFVALCDVCQRVKAEHQRPAGLLQPLQIPEWKWEEIGMDFITGLPRTSSGHDSIWVVVDRLTKVAHFIPVHTTYTGKRLAELYLARIMCLHGVPKKIVSDRGSQFTSKFWQKLQEELGTRLNFSTAYHPQTDGQTERVNQILEDMLRACALDFGGAWDKSLPYAEFSYNNSYQASLQMAPFEALYGRKCRTPLFWDQTGERQLFGTEVLAGAEEKVRIIRERLRIAQSRQKSYADNRRRELTFEAGDYVYLRVTPLRGVHRFQTKGKLAPRFVGPYRILERRGEVAYQLELPSNMIGIHDVFHVSQLKKCLRVPEEQADSEHIDIQEDLTYVEKPVRILDTSERRTRNKVTRFCRVQWSHHSEEEATWEREDELKAAHPYLFTSSSESRGRDSV

SEQ ID NO: 18757 - protein, 1521 aa, Oryza sativa
  Clone ID: TF_OSC400177j.C1.p63.fg
MVYTRTGNRTTGEGSNGEERADGVHPNSDSGNGPPPLPENPTLAQVMAHQTQMMAAMMQQMQQQHQQMHQRMMQHAEQQHQQFDPPPPQSKLPEFLRVRPPTFSSTTNPMEANDWLHAIEKKLNLLQCNDQEKVAFATHQLQGPASAWWDNHMATRPPGTEVTWAEFCRSFRKAQVPDGVVAQKKREFRALHQGNRTVTEYLHEFNRLARYAPEDVRTDAEKQEKFMAGLDDELTNQLISGDYADFERLVDKAIRQEDQRNKMDRKRKAAQFRSNQGSQHRPRLTPGQQGGPTTMIVRQHRPFNSSNFHQGTSGSQNHHGSQPNRGTAPRPPMAPAQSGQPAQAKKETGAKPGSCFNCGELGHFADKCPKPRRAGPRFIQARVNHASAEEAQAAPEVVLGTFPVNSIPATVLFDSGATHSFISKKFVGMHGLIREELSTPMRVHTPGNSSTSVQFSPSITIEIQRSPFLANLILLESKDLDVILGMDWLTKFKGVIDCANRTVTLTNEKGETVVYKSLVSPKKGASLNQIETEIPVDAEEKNLRKLEDIPIVCEYPEVFPEDLTTMPPKREIEFRIDLAPGTAPIYKRPYRMAANELAEVKKQVDEQLQKGYIRPSTSPWGAPVIFVEKKDKTKRMCVDYRALNEVTIKNKYPLPRIDDLFDQLKGAKVFSKIDLRSGYHQLRIREEDIPKTAFTTRYGLYECTVMSFGLTNTPAFFMNLMNKVFMEFLDKFVVVFIDDILIYSKSEEEHEQHLRLVLEKLKEHQLYAKFSKCDFWLMEVKFLGHVITAQGVAVDPSNVESVTKWTPPKTVSQIRSFLGLAGYYRRFIENFSRIARPMTQLLKKDEKFKWTAGCDKSFEELKRKLVSAPVLILPDQTKDFQVYCDASRHGLGCVLMQEGRVVAYASRQLRPHEGNYPTHDLELAAVVHALKIWRHYLIGNRCEVYTDHKSLKYIFTQPDLNLRQRRWLELIKDYDMSIHYHPGKANVVADALSRKSYCTALCIEGMCKELRQELEHLNMGIVEHGFVAALEARPTLVDQVRAAQVNDPEIAELKKNMRVGKARDFLEDEHGTIWMGERLCVPDDKELKDLILTEAHQTQYSIHPGSTKMYQDLKEKFWWVSMRREIAEFVALCDVCQRVKAEHQRPAGLLQPLQIPEWKWEEIGMDFITGLPRTSSGHDSIWVVVDRLTKVAHLIPVHTTYTGKRLAELYLARIMCLHGVPKKIVSDRGSQFTSKFWQKLQEELGTRLNFSTAYHPQTDGQTERVNQILEDMLRACALDFGGAWDKSLPYAEFSYNNSYQASLQMAPFEALYGRKCRTPLFWDQTGERQLFGTEVLAEAEEKVRIIRERLRIAQSRQKSYADNRRRELTFEAGDYVYLRVTPLRGVHRFQTKGKLAPRFVGPYKILERRGEVAYQLELPSNMIGIHDVFHVSQLKKCLRVPEEQADSEHIDIQEDLTYVEKPVRILGTSERRTRNKVTRFCRVQWSHHSEEEATWEREDELKAAHPYLFTSSSESRGRDSA

SEQ ID NO: 18758 - protein, 1138 aa, Oryza sativa
  Clone ID: TF_OSC400432j.C1.p20.fg
MEANDWLHDIEKKLNLLQCNDQEKVAFATHQLQGPASAWWDNHMATRPPGTEVTWAEFCRSFRKAQVPDGVVAQKKREFRALHQGNRTVTEYLHEFNRLARYAPEDVRTDAEKQKKFMAGLDDELTNQLISGDYADFERLVDKAIRQEDQRNKMDRKRKAAQFRSNQGNHQRPRFAPGQQGGPTTMIVRQYRPFNPSNFHQGASGSQNHHGGQPNRGAAPRLPVAPAQSGPSAQAKKETGTKPGSCFNCGELGHFADKCPKPRCAGPRFVQARVSHASAEEAQAAPEVVLGTFPVNSIPATVLFDSGATHSFISKKFVGMHGLRKEELNTPMRVHTPGNSSTSVSFSPSVLIEIQRSPFLANLILLESKDLDVILGMDWLTKFKGVINCANRIVTLTNEKGETAVYKSLVSPKQGVALNQMEAEIPVVTEEKNPRKLEEIPIVCEYPEVFPEDLTTMPPKREIEFRIDLAPGTAPIYKRPYRMAANELAEVKKQVDEQLQKGYIRPSTSPWGAPVIFVEKKDKTKRMCVDYRALNEVTIKNKYPLPRIDDLFDQLKGAKVFSKIDMRSGYHQLRIREEDISKTAFTTRYGLYECTVMSFGLTNAPAFFMNLMNKVFMEFLDKFVVVFIDDILIYPKSEEEHEQHLHLVLEKLKEHQLYAKFSKCDFWLTEVKFLGHVITAQVQQTEPQTKPYPLDMWKYGSALQQRPELNPYSTRAQGVAVDPSNVESVTKWTPPKTVSQIRSFLGLVGYYRRFIENFSRIARPMTQLLKKDEKFKWTAECDKSFEELKKKLVSAPVLILPDQMKDFQVYCDASRHGLGCVLMQEGRVVAYASRQLRPHEGNYPTHDLELAAVVHALKIRRHYLIGNRCEVYMDHKSLKYIFTQPDLNLRQRRWLELIKDYDMSIHYHPEKANVVADALSRKSYCTALGIEGMCEELRQELERLNVGIVEHGFVAALEARPTLADQVRAAQVNDPEIAELKKNMRVRKARDFHEDEHGTIWLGERLCVPDDKELKDLILTEAHQTQYSIHPGSTKMYQDLKEKFWWVSMRREIAEFVALCDVCQRVKAEHQRPVGLLQPLQIPEWKWEEIGMDFITGLPRTSSGHDSISVVNVTPTVLKRVCIPIRLCRGVILSSGRL

SEQ ID NO: 18759 - protein, 1243 aa, Oryza sativa
  Clone ID: TF_OSC400477j.C1.p32.fg
MVYTRNGSRATGEGSNGEERTEGVHPNSNSDNGPPPLPENPTLAQVMAHQTQMMAAMMQQMQQQHQQMHQRMLQHAEQQHQQFGPPPPQSKLPEFLRVRPPTFSSTTNPMEANDWLHAIEKKLNLLQCNDQEKVAFATHQLQGPASAWWDNHMATRPPGTEVTWAEFCHSFRKAQVPDGVVAQKKREFRALHQGNRTVTEYLHEFNHLARYAPEDVRTDAEKQEKFLAGLDDELTNQLISGDYADFERLVDKTIRQEDQRNKMDRKRKAAQFRAPQGSHQRPRFAPEQQGGPTTMIVRQYRPFNPSNFPQGASGSQNHHGGQPNRGAAPLPPMAPAQSGPSAQAKEETGAKPGSCFNCGELGHFADKCPKPRRAGPRFIQARVNHASAKEAQAAPEVVLGTFPVNSIPATVLFDSGATHSFISKKFVGMHGLIREELSTPMRVHTPGNSSTSVQFSPSITIEIQRSPFLANLILLESKDLDVILGMDWLTKFKGVIDCSNRTVTLTNEKGETVVYKSPDSPKQGISLNQIEAEIPVDTVEKNLRKLEDIPIVCEYPEMFPEDLTTMPPKREIEFRIDLAPGIAPIYKRPYRMAANELAEVKKQVDEQLQKGAKVFSKIDLRSGYHQLRIREEDIPKTAFTTRYGLYECTVMSFGLTNAPAFFMNLMNKVFMEFLDKFVVVFIDDILIYSKSEEEHEQHLRLVLEKLKEHQLYAKFTSGYYRRFIENFSRIARPMTQLLKKDEKFKWTAECDKSFEELKKKLVSALVLILPDQMKHFQVYCDACRHGLGCVLMQEGRVVAYVSRQLRPHEGNYPTHDLELAAVVHALKIWRHYLIGNRCEVYTDHKSLKYIFTQPDLNLRQRRWLELIKDYDISIHYHPGKANVVADALSRKSYCTALCIEGMCEELRQEFEHLNVGIVEHGFVAALEARPTLVDQVRAAQVNDSEIAELKKNMRVGKARDFHEDEHGIIWLGERLCVPDDKELKDLILTEAHQTQYSIHPGSTKMYQDLKEKFWWVSMTREIAEFVALCDVCQRVKAEHQRPAVHTTYTGKRLAELYLSRIMCLHGVPKKIVSDRGSQFTSKFWQKLQEELGTRLNFSTAYHPQTDGQTERVNQIWEDMLRACALDFGGAWDKNLPYAEFSYNNNYQASLQMAPFEALYGRKCHTPLFWDQTGERQLFGTEVLAEAEEKVRIIRERLRIAQSRQKSYADNPRRELTFEAGDYVYLHVTPLEFRRRNSHPLALR

SEQ ID NO: 18760 - protein, 1380 aa, Oryza sativa
  Clone ID: TF_OSC400498j.C1.p21.fg
MEANDWLHAIEKKLNLLQCNDQEKVAFATHQLQGPASAWWDNHMATRPPGTEVTWVEFCRSFRKAQVPDGVVAQKKREFRALHQGNRTVTEYLHEFNRLARYAPEDVRTDAEKQEKFMAGLDDELTNQLISGDYADFERLVDKAIRQEDQRNKMDRKRKAAQFRAHQGSHQRPRFTPGQQGGPTTMIVRQYRPFNPSNFPQGASGSQNHHGGQPNRGAAPRPPMAPAQSGPSAQAKKKTGAKPGSCFNCGELGHFADKCPKPRRAGPRFIQARVNHVSAEEAQTAPEVVLGTFPVNSIPATILFDSGATHSFISKKFVGMHGLIREELSTPMRVHTPGNSSTSVQFSPSITIEIQRSPFLANLILLESKDLDVILGMDWLTKFKGVIDCANRTVTLTNEKGETVVYKSPDSPKRGVSFNQIEAEIPVDTVEKNLRKLEDIPIVCEYPEVFPEDLTTMPPKREIEFRIDLAPGTAPIYKRPYRMAANELAEVKKQVDEQLQKGYIRPSTSPWGAPVIFVEKKDKTKRMCVDYRALNEVTIKNKYPLPRIDDLFDQLKGAKVFYKIDLRSGYLQLRIREEDIPKTAFTTRYGLYECTVMSFGLTNAPAFFMNLMNKVFMEFLDKFVVVFIDDILIYSKTEEEHEQHLRLVLEKLKEHQLYAKFSKCDFWLTEVKFLGHVITAQGVAVDPSNVESVTKWTPPKTVSQIRSFLGLAGYYRRFIENFSRIARPMTQLLKKDEKFKWTAECNKSFEELKKKLVSAPVLILPDQMKDFQVYCDASRHGLGCVLMQEGRVRHYLIGNRCEVYTDHKSLKYIFTQPDLNLRPRRWLELIKDYDMSIHYHPGKANVVADALSRKSYRTALCIEGMCEELWQEFEHLNVGIVEHGFVAALEARPTLVDQVRAAQVNDSEMAELKKNMRVGKARDFHEDEHGTIWLGERLCVPDDKELKDLILTEAHQTQYSIHPGSTEMYQDLKEKFWWVSMRREIAEFVALCDVCQRVKAEHQRPAGLLQPLQIPEWKWEEIGMDFITGLPRTSSGHDSIWVVVDRLTKVAHFIPVHTTYTGKRLAELYLSRIMCLHGVPKKIVSDRGSQFTSKFWQKLQEELGTRLNFSTAYHPQTDGQTERVNQILEDMLRACALDFGGAWDKNLPYAEFSYNNSYQASLQMAPFEALYGRKCRTPLFWDQTGERQLFGTEVLTEAEEKVRIIRERLRIAQSRQKSYADNRRRELTFEAGDYVYLRVTPLRGVHRFQTKGKLAPRFVGPYKILERRGEVAYQLELPSNMIGIHDVFHVSQLKKCLRVPEEQADSEHIDIQEDLTYVEKPVCILDTSERRTRKKVTRFCRVQWSHHSEEEATWEREDELKAAHPHLFASSSESRGRDSV

SEQ ID NO: 18761 - protein, 1773 aa, Oryza sativa
  unsure (1)..(1773): unsure at all Xaa locations
  Clone ID: TF_OSC400558j.C1.p1.np
MAGHPPNHRGEGMIDFVAELARMTLVVGYLNAPEYTTIPPLSGELPHRVRLEVHGYVGTCLANMAVEASGGTADHACQEAAYLMMARLRERHDYIFHDTAYRYHPRRAHGDGVSSFRPTAGENDTTFGHMCAVMRGLDRMHSDLHKATKALNDGKLMRIVALKDEIARLKKENAQLKGLPAPGGVRIRTMPRKTTTAPVRIQLAPRNPPPAAAPAAPSVPPAVPAAPVPAPAFTLSFAPASAARGSANGTGGCSLQMVYTRTGNRTTGEGSNGEERADGVHPNSDSGNGPPPLPENPTLAQVMAHQTQMMAAMMQQMQQQHQQMHQRMMQHAEQQHQQFGPPPPQSKLPEFLRVRPPTFSSTTNPMEANDWLHAIEKKLNLLQCNDQEKVAFATHQLQGPVSAWWDNHMATRPPGTEVTWAEFCRSFRKAQVPDGVVAQKKREFRALHQGNRTVTEYLHEFNRLARYAPEDVRTDAEKQEKFMAGLDDELTNQLISGDYADFERLVDKAIRQEDQRNKMDRKRKAAQFRAHQGSHQRPRFTPGQQGGPTTMIVRQHRPFNPSNFHQGTSGSQNYHGSQPNRGTAPRPPMAPAQSGQPAQAKKETGAKPGSCFNCGELGHFADKCPKPRRAGPRFIQARVNHASAEEAQTAPEVVLGTFPVNSIPATVLFDSGATHSFISKKFVGRYGLRKEELSTPMRVHTPGNSSTSVSFSPSVLIEIQRSPFLANLILLESKDLDVILGMDWLTKFKGVIDCASRTVTLTNEKGETVVYKSLVSPKKGVSLNQIETEIPVDTVEKNLRKLEDIPIVCEYPEVFPEDLTTMPPKREIEFRIDLAPGTAPIYKRPYRMAANELAEVKKQVDEQLQKGYIRPSTSPWGAPVIFVEKKDKTKRMCVDYRALNEVTIKNKYPLPRIDDLFDQLKGAKVFSKIDLRSGYHQLRIREEDIPKTAFTTRYGLYECTVMSFGLTNAPAFFMNLMNKVFMEFLDKFVVVFIDDILIYSKSEEEHEQHLRLVLEKLKEHQLYAKFSKCDFWLTEVKFLGHVITAQGVAVDPSNVESVTKWTPPKTVSQIRSFLGLAGYYRRFIENFSRIARPMTQLLKKDEKFKWTAECDKSFEELKKKLVSAPVLILPDQMKDFQVYCDASRHGLGCVLMQEGRVVAYASRQLRPHEGNYPTHDLELAAVVHALKIWRHYLIGNRCEVYTDHKSLKYIFTQPDLNLRQRRWLELIKDYDMSIHYHPGKANVVADALSRKSYCTALCIEGMCEELRQEFEHLNMGIVEHGFVAALEARPTLVDQVRAAQVNDPEIAELKKNMRVGKARDFHEDEHGTIWMGERLCVPDDKELKDLILTEAHQTQYSIHPGSTKMYQDLKEKFWWVSMRREIAEFVALCDVCQXVKAEHQRPAGLLQPLQIPEWKWEEIGMDFITGLPRTSSGHDSIWVVVDRLTKVAHFIPVHTTYTGKRLAELYLARIMCLHGVPRKIVSDRGSQFTSKFWQKLQEELGTRLNFSTAYHPQTDGQTERVNQILEDMLRACALDFGGAWDKSLPYAEFSYNNSYQASLQMAPFEALYGRKCRTPLFWDQTGERQLFGTEVLAEAEEKVRIIRERLRIAQSRQKSYADNRRRELTFEAGDYMYLRVTPLRGVHRFQTKGKLAPRFVGPYKILERRGEVAYQLELPSNMIGIHDVFHVSQLKKCLRVPEEQADSEHIDIQEDLTYVEKPVRILDTSERRTRNKVTRFCRVQWSHHSEEEATWEREDELKAAHPHLFTSSSESRG

SEQ ID NO: 18762 - protein, 1306 aa, Oryza sativa
  Clone ID: TF_OSC400560j.C1.p2.gm
MVYTRTGNRTTGEGSNGEERADGVHPNSDSGNGPPPLPENPTLAQVMAHQTQMMAAMMQQMQQQHQQMHQRMMQHAEQQHQQFGPPPPQSKLPEFLRVRPPTFSSTTNPMEANDWLHAIEKKLNLLQCNDQEKVAFATHQLQGPASAWWDNHMATRPPGTEVTWAEFCRSFRKAQVPDGVVAQKKREFRALHQGNRTVTEYLHEFNRLARYAPEDVRTDAEKQEKFMAGLDDELTNQLISGDYADFERLVDKAIRQEDQRNKMDRKRKAAQFRAHQGSHQRPRFTPGQQGGPTTMIVRQHRPFNPSNFHQGTSGSQNYHGSQPNRGTAPRPPMAPAQSGQPAQAKKETGAKPGSCFNCGELGHFADKCPKPRRAGPRFIQARVNHASAEEAQTAPEVVLVTLTNEKGETVVYKSLVSPKKGVSLNQIETEIPVDTVEKNLRKLEDIPIVCEYPEVFPEDLTTMPPKREIEFRIDLAPGTAPIYKRPYRMAANELAEVKKQVDEQLQKGYIRPSTSPWGAPVIFVEKKDKTKRMCVDYRALNEVTIKNKYPLPRIDDLFDQLKGAKVFSKIDLRSGYHQLRIREEDIPKTAFTTRYGLYECTVMSFGLTNAPAFFMNLMNKVFMEFLDKFVVVFIDDILIYSKSEEEHEQHLRLVLEKLKEHQLYAKFSKCDFWLTEVKFLGHVITAQGVAVDPSNVESVTKWTPPKTVSQIRSFLGLAGYYRRFIENFSRIARPMTQLLKKDEKFKWTAECDKSFEELKKKLVSAPVLILPDQMKDFQVYCDASRHGLGCVLMQEGRVVAYASRQLRPHEGNYPTHDLELAAVVHALKIWRHYLIGNRCEVYTDHKSLKYIFTQPDLNLRQRRWLELIKDYDMSIHYHPGKANVVADALSRKSYCTALCIEGMCEELRQEFEHLNMGIVEHGFVAALEARPTLVDQVRAAQVNDPEIAELKKNMRVGKARDFHEDEHGTIWMGERLCVPDDKELKDLILTEAHQTQYSIHPGSTKMYQDLKEKFWWVSMRREIAEFVALCDEELGTRLNFSTAYHPQTDGQTERVNQILEDMLRACALDFGGAWDKSLPYAEFSYNNSYQASLQMAPFEALYGRKCRTPLFWDQTGERQLFGTEVLAEAEEKVRIIRERLRIAQSRQKSYADNRRRELTFEAGDYVYLRVTPLRGVHRFQTKGKLAPRFVGPYKILERRGEVAYQLELPSNMIGIHDVFHVSQLKKCLRVPEEQADSEHIDIQEDLTYVEKPAEAQPGSRPPASLPPGVADRGTHLSDPSPTSRLSRSRRRTRNGRRAHASASPGP

SEQ ID NO: 18763 - protein, 1360 aa, Oryza sativa
  Clone ID: TF_OSC400574j.C1.p2.gm
MVYTRTGNRTAGEGSNGEERADGVHPNGDSGNGPPPLPENPTLAQVMAHQTQMMAAMMQQMQQQHQQMHQRMMQHAEQQHEQFGPPPPQSKLPEFLRVRPPTFSSTTNPMEANDWLHAIEKKLNLLQCNDQEKVAFATHQLQGPASAWWDNHMATRPPGTEVTWAEFCRSFRKAQVPDGVVAQKKREFRALHQGNRTVTEYLHEFNRLARYAPEDVRTDAEKQEKFMAGLDDELTNQLISGDYADFERLVDKAIRQEDQRNKMDRKRKAAQFRSNQGSQHRPRFTPGQQGGPTTMIVRQHRPFNPSNFHQGTSGSQNHHGGQPNRGAAPRPPMAPAQSGQPAQAKKETGAKPGSCFNCGELGHFADKCPKPRRAGPRFIQARVNHASAEEAQAAPEVVLVTLTNEKGETVVYKSLASPKKGASLNQIETEIPVDAEEKNLRKLEDIPIVCEYPEVFPEDLTTMPPKREIEFRIDLAPGTAPIYKRPYRMAANELAEVKKQVDEQLQKGYIRPSTSPWGAPVIFVEKKDKTKRMCVDYRALNEVTIKNKYPLPRIDDLFDQLKGAKVFSKIDLRSGYHQLRIREEDIPKTAFTTRYGLYECTVMSFGLTNAPAFFMNLMNKVFMEFLDKFVVVFIDDILIYSKSEEEHEQHLRLVLEKLKEHQLYAKFSKCDFWLTEVKFLGHVITAQGVAVDPSNVESVTKWTPPKTVSQIRSFLGLAGYYRRFIENFSRIARPMTQLLKKDEKFKWTAECDKSFEELKRKLVSAPVLILPDQTKDFQVYCDASRHGLGCVLMQEGRVVAYASRQLRPHEGNYPTHDLELAAVVHALKIWRHYLIGNRCEVYTDHKSLKYIFTQPDLNLRQRRWLELIKDYDMSIHYHPGKANVVADALSRKSYCTALCIEGMCEELRHEFEHLNMGIVEHGFVAALEARPTLVDQVRAAQVNDPEIAELKKNMRVGKARDFHEDEHGTIWMGERLCVPDDKELKDLILTEAHQTQYSIHPGSTKMYQDLKEKFWWVSMRREIAEFVALCDVCQRVKAEHQRPAGLLQPLQIPEWKWEEIGMDFITGLPRTSSGHDSIWVVVDRLTKEELGTRLNFSTAYHPQTDGQTERVNQILEDMLIACALDFGGAWDKSLPYAEFSYNNSYQASLQMAPFEALYGRKCRTPLFWDQTGERQLFGTEVLAEAEEKVRIIRERLRIAQSRQKSYADNRRRELTFEAGDYVYLRVTPLRGVHRFQTKGKLAPRFVGPYKILERRGEVAYQLELPSNMIGIHDVFHVSQLKKCLRVPEEQADSEHIDIQEDLTYVEKPVRILDTSERRTRNKARVGVMERGGPCDGLCRFRIHLGTRGDCPSPAGDGGET

SEQ ID NO: 18764 - protein, 1728 aa, Oryza sativa
  Clone ID: TF_OSC400596j.C1.p9.fg
MEKPKSPLNPFSLHMFFAIGFVPGKWGSVLVVQGKNLGRSFKMAGHPPNHRGEGMIDFVAELARMTLVVGYPDAPEYTTIPPLSGELPYRVRLEVHGYVGTCLANMAVEASGGTADHACQEAAYLMMARLRERHDYIFHDTAYRYHPRRAHGDGVSSFRPTAGENDTTFGHMCAVMRGLDRMHSDLHKATKALNDGKLMRIVALKDEVARLKKENAQLKGLPAPGGVRIRTTPRKRTTAPVRIQLAPRNPPPPAAPAAAPVPPAVPAAPAPAPAFTLSFAPASAARGSASGTGGCLFGGQSAMVYTRTGSRATGEGSNGEERADGVHPNGDSGNGPPPLPENPTLAQVMAHQTQMMAAMMQQMQQQHQQMHQRMMQHAEQQHQQFGPPPPQSKLPEFLRVRPPTFSSTTNPMEANDWLHAIEKKLNLLQCNDQEKVAFATHQLQGPASAWWDNHMATRPPGTEVTWAEFCRSFRKAQVPDGVVAQKKREFRALHQGNRTVTEYLHEFNRLARYAPEDVRTDAEKQEKFMAGLDDELTNQLISGDYADFERLVDKAIRQEDQRNKMDRKRKAAQFRSNQGSQHRPRFTPGQQGGPTTMIVRQHRPFNSSNFHQGTSGSQNHQGGQPNRGAAPRPSVAPAQSGQPAQAKKETGAKPGSCFNCGELGHFADKCPKPRRAGPRFIQARVNHASAEEAQAAPEVVLGTFPVNSIPATVLFDSGATHSFISKKFVGMYGLRKEELSTPMRVRTPGNSSTSVSFSPSVLIEIQRSPFLANLILLESKDLDVILGMDWLTKFKGVIDCANRTVTLTNEKGETVVYKSLVSPKKGASLNQIETEIPVDTVGKNLRKLEDIPIVCEYPEVFPENLTTMPPKREIEFRIDLAPGTAPIYKRPYRMAANELAEVKKQVDEQLQKGYIRPSTSPWGAPVIFVEKKDKTKRMCVDYRALNEVTIKNKYPLPRIDELFDQLKGAKVFSKIDLRSGYHQLRIREEDIPKTAFTTRYGLYECTVMSFGLTNAPAFFMNLMNKVFMKFLDKFVVVFIDDILIYSKSEEEHEQHLRLVLEKLKEHQLYAKFSKCDFWLTEVKFLGHVITAQGVAVDPSNVESVTKWTPPKTVSQIRSFLGLAGYYRRFIENFSRIARPMTQLLKKDEKFKWTAECDKSFEELKKKLVSAPVLILPDPTKDFQVYCDASRHGLGCVLMQEGRVVAYASRQLRPHEGNYPTHDLELAAVVHALKIWRHYLIGNRCEVYTDHKSLKYIFTQPDLNLRQRRWLELIKDYDMSIHYHPGKANVVADALSRKSYCTALCIEGMCEELRQEFEHLNMGIVEHGFVAALEARPTLVDQVRAAQVNDPEIAELKKNMRVGKARDFLEDEHGTIWMGERLCVPDDKELKDLILTEAHQTQYSIHPGSTKMYQDLKEKFWWVSMRREIAEFVALCDVCQRVKAEHQRPAGLLQPLQIPEWKWEEIGMDFITGLPRTSSGHDSIWVVVDRLTKVAHFIPVHTTYTGKRLAELYLARIMCLHGVPKKIVSDRGSQFTSKFWQKLQEEMGTRLNFSTAYHPQTDGQTERVNQILEDMLRACALDFGGAWDKSLPYAEFSYNNSYQASLQMAPFEALYGRKCRTPLFWDQTGERQLFGTEVLAEAEEKVRIIRERLRIAQSRQKSYADNRRRELTFEARDYVYLRVTPLRGVHRFQTKGKLAPRFVGPYKILERRGEVAYQLELPSTMIGIP

SEQ ID NO: 18765 - protein, 1819 aa, Oryza sativa
  unsure (1)..(1819): unsure at all Xaa locations
  Clone ID: TF_OSC400679j.C1.p10.np
MAGHPPNHHGEGMIDFVAELARMTLVVGYPNAPEYTTVPPLSGELPHRVRLEVHGYVGTCLANMVVEASGGTADHACQEAAYLMMARLRECHNYIFHDTAYRFHPRRASGDDVSTFRPIAGENDTTFDHMCAVMRGMDRMHLDLHKTSKALNDGKLMRIVVLKDEIARLKRENAQLKGLPAPGGVRIHTTPRKSTTAPVRIQLAPRNPPPPAVPAAPPVPPAAPAVPAAPAPAPAHVPVSAPASALSFAPATAVRGPASGNGGWLPATPSGSRDRSSSGSELGSGETYLPGSRSRSEGRGMVYTRTGTRTTGEGSNGEERADGVHPNSDSGNGPPPLPKNPTLAQVMAHQTQMMAAMMQQMQQQHQQMHQRMLHHAEQQHQQFGPPPPQSKLPEFLRIRPPTFSSTTNPMEANDWLHAIEKKPNLLQCNDQEKVAFATHQLQGPASAWWDNHMATRPPGTEVTWAEFCRSFRKAQVPDGVVAQKKREFRALHQGNRTVTEYLHFNRLAXYAPEDVRTDAEKQEKFLAGLDDELTNQLISGDYADFERLVDKAIRQEDQRNKMERKRKAAQFRSNQGSHQRPRFTPGQQGRPTTLIVRQHRPFNASNFHQGASGCQNHHGGQPNRSAAPCPPMALAQSATSAQAKKETGTKPGSCFNCGELGHFADKCPKPRRAGPRFVXACVNHASAEEAQAAPEVVLGTFPVNSIPAIVLFDSGATRSFISKKFVGMHGLRKEELNTPMRVHTPGNSSTSVSFSPSVLIEIQRSPFLANLILLESKDLDVILGMDWLTKFKGVIDCVNRTVTLTNEKGETVVYKSLVSPKQGVSLNQIEAEIPVVTEEKNSRKLEEIPIVCEYPEVFPEDLTTMPPKREIEFRIDLAPGTAPIYKRPYRMAANELVEVKKQVDEQLQKGYIXPSTSHWGAPVIFVEKKDKTKRMCVDYRALNEVTIKNKYPLPRIDDLFDQLKGAKVFSKIDLRSGYHQLRIREEDIPKMAFTTRYGLYECTVMSFGLTNAPAFFMNLMNKVFMEFLDKFVVVFINDILIYSKSEKEHEQHLRLVLXKLKELQLYAKFSKCDFWLTEVKFLGHVITAQGVAIDPSNVESVTKWTPPKTVSQIXSFLGLAGYYRRFIENFSRIARPMTXLLKKDEKFKWTAECDKSFEEFKKKLVSAPVLILPDQMKDFQVYCDASRHGLGCVLMQEGRVVAYASRQLRLHEGNYPTHDLELAAVVHALKIWRYYLIGNRCEVYTDHKSLKYIFTQPDLNLQQRRWLELIKDYDMSIHYHPGKANVVADALSRKSYCTALCIEGMCEELQXEFEHLNVGIVEHGFVAALEARPTLVDQVRAAQVNDPEIAELKKNMVGKARDFLEDEHGTNWMGERLCVPDDKELKDMILTEAHQTQCSIHPGSTKMYQDLKEKFWWASMRREIAEFVALCDVCQRVKVEHQRPAGLLQPLQIPEWKWEEIGMDCITGLPRTSSGHDSIWVVVDRLTKVAHFIPVHTTYTGKKLAELYLARIMCLHGVPKKIVSDRESQFTSKFWQKLQEELGTRLNFSTAYHPQTDGQTEXVNQILEDMLRACALDFGGAWDKSLPYAEFSYNNSYQASLQMVPFEALYCRKCRTPLFWDQTGERQLFGTEVLAEAEEKVRTIRERLRIALSRQKSYTDNRRRELTFEAGDYVYLRVTPLRGVHRFQTKGKLAPRFVGLYKILERRGEVAYQLELPSNMIGIHDVFHVSQLKKCLRVPEEQADSEHIDIQEDLTYVEKPVRILDTSERRTRNKVTRFCRVQWSHHSEEEATWEREDELKAAHPHLFASSSESQGRDSV

SEQ ID NO: 18766 - protein, 1344 aa, Oryza sativa
  Clone ID: TF_OSC400686j.C1.p8.gm
MVYTRNGSRTTGEGSNGEERTDGVHPNSDSGNGPPPLPENPTLAQVMAHQTQMMAAMMQQQHQQMHQRMQQQAEQHQQQFGPPPPQSKLPEFLRVRPPTFSSTTNPMEANDWLNAIEKKLNLLQCNDQEKVAFATHQLQGPASAWWDNLMATRPPGTEVTWAEFCRSFRKAQVPDGVVAQKKREFRALHQGNRTVTEYLHEFNRLARYAPEDVHTNAEKQEKFLAGLDDELTNQLISGDYADFERLVDKAIRQEDQRTKMDRKRKAAQFRSNQGSHQRPRFTPGQQGGPTTMIVRQHRPFNSSSFHQGASGSQNHHGGQPNHSAAPRPPMAPVQSAPSAQAKKETGTKPGSCFNCGELGHFADKCPKPRRAGPRFIQARVNHASAEEAQAAPEVVLVTLTNKKGETVVYKSLVSPKQGVSLNQIEVEIPVVTEGKSSRKLEDIPIVCEYPKVFPEDLTTMPPKREIEFRIDLAPGTAPIYKTPYRMAANELAEVKKQVDEQLQKGYIRPSTSPWGAPVIFVEKKDKTKRMCVDYRALNEVTIKNKYPLPRIDDLFDQLKGAKVFSKIDLRSGYHQLRIQEEDIPKTAFTTRYGLYECTVMSFGLTNAPAFFMNLMNKVFMEFLDKFVVVFIDDIPIYSKSEEEHEQHLRLVLKKLKEHQLYAKFSKCDFWLSEVKFLGHVITAQDVAVDPSNVESVTKWTPPNTVSQIRSFLGLAGYYRRFIENFSRIARPMTQLLKKDEKFKWTAECDKSFEELKKKLVSAPVLILPDQMKDFQVYCNASRHGFGCVLMQEGRVVAYASRQLRPHEGNYPTHDLELAAVVHALKIWRHYLIGNRCEVYTDHKSLKYIFTQPDLNLQQRRWLELIKDYDMSIHYHPGKANVVADALSRKSYCNALCTEGMCKELQQKLEHLNLGLVEYGYMAALEARPTLVDQVRAAQVNDPEITELKKNMRVGKARDFHEDEHGTIWLEERLCVPDDKELKDMILTEAHQTQYSIHPGSTKMYQDLKEKFWWVSMRREIAEFVTLCDVCQRVKAEHQRPADLLQPLQILEWKWEEIGMDFITGLPRTSSGHDSIWASLQMAPFEALYGWKCRTPLFWDQTGERQLFGTEVLTEAEEKVRTIRERLRIAQSRQKSYADNRRRELTFEAGDNVYLRVTPLRGADSEHIDIQEDLTYMEKPVRILETSERRTRNKVSPSRVRTSASPVFAASLVFRRRSSPPPPVRTPSPFLSFPIPRAPSVLAAPLLRLCASAFVPSAAASSHGRPAGFEAEPSPAATPCAVRSARGRSGPSVLWTGGGPPAWSRSTVDRPLCAADPWGPRAGAPSLSPCATDMRAPHVGAARSL

SEQ ID NO: 18767 - protein, 1810 aa, Oryza sativa
  unsure (1)..(1810): unsure at all Xaa locations
  Clone ID: TF_OSC400722j.C1.p48.np
MAGHPPNHRGEGMIDFVAELARMTLVVGYPDAPEYTTIPPLSGELPHRVRLEVHGYVGTCLANMAVEASGGTADHACQEAAYLMMARLRERHNYIFHDTAYRYHPSRANGDGVSSFRPTAGENDTTFGHMCAVMRGLDRMHSDLHKATKALNDGKLMRIVALKDEIARLKKENAQLKGLPAPGGVRIRTTPRKTTTAPVRIQLAPRNPPPAAAPAAPPVLPAVPAAPAPAPAPAPASALSFAPASAARGPASGTGGWLSATPSGSSDRSSSGSQSGSGETYLPGSRSRSEGPGMVYTRTGNRTTGEGSNGEERVDGVHPNSDSGNGPPPLPENPTLAQVMAHQTQMMAAMMQQMQQQHQQMHQRMMQHVEQQHQHFGPPPPQSKLPEFLGVRPPTFSSTTNPMEANDWLHAIEKKLNLLQCNDQEKVAFATHQLQGPASAWWDNHMATRPPGTEVTWAEFCRSFRAQVPDGVVAQKKREFRALHQGNRTVTEYLHEFNRLTRYAPXDVRTDPDKQEKFMAGLDDELTNQLISGYYADFRLVDKAIRQEDQRNKMDRKRKAAQFRAHQGSHQRPRFTPGQQGGPTTMIVRQHRPFNPSNFYQGTSDSQNHHGGQPNRGAAPRPPVASAQSGQPAQAKKETEAKPGSCFNCGELGHFADKCPKPRRAGPRFIQARVNHASAEEAQAAPEVVLGTFPVNSIPATVLFDSGATHSFISKKFVGMHGLIREELSTPMRVHTPGNSSTSVQFSPSITIEIQRSPVLANLILLESKDLDVILGMDWLTKFKGVIDCANRTVTLTNEKGETVVYKSLVSPKKGVSLNQIETEIPVDTVEKNLRKLDDIPIVCEYPEVFPEDLTTMPPKREIEFRIDLAPGTAPIYKRPYRMAANELTEVKKQVDEQLQKGYIRPSTSPWGAPVIFVEKKDKTKRMCVDYRALNEVTIKNKYPLPRIDDLFDQLKGAKVFSKIDLRSGYHQLRIREEDIPKTAFTTRYGLYECTVMSFGLTNAPAFFMNLMNKVFIEFLDKFVVVFIDDILIYSKEEEHEQHLRLVLEKLKEHQLYAKFSKCDFWLTEVKFLGHVITAQGVAVDPSNVESVTKWTPPKTVSQIRSFLGLAGYYRRFIGNFSRIARPMTQLLKKDEKFKWTAECDKSFEELKKKLVSAPVLILPDQMKDFQVYCDASRHGLGCVLMQEGRVVAYASRQLRPHEGNYPTHDLELAAVVHALKIWRHYLIGNRCEVYTDHKSLKYIFTQPDLNFRQRRWLELIKDYDMSIHYHPGKANVVADALSRKSYCTALCIESMCEELRQEFEHLNIGIVEHGFVAALEARPTLVDQRAAQVNDPEIAELKKNMRVGKARDFLKDEHGTIWMGERLCVPDDKELKDLILTEAHQTQYSIHPGSTKMYQDLKEKFWWVSMRREIAEFVALCDVCQRVKAEHQRPTGLLQPLQIPEWKWEEIGMDFITGLPRTSSGHDSIXVVVDRLTKVAHFIPVHTTYTGKRLAELYLSRIMCLHGVLKKIVSDRGSQFTSKFWQKLQEELGTRLNFSTAYHPQTDGQTERVNQILEDMLRACALDFGGAWDKSLPYAEFSYNNSYQASLQMAPFEALYGRKCRTPLFWDQTGERQLFGTEVLAEAEEKVRIIRERLRIAQSRQKSYADNRRRELTFEAGDHVYLRVTPLRGVHRFQTKGKLAPRFVGPYKILERRGEVAYQLELPSNMIGIHDVFHVSQLKKCLRVPEEQADSEHIDIQEDLTYVEKPVRILDTSERRTRNKVTRFCRVQWSHHSEEEATWEREDELKAAHPHLFTSSSESRGRDSV

SEQ ID NO: 18768 - protein, 1011 aa, Oryza sativa
  Clone ID: TF_OSC400772j.C1.p95.fg
MEANDWLHAIEKKLNLLQCNDQEKVAFATHQLQGPASAWWDNHMATRPPGTEVTWEEFCRSFRKAQGNRTVTEYLHEFNHLARYAPEDVRTDAEKQEKFLAGLDDELTNQLISGDYADFERLVDKAIRQDDQRNKMDRKRKAAQFRAPQGSHQRPRFAPGQQGGPTTMIVRQYRPFNPSNFPQGASGSQNHHGGQPNRGAAPRPPTAPAQSGPSAQAKRETGAKPGSCFNCGELGHFADKCPKPRRAGPRFIQARVNHASAEEAQAAPEVVLGTFPVNSIPATILFDSGATHSFISKKFVGMHGLRKEELSTPMRVHTSGNSSTSVSFSPSVLIEIQRSPFLANLILLESKDLDVILGMDWLTKFKGVIDCANRTVTLTNEKGETAVYKSPDSPKQGVSLNQIEAEIPVDTVKKNLRKLEDIPIVCEYPEVFPEDLTTMPPKREIEFRIDLAPGTAPIYKRPYRMAANELAEVKKQVDEQLQKGYIRPSTSPWGAPVIFVEKKDKTKRMCVDYRALNEVTIKNKYPLPRIDDLFDQLKGAKVFSKIDLRSGYHQLRIREEDIPKTAFTTRYGLYECTVMSFGLTNAPAFFMNLMNKVFMEFLDKFVVVFIDDILIYSKSEEEHEQHLRLVLEKLKEHQLYAKFSKCDFWLTEVKFLGHVITAQGVAVDPSNVESVTKWIPPKTVSQIRSFLGLAGYYRRFIENFSRIARPMTQLLKKDEKFKWTAECDKSFEELKKKLVSAPVLILPDQMKDFQVYCDASRHGLGCVLMQEGRVVAYASRQLRPHEGNYPTHDLELAAVVHALKIWRHYLIGNRCEVYTDHKSLKYIFTQPDLNLRQRRWLELIKDYDMSIHYHPGKANVVADALSRKSYCTALCIEGMCEELRQEFEHLNVGIVEHGFVAALEARPTLVDQVRAVQVNDSEIAELKKNMRVGKTRDFHEDEHGTIWLGERLCVPDDKELKDLILTEAHQTQYSIHPGSTKMYQDLKEKFWWVSMRREKLNSSHSAMFVNE

SEQ ID NO: 18769 - protein, 1664 aa, Oryza sativa
  Clone ID: TF_OSC400773j.C1.p38.fg
MDEVGRRWTFSRANEGYTGCGPAIFPVATDLHKATKALNDGKLMRIVALKDEVARLKKENAQLKGLPAPGGVRIRTTPRKRTTAPVRIQLAPRNPPPPAAPAAAPVPPAVPAAPAPAPAFTLSFAPASAARGSASGTGGCLFGMVYTRTGSRATGEGSNGEERADGVHPNGDSGNGPPPLPENPTLAQVMAHQTQMMAAMMQQMQQQHQQMHQRMMQHAEQQHQQFGPPPPQSKLPEFLRVRPPTFSSTTNPMEVNDWLHAIEKKLNLLQCNDQEKVAFATHQLQGPASAWWDNHMATRPPGTEVTWAEFCRSFRKAQVPDGVVAQKKREFRALHQGNRTVTEYLHEFNRLARYAPEDVRTDAEKQEKFMAGLDDELTNQLISGDYADFERLVDKAIRQEDQRNKMDRKRKAAQFRSNQGSQHRPRFTPGQQGGPTTMIVRQHRPFNSSNFHQGTSGSQNHQGGQPNRGAAPRPPMAPAQSAQPAQAKKETGAKPGSCFNCGELGHFADKCPKPRRAGPRFIQARVNHASAEEAQAAPEVVLGTFPVNSIPATVLFDSGATHSFISKKFVGMYGLRKEELSTPMRVRTPGNSSTSVSFSPSVLIEIQRSPFLANLILLESKDLDVILGMDWLTKFKGVIDCASRTVTLTNEKGETVVYKSPGSPKQGVSLNQIETEIPVDTVGKNLRKLEDIPIVCEYPEVFPEDLTTMPPKREIEFRIDLAPGTAPIYKRPYRMAANELAEVKKQVDEQLQKGYIRPSTSPWGAPVIFVEKKDKTKRMCVDYRALNEVTIKNKYPLPRIDDLFDQLKGAKVFSKIDLRSGYHQLRIREEDIPKTAFTTRYGLYECTVMSFGLTNAPAFFMNLMNKVFMEFLDKFVVVFIDDILIYSKSEEEHEQHLRLVLEKLKEHQLYAKFSKCDFWLTEVKFLGHVITAQGVAVDPSNVESVTKWTPPKTVSQIRSFLGLAGYYRRFIENFSRIARPMTQLLKKDEKFKWTAECDKSFEELKKKLVSAPVLILPDPTKDFQVYCDASRHGLGCVLMQEGRVVAYASRQLRPHEGNYPTHDLELAAVVHALKIWRHYLIGNRCEVYTDHKSLKYIFTQPDLNLRQRRWLELIKDYDLSVHYHPGKANVVADALSRKSYCTALCIEGMCEELRQEFEHLNMGIVEHGFVAALEARPTLVDQVRAAQVNDPEIAELKKNMRVGKARDFHEDEHGTIWMGERLCVPDDKELKDLILTEAHQTQYSIHPGSTKMYQDLKEKFWWVSMRREIAEFVALCDVCQRVKAEHQRPAGLLQPLQIPEWKWEEIGMDFITGLPRTSSGHDSIWVVVDRLTKVAHFIPVHTTYTGKRLAELYLARIMCLHGVPKKIVSDRGSQFTSKFWQKLQEEMGTRLNFSTAYHPQTDGQTERVNQILEDMLRACALDFGGAWDKSLPYAEFSYNNSYQASLQMAPFEALYGRKCRTPLFWDQTGERQLFGTEVLAEAEEKVRIIRERLRIAQSRQKSYADNRRRELTFEAGDYVYLRVTPLRGVHRFQTKGKLAPRFVGPYKILERRGEVAYQLELPSTMIGIHDVFHVSQLKKCLRVPEEQANSEHIDIQEDLTYVEKPVRILDTSERRTRNKVTRFCRVQWSHHSEEEATWEREDELKAAHPYLFTSSTESRGRDSV

SEQ ID NO: 18770 - protein, 1416 aa, Oryza sativa
  Clone ID: TF_OSC400775j.C1.p53.fg
MVYTRNGSRATGEGSNGEERTDGAHPHSDSGNGPPPLPENPTLAQVMAHQTQMMAAMMQQMQQQHQQMHQRMLQHAEQQHQQFGPPPPQSKLPEFLRVRPPTFSSTTNPMEANDWLHAIEKKLNLLQCNDQEKVAFATHQLQGPALAWWDNHMATRPPGTEVTWAEFCRSFRKAQVPDGVVAQKKREFRALHQGNRTVTEYLHKFNRLARYAPEDVRTDAEKQEKFMAGLDDELTNQLISGDYADFERLVDKAIRQEDQRNKMDRKRKAAQFRAPQGSHQRPRFTPGQQGGPTTMIVRQHRPFNPSNFPQGASGSQNHHGGQSNRGAAPRPPMAPAQSGPPAQAKKETGAKPGSCFNCGELGHFADKCPKPRRAGPRFIQARVNHASAEEAQAAPEVVLGTFLVNSIPSTVLFDSGAMHSFISKKFVGMHGLIREELSTPMRVHTPGNSSTSVQFSPSITIEIQRSPFLANLILLESKDLDVILGMDWLTKFKGVIDCVNRTVTLTNEKGETVVYKSPDSPKQGVSLNQIETEIPVDTVEKNLRKLEDIPIVCEYPEVFPEDLTTMPPKREIEFRIDLAPGTAPIYKRPYRMAANELAEVKKQVDEQLQKGYIRPSTSPWGAPVIFVEKKDKTKRMCVDYRALNEVTIKNKYPLPRIDDLFDQLKGAKVFSKIDLRSGYHQLRIREEDIPKTAFTTWYGLYECTVMSFGLTNAPAFFMNLMNKVFMEFLDKFVVVFIDDILIYSKSEEEHEQHLRLVLEKLKEHQLYAKFSKCDFWLTEVKFLGHVITTQGVAVDPSNVESVTKWTPPKTVSQIRSFLGLAGYYRRFIENFSRIARPMTQLLKKDEKFKWTAECDKSFEELKKKLVSAPVLILPDQMKDFQVYCDASRHGLGYVLMQEGRVVAYALRQLRPHEGNYPTHDLELAAVARPTLVDQVRAAQVNDSEIAELKKNMRVGKARDFHEDEHGTIWLGERLCVPDDKELKDLILTEAHQTQYSIHPGSTKMYQDLKEKFWWVSMRREIAEFVALCDVCQRVKAEHQRPAGLLQPLQIPEWKWEEIGMDFITGLPRTSSGHDSIWVVVDRLTKVAHFILVHTTYTGKRLAELYLSRIMCLHGVPKKIVSDRGSQFTSKFWQKLQEELGTRLNFSTAYHPQTDGQTERVNQILEDMLRACALDFGGAWDKSLPYAEFSYNNSYQASLQKAPFEALYGRKCRTPLFWDQTGERQLFGTEVLAEAEEKVRIIRERLRIAQSRQKSYADNRRRELTFEAGDYVYLRVTPLRGVHRFQMKGKLAPRFVGPYKILERRGEVAYQLELPSNMIGIHDVFHVSQLKKCLRVPEEQADSEHIDIQEDLTYVEKPVRILDTSERRTRNKVTRFCRVQWSHHSEEEATWEREDELKAAHPHLFTSSSESRGRYSV

SEQ ID NO: 18771 - protein, 1411 aa, Oryza sativa
  Clone ID: TF_OSC400798j.C1.p32.fg
MAQGKMIGLAGKLRRVSAKTEKPNWQISSTERINTKIGTPPSYSSIGVDMWPMEFSETTINKIVGLTHAAFVRSLLEPCASLRRSPGFLMSLPTPRVSHSPPCHRWRLPSPRRGRHGGRGQVVVHRVVREVTTSSVVYPTLTRTNYQDWVLVMRVNMQAQGLWGAVEPEGDDLVDYRQDRQALTAILRAVPAEMLATLAVKETVQEAWEAIKTRRIGVQHVREANAQQLRREFGDIIFKDGETVDDFSMRIGVLANNLRTLGDNITDAEVVQKLLQVVPEHLQQIAISIETLLDVNELSLEEVTGSLRSVEQRKQRKAVAASSRVDAYGCLLFTEEEWLAKFRKAASLQDAAHSSSGGNSDRQGQGRGNKDDGASKETQPKPANLGGRNPGNCKNCGKRGHWAKDCRSKPKAQQAYVAQEEDDEPALLLAKVELDPPRPRVVAPANPVSPPSAPRTPSPTSELAVVKAKVFTQLDDGGEHYPATWILDTGATNYMTGSRSAFAELDTAVSGTVKFGDGSVVHIEGHGTVLFSCRSREHRGITGIYYIPWLTVNIVSLGQLDHSGSNLDIDRPVCLAARSAEPAWRWHARYGHLNFPALRKLVQQEMVRGLPLLQQVTQVCDGCLLGKQRRAAFPAQSKYCTNEHLVLVHGDLCRPIEPATPAGNRYFLLLVDDMSRYMWLTLIRSKDEAANAIKHFQARAVVETGRKLHALRTDRGGEFTSIEFGEYYANLGVGRKLTVPYSPQQNGVVERRNQTIVATARSMMKAKGVPGRFWGEAMSTTVFLLNRSPKKSLDNQTPYEAWYGQRPAVHFLRTFGCMGHVKITKPGLKKLNDRSVPMVLLGYEEGSKAYRLYDPDSILDADTDDDVVPRYRLVDNLLGDASLPRQTPQVLEQLELYAVSADEPASLAEAEADPNWRGAMQDELDAIVDNDTWSLTDLPHGHRAIGLKWVYKLKRDEQGAIVRYKARLAAKGYVQRQGGGLRRGLHTCRPAGIDWQVHHMDVKSAFLNGKLLEEVYVSQPPGFVDDNHKNKVYRLHKALYGLRQAPRAWNAKLDSSLLSFGFHRSSSEHGVYTRTRGGRRLTVGVYVNDLIITGDHDDEIRSFKGEMMKLFKMSDLGHSDTTSASRLPWTVMGSRWGKLHMPARFLRGQDSRTTIPVRLPWRHSLLGDSFWPRCTGHFKKAVVYSDSDLAGDLDEQKSTSGQIFFVNGGPVTWQSSKQKVVALSSCEAEYIAVAAATCQSVWLAWLLAEVMGDEVAAPLLKVDNQSTISLIKNPVHHDRSKHIDVKYHYIRECAEKKLIEVMSVGTAEQLGDIFTKSLGRTRFQELRSKIESVGVVRCMLQCRDRENFLFPNASVLIPVPGKAGTEPQTKPYPLDMWKYGSALQQRPEDRSLYGRGATIKTMHPEPSLKPF

SEQ ID NO: 18772 - protein, 1449 aa, Oryza sativa
  Clone ID: TF_OSC400800j.C1.p73.fg
MSLPTPRVSHSPPRRRWRSPSPRRGRHGGRGQVVVERVVREATTSSVVYPTLTRTNYQDWALVMRVNMQAQCLWGAVEPEGDDLVDYRQDQQALAAILRAVPAEMLATLAVKETAQEAWEAIKTRRIGVQRVREANAQQLRREFGDILFKDDETVDDFSMRIGGLANNLRTLGDNITEAEVVQKLLQVVPEHLQQIAISIETLLDVNELSLEEVTGRLRSVEQRKQCKTAAASSRVDANGRLLFTEEEWLAKFRKAASLQDAAHSSSGNGDRRGRGRGKKDDGAPKEAQPKPANPGGRNPGNCKNCGKRGHWAKDCRSKPKAQQAYVAQEEDEEPALLLAKVQLDPPRPRVAAPTNVVSPPSAPRAPSPIGELAVVEAKVFAQLDDGGEHDPAMWILDTGATNHMTGSRSAFAELDTAVTGTVRFGDGSVVRIEGRVTVLFSCRFGEHRGIAGVYYIPRLTANIVSLGQLDRSGSKVLIHHGILHVWDPRGHLLVRVRRSDDCLYTIKLDIDRPVCLAARSAEPAWRWHARYGHLNFPALRKLAQQEMVRGLPLLQQVTQVCDGCLLGKQRRAAFPTQSKYRADEHLELVHGDLCGPIEPATPAGNRYFLLLVDDMSRYMWLTMIRSKDEAANAIKHFQARAEVESGRKLRALRMDRGSEFTSIEFGEYCANLGVGRQLTAPYSPQQNGVVERRNQTIVATARSMMKAKGVPGRFWGEAMSTAVFLLNRSPTKSLDNQTPYEAWYGQWPAVHFLRTFGCVGHVKITKPGLKKLDDRSAPMVLLGYEQGSKAYRLYDPVSERVHVSRDVVFDEDIAWDWGPVTPDGAPQLEPFTVEQVVTTTIGTAPASSPTPPSPPSPAPSAPTTPAPPSPPSPEAVEFVTPPTQDSILDADADDDVVPRYRLVDNLLGNASPPGHAPRVLEQLELHVVSADEPASLAEAEADPSWRGAMQDELNAIVDNDTWSLTDLPHGHRAIGLKWVYKLKRDEQGAIVRYKARLVAKGYVQRQGVDFDEVFALVARLESVRLLLAVAAHQGWQVHHMDVKSAFLNGELLEEVYVSQPPGFVDDNHKNKVYRLHKALYGLRQAPRAWNAKLDSSLLSLGFHRSSSEHGVYTRTRGGRRLMVGVYVDDLIITGDHDDEIRSFKGEMMKLFKMSDLGALRYYLGIEVTQDSDGITLGQAAYAGKILEKAGLKDCNPCQTPMEVRLKLRKGSDFPLVDATLYRSLVGSLRYLVNTRPDLAFSVGYVSRFMESPREDHLAAVRRILRYVAGTRCWGIRFGPGARCALPMLVGYSDSDLAGDPDERKSTSGQIFFINGGPVTWQSSKQKVVALSSCEAEYIAAAAATCQGVWLARLLAEVLGDEITAPLLKVDNQSTISLIKNPVHHDRSKHIDVKYHYIRECAEKKLIEMMFVGTAEQLGDIFTKSLGRTRFQELRSKIGVCSLDKSSQT

SEQ ID NO: 18773 - protein, 1561 aa, Oryza sativa
  Clone ID: TF_OSC400992j.C1.p25.fg
MAAASRARRWSLAGKTALVTGGTKGIGRAIVEELAGFGVRVHTCSRHDADLQDCLRRWNAAGEGGGAAALVTGSVCDVSVRGDREALVAAARAALGGRLDMLVNNAGQVVVGPAAETAPEEYARLMATNLESCFHLAQLAHHLLRDAAAGGGAAASVVNISSTAAFYAAPHLAVYSATKGGMNQLTRCLAAEWARDGVRVNAVAPGATRTDICDTSGVALGEKTRRRLADAGAMDRVPIRRIGEPEEVAAAVVFLCMPAASYITGQAQGLWGAVEPEGDDLVDYRQDRQALAAILRAVPAEMLATLAVKETAQEAWEAIKTRRIGVQRVREANAQQLAENSVISSSRTVVPEHLQQIAISIETLLDVNELSLEEVTGRLRSVEQRKQRKTAAASSRVDANGRLLFTEEEWLAKFRKAASLQDAAHSSGGNGDRRGRGRGKKDDGAPKEAQPKPANPGGRNLGNCKNCGKRGHWAKDCRSKPKAQQAYVAQEEDEEPALLLAKVQLDPPRPRVAAPTNVVSPPSAPRALSPMGELAVVEAKVFAQLDGGGEHDPAMWILDTGATNHMTGSRSAFAELDTAVTGTVRFGDGSVVRIEGRGTILFSCRFGEHRGIAGVYYIPRLTANIVSLGQLDRSGSKVLIHHGVLRVWDPRGHLLVRVRRSDDCLYTIKLDIDRPVCLAARSAEPAWRWHARYDHLNFPTLRKLAQQEMVRGLPLLQQVTQVCDGCLLRKQRRAAFPTQSKYRADEHLELVHGDLCGPIEPATPAGNRYFLLLVDDMSRYMWLTLIRSKDESANAIKHFQARAEVESGRKLRALRTDRGGEFTSIEFGEYCANLGVGRQLTAPYSPQQNGVVERRNQTIIATARSMMKAKGVPGRFWGEAMSTAVFLLNRSPTKSLDNQTPYEAWYGQRPAVHFLRTFGCVGHVKITKPGLKKLDDRSAPMVLLGYEQGSKAYRLYDPVSERVHVSRDVVFDEDAAWDWGPVVTTTIGTAPASSPTPPSPPSPAPSAPTTPAPPSPPSPEAVEFVTPPTQDSILDVDADDDVVPRYRLVDNLLGNASPPGHAPRVLEQLELHVVSANEPASLAEAEADPNWRGAMQDELNAIVDNDTWSLTDLPHGHRAIGLKWVYKLKRDEQGAIVRYKARLVAKGYVQRQGVDFDEVFAPVARLESVRLLLVVAVHQGWQVHHMDVKSAFLNGELLEEVYVSQPPGFVDDNHKNKVYRLHKALYGLRQAPRAWNAKFDSSLLSLGFHRSSSEHGVYTRTRGGRRLTVGVYVDDLIITGDHDDEIRSFKGEMMKLFKMSDLGALRYYLGIEVTQDSDGITLGQAAYASKILEKAGLKDCNPCQTPMELGWESALSRQHATRPGILCWVCQSLHGVTQGRPSCCRSTHTALCGARCALPMLVGYSESDLAGDPDERKSTSGQIFFINGGPVTWQSSKQKVVALSSCEAEYIAAAAATCQGVWLARLLAEVLGDEIATPLLKVDNQSTISLIKNPVHHDRSKHIDVKYHYIRECAEKKLIEMMFVGTAEQLGDIFTKSLGRTRFQELRSKIGVCSLDKSSQT

SEQ ID NO: 18774 - protein, 1731 aa, Oryza sativa
  Clone ID: TF_OSC401018j.C1.p15.fg
MGCKMAGHPPNHRGEGMIDFVAELARMTLVVGYPNAPEYTTIPPLSGELPHRVRLEVQGYVGTCLANMAVEASGGTADHACQEAAYLMMARLRERHNYIFHDTAYRYHPRRANGDGVSSFRPTAGENDTTFGHMCAVMRGLDRMHSDLHKATKALNDGKLMRIVALKDEIARLKKDNAQLKGLPAPGGVRIRTTPRKTTTAPVRIQLAPRNPPPAAAPAAPPVPPAVPAAQAPAPASALSFAPASAARGPASGTGGCLFGMVHTRTGSRATGEGSNGEERANGVHPSSDSGNGPPPLPENLTLAQVMAHQTQMMAAMMQQMQQQHQQMHQRMMQHAEQQHQQFGPPPPQSKLPEFLRVRPPTFSSTTNPIEANDWLHAIEKKLNLLQCNDQEKVAFATHQLQGPASAWWDNHMATRPPGTEVTWAEFCRSFRKAQVPDGVVAQKKREFRALHQGNRTVTEYLHEFNRLARYAPEDVRTDAEKQEKFMAGLDDELTNQLISGDYADFERLHRPFNSSNFHQGSSGSQNHHGGQPNRGAAPRPPMAPAQSGPPAQAKKETGAKPGSCFNCGELGHFADKCPKPRRAGPRFIQARVNHASAEEAQTAPEVVLGTFPVNSIPATVLFDSGATHSFISKKFVGMYGLRKEELSTPMRVHTPGNSSTSVSFSPSVLIEIQRLPFLANLILLESKDLDVILGMDWLTKFNGVIDCANRTVTLTNEKGETVVYKSLAPPKQGVSLNQIEMEVPVVTEEKNLKKLEDIPIVSEYPEVFPEDLTTMPPKREIEFRIDLAPGTAPIYKRPYRMAANELAEVKKQVDEQLQKGYIRPSTSPWGAPVIFVEKKDKTKRMCVDYRALNEVTIKNKYPLPRIDDLFDQLKGAKVFSKIDLRSGYHQLRIREEDIPKTAFTTRYGLYECTVMSFGLTNAPAFFMNLMNKVFMEFLDKFVVVFIDDILIYSKSEEEDEQHLHLVLEKLKEHQLYAKFNKCDFWLTEVKFLGHVITAQGVAVDPSNVESVTKWTPPKTVSQIRSFLGLAGYYRRFIENFSRIARPMTQLLKKDEKFKWTAECDKSFEELKKKLVSAPVLILPDPTKDFQVYCDASRHGLGCVLMQEGRVVAYASRQLRPHEGNYPTHDLELAAVVHALKIWRHYLIGNRCEIYTDHKSLKYIFTQPDLNLRQRRWLELIKDYDMSIHYHPGKANVVADALSRKSYCTALCIEGMCEELRQEFGHLNVGIVEHGFVAALEARPTLVDQVRAAQVNDPEIAELKKNMRVGKARDFLEDEHGTIWMGERLCVPDDKELKDLILTEAHQTQYSIHPGSTKMYQDLKEKFWWVSMRREIAEFVALCDVCQRVKAEHQRPAGLLQPLQIPEWKWEEIGMDFITGLPRTSSGHDSIWVVVDRLTKVAHFIPVHTTYTGKRLVELYLARIMCLHGVPKKIVSDRGSQFTSKFWQKLQEELGTRLNFSTAYHPQTDGQTERVNQILEDMLRACALDFGGAWDKSLPYAEFSYNNSYQASLQMAPFEALYGRKCRTPLFWDQTGERQLFGTEVLAEAEEKVIIIRERLRIAQSRQKSYADNRRRELTFEAGDYMYLRVTPLREVHRFQTKGKLAPRFVGPYKILERRGEVAYQLELPSNMIGIHDVFHVSQLKKCLRVPEEQADSEHIDIQEDLTYVEKPVRILDTSERRTRNKVTRFCRVQWNHHSEEEATWEREDELKAAHPHLFTSSSESRGRDSV

SEQ ID NO: 18775 - protein, 1705 aa, Oryza sativa
  Clone ID: TF_OSC401018j.C1.p31.fg
MGCKMAGHPPNHRGEGMIDFVAELARMTLVVGYPNAPEYTTIPPLSGELPHRVRLEVHGYVGTCLANMAVEASGGTADHACQEAAYLMMARLRERDNYIFHDTAYRYHPRRANGDGVSSFCPTAGENDTTFGHMCAVMRGLDRMHSDLHKATKALNDGKLMRIVALKDEIARLKKENAQLKGLPAPGGVRIRTTPRKTTTAPVRIQLAPRNPPPAATPAAPPVPPAVPAAPAPAPESALSFAPASAARGPASGTGGCLFGMVYTRTGSRATGEGSNGEERANGVHPSSDSGNGPPPLPENPTLAQVMAHQTQMMAAMMQQMQQQHQQMHQRMMQHAEQQHQQFGPPPPQSKLPEFLRVRPPTFSSTTNPMEANDWLHAIEKKLNLLQCNDQEKVAFATHQLQGPASAWWDNHMATRPPGTEVTWVEFCRSFRKAQVPDGVMAQKKREFRALHQGNRTVTEYLHEFNRLARYAPEDVRTDAEKQEKFMAGLDDELTNQLISGDYADFEWLVDKAIRQEDQRNKMDRKRKAAQFRAPQGSHQRPRFTPGQQGGPTTMIVRQHRPFNSSNFHQGSSGSQNHHGGQPNRGAAPRPPMAPAQSGPPAQAKKETGAKPGSCFNCGELGHFADKCPKPRRAGPRFIQARVNHASAEEAQTAPEVVLGTFPVNSIPATVLFDSGATHSFISKKFVGMYGLRKEELSTPMRVHTPGNSSTSVSFSPSVLIEIQRLPFLANLILLESKYLDVILGMDWLTKFKGVIDCANRTVTLTNEKGETVVYKSLAPPKQGVSLNQIEMEVPVVTEEKNLKKLEDIPIVSEYPEVFPEDLTTIPPKREIEFRIDLAPGTAPIYKRPYRMAANELAEVKKQVDEQLQKGYIRPSTSPWGAPVIFVEKKDKTKRMCVDYRALNELRIREEDIPKTAFTTRYGLYECTVMSFGLTNAPAFFMNLMNKVFMEFLDKFVVVFIDDILIYSKSEEEHEQHLRLVLEKLKEHQLYAKFNKCDFWLTEVKFLGHVITAQGVAVDPSNVESVTKWTPPKTVSQIRSFLGLAGYYRRFIENFSRIARPMTQLLKKDEKFKWTAECDKSFEELKKKLVSAPVLILPDPTKDFQVYCDASRHGLGCVLMQEGRVVAYASRQLRPHEGNYPTHDLELAAVVHALKIWRHYLIGNRCEIYTDHKSLKYIFTQPDLNLRQRRWLELIKDYDMSIHYHPGKANVVADALSRKSYCTALCIEGMCEELRQEFGHLNVGIVEHRFVAALEARPTLVDQVRAAQVNDPEIAELKKNMRVGKARDFLEDEHGTIWMVERLCVPDDKELKDLILTEAHQTQYSIHPGSTKMYQDLKEKFWWVSMRREIAEFVALCDVCQRVKAEHQRPAGGSLYTSAYHLYGKRLAELYLARIMCLHGVPKKIVSDRGSQFTSKFWQKLQEELGTRLNFSTAYHPQTDGQTERVNLILEDMLRACALDFGGAWDKSLPYAEFSYNNSYQASLQMAPFEALYGRKLYTAICALFWDQTGERQLFGTEVLAEVEEKVRIIRERLRIAQSRQKSYADNRRRELTFEEGDYVYLRVTPLRGVHHFQTKGKLAPRFVGPYKILERRGEVAYQLELPSNMIGIHDVFHVSQLKKCLRVPEEQVDSEHIDIQEDLTYVEKPVRILDTSERRTRNKVTRFCRVQWNHHSEEEATWEREDELKAAHPHLFTSSSESRGRDSV

SEQ ID NO: 18776 - protein, 1819 aa, Oryza sativa
  Clone ID: TF_OSC401051j.C1.p55.fg
MAGHPPNHRGEGMIDFVAELARMTLVVGYPDAPEYTTIPPLSGELPHRVRLEVHGYVGTCLANMAVEASGGTADHACQEAAYLMMARLRERHNYIFHDTAYRYHPSRAHGDGVSSFRPTAGENDTTFGHMCAVMRGLDRMHSDLHKATKALNDGKLMRIVALKDEIARLKKENAQLKGLPAPGGVRIRTTPRKTTKAPVRIQLAPRNPPPAAAPAAPPVPPAAPAAPVPAAPAPAPAFVLSFAPASAVRGPASGIGGWLPATPSGSRDRSSSGSQTGSSETYLPGSRSRSEGPGCLFGMVNTRTGNRTTGEGSNGEERVDGMHPNGDPGNGPPPLPENPTLAQVMAHQTQMMAAMMQQMQQQHQQMHQRMMQYAEQQHQQFGPPPPQSKLPEFLRVRPPTFSSTTNPMEANDWLHAIEKKLNLLQCNDQEKVAFATHQLQGPASAWWDNHMATRPPGTEVTWAEFCRSFRKAQVPDGVVAQKKREFRALHQGNRTVTEYLHEFNRLARYAPEDVRTDAEKQEKFMAGLDDELTNQLISGDYADFERLVDKAIRQEDQRNKMDRKRKAAQFRAHQGSHQRPRFTPGQQGGPTTMIVRQHRPFNPSNFHQGTSGSQNHHGGQPNRGAAPRPPMAPAQSGQPTQAKKETGAKPGSCFNCGELGHFADKCPKPRRAGPRFIQARVNHASAEEAQAAPEVVLGTFPVNSIPATVLFDSGATHSFISKKFVGMHGLIREELSTPMRVHTPGNSSTSVQFSPSITIEIQRSPFLANLILLDSKGLDVILGMDWLTKFKGVIDCANRTVTLTNEKGETVVYKSLVSPRKGVSLNQIETEIPVDTVEKNSRKLDDIPIVCEYPEVFPEDLTTMPPKREIEFRIDLAPGTAPIYKRPYRMAANELAEVKKQVDEQLQKGYIRPSTSPWGAPVIFVEKKDKTKRMCVDYRALNEVTIKNKYPLPRIDDLFDQLKGAKVFSKIDLRSGYHQLRIREEDIPKTAFTTRYGLYECTVMSFGLTNAPAFFMNLMNKVFMEFLDKFVVVFIDDILIYSKSEEEHEQHLRLVLEKLKEHQLYAKFSKCDFWLTEVKFLGHVITAQGVAVDPSNVESVTKWTPPKTVSQIRSFLGLAGYYRRFIENFSRIARPMTQLLKKDEKFKWTAECDKSFEELKKKLVSAPVLILPDQMKDFQVYCDASRHGLGCVLMQEGRVVAYASRQLRPHEGNYPTHDLELAAVVHALKIWRHYLIGNRCEVYTDHKSLKYIFTQPDLNLRQRRWLELIKDYDMSIHYHPGKANVVADALSRKSYCTALCTEGMCEELRQEFEHLNIGIVEHGFVAALEARPTLVDQVRAAQVNDPEIAELKKNMRVGKARDFLEDEHGTIWMGERLCVPDDKELKDLILTEAHQTQYSIHPGSTKMYQDLKEKFWWVSMRREIAEFVALCDVCQRVKAEHQRPAGLLQPLQIPEWKWEEIGMDFITGLPRTSSGHDSIWVVVDRLTKVAHFIPVHTTYTGKRLAELYLARIMCLHGVPRKIVSDRGSQFTSKFWQKLQEELGTRLNFSTAYHPQTDGQTERVNQILEDMLRACALDFGGAWDKSLPYAEFSYNNSYQASLQMAPFEALYGRKCRTPLFWDQTGERQLFGTEVLAEAEEKVRIIRERLRIAQSRQKSYADNRRRELTFEAGDYVYLRVTPLRGVHRFQTKGKLAPRFVGPYKILERRGEVAYQLELPSNMIGIHDVFHVSQLKKCLRVPEEQADSEHIDIQEDLTYVEKPVRILDTSERRTRNKVTRFCRVQWSHHSEEEATWEREDELKAAHPHLFTSSSESRGRDSV

SEQ ID NO: 18777 - protein, 1425 aa, Oryza sativa
  Clone ID: TF_OSC401054j.C1.p28.fg
MVYTRNGSRATGEGSNGEERTEGVHPNSNSGNGPPPLPENPTLAQVMAHQTQMMAAMMQQMQQQHQQMHQRMLQHAEQQHQQFGPPPPQSKLPEFLLVRPPTFSSTTNPMEANDWLHAIEKKLNLLQCNDQEKVAFATHQLQGPASAWWDNHMATRPPGTEVTWAEFCRSFKKAQVPDGVVAQKKREFRALHQGNRTVTEYLHEFNRLARYAPEDVRTDAEKQEKFLAGLDDELTNQLISGDYADFERLVDKAIRQEDQRNKMDRKSNFPQGASGSQNHHGGQPNRGAAPRPPMAPAQSGPSAQAKKETGAKPGSCFNCGELGHFADKCPKPRRAGPRFIQARVNHASAEEAQAAPEVVLGTFPVNSIPATILFDSGATHSFISKKFVGMHGLRKEELSTPMRVHTPGNSSTSVSFSPSVLIEIQRSPFLANLILLESKDLDVILGMDWLTKFKGVIDCANRTVTLTNEKGETVVYKSPDSPKQGVSLNQIEAEIPVDTVEKNLRKLEDIPIVCEYPEVFPEDLTTMPPKREIEFRIDLAPGTAPIYKRPYRMAANELAEVKKQVDEQLQKGYIRLSTSPWGAPVIFVEKKDKTKRMCVDYRALNEVTIKNKYPLPRIDDLFDQLKGAKVFSKIDLRSGYHQLRIREEDIPKTAFTTRYGLYECTVMSFGLTNAPAFFMNLMNKVFMEFLDKFVVVFIDDILIYSKSEEEHEQHLRLVLEKLKEHQLYAKFSKCDFWLTEVKFLGHVITAQGVAVDPSNVESVTKWTPPKTVSQIRSFLGLAGYYRRFIENFSRIARPMTQLLKKDEKFKWTAECDKSFEELKKKLVSAPVLILPDQMKDFQVYCDASRHGLGCVLMQEGRVVAYASRQLRPHEGNYPTHDLELAAVVHALKIWRHYLIGNRCEVYTDHKSLKYIFTQPDLNLRQRRWLELIKDYDMSIHYHPGKANVVADALSRKSYCTALCIEGMCEELRQELEHLNVGIVEHGFVAALEARPTLVDQVRAAQVNDSEIAELKKNMRVGKARDFHEDEHGTIWLGERLCVPDDKELKDLILTEAHQTQYSIHPGSTKMYQDLKEKFWWVSMRREIAEFVVLCDVCQRVKAEHQRPAGLLQPLQIQEWKWEEIGMDFITGLPRTSSGHDSIWVVVDRLTKVAHFIPVHTTYTGKRLAELYLSRIMCLHGVPKKIVSDRGSQFTSKFWQKLQEELGTRLNFSTAYHSQIDEFSYNNSYQASLQMAPFEALYGRKCRTPLFWDQTDERQLFGTEVLAEAEEKVRIIRERLRIAQSRQKSYADNRRRELTFEAGDYVYLRVTPLRGEVAYQLELPSNMIGIHDVFHVSQLKKCLRVPEEQADSEHIDIQEDLTYVEKPVRILDTSERRTRNKVTRFCRVQWSHHSEEEATWEREDELKAAHPHLFASSSESRGRDSV

SEQ ID NO: 18778 - protein, 1773 aa, Oryza sativa
  Clone ID: TF_OSC401054j.C1.p42.fg
MAGHPPNHRGEGMIDFVAELARMTLVVGYPNAPEYTTIPPLSGELPHRVHLEVHGYVGTCLANMAVEASGGTADHACQEAAYLMMARIRERHDYIFHDTAYRYHPRRAHGDGVSSFRPTAGENDTTFGHMCAVMSGLDRMHSDLHKATKALNDGKLMRIVALKDEIARLKKENAQLKGLPAPGGVRIRTTPRKTTTAPVRIQLAPRNPPPAAAPAAPSVPPAVPAAPVPAPAFTLSFAPASAARGPASGTGGCLFGMVYTRTGNRTTGEGSNGEERVDGVHPNSDSGNGPPPLPENPTLAQVMAHQTQMMAAMMQQMQQQHQQMHQRMMQHAEQQHQQFGPPPPQSKLPEFLRVRPPTFSSTTNPMEANDWLHAIEKKLNLLQCNDQEKVAFATHQLQGPASAWWDNHMATRPPGTEVTWAEFCRSFRKAQVPDGVVAQKKREFRALHQGNRTVTEYLHEFNRLARYAPEDVRTDAEKQEKFMAGLDDELTNQLISGDYADFERLVDKAIRQEDQRNKIDRKRKAAQFRAPQGSHQRPRFTPGQQGGPTTMIVRQHRPFNPSNFHQGTSGSQNHHGGQPNRGAAPRPSVAPAQSGQPAQAKKETGAKPGSCFNCGELGHFADKCPKPRRAGPRFIQARVNHASAEEAQTAPEVVLGTFPVNSIPATVLFDSGATHSFISKKFVGRYGLRKEELSTPMRVHTPGNSSTSVSFSPSVLIEIQRSPFLANLILLESKDLDVILGMDWLTKFKGVIDCANRTVTLTNEKGETVVYKSLVSPKKGVSLNQIETEIPVDTVEKNLRKLEDIPIVCEYPEVFPEDLTTMPPKREIEFRIDLAPGTAPIYKRPYRMAANELAEVKKQVDEQLQKGYIRPSTSPWGAPVIFVEKKDKTKRMCVDYRALNEVTIKNKYPLPRIDDLFDQLKGAKVFSKIDLRSGYHQLRIREEDIPKTAFTTRYGLYECTVMSFGLTNAPAFFMNLMNKVFMEFLDKFVVVFIDDILIYSKSEEEHEQHLRLVLEKLKEHQLYAKFSKCDFWLTEVKFLGHVITAQGVAVDPSNVESVTKWTPPKTVSQIRSFLGLAGYYRRFIENFSRIARPMTQLLKKDEKFKWTAECDKSFEELKKKLVSTPVLILPDQMKDFQVYCDASRHGLGCVLMQEGRVVAYASRQLRPHEGNYPTHDLELAAVVHALKIWRHYLIGNRCEVYTDHKSLKYIFTQPDLNLRQRRWLELIKDYDMSIHYHPGKANVVADALSRKSYCTALCIEGMCEELRQEFEHLNMGIVEHGFVAALEARPTLVDQVRAAQVNDSEIAELKKNMRVGKAREFHEDEHGTIWMGERLCVPDDKELKDLILTEAHQTQYSIHPGSTKMYQDLKEKFWWVSMRREIAEFVALCDVCQRVKAEHQRPAGLLQPLQIPEWKWEEIGMDFITGLPRTSSGHDSIWVVVDRLTKVAHFIPVHTTYTGKRLAELYLSRIMCLHGVPKKIVSDRGSQFTSKFWQKLQEELGTRLNFSTAYHPQTDGQTERVNQILEDMLRACALDFGGAWDKSLPYAEFSYNNSYQASLQMAPFEALYGRKCRTPLFWDQTGERQLFGTEVLAEAEEKVRIIRERLRIAQSRQKSYVDNRRRELTFEAGDYVYLRVTPLRGVHRFQTKGKLAPRFVGPYKILERRGEVAYQLELPSNMIGIHDVFHVSQLKKCLRVPEEQADSEHIDIQEDLTYVEKPVRILDTSERRTRNKVTRFCRVQWSHHSEEEATWEREDELKAAHPHLFTSSSESRG

SEQ ID NO: 18779 - protein, 1714 aa, Oryza sativa
  Clone ID: TF_OSC401054j.C1.p59.fg
MAVEASGGTADHACQEAAYLMMARIRERHDYIFHDTAYRYHPRRAHGDGVSSFRPTAGENDTTFGHMCAVIRGLDRMHSDLHKATKALNDGKLMRIVALKDEIARLKKENAQLKGLPAPGGVRIRTTPRKTTTAPVRIQLAPRNPPPPAAPAAPSVPPAVPAAPAPAPAFTLSFAPASAARGSASGTGGCLFGMVYTRNGSRATGEGSNGEERADGVHPNSDSGNGPPPLPENPTLAQVMAHQTQMIAAMMQQMQQQHQQMHQRMMQHAEQQHQQFGPPPPQSKLPEFLRVRPPTFSSTTNPMEANDWLHAIEKKLNLLQCNDQEKVAFATHQLQGPASAWWDNHMATRPPGTEVTWAEFCRSFRKAQVPDGVVAQKKREFRALHQGNRTVTEYLHEFNRLARYAPEDVRTDAEKQEKFMAGLDDELTNQLISGDYADFERLVDKAIRQEDQRNKMDRKRKAAQFRAHQGSHQRPRFTPGQQGGPTTMIVRQHRPFNPSNFHQGTSGSQNHHGSQPNRGAAPRPSVAPAQSGQPAQAKKETGAKPGSCFNCGELGHFADKCPKPRRAGPRFIQARVNHASAEEAQAAPEVVLGTFPVNSIPATVLFDSGATHSFISKKFVGMHGLIREELSTPMRVHTPGNSSTSVQFSPSITIEIQRSPFLANLILLESKDLDVILGMDWLTKFKGVIDCASRTVTLTNEKGETVVYKSLVSPKKGVSLNQIETEIPVDTVEKNLRKLEDIPIVCEYPEVFPEDLTTMPPKREIEFRIDLAPGTAPIYKRPYRMAANELAEVKKQVDEQLQKGYIRPSTSPWGAPVIFVEKKDKTKRMCVDYRALNEVTIKNKYPLPRIDDLFDQLKGAKVFSKIDLRSGYHQLRIREEDIPKTAFTTRYGLYECTVMSFGLTNAPAFFMNLMNKVFMEFLDKFVVVFIDDILIYSKSEEEHEQHLRLVLEKLKEHQLYAKFSKCDFWLTEVKFLGHVITAQGVAVDPSNVESVTKWTPPKTVSQIRSFLGLAGYYRRFIENFSRIARPMTQLLKKDEKFKWTAECDKSFEELKKKLVSAPVLILPDPTKDFQVYCDASRHGLGCVLMQEGRVVAYASRQLRPHEGNYPTHDLELAAVVHALKIWRHYLIGNRCEVYTDHKSLKYIFTQPDLNLRQRRWLELIKDYDMSIHYHPGKANVVADALSRKSYCTALCVEGMCEELRQEFEHLNVGIVEHGFVAALEARPTLVDQVRAAQVNDSEIAELKKNMRVGKARDFHEDEHGTIWMGERLCVPNDKELKDLILTEAHQTQYSIHPGSTKMYQDLKEKFWWVSMRREIAEFVALCDVCQRVKAEHQRPAGLLQPLQIPEWKWEEIGMDFITGLPRTSLGHDSIWVVVDRLTKVAHFIPVHTTYTGKRLAELYLARIMCLHGVPKKIVSDRGSQFTSKFWQKLQEELGTRLNFSTAYHPQTDGQTERVNQILEDMLRACALDFGGAWDKSLPYAEFSYNNSYQASLQMAPFEALYGRKCRTPLFWDQTGERQLFGTEVLAEAEEKVRIIRERLRIAQSRQKSYADNRRRELTFEAGDYVYLRVTPLRGVHRFQTKGKLAPRFVGPYKILERRGEVAYQLELPSNMIGIHDVFHVSQLKKCLRVPEEQADSEHIDIQEDLTYVEKPVRILDTSERRTRNKVTRFCRVQWSHHSEEEATWEREDELKAAHPHLFTSSSESRGRDSV

SEQ ID NO: 18780 - protein, 1785 aa, Oryza sativa
  Clone ID: TF_OSC401061j.C1.p25.fg
MAGHPPNHRGEGMIDFVAELARMTLVVGYPNAPEYTTIPPLSGELPHRVRLEVHGYVGTCLANMAVEASGGTADHACQEAAYLMMARLRERHDYIFHDTAYRYHPRRAHGDGVSSFRPTAGENDTTFGHMCAVMRGLDRMHSDLHKATKALNDGKLMRIVALKDEIARLKKENAQLKGLPVPGGVRIRTTPRKRTTAPVRIQLAPRNPPPPAAPAAPPVPPAAPAVPAVPPAPAPAPAPAFTLSFAPASAARGPASGTGGCLFGMVYTRTGNRTTGEGSNGEERADGVHPNGDSGNGPPPLPENPTLAQVMAHQTQMMAAMMQQMQQQHQQMHQRMMQHAEQQHQQFGPPPPQSKLPEFLRVRPPTFSSTTNPMEANDWLHAIEKKLNLLQCNDQEKVAFATHQLQGPASAWWDNHMATRPPGTEVTWAEFCRSFRKAQVPDGVVAQKKREFRALHQGNRTVTEYLHEFNRLARYAPEDVRTDAEKQEKFMAGLDDELTNQLISGDYADFERLVDKAIRQEDQRNKMDRKRKAAQFRSNQGSQHRPRFTPGQQGGPTTMIVRQHRPFNPSNFHQGTSGSQNHHGSQPNRGTAPRPSVAPAQSGQPAQAKKETGAKPGSCFNCGELGHFADKCPKPRRAGPRFIQARVNHASAEEAQAAPEVVLGTFPVNSIPATVLFDSGATHSFISKKFVGMHGLIREELSTPMRVHTPGNSSTSVQFSPSITIEIQRSPFLANLILLESKDLDVILGMDWLTKFKGVIDCASRTVTLTNEKGETVVYKSLVSPKKGVSLNQIETEIPVDTVEKNLRKLEDIPIVCEYPEVFPEDLTTMPPKREIEFRIDLAPGTAPIYKRPYRMAANELAEVKKQVDEQLQKGYIRPSTSPWGAPVIFVEKKDKTKRMCVDYRALNEVTIKNKYPLPRIDDLFDQLKGAKVFSKIDLRSGYHQLRIREEDIPKTAFTTRYGLYECTVMSFGLTNAPAFFMNLMNKVFMEFLDKFVVVFIDDILIYSKSEEEHEQHLRLVLEKLKEHQLYAKFSKCDFWLTEVKFLGHVITAQGVAVDPSNVESVTKWTPPKTVSQIRSFLGLAGYYRRFIENFSRIARPMTQLLKKDEKFKWTAECDKSFEELKKKLVSAPVLILPDQMKDFQVYCDASRHGLGCVLMQEGRVVAYASRQLRPHEGNYPTHDLELAAVVHALKIWRHYLIGNRCEVYTDHKSLKYIFTQPDLNLRQRRWLELIKDYDMSIHYHPGKANVVADALSRKSYCTALCIEGLCEKLRQEFEHLNVGIVEHGFVAALEARPTLVDQVRAAQVNDSEIAELKKNMRVGKARDFHEDEHGTIWMGERLCVPDDKELKDLILTEAHQTQYSIHPGSTKMYQDLKEKFWWVSMRREIAEFVALCDVCQRVKAEHQRPAGLLQPLQIPEWKWEEIGMDFITGLPRTSSGHDSIWVVVDRLTKVAHFIPVHTTYTGKRLAELYLARIMCLHGVPKKIVSDRGSQFTSKFWQKLQEEMGTRLNFSTAYHPQTDGQTERVNQILEDMLRACALDFGGAWDKSLPYAEFSYNNSYQASLQMAPFEALYGRKCRTPLFWDQTGERQLFGTEVLAEAEEKVRIIRERLRIAQSRQKSYADNRRRELTFEAGDYVYLRVTPLRGVHRFQTKGKLAPRFVGPYKILERRGEVAYQLELPSNMIGIHDVFHVSQLKKCLRVPEEQADSEHIDIQEDLTYVEKPVRILDASERRTRNKVTRFCRVQWSHHSEEEATWEREDELKAAHPHLFTSSSESRGRDSV

SEQ ID NO: 18781 - protein, 353 aa, Oryza sativa
  Clone ID: TF_OSC401097j.C1.p3.fg
MSEVGSQDEFVKTNTDGSEKGEYSGGNRPVMSRIGKMAPTGRDGSDSTCERFQSTVTDLVKMDVEVDDEDKAIVLLCSLPESYEHVVTTLTYGKETIKTKDITSALLARDQMRKNKEGETSQAEGLLVKEDHAGHKVKKNKKKKMVQCFRCDELGHISRECPTLKGKAKANAATSSNDSDSDGCDLLTMSSAQSKDAEVWILDLASLFHVTPRKEWFSSYKSGECGFVYLGDDTSYPAVGVGEVKIKLEDGGLKRNLISLGTLHEEGLIFHGNRNRKTIEIMKGKMTVMTGEKVESHLYKLQGCTVAGGVQEEAVAGIGIVFVAAGLAQTRRAACGEAAKKTTQVWKTGGSAW

SEQ ID NO: 18782 - protein, 1649 aa, Oryza sativa
  Clone ID: TF_OSC401127j.C1.p10.fg
MAGHPPNHRGEGMIDFVAELARMTLVVGYPNAPEYTTIPPLSGELPHRVRLEVHGYVGTCLANMAVEASGGTADHACQEAAYLMMARLRERHNYIFHDTAYRYHPRRANGDGVSSFRPTAGENDTTFGHMCAVMRGLDRMHSDLHKATKALNDGKLMRIVALKDEIARLKKENAQLKGLPAPGGVRIRTTPRKTTTAPVRIQLAPRKPPPPAAPAAPPVPPAVPAAPVPAPAFTLSFAPASAARGPASGTGGCLFGMVYTRNGSRATGEGSNGEERADGVHPNSDSGNGPPPLPENPTLAQVMAHQTQMMAAMMQQMQQQHQQMHQRMMQHAEQQHQQFGPPPPQSKLPEFLRVRPPTFSSTTNPMEANDWLHAIEKKLNLLQCNDQEKVAFATHQLQGPASAWWDNHMATRPPGTEVTWAEFCRSFRKAQVPDGVVAQKKREFRALHQGNRTVTEYLHEFNRLARYAPEDVRTDAEKQEKFMAGLDDELTNQLISGDYADFERLVDKAIRQEDQRNKMDRKRKAAQFRAPQGSHQRPRFTPGQQGGPTTMIIRQHRPFNPSNFHQGTSGSQNHHGGQPNRGAAPRPSVAPAQSGQPAQAKKETGAKPGSCFNCGELGHFADKCPKPRRAGPRFIQARVNHASAEEAQAAPEVVLGTFPVNSIPATVLFDSGATHSFISKKFVGRSPFLANLILLESKDLDVILGMDWLTKFKGVIDCASRTVTLTNEKGETVVYKSLVSPKKGVSLNQIETEIPVDTVEKNLRKLEDIPIVCEYPEVFPEDLTTMPPKREIEFRIDLAPGTAPIYKRPYRMAANELAEVKKQVDEQLQKGYIRPSTSPWGAPVIFVEKKDKTKRMCVDYRALNEVTIKNKYPLPRIDDLFDQLKGAKVFSKIDLRSGYHQLRIREEDIPKTAFTTRYGLYECTVMSFGLTNAPAFFMNLMNKVFMEFLDKFVVVFIDDILIYSKSEEEHEQHLRLVLEKLKEHQLYAKFSKCDFWLTEVKFLGHVITAQGVAVDPSNVESVTKWTPPKTVSQIRSFLGLAGYYRRFIENFSRIARPMTQLLKKDEKFKWTAECDKSFEELKKKLVSAPVLILPDPTKDFQVYCDASRHGLGCVLMQEGRVVAYASRQLRPHEGNYPTHDLELAAVVHALKIWRHYLIGNRCEVYTDHKSLKYIFTQPDLNLRQRRWLELIKDYDMSIHYHPGKANVVADALSRKSYCTALCIEGMCEELRQEFEHLNMGIVEHGFVAALEARPTLVDQVRAAQVNDSEIAELKKNMRVGKARDFHEDEHGTIWMGERLCVPDDKESKDLILTEAHQTQYSIHPGSTKMYQDLKEKFWWVSMRREIAEFVALCDVCQRVKAEHQRPAGLLQPLQIPEWKWEEIGMDFITGLPRTSSGHDSIWVVVDRLTKLVDKSLPYAEFSYNNSYQASLQMAPFEALYGRKCRTPLFWDQTGERQLFGTEVLAEAEEKVRIIRERLRIAQSRQKSYADNRRRELTFEAGDYVYLRVTPLRGVHRFQTKGKLAPRFVGPYKILERRGEVAYQLELPSNMIGIHDVFHVSQLKKCLRVPEEQADSEHIDIQEDLTYVEKPVRILDTSERRTRNKVTRFCRVQWSHHSEEEATWEREDELKAAHPHLFTSSSESRGRDSV

SEQ ID NO: 18783 - protein, 1114 aa, Oryza sativa
  Clone ID: TF_OSC401161j.C1.p52.gm
MVYTRTGNRTAGEGSNGEERADGVHPNSDSGNGPPPLPENPTLAQVMAHQTQMMAAMMQQMQQQHQQMHQRMMQHAEQQHQQFGPPPPQSKLLEFLRVRPPTFSSTTNPMEANDWLHAIEKKLNLLQCNDQEKVAFATHQLQGPASAWWDNHMATRPPGAEVTWAEFCRSFRKAQVPDGVVAQKKREFRVLHQGNRTVTEYLHEFNRLARYAPEDVRTDAEKQEKFMAGLDDELTNQLISGDYADFERLVDKAIRQEDQRNKMDRKRKAAQFRSNQGSQHRPRFTPGQQGGPTTMIVRQHRPFHSSNFHQGASGSPNHQGGQPNRGAAPRPPMAPAQPAPSAQAKKETGTKPGSCFNCGELGHFADKCPKPRRAGPRFIQARVNHASAEEAQAAPEIETEIPVDTVEKSLRKLEDIPIVCEYPEVFPEDLTTMPPKREIEFRIDLAPGTAAIYKRPYRMAANELAEVKKQVDEQLQKGYIRPSTSPWGAPVIFVEKKDKTKRMCVDYRALNEVTIKNKYPLPRIDDLFDQLKGAKVFSKIDLRSGYHQLRIREEDIPKTAFTTRYGLYECTVMSFGLTNAPAFFMNLMNKVFMEFLDKFVVVFIDDILIYSKSEEEHEQHLRLVLEKLKEHQLYAKFSKCDFWLTEVKFLGHVITAQGVAVDPSNVESVTKWTPPKTVSQIRSFLGLAGYYRRFIENFSRIARPMTQLLKKDEKFKWTAECDKSFEELKKKLVSAPVLILPDQMKDFQVYCDASRHGLGCVLMQEGRVVAYASRQLRPHEGNYPTHDLELAAVVHALKIWRHYLIGNRCEEFEHLNVGIVEHGFVAALEARPTLVDQVRAAQVNDPEIAELKKNMRVGKARDFLEDEHGTIWMGERLCVPDDKELKDLILTEAHQTQYSIHPGSTKIASKASRLTPTSSNPGMEMGGNWNGLYNRTAPDIIGSRFNLEVLAEAEEKVRIIRERLRIAQSRQKSYADNRRRELTFEAGDYVYLRVTPLRGVHRFQTKGKLAPRFVGPYKILERRGEVAYQLELPSNMIGIHDVFHVSQLKKCLRVPEEQADSEHIDIQEDLTYVEKPARVGVMERGGPCDGLYRFRIHLGTRGDCPLPAGDGGET

SEQ ID NO: 18784 - protein, 992 aa, Oryza sativa
  Clone ID: TF_OSC401171j.C1.p7.np
MAGHPPNHRREGMIDFVAELARMTLVVGYPNAPEYTTIPPLSGELPHRVRLEVHGYVGTCLANMAVEASGGTADHACQEAAYLMMARLRERHNYIFHDTAYRYHPRRANGDGVSSFRPTAGENDTTFGHMCAVMRGLDRMHSDLHKATKALNDGKLMRIVALKDEIARLKRENAHLKGLPAPGGVRIRTTPRKTTTTPVRIQLAPRNPPPAAAPAAPPVPPVVPAAPAPAPASALSFAPASAARGPASGTGGWLSATPSGSRDRSSSGSQSGSGETYLPGSRSRSEGPGMVYTRTGNRTTGEGSNGEERADGVHPNSDSGNGPPPLPENPTLAQVMAHQTQMMAAMMQQMQQQHQQMHQRMMQHVEQQHQHFGPPPPQSKLPEFLHVRPPTFSSTTNPMKANDWLHAIEKKLNLLQCNDQEKVAFATHQLQGPASAWWDNHMATRPPGTEVTWAEFCRSFRKAQVLDGVVAQKKREFRALHQGNRTVTEYLHEFNRLARYAPEDVRTDAEKREKFMAGLDDELTNQLISGDYADFERLVDKAIRQEDQRNKMDRKRKAAQFRAHQGSHQRPRFTPGQQGGPTTMIVRQHRPFNPSNFPQGANGSQNHHGGQPNRGAAPRPPMAPAQSGPSAQAKKETGAKPGSCFNCGELGHFADKCPKPRRAGPRFIQARVNHASAEEAQAAPEVVLGTFPVNSIAATVLFDSDATHSFISKKFVGMYGLRKEELSTPMRVHTPGNSSTSVSFSPSVLIEIQRSPFLANLILLESKDLDVILGMDWLTKFKGVIDCANRTVTLTNEKGETVVYKSLASPKQGVSLNQIETEIPVDTVEKNLRKLEDIPIVCEYPEVFPEDLTTMPPKREIEFRIDLAPGTAPIYKRPYRMAANELAEVKKQVDEQLQKGYIRPSTSPWGAPVIFVEKKDKTKRMCVDYRALNEVTIKNKYPLPRIDDLFDQLKGAKVFSKIDLRSGYHQLRIREEAITATGFHTGHGKASH

SEQ ID NO: 18785 - protein, 1823 aa, Oryza sativa
  Clone ID: TF_OSC401197j.C1.p33.fg
MERPKSPLNPFHCICSLQLDFVPGKWGSVLVVQGKNLGRSFKMAGHPPNHRGEGMIDFVAELARMTLVVGYPDAPEYTTIPPLSGELPHRVRLEVHGYVGTCLANMAVEASGGTADHACQEAAYLMMARLRERHDYIFHDTAYRYHPRRAHGDGVSSFRPTAGENDTTFGHMCAVMRGLDRMHSDLHKATKALNDGKLMRIVALKDEVARLKKENAQLKGLPAPGGVRIRTTPRKRTTAPVRIQLAPRNPPPPAAPAAPSVLPAVPAAPASAPAPAPAFTLSFAPASAARGSASGTGGCLFGMVYTRTGSRATGEGSNGEERADGVHPNGDSGNGPPPLPENPTLAQVMAHQTQMMAAMMQQMQQQHQQMHQRMMQHAEQQHQQFGPPPPQSKLPEFLRVRPPTFSSTTNPMEANDWLHAIEKKLNLLQCNDQEKVAFATHQLQGPASAWWDNHMATRPPGTEVTWAEFCRSFRKAQVPDGVVAQKKREFRALHQGNRTVTEYLHEFNRLARYAPEDVRTDAEKQEKFMAGLDDELTNQLISGDYADFERLVDKAIRQEDQRNKMDRKRKAAQFRSNQGSQHRPRFTPGQQGGPTTMIVRQHRPFNPSNFHQGTSGSQNHHGGQPNRGAAPRPPMAPAQSGQPAQAKKETGAKPGSCFNCGELGHFADKCPKPRRAGPRFIQARVNHASAEEAQAAPEVVLGTFPVNSIPATVLFDSGATHSFISKKFVGMHGLIREELSTPMRVHTPGNSSTSVQFSPSITIEIQRSPFLANLILLESKDLDVILGMDWLTKFKGVIDCASRTVTLTNEKGETVVYKSLVSPKKGASLNQIETEIPVDTEEKNLRKLEDIPIVCEYPEVFPEDLTTMPPKREIEFRIDLAPGTAPIYKRPYRMAANELAEVKKQVDEQLQKGYIRPSTSPWGAPVIFVEKKDKTKRMCVDYRALNEVTIKNKYPLPRIDDLFDQLKGAKVFSKIDLRSGYHQLRIREEDIPKTAFTTRYGLYECTVMSFGLTNAPAFFMNLMNKVFMEFLDKFVVVFIDDILIYSKSEEEHEQHLRLVLEKLKEHQLYAKFSKCDFWLTEVKFLGHVITAQGVAVDPSNVESVTKWTPPKTVSQIRSFLGLAGYYRRFIENFSRIARPMTQLLKKDEKFKWTAECDKSFEELKRKLVSAPVLILPDQTKDFQVYCDASRHGLGCVLMQEGRVVAYASRQLRPHEGNYPTHDLELAAVVHALKIWRHYLIGNRCEVYTDHKSLKYIFTQPDLNLRQRRWLELIKDYDMSIHYHPGKANVVADALSRKSYCTALCIEGMCEELRQEFEHLNVGIVEHGFVAALEARPTLVDQVRAAQVNDPEIAELKKNMRVGKARDFLEDEHGTIWMGERLCVPDDKELKDLILTEAHQTPYSIHPGSTKMYQDLKEKFWWVSMRREIAEFVALCNVCQRVKAEHQRPAGLLQPLQIPEWKWEEIGMDFITGLPRTSSGHDSIWVVVDRLTKVAHFIPVHTTYTGKRLAELYLARIMCLHGVPKKIVSDRGSQFTSKFWQKLQEELGTRLNFSTAYHPQTDGQTERVNQILEDMLRACALDFGGAWDKSLPYAEFSYNNSYQASLQMAPFEALYGRKCRTPLFWDQTGERQLFGTEVLAEAEEKVRIIRERLRIAQSRQKSYADNRRRELTFEAGDYVYLRVTPLRGVHRFQTKGKLAPRFVGPYKILERRGEVAYQLELPSNMIGIHDVFHVSQLKKCLRVPEEQADSEHIDIQEDLTYVEKPVRILDTSERRTRNKVTRFCRVQWSHHSEEEATWEREDELKAAHPHLFTSSSESRGRDSV

SEQ ID NO: 18786 - protein, 1192 aa, Oryza sativa
  Clone ID: TF_OSC401235j.C1.p16.fg
MGCKMAGHPPNHRGEGMIDFVAELARMTLVVGYPNAPEYTTIPPLSGELPHRVRLEVHGYVGTCLANMVVEAAGGTADHACQEAAYLMMARLRERHNYIFHDTAYRFHPRRASNDDVSSFRPTAGENDTTFGHMCAVMRGLDRMHSDLHKATKALNDGKLMRIVALKDEITRLKRENAQLKGLPAPGGVWIRTTPRKTTTAPVRIQLAPRNPPPSAAPAAPPVPPTVPAAPAPAPASALSFAPASAARGPASGTGGCLFGMVYTRNGSRATGEGSNGEERTDGAHPHSDSGNGPPPLPENPTLAQVMAHQTQMMAAMMQQMQQQHQQMHQRMMQHVEQQHQHFGPPPPQSKLPEFLRVRPPTFSSTTNPMEANDWLHAIEKKLNLLQCNDQEKVAFATHQLQGPASAWWDNHMATRPPGTEVTWAEFCRSFRKAQVPDGVVAQKKREFRALHQGNRTVTEYLHEFNRLTRYAPEDVRTDAEKQEKFMAGLDDELTNQLISGDYADFERLVDKAIRQEDQRNKMDRKRKATQFRAPQGSHQRPRFTPGQQGGPTTMIVRQYRPFNPSNFPQGSSGSQNHHGGQSNRGAAPRPPMAPAQSGPSAQAKKETGAKPGSCFNCGELGHFADKCPKPRRAGPRFIQARVNHASAEEAQAAPEVVLGTFPVNSIPAIVLFDSGATHSFISKKFVGMHGLIREKLSTPMRVHTPGNSSTSVQFSPSITIEIQRSPFLANLILLESKDLDVILGMDWLTKFKGVIDCANRTVTLTNEKGKTVVYKSPDSPKQGVSLNQIEAEIPVDTVEKNLRKLEDIPIVSEYPEVFPEDLTTMPPKREIEFRIDLAPGTAPIYKRPYRMAANELAEVKKQVDEQLQKGYIRPSTSPWGAPVIFVEKKDKTKRMCVDYRALNEVTIKNKYPLPRIDDLFDQLKGAKVFSKIDLRSGYHQLRIREEDIPKTAFTTRYGLYECTVMSFGLTNAPAFFMNLMNKVFMEFLDKFVVVFIDDILIYSKSEEEHEQHLRLVLEKLKEHQLYAKFSKCDFWMTEVKFLGHVITAQGVAVDPSNVESVTKWTPPKTVSQIRSFLGLAGYYRRFIENFSRIARPMTQLLKKDEKFKWTAECDKSFEELKKKLVSALVLILPDQMKDFQVYCDASRHGLGCVLMQEGRVVAYASRQLRPHEGNYPTHDLELAAVVHALKI

SEQ ID NO: 18787 - protein, 1656 aa, Oryza sativa
  Clone ID: TF_OSC401325j.C1.p17.fg
MSGQTGNGKDGDKGGTFPYDYLSTSISYVSTYSGKAPYFNGTDYAASKHKMKMHLKSINPLIWRIVEKGYVLQNPEEPTKEDDENEHKNAQAANAILSALSGSEFNRVDGIESAKVIWDTLRNLHEGTDSVRESKVEILKGQFERKIVNEIKGLGSKDMTDEVVVKKMVRAITPRNSTLVTIIRERPDYKTLTPHDLLGRILAHNMLEQESKEVIQYINQTSTTSIKKEDLALKAKEEEEESRKSKSKAEIDDEEMALFVKKFGKFMKQSGFFKGSSSKHSSNKSSGRRSARVCYVCKEPGHFITDCPHIKDCLHFKEDKKKLEKKEKHKHSKHDRYGQAHLGMIFGSDSESSSSDEEGVATFAVKPSSPPRLFNYSSDEDAPICLMAKEPKVPSPLKSFNVDLVSDLEEDVEDEVMDDELFKSIAKESIPHLSELLRRIENQYATLERQEELLIREKERSHELKSELAKEREKNEALVRLYKQTKESHANLEVANAQLQERVDDLDKAYLSLEEKFETLKNSVSFPSEASCSKIVPSNEPCVRCKDIDIETCATNSTSLSALQKQNEKLMGLLHNGLLKCHMGSKALKEYLGYQRDNFNHEGLGYVPPPKGRVDKSVMIKKPQCLSNFVKAKCILPNDNASHCFDASYVLRKNASGRVVAKYVGPRGKNISIKRVLWVPKALVTNMRGPKQEYVSGGRSWVIDSGCTNHMTGEESMFSSLDPNGTSQENIIFGDDGKGKASPCWYEESSQTSKARHILGLTNIQFEKDRVCSACQAGKQIGAHHPVKNVMTTTRPLELLHMDLFGPIAYLSIGGNKYGLVIVDDFSCFTWVFFLHDKSETQAIFKKFARRAQNEFDLKIKNIRSDNVKEFKNTCIESFLDEEGIKHEFSAPYSPQQNGVAERKNRTLIEIARTMLDEYKTSDRFWAEAVNTVCHDINRLYLHRLLKKTPYELLTGNKPNVSYFRVFGSKCYILNKKARSSKFAPKVDGGFLLGYGSNECAYRVFNKTSGIVEIAPDVTFDETNGSQVEQVDSHVLGEEEDPREAIKRLALGDVRPREPQQGASSSTQVEPPTSTQANDPSTSSLDQGEEGEQVPPSSINLAHPRIHQSIQRDHPTDNILGDINKGVSTRSHIANFCEHYSFVSSLEPLRVEEALNDPDWVMAMQEELNNFTRNEVWTLVERSRQNVIGTKWIFRNKQDEAGVVIRNKARLVAQGFTQIEGLDFGETFAPVARLESIRILLTFATNLNFKLYQMDVKSAFLNGLINELVYVEQPPGFKDPKYPNHVYKLHKALYELKQAPRAWYECLRNFLVKNGFEIGKADSTLFTKRHDNDIFVCQIYVDDIIFGSTNKSFSEEFSRMMTKRFEMSMMGELKFFLGLQIKQLKEGTFICQTKYLKDMLKKFGMENAKPIHTPMPSNGHLDLNEQGKDVDQKVYRSIIGSLLYLCASRPDIMLSVCMCARFQAAPKECHLVAVKRILRYLVHTPNLGLWYPKGARFDLIGYADADYAGCKVDRKSTSGTCQFLGRSLVSWSSKKQNSVALSTAEAEYISTGSCCAQLIWMKQTLRDYGLNVSKIPLLCDNESAIKIANNPVQHSRTKHIDIRHHFLRDHSTRGDIDIQHVRIDKQLADIFTKPLDEARFCELRSELNILDSRNVA

SEQ ID NO: 18788 - protein, 1398 aa, Oryza sativa
  unsure (1)..(1398): unsure at all Xaa locations
  Clone ID: TF_OSC401394j.C1.p1.np
IAGHPPNHHGEGMIDFVAELARMTLVVGYPNAPEYTTVPPLSGELPHRVRLEVHGYVGTCLANMVVEASGDTADHACQEAAYLMMAKLRERHNYIFHDTAYRFHPRRASGDDVSTFRPTAGDNDTTFGHMCAVMRGLDRMHSDLHKASKALNDGKLMRIVTLKDKIARLKRENAQLKGLPAPGGVRIRTTPRKSTTTPVCIQLAPRNPPPSAAPAAPPVPPTAPAVPAAPAPAPALVPVSAPASALSFAPALAVRVPASGNGGWLPATPSGSRDRSSSGSEPGSGETYLPGSRSRSEGPGLFLQMVYTRNGSRTTGEGSNGEERADGVHPNSDSGNGPPPLPENPTLAQVMAHQTQMMAAMMQQMQHQHQQMHQRMLQHAEQQHQQFGPPPSQSKLPEFLRVRPPTFSSTTNPMEANDWLHAIEKKLNLLQCNDQEKVAFATHQLQGPASAWWDNHMATRPPGTEVTWAEFCRSFRKAXVPDGVVAQKKREFQALHQGNRTVTEYLHEFHRLARYAPEDVRTDAEKQEKFMAGLDDELTNQLISGDYADFERLVDKAIRQEDQQNKMDGKRKAAQFRSNQGNHQRLRFAPGQQGGPTTMIICQYRPFNSSNFHQGASGSQNHHGGQPNRGAAPRPPVAPAQSGPSAQAKKETGTKPGSCFNCGELGHFADKCPKPRRAGPRIVQARVNHASAEEAQAAPEVVLGTFLVSSIPATVLFDSGATHSFISKKFVGMHGLRKEELNTPMRVHTLGNSSTSVSFSPSVLIEIQRSPFLANLILLESKDLDVILGMDWLTKFKGVIDCANRTVTLTNKKGETVVYKSLVSPKQRVSLNQIEAEIPVVTEEKNPRKLEEIPIVCEYPEVFPEDLTTMPPKREIEFRIDLAPGTAPIYKRPYRMAANELAEVKKQVDEQLQKGYIRPSTLPXGAPVIFVEKKDKTKRVDYRALNEVTIKNKYPLPRIDDLFDQLKGAKVFSKIDLRSGYHQLRIREEDIPKTAFTTRYGLYECTVMSFGLTNAPAFFMNLINKVFMEFLDKFVVVFIDDILIYSKSEEEHEQHLRLVLEELKEHQLYAKFSKCDFWLSEVKFLGHVITAQGVAVDPSNVESVTKWTPPKTSQIRSFLELAGYXRRFIENFSRIARPMTQLLKKDEKFKWTAECDKSFEELKKKLVSAPVLILPDQMKDFQVYCDASRHGLGCVLMQEGRVVAYASRQLCPHEGNYPTHDLELAAVVHALKIWRHYLIGNRCEVYTDHKSLKYIFTQPDLNLRQQKWLELIKDYDMSIHYHQGKANVVADALSRKSYYTALCIEGMCEELRQEFEHLNVAIVEHGFVAVLEARPTLVDQVRAAQVNDPEIAELKKNMRVGKARDFHEDEHGTIWLGLVACLLSDSALCLKXLTLPYS

SEQ ID NO: 18789 - protein, 1157 aa, Oryza sativa
  Clone ID: TF_OSC401435j.C1.p23.gm
MVYTRNGSRATGEGNNGEERTEGVHPNSNSGNGPPPLPENPTLAQVMAHQTQMMAAMMQQMQQQHQQMHQRMLQHAEQQHQLFGPPPPQSKLPEFLRVRPPTFSSTTNPMEANDWLHAIEKKLNLLQCNDQEKVAFATHQLQGPASAWWDNHMATRPPGTEGNMTVTEYLHEFNRLARYAPEDVRTDAEKQEKFLAGLDDELTNQLISGDYANFERLVDKAIRQEDQRNKMDRKRKAAQFRAPQGSHQRPRFAPGQQGGPTTMIVRQYRPFNPSNFPQGASGSQNHHGGQPNRGAAPRPPTAPAQSGLSAQAKKETGAKPGSCFNCGELGHFADKCPKPRRAGPRFIQARVNHASAEEAQAAPEVVLVTLTNEKGETVVYKSPDSPKQGVSLNQIEAEIPVVTVEKNLRKLEDIPIVCEYPEVFPEDLTTMPPKREIEFRIDLAPGTAPIYKRPYRMAANELAEVKKQVDEQLQKGYIRPSTSPWGAPVIFVEKKDKTKRMCVDYRALNEVTIKNKYPLPRIDDLFDQLKGAKVFSKIDLRSGYHQLRIREEDIPKTAFTTRYGLYECTVMSFGLTNAPAFFMNLMNKVFMEFLDKFVVVFIDDILIYSKSEEEHEQHLRLVLEKLKEHQLYAKFSKCDFWLTEVKFLGHVITAQGVAVDPSNVESVTKWTPPKTMSQIRSFLGLAGYYRRFIENFSRIARPMTQLLKKDEKFKWTAECDKSFEELKKKLVSAPVLILPDQMKDFQVYCDASRHGLGCVLMQEGRVVAYASRQLRPHEGNYPTHDLELAAVVHALKIWRHYLIGNRCEVYTDHKSLKYIFTQPDLNLRQRRWLELIKDYDMNIHYHPGKANVVADALSRKSYCTALCIEGMCEKLQQELERLNVGIVEHGFVAALEARPTLVDQVRAAQVNDAEIAELKKNMRVGKARDFLEDEHGTIWLGERLCVPDDKELKDLILTEAHQTQYSIHPGSTKMERLRIAQSRQKSYADNRRRELTFEAGDYVPRPSQAAPSSLSRATDRWGPFAGAAPRLDDVVLATRCHHRWPSDRVAAAALRAPCPRRCRWCRADGCRLPLAAPRRCSRVRRFRPRELSPAVAAGGRAAARRRLASRLCAVLCPSRAAPGSLIGLGRSGPSVPVDRRWTASVVPVHGGPAPLCR

SEQ ID NO: 18790 - protein, 1745 aa, Oryza sativa
  unsure (1)..(1745): unsure at all Xaa locations
  Clone ID: TF_OSC401567j.C1.p10.np
MAGHPPNHRGEGMIDFVAELARMTLVVGYPNAPEYTTVPPLSGELPHRVRLEVHGYVGTCLANMVVEASGGTADHACQEAAYLMMARLRERHNYIFHDTAYRFHPRRASGDDVSTFRPTAGENDTTFGHMCAVMRGLDRMHSDLHKASKALNDGKLMRIVALKDEIARLKRDNAQLKGLPAPGGVRIRTTPHKTTTAPVRIQLAPKNPPPSAAPAAPPVPLAAPVVPAAPVPAPAPASALSFAPASAARGPASGNGGWLSATPSGSCDRRSSGSELGSGETYLPGSRSRSEGPGLFLQMVYTRNGSRATGEGSNGEERTEGVHPNSNSGNGPPPLPENPTLAQVMAHQTXMMAAMMQQMQQQHQQMHQRMLQHAEQQHQXFGPPPPQSKLLEFLRVRPPTFSSTTNPMEANDWLHAIEKKLNLLQCNDQEKVAFATHQLQGPASAWWDNHMATRPPGTEVTWEEFCRSFRKAQVADGVVAQKKREFRALHXGNRTVTEYLHEFNHLARYAPEDVRTDAEKQEKFLAGLDDELTNQLISGDYADFERLVDKAIRQDDQRNKMDRKRKAAQFRAPQGSHQRPRFAPGQQGGPTTMIVRQYRPFNPSNFPQGASGSQNHHGGQPNRGAAPRPPTAPAQSGPSAQAKRETGAKPGSCFNCGELGHFADKCPKPRRAGPRFIQARVNHASAEEAQAAPEVVLGTFPVNSIPATILFDSGATHSFISKKFVGMHGLRKEELSTPMRVHTSGNSSTSVSFSPSVLIEIQRSPFLANLILLESKDLDVILGMDWLTKFKGVIDCANRTVTLTNEKGETAVYKSPDSPKQGVSLNQIEAEIPVDTVKKNLRKLEDIPIVCEYPEVFPEDLTTMPPKREIEFRIDLAPGTAPIYKRPYRMAANELAEVKKQVDEQLQKGYIRPSTSPWGAPVIFVEKKDKTKRMCVDYRALNEVTIKNKYPLPRIDDLFDQLKGAKVFSKIDLRSGYHQLRIREEDIPKTAFTTRYGLYECTVMSFGLTNAPAFFMNLMNKVFMEFLDKFVVVFIDDILIYSKSEEEHEQHLRLVLEKLKEHQLYAKFSKCDFWLTEVKFLGHVITAQGVAVDPSNVESVTKWIPPKTVSQIRSFLGLAGYYRRFIENFSRIARPMTQLLKKDEKFKWTAECDKSFEELKKKLVSAPVLILPDQMKDFQVYCDASRHGLGCVLMQEGRVVAYASRQLRPHEGNYPTHDLELAAVVHALKIWRHYLIGNRCEVYTDHKSLKYIFTQPDLNLRQRRWLELIKDYDMSIHYHPGKANVVADALSRKSYCTALCIEGMCEELRQEFEHLNVGIVEHGFVAALEARPTLVDQVRAVQVNDSEIAELKKNMRVGKTRDFHEDEHGTIWLGERLCVPDDKELKDLILTEAHQTQYSIHPGSTKMYQDLKEKFWWVSMRREAEFVALCDVCQRVKAEHQRPAGLLQPLQIPEWKWEEIGMDFIIALPRTSSGHDSIWVVVDRLTKVAHFIPVHTTYTGKRLAELYLSRIMCLHGVPKKIVSDRGSQFTSKFWQKLQEELGTRLNFSTAYHPQTDGQTERVNQILEDMLRACALDFGGAWDKNLPYAEFSYNNSYQASLQMAPFEALYGRKCRTPLFWDQTGKRQLFGTEVLAEAEEKVRIIRERLRIAQSXQKSYADNRRRELTFEAGDYVYLRVTPLRGVHRFQTKGKLAPRFVGPYKILERRGEVAYQLELPSNMIGIHDVFHVSQLFSKLRVDKYQQDFI

SEQ ID NO: 18791 - protein, 1536 aa, Oryza sativa
  Clone ID: TF_OSC401630j.C1.p1.fg
MAGHPPNHRGEGMIDFVAELARMTLVVGYPNAPEYTTIPLLSGELPHRVRLEVHGYVGTCLANMAVEASGGTADHACQEAAYLMMARLRERHNYIFHDTAYRYHPRRANGDGVSSFRPTAGENDTTFGHMCAVMRGLDRMHSDLHKATKALNDGKLMRIVALKDEIARLKKENAQLKGLPAPEGVRIRTTPRKTTTAPVRIQLAPRNPPPAAAPAAPPVPPAVPAAPVPAPAFTLSFAPASAARGPASGTGGCLFGMVYTRTGSRATGEGSNGEERTDGVHPNSDSGNGPPPLPENPTLAQVMAHQTQMMAAMMQQMQQQHQQMHQRMMQHAEQQHQQFGPPPPQSKLPEFLRVRPPTFSSTTNPMEANDWLHAIEKKLNLLQCNDQEKVAFATHQLQGPASAWWDNHMATRPPGTEVTWAEFCRSFRKAQVPDGVVAQKKREFRALHQGNRTVTEYLHEFNRLARYAPEDVRTDAEKQEKFMAGLDDELTNQLISGDYADFERLVDKAIRQEDQRNKMDRKRKAAQFRAHQGSHQRPRFTPGQQGGPTTMIVRQHRPFNPSNFHQGTSGSQNHHGGQPNRGAAPRPSVAPAQSGQPAQAKKETGAKPGSCFNCGELGHFADKCPKPRRAGPRFIQARVNHASAQEAQTAPEVVLGTFPVNSIPATVLFDSGATHSFISKKFVGMHGLIREELSTPMRVHTPGNSSTSVQFSPSITIEIQRSPFLANLILLESKDLDVILGMDWLTKFKGVIDCASRTVTLTNEKGETVVYKSLVSPKKGVSLNQIETEIPVDTVEKNLRKLEDIPIVCEYPEVFPEDLTTMPPKREIEFRIDLAPGTAPIYKRPYRMAANELAEVKKQVDEQLQKGYIRPSTSPWGAPVIFVEKKDKTKRMCVDYRALNEVTIKNKYPFPRIDDLFDQLKGTKVFSKIDLRSGYHQLKNPERGYSEDGLHHSFVVVFIDDILIYSKSEEEHEQHLRLVLEKLKEHQLYAKFSKCDFWLTEVKFLGHVITAQGVAVDPSNVESVTKWTPPKTVSQIRSFLGLAGYYRRFIENFSRIARPMTQLLKKDEKFKWTAECDKSFEELKKKLVSAPVLILPDQMKDFQVYCDASRHGLGCVLMQEGRVVAYASRQLRPHEGNYPTHDLELAAVVHALKIWRHYLIGNRCEVYTDHKSLKYIFTQPDLNLRQRRWLELIKDYDMSIHYHPGKANVVADALSRKSYCTALCIEGMCEELRQEFEHLNMGIVEHGFVAALEARPTLVDQVRAAQVNDPEIAELKKNMRVGKARDFFEDEHGTIWMGERLCVPDDKELKDLILTEAHQTQYSIHPGSTKMYQDLKERFWWVSMRREIAEFVALCDVCQRVKAEHQRPAGLLQPLQIPEWKWKEIGMDFITGLPRTSSGHDSIWVVVDRLTKVAHFILVHTTYTGKRLAELYLARIMCLHGVPMKILSDRGSQFTSKFWQKLQEELGTRLNFSTAYHPQTDGQTERVHQFLEDMLRACALDYDGAWDKRLPYAEFSYNNSYQANLQMALCRVPNRL

SEQ ID NO: 18792 - protein, 1220 aa, Oryza sativa
  Clone ID: TF_OSC401655j.C1.p2.fg
MVYTRNGTRTTGEGSNGEERTDGVHPNSDSGNGPPPLPENPTLAQVMAHQTQMMTAMMQQMQQQHQQMYQRMQQQAEQHQQQFGPPPPQSKLPEFLRVRPPTFSSTTNPMKANDWLHAIEKKLNLLQCNDQEKVAFATHQLQGPASAWWDNHMTTRPPGTEVTWAEFCRNFRKAQVLDGVVAQKKREFRALHQGNRTVTEYLHEFDRLARYAPEDVRTDAKKQEKFLAGLDDELTNQLISGDYADFERLVDKAIRQEDQHNKMDRKRKAAQFRSNQASHQRPRFIPRQQGEPTTMIVRQHRPFNSSNFHQGASGSQNHRGGQPNRSATPRPPMAPAQSAPSVQAKKETGAKPGSCFNCGELGHFADKCPKPRRAGPRFVQARVNHASTEEAQAAPEVVLGTFPVNSIPATVLFDSGAMHSFIYKKFVGMHGLIREELSTPMRVHTPGNSSTSVQFSPSVTIEIQRSPFLANLILLESKDLDVILGMDWLTKFKGVIDCANCTVTLINEKGETVVYKSLVSPKQGVSLNQIEVEIPVVTEEKNSRKLEEIPIVCEYPEVFPEDLTTMPPKREIEFRIDLAPGTAPIYKRPYRMAANELAEVKKQVDEQLQKGYIRPSTSPWGAPVIFVEKKDKTKRMCVDYRALNEVTIKNKYPLPRIDDLFDQLKGAKVFSKIDLRSGYHQLRIREEDIPKTAFTTQYGLYECTVMSFGLTNAPAFFMNLMNKVFMEFLDKFVVVFIDDILIYSKLEEEHEQHLRLVLEKLKEHQLYAKFSKCDFWLSEVKFLGHIITAQGVAVDSSNVESVTKWTPPKTVSQIRSFLGLAGYYRRFIENFSRIARPMTQLLKKDEKFKWTAECDKSFEELKKKLVSAPVLILPDQMKDFQVYCDASRHGLGCVLMQEGRVVAYASRQLRPHEGNYPTHDLELAVVVHALKIWRHYLIGNRCEVYTDHKSLKYIFTQPDLNLRQRRWLELIKDYDMSIHYHPGKANVVADALSRKSYCNALCTEDMCEELQQELERLNVGIVEHRFVAALEARPTLVDQFRAAQVNDPEIVELKKNMRVGKARDFLEDEHRTIWMGERLCVPDDKELKDLILTEAHQTQYSIHPGSTKMYQDLKEKFWWVSMRREIAEFVALCDVCQRVKAEHQRPVGLFQPLQIPKWKWEEIGMDFITGLPRTSSGHDSIWVVVDRLTKVAHFIPVHTTYTGKKLAELCLARIEFDLLR

SEQ ID NO: 18793 - protein, 3350 aa, Oryza sativa
  Clone ID: TF_OSC401894j.C1.p32.fg
MGSKMAGHPPNHRGEGMIDFVAELARMTLVVGYPNAPEYTTIPQLSGELPHRVRLEVHGYVGTCLANMVVEASGGTADHACQEAAYLMMARLRERHNYIFHDTAYRFHPRRANGDDVSSFRPTAGENDTTFGHMCAVMRGLDRMHSDLHKATKALNDGKLMRIVALKDEIARLKRENAQLKGLPAPGGVRIRTTPRKTTTAPVRIQLAPRNPPPSAAPAAPPVPPAAPAVPAAPAPASALSFAPASAARGPASGNGGCLFGMVYTRNGSRATGEGSNGEERADGVHPSSDSGNGPPPLPENPTLAQVMAHQTQMMAAMMQQMQQQHQQMHQRMMQHVEQQHQQFGPPPPQSKLPEFLREKVAFATHQLQGPASAWWDNHMATRPPGTEVTWAEFCRSFRKAQVPDGVVAQKKREFRALHQGNRTVTEYLHEFNRLARYAPEDVRTDAEKQEKFMAGLDDELTNQLISGDYADFERLVDKAIRQEDQRNKMDRKRKAAQFRAPQGSHQRPRFAPGQQGGPTTMIVRQHRPFNPSNFPQGASGSQNHHGGQSNRGAASRPPMAPAQSGQPAQAKKEIGAKPGSCFNCGELGHFADKCPKPRSAGPRFIQARVNHASAEEAQAAPEVVLGTFPVNSIPATVLFDSGATHSFISKKFVGMHGFIREELSTPMRVHTPGNSSTSVQFSPSITIEIQRSPFLANLILLESKDLDVILGMDWLTKFKGVIDCANRTVTLTNEKGETVVYKSPDSPKQGVSLNQIEAEIPVDTVERNLRKLEDIPIVSEYPEVFPEDLTTMPPKREIEFRIDLAPGTAPIYKRPYRMAANELAEVKKQVDEQLQKGYIRPSTSPWGAPVIFVEKKDKTKRMCVDYRALNEVTIKNKYPLTRIDDLFDQLKGAKVFSKIDLRSGYHQLRIREEDIPKTAFTTRYGLYECTVMSFGLTNAPAFFMNLMNKVFMEFLDKFVEVFIDDILIYSKSEEEHEQHLRLVLEKLREHQLYAKFSKCDFWLTEVKFLGHVITAQGVAVDPSNVESVTKWTPPKTVSQIRSFLGLAGYYRRFIENFSRIARPMTQLLKKDEKFKWTAECDKSFEELKKKLVSAPVLILPDPMKDFQVYCDASRHGLGCVLMQEGRVVAYASRQLRPHEGNYPTHDLELATVVHALKIWRHYLIGNRCEVYTDHKSLKYIFTQPDLNLRQRRWLELIKDYDMSIHYHPGKANVVADALSRKSYCTALCIEGMCEELRQEFEHLNVGIVELGFVAALEARPTLVDQVRAAQANDSEIAELKKNMRVGKARDFHEDEHGTIWLGERLCVPDDKELKDLILTEAHQTQYSIHPGSTKMYQDLKERFWWVSMRREIAEFVALCDVCQRVKAEHQRPAGLLQPLQIPEWKWEEIGMDFITGLPRTSSGHDSIWVVVDRLTKVAHFIPVHTTYTGKRLAELYLSRIMCLHGVPKKIVSDRGSQFTSKFWQKLQEELGTRLNFSTAYHPQTDGQTERVNQILEDMLRACALDFGGAWDKSLPYAEFSYNNSYQASLQMAPFEALYGRKCRTPLFWDQTGKRQLFGTEVLAEAEEKVRIIRERLRIAQSRQKSYADNRRKELTFEAGDYVYLRVTPLRGVHRFQTKGKLAPRFVGPYKILERRGEVAYQLELPSNMIGIRDVFHVSQLKKCLRVPEEQADSEHIDIQGDLTYVEKPWVVLSLALLFPTSEFEFGSDEGVTTIIEKYDGSVNPAEFLQIYTTGIEAAGGDDRVMANFFPMALKGQARGWLMNLPPASVHSWEDLCQQFTTNFQGIYPRPDEEADLHAVQRRDDESLRSYIQRFCQVRNTIPCIPAHAVIYAFRGGVRHNRMLEKIASKEPQTTAQLFELADRVARKEEAWTWNSSGSGVAAPAAPGSAARSGRRDRRRKKGSARSDDESHVLAVEGASRAPRKGRPASNKKKEAGAPSRERPTGKWCTVHNTSLHDLADCRAVKSLAERTRKWEEEKRQERREGKTPAAPAGNRRGEAKQKATAEDIDDGDDDLGFQEPEATVATVDGGACAHASRRSLKAMKRELLAAAPTHEATWRARWSEVALSFDQTDHPPCVARGGQIAMPLGHIDLPVTFGGSANFCTERVDFDVADLSLPYNAVLGRPALVKFMAAVHYAYLQMKMPGPGGPITVHGDLKVTLACMEQRADHLAAAYKPAGGDERLSTSVPAAPRQRMVTCDEVSVKEEDALVSLLRANTDVFAWRPADMPEVPREVIEHRLAVQLGARPVRQKVRRQAPERQAFIREEVARLLEAGFIREVIHPEWLANPVVVPKANGKLRMCIDYTDLNKACPKDPYPLPRIDQIVDSTAGCDLLCFLDAYSSYHQIRMAREDEEKTAFITPIGTYCYTTMPFGLKNAGPTFQRTTRISLGSQIGRNVEAYVDDLVVKTRNQETLLSDLAETFKSLRSARIKLNPDKCVFGVPAGKLLGFLVSARGIEANPEKIRAIERMHPPSMLRDVQCVTGCMAALSRFISRLGEKALPLFKLLKRSGPFTWTEEAERAFTQLKAYLSSPPVLVAPEPDEPLLLYLAATPQVVSAALVVERDKDNPHSAHPHPVSTRPGREQGGEAPEPNGGPGPRRPELALRLLVRRCQVVGTEAECAPCGLSDEERPGDAAPGEEDRPRRKMQRPVYFVSEALRDAKTRYPQAQKMLYAILMASRKLRHYFQAHRVTVVTSYPLGQILHNREGTGRVVRWAIELSEFDLRFEPRHAIKSQALADFVAEWTPAPEPVSAPKASSGPSQLPHTAYWGAGAGVTLTSPSGDVLRYLVRLDFRATNNMAEYEGLLAGLRVAAGLGIRRLLVFGDSQLVVNQVCKEYQCSDPQMDAYVRQVRRMERHFDGIELRHVPRRDNTVADELSRLASSRAQTPPGAFEERLAQPSARPDPLGETDAPERPPRPVGVQASGPEGSAPSSPRLIAWITEIQAYLADKTLPEDREGSERVRRISKRYVLVEGTLYRRAANGVLLKCIPREQGVELLADIHEGECGAHSVSRTLVGKAFRQGFYWPTALNDAVDLVRRCRACQFHARQTHQPTQALQTIPLSWPFAVWGLDILGPFRRAPGGFEYLYVAVDKFTKWPEAYPVIKIDKHSALKFIRGITARFGVPNRIITDNGTQFTSELFGDYCEDMGIKLCFASPAHPRSNGQVERANAEILKGLKTKTFNILKKHGDSWIEELPAVLWANRTTPSRATGETPFFLVYGAEAVLPSELTLRSPRVTMYCEADQDQLRRDDLDYLEERRRRAALRAARYQQSLRRYHQRHVRARSLCVDDLVLRRVQTRAGLSKLSPMWEGPYRVIGVPQPGSVRLATGDGTELPNPWNIEHLRRFYP

SEQ ID NO: 18794 - protein, 1565 aa, Oryza sativa
  Clone ID: TF_OSC401978j.C1.p63.fg
MAEHPPNHRGEGMDDFVAELARMTLVVGYPNAPEYTTVPPLSGELPHRVRLEVHGYVGTCLANMVVEASGATADHACQEAAYLMMARLRERHNYIFHNTVYRFHPRRANDSDVSSFRPTAGENDTTFSHASKALNDGKLMRIVALKDEIARLKRENAQLKGLPAPGGVQIRTTPRKSTTAPVRIQLAPRNPPPSAAPAAPPVPPAAPAVPTAPAPAPAPVPVSAPASALSFAPASAVRGPASGNGGWLPATPSGSRDRSSSSSSGIEPGSGETYLPGSRSRSEDLMVYTRTGTRTTGEGSNGEERADGVHPNSDSGNGPPPLPENPTLAQVMAHQTQMMAAMMQQMQQQHQQMHQRMLQHAEQQHRQFGPPPPQSKLPEFLRVRPPTFSSTTNPMEANDWLHAIEKKLNLLQCNDQEKVAFATHQLQGPASAWWDNHMATRPPGTEVTWAEFCRSFRKAQVPDGVVAQKKREFRALHQGNRTVTEYLHEFNRLARYAPEDVRTDAEKQEKFMAGLDDELTNQLISGDYADFERLVDKAIRQEDQRNKMDRKRKAAQFRSNQGNHQRPRFTPGQQGGPTTMIVRQHRPFNSSNFHQGASGSQNHHGGQPNRGAAPRPPVAPAQSGPSAQAKETEAKPGSCFNCGELGHFADKCPKPRRAGPRKEELSTPMRVHTPGNSSTSVNFSPSVLIEIQRSPFLANLILLESKDLDVILGMDWLTKFKGVIDCANRTVTLTNEKGETVVYKSLVSPKQGVSLNQIEMEIPVVTEEKNSRKLEEIPIVCEYPEVFPEDLTTMPPKRKIEFRIDLAPGTAPIYKRPYRMAANELAEVKKQVDEQLQKGYIRPSTSPWGAPVIFVEKKDKTKRMCVDYRALNEVTIKNKYHLPRIDDLFDQLKGAKLRIREEDIPKTAFTTRYGLYECTVMSFGLTNAPAFFMNLMNKVFMEFLDKFVVVFIDDILIYSKSEEEHEQHLRLVLEKLKEHQLYAKFSKCDFWLTEVKFLGHVITAQGVAVDPSNVESVTKWTPPKTVSQIRSFLGLAGYYRRFIENFSRIARPMTQLLKKDEKFKWTAECDKSFEELKKKLVSAPEGRVVAYASRQLRPHEGNYPTHDLELAAVVHALKIWGHYLIGNRCEVYTDHKSLKYIFTQPDLNLRQRRWLELIKDYDMSIHYHPGKANVVADALSRKSYCTALCIEGMCEELRQEFEHLNVGIVEHGFVAALEARPTLVDQVRAAQINDPEIAELKKNMRVGKARDFLEDEHGTIWMGERLCVPDDKELKDLILTEAHQTQYSIHPGSTKMYQDLKEKFWWVSMRREIAEFVALCDVCQRVKAEHQRPAGLLQPLQIPEWKLHTTYTGKRLAELYLARIMCLHGVPKKIVSDRGSQFTSKFWQKLQKELGTRLNFSTAYHPQTDGQTERVNQILEDMLRACALDFGGAWDNSLPYAEFSYNNSYQASLQMAPFEALYGRKCRTPLFWDQTGERQLFGTEVLTEAEEKVRTIRERLRIAQSRQKSYADNRRRKLTFEAGDYVYLRVTPLRGVHRFQTKGKLAPRFVGPYKILERRGKLLIS

SEQ ID NO: 18795 - protein, 1429 aa, Oryza sativa
  Clone ID: TF_OSC402030j.C1.p1.np
MVNTRASGSGNNNNEGNPTLAQVLAQQTQLMNMMIQQMQNQLNQGNNNAPPPQNKLTDFLRVRPPTFSSTTNPVEAGDWLHAVEKKLELLQCTDQEKVVFASHQLQGPASEWWDHFRMNRAEGQPITWEEFTEGFKKTHIPVGVVALKKREFRAQEKFLEGLKDELSVTLISHDYVDFQQLVDKAIRLEDKKNRMDNRKRKMIVFQEAQGSSQRQRITFNPSNFPQGASGSQNHHGGQSNRGAAPRPPMAPAQSGPPAQAKKETGAKPGSCFNCGELGHFADKCPKPRPGQGLSARVNHASAEEAQAAPEVVLGTFSINSIPATVLFDSGATHSFISKKFVGMHGLIREELSTPMRVHTPGNSSTSVQFSPSITIEIQRSPFLANLILLESKDLDVILGMDWLTKFKGVIDCANRTVTLTNEKGETVVYKSLVSPKQGVSLNQMKLEDIPIVCEYPEVFLEDKLEDIPIVCEYPEVFLEDLTTMPPKRERFRIDLAPGTAPIYKRPYRMAANELAEVKKQVDEQLQKGYIRPSTSPWGAPVIFVEKKDKTKRMCVDYRALNEVTIKNKYPLPRIDDLFDQLKGAKVFSKIDLRSGYHQLRIREEDIPKTAFTTRYGLYECTVMSFGLTNAPAFFMNLMNKVLMEFLDKFVVVFIDDILIYSTSEEEHEQHLRLVLEKLKEHQLYAKFSKCDFWLTEVKFLGHVITAQGVAVDPSNVESVTKWTPPKTVSQIRSFLGLAGYFKWTTECDKSFEELKFKWTTECDKSFEELKKKLVSAPVLILPDQMKDFQVYCDASRHGLGCVLMQEGIVVAYASRQLRPHEGNYPTHDLELAAVVHALKIWRHYLIGNRCEVYTDHKSLKYIFTQPDLNLRQRRWLELIKDYDMSIHYHPGKANVVADALSRKSYCTALCIEGMCEELWQEFEHLNVGIVEHGFVAALEARPTLVDQVRAAQVNDSEIAELKKNMRVGKARDFHEDEHGTIWLGERLCVPDDKELKDLILTEAHQTQYSIHPGSTKMYQDLKEKFWWVSMRREIAEFVALCDVCQRVKAEHQRPAGLLQPLQILEWKWEEIGMDFITGLPRTSSGHDSIWVVVDRLTKVAHFIPVHTTYTGKRLAELYLSRIMCLHGVPKKIVSDRGSQFTSKFWQKLQEELGTRLNFSTAYHPQTDGQTERVNQILEDMLRACALDFGGAWDKSLPYAEFSYNNSYQASLQMAPFEALYGRKCRTPLFWDQTGERQLFGTEVLAEAEEKVRIIRERLRIAQSRQKSYADNRRRELTFEAGDYVYLRVTPLRGVHRFQTKGKLAPRFVGPYKILERRGEVAYQLELPSNMIGIHDVFHVSQLKKCLRVPEEQADSKHIDIQEDLTYVEKPIRILDTSERRTRNKVNRFCRVQWSHHSEEEATWEREDELKAAHPHLFTSSSESRGRDSV

SEQ ID NO: 18796 - protein, 589 aa, Oryza sativa
  Clone ID: TF_OSC402030j.C1.p4.fg
MVVEASGGTADHACQEAAYLMMARLRERHNYIFHDMAYRFHPRRASGDDVSTFRPTTGQNDTTFGHMCAVMSGLDRMHSDLHKATKALNDGKLMRIVALMDEIARLKRENAQLKGLPAPGGVRIRTTPRKTTTAPVRIQLAPRNPPPSAAPAAPPVPPAVPAAPAPAPASALSFAPASAARGPASGNGGCLLGMVYTRNGSRATGEGSNGEERTDGAHPHSDSGNGPPPLPENPTLVQVMAHQTQMMAAMMQHQHQQMHQRMLQHAEQQHQQFGPPPPQSKLPEFLRVRPPTFSSTTNPMEANDWLHAIEKKLNLLQCNDQEKVAFATHQLQGPASAWWDNHMATRPPGTEVTWVEFCRSFRKAQVPDGVVAQKKREFRALHQGNRTVTEYLHEFNRLARYAPEDVRTDAEKQEKFMAGLDDELTNQLISGDYADVERLVDKAIRQEDQRNKMDRKRKAAQFRAPQGSHQRPRFAPRQQGGPTTMIVRQHRPFNPSNFPQGASGSQNHHGGQSNRGAAPRPPMAPAQSGPPAQAKKETGAKPGSCFNCGELGHFADKCPKPRRAGPRFIQARVNHASAEEAQAAPEVVL

SEQ ID NO: 18797 - protein, 1267 aa, Oryza sativa
  Clone ID: TF_OSC404489j.C1.p1.fg
MVYTRTGTRTTGEGSNGEERADGVHPSSDSGNGPPPLPENPTLAQVMAHQTQMMAAMMQQMQQQHQQMHQRMMQHAEQQHQQFGPPPPQSKLPEFLRVRPPTFSSTTNPMEANDWLHAIEKKLNLLQCNDQEKVAFATHQLQGPASAWWDNHMATRPPGTEVTWAEFCRSFRKAQVPDGVVAQKKREFRALHQGNRTVTEYLHEFNRLARYAPEDVRTDAEKQEKFMAGLDDELTNQLISGDYADFERLVDKAIRQEDQRNKMDRKRKAAQFRAPQGSHQRPRFTPGQQGGPTTMIVRQHRPFNPSNFPQGASGSQNHHGGQSNRGAAPRPPMAPAQSSPPAQAKKETGAKPGSCFNCGELGHFADKCPKPRRAGPRFIQARVNHASAEEAQAAPEVVLGTFPVNSIPATVLFDSGATHSFISKKFVGMYGLRKEELSTPMRVHTPGNSSTSVSFSPSVLIEIQRSPFLANLILLESKDLDVILGMDWLTKFKGVIDCANRTVTLTNEKGETVVYKSPDSPKQGVSLNQIEAEIPVDTVEKNLKKLEDIPIASEYPEVFPEDLTTMPPKREIEFRIDLAPGTAPIYKRPYRMAVNELAEVKKQVDEQLQKGYIRPSTSPWGAPVIFVEKRDKTKRMCVDYRALNEVTIKNKYPLPRIDDLFDQLKGAKVFSKIDMRSGYHQLRIREEDIPKTAFTTRYGLYECTVMSFGLTNAPAFFMNLMNKVFMEFLDKFVVVFIDDILIYSKSEEEHEQHLRLVLEKLKEHQLYAKFSKCDFWLTEVKFLGHVITAQGVAVDPSNVESVTKWTPPKTVSQIRSFLGLAGYYRRFIENFSRIARPMTQLLKKDEKFKWTAECDKSFEELKKKLVSAPVLILPDQMKDFQVYCDASRHGLGCVLMQEGRVVASGSYFEDLEARPTLVDQVRAAQVNDSEIAELKKNMRVGKARDFHEDEHGTIWLGERLCVPDDKELKDLILTEAHQTQYSIHPGSTKMYQDLKEKFLWVSMRREIAEFVALCDVCQRVKAEHQRPAAWDKSLPYAEFSYNNSYQASLQMAPFEALYGRKCRTPLFWDQTGERQLFGTEVLAEAEEKVRIIRERLRIAQSRQKSYADNRRRELTFEAGDYVYLRVTPLRGVHRFQTKGKLVPRFVGPYKILERRGEVAYQLELPSNMIGIHDVFHVSQLKKCLRVPEEQADSEHIDIQEDLTYVEKPVRILDTSERRTRNKVTRFCRVQWSHHSEEEATWEREDELKAAHPHLFTSTSESRGRDSV

SEQ ID NO: 18798 - protein, 1717 aa, Oryza sativa
  Clone ID: TF_OSC404956j.C1.p1.np
MAGHPPNHRGEGMIDFVAELARMTLVVGYPNAPEYTTIPPLSGELPHRVRLEVHGYVGTCLANMAVEASGGTADHACQEAAYLMMARLRERHDYIFHDTAYRYHPCRANGDGVSSFRPTAGENDTTFGHMCAVVRGLDRMHSDLHKATKALNDGKLMGIVALKDEIARLKKENAQLKGLPVPGGVRIRTTPRKTTTAPVRIQLAPRNPPPAAAPAAPPVPPAVPAAPVPAPAFTLSFAPASAARGPASGTGGCSLQMVYTRNGSRATGEGSNGEERADGVHPNSDSGNGPPPLPENPTLAQVMAHQTQMMAAMMQQMQQQHQQMHQRMMQHAEQQHQQFGPPPPQSKLPEFLRVRPPTFSSTTNPMEANDWLHAIEKKLNLLQCNDQEKVAFATHQLQGPASAWWDNHMATRPPGTEVTWAEFCRSFRKAQVPDGVVAQKKREFRALHQGNRTVTEYLHEFNRLARYAPEDVRTDAEKQEKFMAGLDDELTNQLISGDYADFERLVDKAIRQEDQRNKMDRKRKAAQFRAHQGSHQRPRFTPGQQGGPTTMIVRQHRPFNPSNFHQGTSGSQNHHGGQPNRGAAPRPSVAPAQSGQPAQAKKETGAKPGSCFNCGELGHFADKCPKPRRAGPRFIQARVNHASAEEAQTAPEVVLGTFPVNSIPATVLFDSGATHSFISKKFVRMHGLIREELSTPMRVHTPGNSSTSVQFSPSITIEIQRSPFLANLILLESKDLDVILGMDWLTKFKGVIDCASRTVTLTNEKGETVVYKSLVSPKKGVSLNQIETEIPVDTVEKNLRKLEDIPIVCEYPEVFPEDLTTMPPKREIEFRIDLAPGTAPIYKRPYRMAVNELAEVKKQVDEQLQKGYIRPSTSPWGAPVIFVEKKDKTKRMCVDYRALNEVTIKNKYPLPRIDDLFDQLKGAKVFSKIDLRSGYHQLRIREEDIPKTAFTTRYGLYECTVMSFGLTNAPAFFMNLMNKVFMEFLDKFVVVFIDDILIYSESEEEHEQHLRLVLEKLKEHQLYAKFSKCDFWLTEVKFLGHVITAQGVAVDPSNVESVTKWTPPKTVSQIRSFLGLAGYYRRFIENFSRIARPMTQLLKKDEKFKWTAECDKSFEELKKKLVSAPVLILPDQMKDFQVYCDASRHGLGCVLMQEGRVVAYASRQLRPHEGNYPTHDLELAAMVHALKIWRHYLIGNRCEVYTDHKSLKYIFTQPDLNLRQRRWLELIKDYDMSIHYHPGKANVVADALSRKSYCTALCIEGMCEELRQEFEHLNMGIVEHGFVAALEARPTLVDQVRAAQVNDPEIAELKKNMRVGKARDFHEDEHGTIWMGERLCVPDDKELKDLILTEAHQTQYSIHPGSTKMYQDLKERFWWVSMRREIAEFVALCDVCQRVKAEHQRPAGLLQPLQIPEWKWEEIGMDFITGLPRTSSGHDSIWVVVDRLTKVAHFIPVHTTYTGKRLAELYLARIMCLHGVPRKIVSDRGSQFTSKFWQKLQEELGTRLNFSTAYHPQTDGQTERVNQILEDMLRACALDFGGAWDKSLPYAEFSYNNSYQASLQMAPFEALYGRKCRTPLFWDQTGERQLFGTEVLAEAEEKVRIIRERLRIAQSRQKSYADNRRRELTFEAGDYVYLRVTPLRGVHRFQTKGKLAPRFVGPYKILERRGEVAYQLELPSNMGDIRDVFHVSQLKKCLMVPEGQADSEHIGDRARIRIMVK

SEQ ID NO: 18799 - protein, 1785 aa, Oryza sativa
  Clone ID: TF_OSC407404j.C1.p8.fg
MEKPKSPLNPFSLHMFFAIGFVPGKWGSVLVVQGKNLGRSFKMAGHPPNHRGEGMIDFVAELARMTLVVGYPDAPEYTTIPPLSGELPYRVRLEVHGYVGTCLANMAVEASGGTADHACQEAAYLMMARLRERHDYIFHDTAYRYHPRRAHGDGVSSFRPTAGENDTTFGHMCAVMRGLDRMHSDLHKATKALNDGKLMRIVALKDEVARLKKENAQLKGLPAPGGVRIRTTPRKRTTAPVRIQLAPRNPPPPAAPAAAPVPPAVPAAPAPAPAFTLSFAPASAARGSASGTGGCLFGMVYTRTGSRATGEGSNGEERADGVHPNGDSGNADASEDDAARRTAAPAVGPPPPQSKLPEFLRVRPPTFSSTTNPMEANDWLHAIEKKLNLLQCNDQEKVAFATHQLQGPASAWWDNHMATRPPGTEVTWAEFCRSFRKAQVPDGVVAQKKREFRALHQGNRTVTEYLHEFNRLARYAPEDVRTDAEKQEKFMAGLDDELTNQLISGDYADFERLVDKAIRQEDQRNKMDRKRKAAQFRSNQGSQHRPRFTPGQQGGPTTMIVRQHRPFNSSNFHQGTSGSQNHQGGQPNRGAAPRPPMAPAQSAQPAQAKKETGAKPGSCFNCGELGHFADKCPKPRRAGPRFIQARVNHASAEEAQAAPEVVLGTFPVNSIPATVLFDSGATHSFISKKFVGMYGLRKEELSTPMRVRTPGNSSTSVSFSPSVLIEIQRSPFLANLILLESKDLDVILGMDWLTKFKGVIDCANRTVTLTNEKGETVVYKSLVSPKKGASLNQIETEIPVDTVGKNLRKLEDIPIVCEYPEVFPENLTTMPPKREIEFRIDLAPGTAPIYKRPYRMAANELAEVKKQVDEQLQKGYIRPSTSPWGAPVIFVEKKDKTKRMCVDYRALNEVTIKNKYPLPRIDDLFDQLKGAKVFSKIDLRSGYHQLRIREEDIPKTAFTTRYGLYECTVMSFGLTNAPAFFMNLMNKVFMKFLDKFVVVFIDDILIYSKSEEEHEQHLRLVLEKLKEHQLYAKFSKCDFWLTEVKFLGHVITAQGVAVDPSNVESVTKWTPPKTVSQIRSFLGLAGYYRRFIENFSRIARPMTQLLKKDEKFKWTAECDKSFEELKKKLVSAPVLILPDPTKDFQVYCNASRHGLGCVLMQEGRVVAYASRQLRPHEGNYPTHDLELAAVVHALKIWRHYLIGNRCEVYTDHKSLKYIFTQPDLNLRQRRWLELIKDYDMSIHYHPGKANVVADALSRKSYCTALCIEGMCEELRQEFEHLNMGIVEHGFVAALEARPTLVDQVRAAQVNDPEIAELKKNMRVGKARDFLEDEHGTIWMGERLCVPDDKELKDLILTEAHQTQYSIHPGSTKMYQDLKEKFWWVSMRREIAEFVALCDVCQRVKAEHQRPAGLLQPLQIPEWKWEEIGMDFITGLPRTSSGHDSIWVVVDRLTKVAHFIPVHTTYTGKRLAELYLARIMCLHGVPKKIVSDRGSQFTSKFWQKLQEEMGTRLNFSTAYHPQTDGQTERVNQILEDMLRACALDFGGAWDKSLPYAEFSYNNSYQASLQMAPFEALYGRKCRTPLFWDQTGERQLFGTEVLAEAEEKVRIIRERLRIAQSRQKSYADNRRRELTFEAGDYVYLRVTPLRGVHRFQTKGKLAPRFVGPYKILERRGEVAYQLELPSTMIGIHDVFHVSQLKKCLRVPEEQANSEHIDIQEDLTYVEKPVRILDTSERRTRNKVTRFCRVQWSHHSEEEATWEREDELKAAHPYLFTSSTESRGRDSV

SEQ ID NO: 18800 - protein, 1676 aa, Oryza sativa
  Clone ID: TF_OSC407849j.C1.p7.fg
MGCKMAGHPPNHHGEGMIDFVAELARMTLVVGYPNAPEYTTIPPLSGELPHRVRLEVHDYVAGENDTTFGHMCAVMRGLDRMHSDLHKATKALNDGKLMRIVALKDEIARLKRENAQLKGLPAPGGVRIRTTPRKTTTAPVRIQLAPRNPPPSAAPAAPPVPPVVPAAPAPAPASALSFAPASAARGPASGTGGCFFGMVYTRNGSRATGEGSNGEERTDGAHPHSDSGNGPPPLPENPTLAQVMAHQTQMMAAMMQQMQQQHQQMHQRMLQHAEQQHQQFGPPPPQSKLPEFLRVRPPTFSSTTNPMEANDWLHAIEKKLNLLQCNDQEKVAFATHQLQGPASAWWDNHMTTRPPGIEVTWAEFCRSFRKAQVPDGVVAQKKREFRALHQGNRTVTEYLHEFNRLARYAPEDVRTDAEKQEKFMAGLDDELTNQLISGDYADFERLVDKAIRQEDQRNKMDRKRKAAQFRAPQGSHQRSRFAPGQQGGPTTMIVRQHRPFNPSNFPQGTSGSQNHHGGQSNRGAAPRPPMAPAQSGPPAQAKKETGAKPGSCFNCGELGHFADKCPKPRRAGPRFIQARVNHASAEEAQAAPEVILGTFPINSIPAIVLFDSGATHYFISKKFVGMQGLIREELSTPMRVHTPGNSSTSVQFSPSITIEIQRSPFLANLILLESKDLDVILGMDWLTKFKGVIDCANRTVTLTNEKGETVVYKSPDSPKQGVSLNQIETEIPVDTVEKNLRKLEDIPIVCEYPEVFPEDLTTMPPKREIEFRIDLAPGTAPIYKRPYRMAANELAEVKKQVDEQLQKGYIRPSTSPWGAPVIFVEKKDKTKRMCVDYRALNEVTIKNKYPLPQIDDLFDQLKGAKVFSKIDLRSGYHQLRIREEDIPKTAFTTRYGLYECTVISFRLTNAPAFFMNLMNKVFMEFLDKFVVVFIDDILIYSKSEEEHEQHLRLVLEKLKEHQLYAKFSKCDFWLTEVKFLGHVITAQGVVVDPSNVESVTKWTPPKTVSQIRSFLGLAGYYRRFIENFSRIARPMTQLLKKDEKFKWTAECDKSFEELKKKLVSAPVLILPDQMKDFKVYCDASRHGLGCVLMQEGRVVAYASRQLRPHEGNYPTHDLELAAVVHALKIWRHYLIGNRCEVYTDHKSLKYIFTQPDLNLRQRRWLELIKDYDMSIHYHPGKANVVADALSRKSYCTALCIEGMCEELRQEFEHLNMGIVEHGFVAALEARPTLVDQVRAAQVNDSEIAELKKNMRVGKARDFHEDEHGTIWLGERLCVPDDKELKDLILTEAHQTQYSIHPGSTKMYQDLKEKFWWVSMRREIAEFVALCDVCQRVKAEHQRPAGLLQPLQIPEWKWEEIGMDFITGLPRTSSGHDSIWVVVDRLTKVAHFIPVHTTYTGKRLAELYLSRIMCLHGVPKKIVSDRGSQFTSKFWQKLQEELGTRLNFSTAYHPQTDGQTERVNQIMEDMLRACAVDFGGAWDKSLPYAEFSYNNSYQASLQMAPFEALYGQKCRTPLFWDQTGERQLFGTEVLAEAEEKVRIIRERLRIAQSRQKSYADNRRRELTFEAGDYVYLRVTPLRGVHRFQTKGKLAPCFVGPYKILERRGEVAYQLELPSNMIGIHDVFHVSQLKKCLRVPEEQADSEHIDIQEDLTYVEKPVRILDTSERRTRNKVT

SEQ ID NO: 18801 - protein, 1381 aa, Oryza sativa
  Clone ID: TF_OSC409054j.C1.p4.gm
MVYTRTGNRTTGEGSNGEERADGVHPNSDSGNGPPPLPENPTLAQVMAHQTQMMAAMMQQMQQQHQQMHQRMMQYAEQQHQQFGPPPPQSKLPEFLRVRPPTFSSTTNPMEANDWLHAIEKKLNLLQCNDQEKVAFATHQLQGPASAWWDNHMATRPPGTEVTWAEFCRSFRKAQVPDGVVAQKKREFRALHQGNRTVTEYLHEFNRLARYAPEDVRTDAEKQEKFMAGLDDELTNQLISGDYADFERLVDKAIRQEDQRNKMDRKRKAAQFRSNQGSQHRPRFTPGQQGGPTTMIVRQHRPFHSGNFHQGASGSQNHQGGQPNRGAAPRPPMAPAQSAQPAQAKKETGAKPGSCFNCGELGHFADKCPKPRRAGPRFIQARVNHASVEEAQAAPEVVLVTLTNEKGETVVYKSLVSPKKGASLNQIETEIPVDTEEKNLRKLEDIPIVCEYPEVFPEDLTTMPPKREIEFRIDLAPGTAPIYKRPYRMAANELAEVKKQVDEQLQKGYIRPSTSPWGAPVIFVEKKDKTKRMCVDYRALNEVTIKNKYPLPRIDDLFDQLKGAKVFSKIDLRSGYHQLRIREEDIPKTAFTTRYGLYECTVMSFGLTNAPAFFMNLMNKVFMEFLDKFVVVFIDNILIYSKSEEEHEQHLRLVLEKLKEHQLYAKFSKCDFWLTEVKFLGHVITAQGVAVDPSNVESVTKWTPPKTVSQIRSFLGLAGYYRRFIGNFSRIARPMTQLLKKDEKFKWTAECDKSFEELKRKLVSAPVLILPDQTKDFQVYCDASRHGLGCVLMQEGRVVAYASRQLRPHEGNYPTHDLELAAVVHALKIWRHYLIGNRCEVYTDHKSLKYIFTQPDLNLRQRRWLELIKDYDMSIHYHPGKANVVADALSRKSYCTALCIEGMCEELRQELEHLNMGIVEHGFVAALEARPTLVDQVRAAQVNDPEIAELKKNMRVGKARDFHEDEHGTIWMGERLCVPDDKELKDLILTEAHQTQYSIHPGSTKMYQDLKEKFWWVSMRREIAEFVALCDVCQRVKAEHQRPAGLLQPLQIPEWKWEEIGMDFITGLPRTSSGHDSIWVVVDRLTKEELGTRLNFSTAYHPQTDGQTERVNQILEDMLRACALDFGGAWDKSLPYAEFSYNNSYQASLQMAPFEALYGRKCRTPLFWDQTGERQLFGTEVLAEAEEKVRIIRERLRIAQSRQKSYADNRRRELTFEAGDYVYLRVTPLRGVHRFQTKGKLAPRFVGPYKILERRGEVAYQLELPSNMIGIHDVFHVSQLKKCLRVPEEQADSEHIDIQEDLTYVEKPAEAQPDSRPPARLLSGSPTDSDLSDAPVYFEIVAEARVGVMERGGPCDGLCRFRIHLGTRGDCPSPAGDGGET

SEQ ID NO: 18802 - protein, 1628 aa, Oryza sativa
  Clone ID: TF_OSC409192j.C1.p1.fg
MGCKMAGHPPNHRGEGMIDFVAELASMTLVVGYPNAPEYTTIPPLSGELPHRVRLEVHGYVGTCLANMVVKASGGSADHACQEAAYLMMARLQERHNYIFHDTAYRFHPRRASNDDVSTFRPTAGKNDTTFGHMCAVMRGLDRMHSDLHQATKALNDGKLMRIVALKDEIARLKRENAQLKGLPAPGGVRIRTTPRKTTTAPVRASLRPGTHLHQQLPQHLQFRPQFLQLQLQLPRPLSPSLQHQPPEVQPVAPEMVYTRNGSRATGEGSNGEERTDGAHPHSDSGNGPPPLPENPTLAQVMAHQTQMMAAMMQQMQQQHQQMHQRMLQHAEQQHQQFGPPPPQSKLPEFLREKVAFATHQLQGPASAWWDNHMATRPPGTEVTWAEFCRSFRKAQVPDGVVAQKKREFRALHQGNRTVTEYLHEFNRLARYAPEDVRTDAEKQEKFMVGLDDELTKQLISGDYADFERLVDKAIRQEDQRNKMDRKRKAAQFRAPQGSHQRPRFAPGQQGGPTTMIVRQYRPFNPSNFPQGASGSQNHHGGQPNRGAAPRPPMAPAQSGPPAQAKKETGAKPGSCFNCGELGHFADKCPKPRRAGPRFIQARVNHASAEEAQAAPEVVLGTFPVNSIPATVLFDSGATHSFISKKFVGMYGLRKEELSTPMRVHTPGNRSTSVSFSPSVLIEIQRSPFLANLILLESKDLDVILGMDWLTKFKGVIDCANHTVTLTNEKGETVVYKSLVSPKQGVSLNQIEAEIPVDTVEKNLRKLEDIPIVCEYPEVFPEDLTTMPPKREIEFRIDLAPGTAPIYKRPYRMAANELAEVKKQVDEQLQKGYIRPKKDKTKRMCVDYRALNEVTIKNKYPLPRIDDLFDQLKGAKVFSKIDLRSGYHQLRIREEDIPKTAFTTRYGLYECTVMSFGLTNAPAFFMNLMNKVFMEFLDKFVVVFIDDILIYSKSEEEHEQHLRLVLEKLKEHQLYAKFSKCDLWLTEVKFLGHVITAQGVAVDPSNVESVTKWTLPKIVSQIRSFLGLAGYYRRFIENFSRIARPMTQLLKKDEKFKWTAECDKSFEELKKKLVSAPVLILPDQMKDFQVYCDASRHGLGCVLMQEGRVVAYASRQLRPHEGNYPTHDLELAAVVHALKIWRHYLIGNRCEVYTDHKNYDMSIHYHPGKANVVADALSRKSYCTALCIKSMCEELRQEFEHLNVGIVEHGFVAALEARPTLVDQVRAAQVNDSEIAELKKNMRVGKARDFHEDEHGTIWLGERLCVPDDKELKDLILTEAHQTQYSIHPGSTKMYQDLKEKFWWVSMRREIAEFVALCDVCQRVKAEHQRPAGLLQSLQIPEWKWEEIGMDFITGLPRTSSGHDSIWIVVDRLTKVAHFIPVHTTYTGKRLAELYLSRIMCLHGVPKKIVSDRGSQFTSKFWQKLQEELGTRLNFSTAYHPQTDGQTERVNQILEDMLRACALDFGGAWDKSLPYAEFSYNNSYQASLQMAPFEALYGRKCRTPLFWDQIGERQLFGTEVLAEAEEKVRIIRERLRIAQSRQKSYADNRRRELTFEAGDYMYLRVTPLRGVHRFQTKGKLAPRFVGPYKILERRGEVAYQLELPSNMIGIHDVFHVSQLKKCLRVPEE

SEQ ID NO: 18803 - protein, 1142 aa, Oryza sativa
  Clone ID: TF_OSC409799j.C1.p20.fg
MVYTRNGSRATGEGSNGEERTDGVHPNSNSGNGPPPLPENPTLAQVRAHQGSHQRPRFTPGQQGGPTTMIVRQYRPFNPSNFPQGASGSQNHHGGQPNRGAAPRPPVAPAQSGPSAQAKKETGTKPGSCFNCGELGHFADKCPKPRCAGPRFVQARVNHASVEEAQAAPEVVLGTFPVNSIPATVLFDSGATHSFISKKFVGMHGLRKEELSTPMRVHTPGNSSTSVSFSPSVLIEIQRSPFLANLILLESKDLDVILGMDWLTKFKGVIDCANRTVTLTNEKGETVVYKSLVSPKQGVSLNQIEAEIPVDTVEKNLRKLEDIPIVCEYPEVFPEDLTTMPPKREIEFRIDLAPGTAPIYKRPYRMAANELAKVKKQVDEQLQKGYIRPSTSPWGAPVIFVEKKDKTKRMCVDYRALNEVTIKNKYPLPRIDDLFDQLKGAKVFSKIDLRSGYHQLRIREEDIPKTAFTTRYGLYECTVISFGLTNAPAFFMNLMNKVFMEFLDKFVVVFIDDILIYSKSEEEHEQHLRLVLEKLKEHQLYAKFSKCDFWLTEVKFLGHVITAQGVAVDPSNVESVIKWTPPKTVSQIRSFLVLAGYYRRFIENFSRIARPMTQLLKKDEKFKWTAECDKSFEELKKKLVSAPVLILPDQMKDFQVYCDASRHGLGCVLMQQGRVVAYASWQLRPHEGNYPTHDLELAAVVHALKIWRHYLIGNRCEVYTDHKSLKYIFTQPDLNLRQRRWLELIKDYDMSIHYHPGKANVVADALSRKSYCTALCIEGMSALEARPTLVDQVRAAQVNDPEIAELKKNMRVGKARDFLEDEHGTIWLGERLCVPDDKELKNLILTEAHQTQYSIHPGSTKMYQDLKEKFWWVSMRREIAEFVALYDVCQRVKAEHQRPAGLLQPLQIPEWKWEEIRMDFITGLPRTSSGHDSIWVVVDRLTKDQTGERQLFGTEVLAEAEEKVRTIRERLRIAQSRQKSYADNRRRELTFEAGDYVYLRVTPLRGVHRFQTKGKLAPRFVGPYKILERRGEVAYQLELPSNMIGIHDVFHVSQLKKCLRVPEEQADSEHIDIQEDLTYVEKPVRILDTSERRTRNKVTRFCRVQWSHHSEEEATWEREDELKAAHPHLFASSSESRDRDSV

SEQ ID NO: 18804 - protein, 1486 aa, Oryza sativa
  Clone ID: TF_OSC411348j.C1.p4.fg
MVYTRTGSRATGEGSNGEERADGVHPNGDSGNGPPPLPENPTLAQVMAHQTQMMAAMMQQMQQQHQQMHQRMMQHAEQQHQQFGPPPPQSKLPEFLRVRPPTFSSTTNPMEANDWLHAIEKKLNLLQCNDQEKVAFATHQLQGPASAWWDNHMATRPPGTEVTWAEFCRSFRKAQVPDGVVAQKKREFRALHQGNRTVTEYLHEFNRLARYAPEDVRTDAEKQEKFMAGLDDELTNQLISGDYADFERLVDKAIRQEDQRNKMDRKRKAAQFRSNQGSQHRPRFTPGQQGGPTTMIVRQHRPFHSSNFHQGASGSQNHQGGQPNRGAAPRPPMAPAQSAQPAQAKKETGAKPGSCFNCGELGHFADKCPKPRRAGLRFIQARVNHASAEEAQAAPEVVLGTFPVNSIPATVLFDSGATHSFISKKFVGMYGLRKEELSTPMRVHTPGNSSTSVSFSPSVLIEIQRSPFLANLILLESKDLDVILGMDWLTKFKGVIDCANRTVTLTNEKGETVVYKSLVSPKKGASLNQIETEIPVDTEEKNLRKLEDIPIVCEYPEVFPEDLTTMPPKREIEFRIDLAPGTAPIYKRPYRMAANELAEVKKQVDEQLQKGYIRPSTSPWGAPVIFVEKKDKTKRMCVDYRALNEVTIKNKYPLPRIDDLFDQLKGAKVFSKIDLRSGYHQLRIREEDIPKTAFTTRYGLYECTVMSFGLTNAPAFFMNLMNKVFMEFLDKFVVVFIDDILIYSKSEEEHEQHLRLVLEKLKEHQLYAKFSKCDFWLTEVKFLGHVITAQGVAVDPSNVESVTKWTPPKTVSQIRSFLGLAGYYRRFIENFSRIARPMTQLLKKDEKFKWTAECDKSFEELKRKLVSAPVLILPDQTKDFQVYCDASRHGLGCVLMQEGRVVAYASRQLRPHEGNYPTHDLELAAVVHALKIWRHYLIGNRCEVYTDHKSLKYIFTQPDLNLRQRRWLELIKDYDMSIHYHPGKANVVADALSRKSYCTALCIEGMCEELRQEFEHLNVGIVEHGFVAALEARPTLVDQVRAAQVNDPEIAELKKNMRVGKARDFHEDEHGTIWMGERLCVPDDKELKDLILTEAHQTQYSIHPGSTKMYQDLKEKFWWVSMRREIAEFVALCDVCQRVKAEHQRPAGLLQPLQIPEWKWEEIGMDFITGLPRTSSGHDSIWVVVDRLTKVAHFIPVHTTYTGKRLAELYLARIMCLHGVPKKIVSDRGSQFTSKFWQKLQEEMGTRLNFSTAYHPQTDGQTDYQASLQMAPFEALYGRKCRTPLFWDQTGERQLFGTEVLAEAEEKVRIIRERLRIAQSRQKSYADNRRRELTFEAGDYVYLRVTPLRGVHRFQTKGKLAPRFVGPYKILERRGEVAYQLELPSTMIGIHDVFHVSQLKKCLRVPEEQANSEHIDIQEDLTYVEKPVRILDTSERRTRNKVTRFCRVQWSHHSEEEATWEREDELKAAHPYLFTSSTESRGRDSV

SEQ ID NO: 18805 - protein, 1283 aa, Oryza sativa
  Clone ID: TF_OSC4117j.C1.p2.fg
MPMTRRSPHIPRLLFLHELESESFDSAATTLEWVVLEAIMVLLLTLPVLDRLPVRDDLRGAERAEDDDVDGALLPLPADGHLLERVDWPDRDPPTADLHPRQTTQGERKRGELGKRRVSYVWFQVQGEPADAQPSTDASCALKEEEGGVAMGAGEELKEGGGKAQGLWGAVEPEGDDLVDYRQDRQALAAILRAVPAEMLATLAVKETAQEAWEAIKTRRIGVQRVREVNAQQLRREFGDILFKDGETVDDFSMRIGGLANNLRTLGDNITEAEVVQKLLQVVPEHLQQIAISIETLLDVNEVSLEEVTGRLRSVEQRKQRKTAAASSQVDANGRLLFTEEEWLAKFRKAASLQDAAHSSGGNGDHRGRGRGKKDGGAPKEAQPKPANPGGRNPGNCKNCGKRGHWAKDCRSKPKAQQAYVAQEEDEEPALLLAKVQLDPPRPRVAAPTNVVSPPSAPRAPSPMGELAVVEARVFAQLDDGGEHDPAMWILDTGATNHMTGSRSAFAELDTVVTGTVRFGDGSVVRIEGRGTVLFSCRFGEHRGIAGVYYIPRLMANIVSLGQLDRSGSKVLIHHGVLRVWDPRGHLLVRVRRSDDCLYTINLYIDRPVCLAARSAEPAWRWHARSKDEAANAIKHFQARAEVESGRKLRALRTDRGGEFTSIEFGEYCANLGVGRQLTAPYSPQQNGVVEHRNQTIVATARSMLKAKGVPGRFWGEAMSTAVFLLNRSPTKSLDNQTPYEAWYGQRPAMHFRRTFGCRGHVKITKPGLKKLDDRSAPMVLLGYVQGSKAYRLYDPLELHVVSADEPASLAEADPNWRGAMQDELNAIVDNDTWSLTDLPHGHRAIGLKWVYKLKRDEQGAIGVDFDEVFAPVARLESVRLLLAVAAHQGWQVHHMDVKSAFLNGELLEEVYVSQPLGFVDDNHKNKVYRLHKALYGLRQAPRAWNAKLDSSLLSLGFHRSSSEHGVYTRTRGGRRLTVGVYVDDLIITGDHDDEIRSFKGEMMKLFKMSDLGHSDTTSASRLPRTVMGSRWGKPHMPARFLRRQDSRTAIPVRLPWSLVGSLRYLVNTRPDLAFSVGYVSRFMESPREDHLAAVRRILRYVAGTRCWGIRFGPGARCALPMLVGYSDSDLAGDPDERKSTSGQIFFVNGGPITWQSSKQKVVALSSCEAEYIAAAAATCQGVWLARLLAEVLGDEIAAPLLKVDNQSTISLIKNPVHHDRSKHIDVKYHYIRECAEKKLIEMMFVGTAEQLGDIFTKSLGRTRFQELRLKIGVCSLDKSGQT

SEQ ID NO: 18806 - protein, 1709 aa, Oryza sativa
  Clone ID: TF_OSC412583j.C1.p1.fg
MAGHPPNHRGEGMIDFVAELARMTLVVGYPNAPEYTTIPPLSGELPHRVRLEVHGYVGTCLANMAVEASGGTADHACQEAAYLMMARLRERHDYIFHDTAYRYHPRRAHGDGVSSFRPTAGENDTTFGHMCAVMRGLDRMHSDLHKATKALNDGKLMRIVALKDEIARLKKENAQLKGLPAPGGVRIRTTPRKRTTAPVRIQLAPRNPPPAAAAPAVPPAPAPAPAPAPAFTLSFAPASAARGPASGTGGCLFGMVYTRTGNRTTGEGSNGEERADGVHPNSDSGNGPPPLPENPTLAQVMAHQTQMMAAMMQQMQQQHQQMHQRMMQHAEQQHQQFGPPPPQSKLPEFLRVRPPTFSSTTNPMEANDWLHAIEKKLNLLQCNDQEKVAFATHQLQGPASAWWDNHMATRPPGTEVTWAEFCRSFRKAQVPDGVVAQKKREFRALHQGNRTVTEYLHEFNRLARYAPEDVRTDAEKQEKFMAGLDDELTNQLISGDYADFERLVDKAIRQEDQRNKMDRKRKAAQFRAPQGSHQRPRLTPGQQGGPTTMIVRQHRPFNPSNFHQGTSGSQNHHGGQPNRGTAPRPPMAPAQSGQPAQAKKETGAKPGSCFNCGELGHFADKCPKPRRAGPRFIQARVNHASAEEAQAAPEVVLGTFPVNSIPATVLFDSGATHSFISKKFVGMHGLIREELSTPMRVHTPGNSSTSVQFSPSITIEIQRSPFLANLILLESKDLDVILGMDWLTKFKGVIDCASRTVTLTNEKGETVVYKSLVSPKKGVSLNQIETEIPVDTVEKNLRKLEDIPIVCEYPEVFPEDLTTMPPKREIEFRIDLAPGTAPIYKRPYRMAANEVAEVKKQVDEQLQKGYIRPSTSPWGAPVIFVEKKDKTKRMCVDYRALNEVTIKNKYPLPRIDDLFDQLKGARVFSKIDLRSGYHQLRIWEEDIPKTAFTTRYGLYECTVMSFGLTNAPAFFMNLMNKVFMEFLDKFVVVFIDDILIYSKSEEEHEQHLRLVLEKLKEHQLYAKFSKCDFWLTEVKFLGHVITAQGVAVDPSNVESVTKWTPPKTVSQIRSFLGLAGYYRRFIENFSRIARPMTQLLKKDEKFKWTAECDKSFEELKKKLVSAPVLILPDPTKDFQVYCDASRHGLGCVLMQEGRVVAYASRQLRPHEGNYPTHDLELAAVVHALKIWRHYLIGNRCEVYTDHKSLKYIFTQPDLNLRQRRWLELIKDYDMSIHYHPGKANVVADALSRKSYCTALCIEGMCEELRQEFEHLNVGIVEHGFVAALEARPTLVDQVRAAQVNDSEIAELKKNMRVGKARDFHEDEHGTIWMGERLCVPDDKELKDLILTEAHQTQYSIHPGSTKMYQDIKEKFWWVSMRREIAEFVALCDVCQRVKAEHQRPAGLLQPLQIPEWKWEEIGMDFITGLPRTSSGHDSIWVVVDRLTKVAHFIPVHTTYTGKRLAELYLARIMCLHGVPRKIVSDRGSQFTSKFWQKLQEELGTRLNFSTAYHPQTDGERQLFGTEVLTEAEEKVRIIRERLRIAQSRQKSYADNRRRELTFEAGDYVYLRVTPLRGVHRFQTKGKLAPRFVGPYKILERRGEVAYQLELPSNMIGIHDVFHVSQLKKCLRVPEEQADSEHIDIQEDLTYVEKPVRILDTSERRTRNKVTKFCRVQWSHHSEEEATWEREDELKAAHPHLFTSSSESRGRDSV

SEQ ID NO: 18807 - protein, 1815 aa, Oryza sativa
  unsure (1)..(1815): unsure at all Xaa locations
  Clone ID: TF_OSC413746j.C1.p1.np
MAGHPPNHRGEGMIDFVAELARMTLVVGYPNAPEYTTVPPLSGELPHRVRLEVHGYVGTCLANMVVEASGGTADHACXEAAYLMMARLRERHNYIFHDTAYRFHPLRASGDDVSTFRPTAGENDTTFGHMCAVMRGLDRMHSDLHKASKALNDGKLMRIVALKDEIARLKRENAQLKGLPAPGGVRIRTTPRKTTTAPVRIQLAPRNPPPSAAPAAPPIPPVAPVVPVAPAPAPAPTSALSFAPASAARGPASGNGGWLSATPNGSRDRSSSGSEPGSGETYLPGSRSRFEGPDLFLQMVYTRNGSRATGEGSNGEEHTDGVHPNSDSGNGPPPLPENPTLAQVMAHQTQMMAAMMQQMQQQHQXMHQRMLQHAEQQHQQFGPPPPQSKLPEFLRVRPPTFSSTTNPMEANDWLHAIEKKLNLLQCNDQEKVAFATHQLQGLASAWWDNHMATRPPGTEVTWAEFCRSFRKAQVPDGVVAQKKREFRALHQGNRTVTEYLHEFNRLARYAPEDVRTDAEKQEKFLAGLDDELTNQLISGDYADFERLVDKAIRQEDQRNKMDRKRKAAQFRAHQGSHQRPRFATGQQGGPTTMIVRQYRPFNPSNFPQGASGSQNHHGGQPNRGAAPRPPVAPAQSGPSAQAKKETGTKPGSCFNCGELGHFADKCPKPRRAGLRFVQARVNHASAEEAQAAPEVVLGTFPVNSIPATVLFDSGATHSFISKKFVGMHGLIREELSTPMRVHTPGNSSTSVQFSPSITIEIQRSPFLANLILLEFKDLDVILGMDWLTKFKGVIDCANRTVTLTNEKGETVVYKSPDSPKQGVSLNQIRRKPVVTVEKNLRKLEDIPIVCEYPEVFPEDLTTMPPKREIEFRIDLAPGTAPIYKRPYRMAANELAEVKKQVDEQLQKGYIRPSTSPWGAPVIFVEKKDKTKRMCVDYRALNEVTIKNKYPLPRIDDLFDQLKGAKVFSKIDLRSRYHQLRIREEDIPKTAFTTRYGLYECTVMSFGLTNAPTFFMNLMNKVFMEFLDKFVVVFIDDLLIYSKSEEEHEQHLRLVLEKLKEHQLYAKFSKCDFWLTEVKFLGHVITAQGVAVDPSNVESVTKWTPPKTVSQIXSFLGLAGYYSRFIENFSRIARPMKMKDEKFKWTAECDKSFEELKKKLVSAPVLILPDQMKDFQVYCDASRHGLGCVLMQEGRVVAYASRHLSPHEGNYPTHDLELAAVVHALKIWRHYLIGNRCEVYTDHKSLKYIFTQPDLNLRQRRWLELIKDYDMSIHYHPGKVNVVADALSRKSYCTTLCIEGMCEELRQEFEHLNVGIVEHGFIAALEARPTLVDQVRAGQVNDPEIAELKKNMRVEKARDFLEDEHGTIWLGERLCVLDDKELKDLILTEAHQTQYSIHPGSTKMYQDLKEKFWWVSMRREIAEFVALCDVCQRVKAEHQRPAGLLQPLQILEWKWEEIGMDFITGLPRTSSGHDSIXVVVDRLTKVAHFIPVHTTYTGKRLAELYLSRIICLHGVPKKIVSDRGSQFTSKFWQKLQEELGTRLNFSTAYHPQTNGQTERVNQILEDMLRACALDFGGAWDKSLPYAEFSYNNSYQASLQMVPFEALYGRKCRTPLFWDQAGERQLFGIEVLAEAEEKVRTIRERLRIAQSRQKSYADNRRRELTFEAGDYVYLLVTPLRGVHRFQTKGKLAPRFVGPYKILERRGEVAYQLELPSNMIGIHDVFHVSQLKKCLRVPEEQTDSEHIDIQEDLTYVEKPVRILDTSERRTRNKVTRFCRVQWSHHPEEEATWEREDELKAAHPHLFASSSESRGRDSV

SEQ ID NO: 18808 - protein, 1672 aa, Oryza sativa
  Clone ID: TF_OSC414115j.C1.p1.fg
MVVEASGGTADHACQEAAYLMMARLRERHNYIFHDMAYRFHPRRASGDDVSTFRPTTGQNDTTFGHMCAVMSGLDRMHSDLHKATKALNDGKLMRIVALMDEIARLKRENAQLKGLPAPGGVRIRTTPRKTTTAPVRIQLAPRNPPPSAAPAAPPVPPAVPAAPAPAPASALSFAPASAARGPASGNGGCLLGMVYTRNGSRATGEGSNGEERTDGAHPHSDSGNGPPPLPENPTLVQVMAHQTQMMAAMMQHQHQQMHQRMLQHAEQQHQQFGPPPPQSKLPEFLRVRPPTFSSTTNPMEANDWLHAIEKKLNLLQCNDQEKVAFATHQLQGPASAWWDNHMATRPPGTEVTWVEFCRSFRKAQVPDGVVAQKKREFRALHQGNRTVTEYLHEFNRLARYAPEDVRTDAEKQEKFMAGLDDELTNQLISGDYADVERLVDKAIRQEDQRNKMDRKRKAAQFRAPQGSHQRPRFAPRQQGGPTTMIVRQHRPFNPSNFPQGASGSQNHHGGQSNRGAAPRPPMAPAQSGPPAQAKKETGAKPGSCFNCGELGHFADKCPKPRRAGPRFIQARVNHASAEEAQAAPEVVLGTFSINSIPATVLFDSGATHSFISKKFVGMHGLIREELSTPMRVHTPGNSSTSVQFSPSITIEIQRSPFLANLILLESKDLDVILGMDWLTKFKGVIDCANRTVTLTNEKGETVVYKSLVSPKQGVSLNQIEAEIPVDTVEKNLRKLEDIPIVCEYPEVFLEDLTTMPPKREIDSGLTWHREPPQFTRDQKKDKTKRMCVDYRALNEVTIKNKYPLPRIDDLFDQLKGAKVFSKIDLRSGYHQLRIREEDIPKTAFTTRYGLYECTVMSFGLTNAPAFFMNLMNKVLMEFLDKFVVVFIDDILIYSTSEEEHEQHLRLVLEKLKEHQLYAKFSKCDFWLTEVKFLGHVITAQGVAVDPSNVESVTKWTPPKTVSQIRSFLGLAGYYRRFIENFSRIARPMTQLLKKDEKFKWTTECDKSFEELKKKLVSAPVLILPDQMKDFQVYCDASRHGLGCVLMQEGIVVAYASRQLRPHEGNYPTHDLELAAVVHALKIWRHYLIGNRCEVYTDHKSLKYIFTQPDLNLRQRRWLELIKDYDMSIHYHPGKANVVADALSRKSYCTALCIEGMCEELWQEFEHLNVGIVEHGFVAALEARPTLVDQVRAAQVNDSEIAELKKNMRVGKARDFHEDEHGTIWLGERLCVPDDKELKDLILTEAHQTQYSIHPGSTKMYQDLKEKFWWVSMRREIAEFVALCDVCQRVKAEHQRPAGLLQPLQILEWKWEEIGMDFITGLPRTSSGHDSIWVVVDRLTKVAHFIPVHTTYTGKRLAELYLSRIMCLHGVPKKIVSDRGSQFTSKFWQKLQEELGTRLNFSTAYHPQTDGQTERVNQILEDMLRACALDFGGAWDKSLPYAEFSYNNSYQASLQMAPFEALYGRKCRTPLFWDQTGERQLFGTEVLAEAEEKVRIIRERLRIAQSRQKSYADNRRRELTFEAGDYVYLRVTPLRGVHRFQTKGKLAPRFVGPYKILERRGEVAYQLELPSNMIGIHDVFHVSQLKKCLRVPEEQADSKHIDIQEDLTYVEKPIRILDTSERRTRNKVNRFCRVQWSHHSEEEATWEREDELKAAHPHLFTSSSESRGRDSV

SEQ ID NO: 18809 - protein, 541 aa, Oryza sativa
  Clone ID: TF_OSC414616j.C1.p3.fg
MAQLGRLCAVLCPSRAAPGRPIGLGRFGPSVPVDRWWTASVVPGFNTQNSLEIWVKFLGVTKWYQSQLDCRLSQMVKPCQTWRRNRQLHACPEVKSSLKLRAAKSEKQLVSMRDNFNGSGSRQFHGSTQLNSISFPRQPLKDQPQSQVMANQTQTVEELLRQMRHRSLKITAAKLPSDQREVSATCYDCGEQGHYIRNCPWKVFTRSPEKDEKQCPGSNQAPSQSTNKKDGTLQHSSGANRKGTDHVPKDYQRNSVLVMTKKEQGTTVQPFHQPMAVDDISHNPSALPPILAPVDANHGRSNVARDVHKSLLVPVSAAKVHNQKPAPQDQASRFCRNCRKPGHCFSDCPLPRAAKAVRRDSQVISTAHDPNRHLNVQPPPQRIIVKGTVRGRIVPPAIVSSLQHQRQQGKQCKENNSSLQLQRGSMLLHQHPQQVSSAPGRSTVVSSSNAPRIAPIRRPIDKPPLGNPASKKSHLLRQSRELLLHHRRPTSRATFPVRLQLVGTKGTSQSGLNDGSNNSSSQDLYFSGLKGSSNQQQSTMV

SEQ ID NO: 18810 - protein, 1802 aa, Oryza sativa
  Clone ID: TF_OSC416746j.C1.p17.fg
MAGHPPNHRGEGMIDFVAELARMTLVVGYPDAPEYTTIPPLSGELPHRVRLEVHGYVGTCLANMAVEASGGTADHACQEAAYLMMARLRERHNYIFHDTAYRYHPSRAHGDGVSSFRPTAGENDTTFGHMCAVMRGLDRMHSDLHKATKALNDGKLMRIVALKDEVARLKKENAQLKGLPAPGGVRIRTTPRKRTTAPVRIQLAPRNPPPPAAPAAAPAPPAVPAAPAPAPAFTLSFAPASAAGGSASGTGGWLSATPSGSGETDPSDSRSRSEGPGCLFGMVYTRTGNRATGEGSNGEERADGVHPNGDSGNGPPPLQENPTLAQVMAHQTQMMAAMMQQMQHQHQQMHQRMMQHAEQQHQQFGPPPPQSKLPEFLRVRPPTFSSTTNPMEANDWLHAIEKKLNLLQCNDQEKVAFATHQLQGPASAWWDNHMATRPPGTEVTWAEFCRSFRKAQVPDGVVAQKKREFRALHQGNRTVTEYLHEFNRLARYAPEDVRTDAEKQEKFMAGLDDELTNQLISGDYADFERLVDKAIRQEDQRNKMDRKRKAAQFRSNQGSQHRPRFTPGQQGGPTTMIVRQHRPFNSSNFHQGTSGSQNHHGSQPNRGAAPRPPMAPAQSGQPAQAKKETGAKPGSCFNCGELGHFADKCPKPRRAGPRFIQARVNHASAEEAQAAPEVVLGTFPVNSIPATVLFDSGATHSFISKKFVGMHGLIREELSTPMRVHTPGNSSTSVQFSPSITIEIQRSPFLANLILLDSKGLDVILGMDWLTKFKGVIDCANRTVTLTNEKGETVVYKSLVSPRKGVSLNQIETEIPVDTVEKNSRKLEDIPIVCEYPEVFPEDLTTMPPKREIEFRIDLAPGTAPIYKRPYRMAANELAEVKKQVDEQLQKGYIRPSTSPWGAPVIFVEKKDKTKRMCVDYRALNEVTIKNKYPLPRIDDLFDQLKGAKVFSKIDLRSGYHQLRIREEDIPKTAFTTRYGLYECTVMSFGLTNAPAFFMNLMNKVFMEFLDKFVVVFIDDILIYSKSEEEHEQHLRLVLEKLKEHQLYAKFSKCDFWLTEVKFLGHVITAQGVAVDPSNVESVTKWTPPKTVSQIRSFLGLAGYYRRFIENFSRIARPMTQLLKKDEKFKWTAECDKSFEELKKKLVSAPVLILPDPTKDFQVYCDASRHGLGCVLMQEGRVVAYASRQLRPHEGNYPTHDLELAAVVHALKIWRHYLIGNRCEVYTDHKSLKYIFTQPDLNLRQRRWLELIKDYDMSIHYHPGKANVVADALSRKSYCTALCIEGMCEELRQELEHLNVGIVEHGFVAALEARPTLVDQVRAAQVNDPEIAELKKNMRVGKARDFHEDEHGTIWMGERLCVPDDKELKDLILTEAHQTQYSIHPGSTKMYQDLKEKFWWVSMRREIAEFVALCDVCQRVKAEHQRPAGLLQPLQIPEWKWEEIGMDFITGLPRTSSGHDSIWVVVDRLTKVAHFIPVHTTYTGKRLAELYLARIMCLHGVPKKIVSDRGSQFTSKFWQKLQEELGTRLNFSTAYHPQTDGQTERVNQILEDMLRACALDFGGAWDKSLPYAEFSYNNSYQASLQMAPFEALYGRKCRTPLFWDQTGERQLFGTEVLAEAEEKVRIIRERLRIAQSRQKSYADNRRRELTFEAGDYVYLRVTPLRGVHRFQTKGKLAPRFVGPYKILERRGEVAYQLELPSNMIGIHDVFHVSQLKKCLRVPEEQADSEHIDIQEDLTYVEKPVRILDTSERRTRNKVTRFCRVQWSHHSEEEATWEREDELKAAHPHLFTSSSESRGRDSV

SEQ ID NO: 18811 - protein, 1664 aa, Oryza sativa
  Clone ID: TF_OSC418148j.C1.p15.fg
MATWGLASLTWRVEASGGTADHACQEAAYLMMARLRERHNYIFHDTAYRYHPSRANGDGVSSFRPTAGENDTTFGHMCAVMRGLDRMHSDLHKATKALNDGKLMRIVALKDEIARLKKENAQLKGLPAPGGVRIRTTPRKRTTAPVRIQLAPRNPPPPAAPAAPAVPAVPPAPAPAPAPAFTLSFAPASAARGPASGTGGWLSATPSGSDETDLSGSRSRSEGPGCLFGMVYTRTGNRTTGEGSNGEERADGVHPNSDSGNGPPPLPENPTLAQVMAHQTQMMAAMMQQMQQQHQQMHQRMMQHAEQQHQQFGPPPPQSKLPEFLRVRPPTFSSTTNPMEANDWLHAIEKKLNLLQCNDQEKVAFATHQLQGPASAWWDNHMATRPPGTEVTWAEFCRSFRKAQVPDGVVAQKKREFRALHQGNRTVTEYLHEFNRLARYAPEDVRTDAEKQEKFMAGLDDELTNQLISGDYADFERLVDKAIRQEDQRNKMDRKRKAAQFRAHQGSHQRPRFTPGQQGGPTTMIVRQHRPFNPSNFHQGSSGSQNHHGSQPNRGTAPRPPMAPAQSGQPAQAKKETGAKPGSCFNCGELGHFADKCPKPRRAGPRFIQARVNHASAEEAQAAPEVVLGTFPVNSIPATVLFDSGATHSFISKKFVGMHGLIREELSTPMRVHTPGNSSTSVQFSPSITIEIQRSPFLANLILLESKDLDVILGMDWLTKFKGVIDCANRTVTLTNEKGETVVYKSLVSPKKGASLNQIETKIPVDTEEKNLRKLEDIPIVCEYPEVFPEDLTTMPPKREIEFRIDLAPGTAPIYKRPYRMAANELAEVKKQVDEQLQKGYIRPSTSPWGAPVIFVEKKDKTKRMCVDYRALNEVTIKNKYPLPRIDDLFDQLKGAKVFSKIDLRSGYHQLRIREEDIPKTAFTTRYGLYECTVMSFGLTNAPAFFMNLMNKVFMEFLDKFVVVFIDDILIYSKSEEEHEQHLRLVLEKLKEHQLYAKFSKCDFWLTEVKFLGHVITAQTKDFQVYCDASRHGLGCVLMQEGRVVAYASRQLRPHEGNYPTHDLELAAVVHALKIWRHYLVGNRCEVYTDHKSLKYIFTQPDLNLRQRRWLELIKDYDMSIHYHPGKANVVADALSRKSYCTALCIEGMCEELRQELEHLNMGIVEHGFVAALEARPTLVDQVRAAQVNDPEIAELKKNMRVGKARDFLEDEHGTIWMGERLCVPDDKELKDLILTEAHQTQYSIHPGSTKMYQDLKEKFWWVSMRREIAEFVALCDVCQRVKAEHQRPAGLLQPLQIPEWKWEEIGMDFITGLPRTSSGHDSIWVVVDRLTKVAHFIPVHTTYTGKRLAELYLARIMCLHGVPKKIASDRGSQFTSKFWQKLQEELGTRLNFSTAYHPQTDGQTERVNQILEDMLRACALDFGGAWDKSLPYAEFSYNNSYQASLQMAPFEALYGRKCRTPLFWDQTGERQLFGTEVLAEAEEKVRIIRERLRIAQSRQKSYADNRRRELTFEAGDYVYLRVTPLRGVHRFQTKGKLAPRFVGPYKILERRGEVAYQLELPSNMIGIHDVFHVSQLKKCLRVPEEQADSEHIDIQEDLTYVEKPVRILDTSERRTRNKVTRFCRVQWSHHSEEEATWEREDELKAAHPHLFTSSSESRGRDSV

SEQ ID NO: 18812 - protein, 1777 aa, Oryza sativa
  Clone ID: TF_OSC420097j.C1.p7.fg
MAGHPPNHRGEGMIDFVAELARMTLVVGYPNAPEYTTIPPLSGELPHRVRLEVHGYVGTCLANMAVEASGGTADHACQEAAYLMMARIRERHDYIFHDTAYRYHPRRAHGDGVSSFRPTAGENDTTFGHMCAVMRGLDRMHSDLHKATKALNDGKLMRIVALKDEIARLKKENAQLKGLPAPGGVRIRTTPRKTTTAPVRIQLAPRNPPPPAAPAAPSVPPAVPAAPAPAPAFTLSFAPASAARGSASGTGGCLFGMVYTRNGSRATGEGSNGEERADGVHPNSDSGNGPPPLPENPTLAQVMAHQTQMMAAMMQQMQQQHQQMHQRMMQHAEQQHQQFGPPPPQSKLPEFLRVRPPTFSSTTNPMEANDWLHAIEKKLNLLQCNDQEKVAFATHQLQGPASAWWDNHMATRPPGTEVTWAEFCRSFRKAQVPDGVVAQKKREFRALHQGNRTVTEYLHEFNRLARYAPEDVRTDAEKQEKFMAGLDDELTNQLISGDYADFERLVDKAIRQEDQRNKMDRKRKAAQFRAHQGSHQRPRFTPGQQGGPTTMIVRQHRPFNPSNFHQGTSGSQNHHGSQPNRGAAPRPSVAPAQSGQPAQAKKETGAKPGSCFNCGELGHFADKCPKPRRAGPRFIQARVNHASAEEAQAAPEVVLGTFPVNSIPATVLFDSGATHSFISKKFVGMHGLIREELSTPMRVHTPGNSSTSVQFSPSITIEIQRSPFLANLILLESKDLDVILGMDWLTKFKGVIDCASRTVTLTNEKGETVVYKSLVSPKKGVSLNQIETEIPVDTVEKNLRKLEDIPIVCEYPEVFPEDLTTMPPKREIEFRIDLAPGTAPIYKRPYRMAANELAEVKKQVDEQLQKGYIRPSTSPWGAPVIFVEKKDKTKRMCVDYRALNEVTIKNKYPLPRIDDLFDQLKGAKVFSKIDLRSGYHQLRIREEDIPKTAFTTRYGLYECTVMSFGLTNAPAFFMNLMNKVFMEFLDKFVVVFIDDILIYSKSKEEHEQHLRLVLEKLKEHQLYAKFSKCDFWLTEVKFLGHVITAQGVAVDPSNVESVTKWTPPKTVSQIRSFLGLAGYYRRFIENFSRIARPMTQLLKKDEKFKWTAECDKSFEELKKKLVSAPVLILPDPTKDFQVYCDASRHGLGCVLMQEGRVVAYASRQLRPHEGNYPTHDLELAAVVHALKIWRHYLIGNRCEVYTDHKSLKYIFTQPDLNLRQRRWLELIKDYDMSIHYHPGKANVVADALSRKSYCTALCIEGMCEELRQEFEHLNMGIVEHGFVAALEARPTLVDQVRAAQVNDSEIAELKKNMRVGKARDFHEDEHGTIWMGERLCVPDDKELKDLILTEAHQTQYSIHPGSTKMYQDLKEKFWWVSMRREIAEFVALCDVCQRVKAEHQRPAGLLQPLQIPEWKWEEIGMDFITGLPRTSSGHDSIWVVVDRLTKVAHFIPVHTTYTGKRLAELYLSRIMCLHGVPKKIVSDRGSQFTSKFWQKLQEEMGTRLNFSTAYHPQTDGQTERVNQILEDMLRACALDFGGAWDKSLPYAEFSYNNSYQASLQMAPFEALYGRKCRTPLFWDQTGERQLFGTKVLAEAEEKVRIIRERLRIAQSRQKSYADNRRRELTFEAGDYVYLRVTPLRGVHRFQTKGKLAPRFVGPYKILERRGEVAYQLELPSNMIGIHDVFHVSQLKKCLRVPEEQADSEHIDIQEDLTYVEKPVRILDTSERRTRNKVTRFCRVQWSHHSEEEATWEREDELKAAHPHLFTSSSESRGRDSV

SEQ ID NO: 18813 - protein, 1513 aa, Oryza sativa
  unsure (1)..(1513): unsure at all Xaa locations
  Clone ID: TF_OSC4211j.C1.p3.np
RNGXRRTSGGDGPKARPGGPSPRSDSGNGPPPLPENPTLAQVMAHQTQMMAAMIQQMQQQHQQMHQRMMQHVEQQHQQFGPPPPQSKLPEFLRVRPPTFSSTTNPMEANDWLHAIEKKLNLLQCNDQEKVAFATHQLQGPASAWWDNHMATRPPGTEVTWAEFCRSLRKAQVPDGVVAQKKREFRALHQGNRTVTQYLHEFNRLARYAPEDVRTDAEKQEKFMAGLDDELTNQLISGDYADFERLVDKAIRQEDQRNKIDRKRKAAQFRAPQGSHQRPRFTPGQQGGPTTMIVRQHRPFNPSNFPQGTSGSQNHHGGQPNRGAAPRPSVAPAQSGQPAQAKKETGAKPGSCFNCGELGHFADKCPKPRRAGPRFIQARVNHASAEEAQTAPEVVLGTFPVNSIPATVLFDSGATHSFISKKFVGRYGLRKEELSTPMRVHTPGNSSTSVSFSPSVLIEIQRSPFLANLILLESKDLDVILGMDWLTKFKGVIDCANRTVTLTNEKGETVVYKSLVSPKKGVSLNQIETEIPVDTVEKNLRKLEDIPIVCEYPEVFPEDLTTMPPKREIEFRIDLAPGTAPIYKRPYRMAANELAEVKKQVDEQLQKGYIRPSTSPWGAPVIFVEKKDKTKRMCVDYRALNEVTIKNKYPLPRIDDLFDQLKGAKVFSKIDLRSGYHQLRIREEDIPKTAFTTRYGLYECTVMSFGLTNAPAFFMNLMNKVFMEFLDKFVVVFIDDILIYSKSEEEHEQHLRLVLEKLKEHQLYAKFSKCDFWLTEVKFLGHVITAQGVAVDPSNVESVTKWTPPKTVSQIRSFLGLAGYYRRFIENFSRIARPMTQLLKKDEKFKWTAECDKSFEELKKKLVSAPVLILPDPMKDFQVYCDASRHGLGCVLMQEDRVVAYASRQLRPHEGNYPTHDLELAAVVHALKIWRHYLIGNRCEVYTDHKSLKYIFTQPDLNLRQRRWLELIKDYDMSIHYHPGKANVVADALSRKSYCTALCIEGMCEELRQEFEHLNMGIVEHGFVAALEARPTLVDQVRAAQVNDSEIAELKKNMRVGKARDFHEDEHGTIWMGERLCVPDDKELKDLILTEAHQTQYSIHPGSTKMYQDLKEKFWWVSMRREIAEFVALCDVCQRVKAEHQRPAGLLQPLQIPEWKWEEIGMDFITGLPRTSSGHDLIWVVVDRLTKVAHFIPVHTTYTGKRLAELYLSRIMCLHGVPKKIVSDRGSQFTSKFWQKLQEELGTRLNFSTAYHPQTDGQTERVNQILEDMLRACALDFGGAWDKSLPYAEFSYNNSYQASLQMAPFEALYGRKCRTPLFWDQTGERQLFGTEVLAEAEEKVRIIRERLRIAQSRQKSYADNRRRELTFEAGDYVYLRVTPLRGVHRFQTKGKLAPRFVGPYKILERRGEVAYQLELPSNMIGIHDVFHVSQLKKCLRVPEEQADSKHIDIQEDLTYVEKPVRILDTSERRTRNKVTRFCRVQWSHHSEEEATWEREDELKAAHPHLFTSSSESRG

SEQ ID NO: 18814 - protein, 1315 aa, Oryza sativa
  unsure (1)..(1315): unsure at all Xaa locations
  Clone ID: TF_OSC5112j.C1.p1.np
MAEHPPNHRGEGMGDFVAELARMTLVVGYPNAPEYTTVPPLSGELPHRVRLEVHGYMGTCLAKMVVEASGGTADHACQEAAYLMMARLRERHNYIFHDTAYRFHPRRASGSDVSSFRPTAGENDTTFGHMCAVMRGMDRMHSDLHKASKALNDGKLVRIIALKDEIARLKRENAQLKGLPAPGGVRIRTTPRKSTTAPVRVQLAPRNPPPSAAPAAPAVPAAPPVPPAAPAVPAAPAPAPAPVPMSAPASALSFAPASAVRGPASGNGGCFLQMVYTRNGTRTTSEGSNGEERADGVHPNSDSGNGPPPFPENLTLAQVMAHQTQMMAAMMQQMQQQHQQMHQRMLQHAEQQHQQFGPPPPQSKLPEFLRVRPPTFSSTTNPMEANDWLHAIEKKLNLLQCNDQEKVAFATHQLQGPASAWWDNHVATRPPGTEVTWAEFCRSFRKAQVPDGVVAQKKRGFRALHQGNRTVTEYLHEFNRLARYAPEDVCTDAEKQEKFLAGLDDELTNQLISGDYADFERLVDKAIRQEDQRNKMDRKRKAAQFRSNQGNHQRPRFTLGQQGGPTTMIVRQHRTFKSSNFHQGASGSQNHHGGQPNHGAAPHPPVAPAQSGPSAQAKETGAKPGSCFNCGELGHFADKCPKPRRAGSKFVQARVNHASAKEAQAAPEVVLGTFPVNSIPATVLFDSGATHSFISKKFVRMHGLIREELSTPMRVHTPGNSSTSVQFSPSITIEIQRSPFLANIILLDSKDLDVILGMDWLTKFKGVIDCANRTVTLTNEKGETIVYKSLVSPKQGVSLNQIEAETPVVTEGMNSRKLEEIPIVCEYPEVFPKDLTTMPPKREIEFRIDLAPGTAPIYKRPYRMAANELAEVKKQVDEQLQKGYIRPSTSPWGAPVIFVEKKDKTKRMCVDYRALNEVTIKNKYPLPRIDDLFDQLKGAKVFSKIDLRSGYHQLRIREEDIPKTAFTTRYGLHECTVMSFGLTNAPAFFMNLMNKVFMEFLDKFVVVFIDDILIYSKSEEEHEQHLRLVLEKLKEHQLYAKFSKCDFWLTEVKFLGHVIIAQGMAVDPSNVEVIIAQGMAVDPSNVESVTKWTPPKTVSQIRSFLRLAGYYRQFIENFSRIARPMTQLLKKDEKFKWTAECDKSFEELKKKLVSAPVLILPDQMKDFQVYCDASRHGLGCVLMQEGRVVAYASRXSRPHEGNYPTHDLELAAVVHALKIWRHYLIGNRCEVYTDHKSLKYIFTQPDLNLRQRRWLELIKDYDMSIHYHPGKANVVADALSRKSYCTALCIEGMCEELQQEFKRLNVGIVEHGFIA

SEQ ID NO: 18815 - protein, 1825 aa, Oryza sativa
  Clone ID: TF_OSC5884j.C1.p1.fg
MERPKSPLNPFHCICSLQLDFVPGKWGSVLMVQGKNLGRSFKMAGHPPNHRGEGMIDFVAELARMTLVVGYPDAPEYTTIPPLSGELPHRVRLEVHGYVGTCLANMAVEASGGTADHACQEAAYLMMARLRERHDYIFHDTAYRYHPRRAHGDGVSSFRPTAGENDTTFGHMCAVMRGLDRMHSDLHKATKALNDGKLMRIVALKDEIARLKKENAQLKGLPAPGGVRIRTTPRKRTTAPVRIQLAPRNPPPPAAPAAPPVPPAAPAVPAVPPAPAPAPAFTLSFAPASAARGPASGTGGCLFGMVYTRTGNRTTGEGSNGEERVDGVHPNSDSGNGPPPLPENPTLAQVMAHQTQMMAAMMQQMQQQHQQMHQRMMQHAEQQHQQFGPPPPQSKLPEFLRVRPPTFSSTTNPMEANDWIHAIEKKLNLLQCNEQEKVAFATHQLQGPASAWWDNHMATRPPGTEVTWAEFCRSFRKAQVPDGVVAQKKREFRALHQGNRTVTEYLHEFNRLARYAPEDVRTDAEKQEKFMAGLDDELTNQLISGDYADFERLVDKAIRQEDQRNKMDRKRKAAQFRSNQGSQHRPRLTPGQQGGPTTMIVRQHRPFNPSNFHQGTSGSQNHHGSQPNRGTAPRPPMAPAQSGQPAQAKKETGAKPGSCFNCGELGHFADKCPKPRRAGPRFIQARVNHASAEEAQAAPEVVLGTFPVNSIPATVLFDSGATHSFISKKFVGMHGLIREELSTPMRVHTPGNSSTSVQFSPSITIEIQRSPFLANLILLESKDLDVILGMDWLTKFKGVIDCANRTVTLTNEKGETVVYKSLVSPKKGASLNQIETEIPMDAEEKNLRKLEDIPIVCEYPEVFPEDLTTMPPKREIEFRIDLAPGTAPIYKRPYRMAANELAEVKKQVDEQLQKGYIRPSTSPWGAPVIFVEKKDKTKRMCVDYRALNEVTIKNKYPLPRIDDLFDQLKGAKVFSKIDLRSGYHQLRIREEDIPKTAFTTRYGLYECTVMSFGLTNAPAFFMNLMNKVFMEFLDKFVVVFIDDILIYSKSEEEHEQHLRLVLEKLKEHQLYAKFSKCDFWLTEVKFLGHVITAQGVAVDPSNVESVTKWTPPKTVSQIRSFLGLAGYYRRFIENFSRIARPMTQLLKKDEKFKWTAECDKSFEELKRKLVSAPVLILPDQTKDFQVYCDASRHGLGCVLMQEGRVVAYASRQLRPHEGNYPTHDLELAAVVHALKIWRHYLIGNRCEVYTDHKSLKYIFTQPDLNLRQRRWLELIKDYDMSIHYHPGKANVVADALSRKSYCTALCIEGMCEELRQELEHLNMGIVEHGFVAALEARPTLVDQVRAAQVNDPEIAELKKNMRVGKARDFLEDEHGTIWMGERLCVPDDKELKDLILTEAHQTQYSIHPGSTKMYQDLKEKFWWVSMRREIAEFVALCDVCQRVKAEHQRPAGLLQPLQIPEWKWEEIGMDFITGLPRTSSGHDSIWVVVDRLTKVAHFIPVHTTYTGKRLAELYLARIMCLHGVPKKIVSDRGSQFTSKFWQKLQEELGTRLNFSTAYHPQTDGQTERVNQILEDMLRACALDFGGAWDKSLPYAEFSYNNSYQASLQMAPFEALYGRKCRTPLFWDQTGERQLFGTEVLAEAEEKVRIIRERLRVAQSRQKSYADNRRRELTFEVGDYVYLRVTPLRGVHRFQTKGKLAPRFVGPYKILERRGEVAYQLELPSNMIGIHDVFHVSQLKKCLRVPEEQADSEHIDIQEDLTYVEKPVRILDTSERRTRNKVTRFCRVQWSHHSEEEATWEREEELKAAHPYLFTSSSESRGRDSV

SEQ ID NO: 18816 - protein, 1784 aa, Oryza sativa
  unsure (1)..(1784): unsure at all Xaa locations
  Clone ID: TF_OSC6690j.C1.p2.np
MAGHPPNHRGEGMIDFVAELARMTLVVGYPNAPEYTTIPPLSGELPHRVRLEVHGYVGTCLANMAVEACGGTADHACQEAAYLMMARLRERHNYIFHDTAYRYHPRRANGDGVSSFRPTAGENDTTFGHMCAVMRGLDRMHSDLHKATKALNDGKLMRIVALKDEIARLKKENAQLKGLPAPGGVRIRTTPRKTTTAPVRIQLAPRNPPPPAAPAAPPVPPAAPAVPAAPAPAPAPAPAFALSFAPASAARGPASGTGGCSLQMVYTRTGSRATGEDSNGEERADGVHPSSDSGNGPPPLPENPTLAQVMAHQTQMMAAMMQQMQQQHQQMHQRMLQHAEQQHQQLGPPPPQSKLPEFLRVRPPTFSSTTNPMEANDWLHAIEKKLNLLQCNDQEKVAFATHQLQGPASAWWDNHMATRPPGTEVTWAEFCRSFRKAQVPDGVVAQKKREFRALHQGNRTVTEYLHEFNRLARYAPEDVRTDAEKQEKFMAGLDDELTNQLISGDYADFERLVDKAIRQEDQRNKMDRKRKAAQFRAHQGSHQRPRFTSGQQGGPTTMIVRQHRPFNPSNFPQGASGSQNHHGGQPNRGAAPRPPMAPAQSGQPAQAKKETGAKPGSCFNCGELGHFADKCPKPRRAGPRFIQARVNHASAEEAQAAPEVVLGTFPVNSIPATVLFDSGATHSFISKKFVGMHGLIREELSTPMRVHTPGNSSTSVQFSPSITIEIQRSLFLANLILLESKDLDVILGMDWLTKFKGVIDCANRTVTLTNEKRETVVYKSLVSPKKGVSLNQIETEIPVDTVEKNLRKLEDIPIICEYPEVFPEDLTTMPPKREIEFRIDLAPGTAPIYKRPYRMAANELAEVKKQVDEQLQKGYIRPSTSPWGAPVIFVEKKDKTKRMCVDYCALNEVTIKNKYPLPRIDDLFDQLKGARVFSKIDLRSGYHQLRIREEDIPKTAFTTRYGLYECTVMSFGLTNAPAFFMNLMNKVFMEFLDKFVVVFIDDILIYSKSEEEHEQHLRLVLEKLKEHQLYAKFSKCDFWLTEVKFLGHVITAQGVAVDPSNVESVTKWTPPKTVSQIRSFLGLAGYYRRFIENFSRIARPMTQLLKKDEKFKWTAECDKSFEELKQKLVSAPVLILPDPMKDFQVYCDASHHGLGCVLMQEGRVVAYASRQLRPHEGNYPTHDLELAAVVHALKIWRHYLIGNRCEVYTDHKSLKYIFTQPDLNLRQRRWLELIKDYDMSIHYHPGKANVVADALSRKSYCTALCVEGMCEELRQEFEHLNVGIVEHGFVAALEARPTLVDQVRAAQVNDPEIAELKKNMRVGKARDFLEDEHGTIWIGERLCVPDDKELKDLILTEAHXTQYSIHPGSTKMYQDLKEKFWWVSMRREIAEFVALCDVCQRVKAEHQRPAGLLQPLQIPEWKWEEIGMDFITGLPRTSSGHDSIWVVVDRLTKVAHFIPVHTTYTGKRLAELYLARIMCLHGVPKKIVSDRGSQFTSKFWQKLQEEMGTRLNFSTAYHPQTDGQTERVNQILEDMLRACALDFVGAWDKSLPYAEFSYNNSYQASLQMAPFEALYGRKCRTPLFWDQTGERQLFGTEVLAEAEEKVRIIRERLRIAQSRQKSYADNRRRELTFEAGDYVYLRVTPLRGVHHFQTKGKLAPRFVGPYKILERRGEVAYQLELPSNMIGIHDVFHVSQLKKCLRVPEEQADSEHIDIQEDLTYVEKPVRILDTSERRTRNKVTRFCRVQWSHHSEEEATWEREDELKAAHPHLFTSSSESRGRDSV

SEQ ID NO: 18817 - protein, 749 aa, Oryza sativa
  Clone ID: TF_OSC734j.C1.p3.gm
MVYTRNGSRATGEGSNGEERTDGVHPNSDSGNGPPPLPENPTLAQVMAHQTQMMAAMMQQMQHQHQQMHQRMLQHAEQQHQQFGPPPPQSKLPEFLRVRPPTFSSTTNPMEANDWLHAIEKKLNLLQCNDQEKVAFATHQLQGPASAWWDNHMATRPPGTEVTWAEFCRSFRKAQVPDGVVAQKKREFRALHQGNRTATVYLHEFNRLARYAPEDVRTDAEKQEKFMAGLDDELTNQLISGDYADFERLVDKAIRQEDQRNKMDRKRKAAQFRADQGSHQRPRFTPGQQGGPTTMIVRQHRPFNPSNFPQGASGSQNHHGGQSNRGAAPRPPMAPAQSGPPAQAKKETGAKPGSCFNCGELGHFADKCPKPRRAGPRFIQARVNHASAEEAQAAPEVVLVTLTNEKGETVVYKSPDSPKRGVSLNQIETEIPVDTVEKNLRKLEDIPIVCEYPEVFPEDLTTMPPKREIEFRIDLAPGTAPIYKRPYRMAANELAEVKKQVDEQLQKGYIRPSTSPWGAPVIFVEKKDKTKRMCVDYRALNEEEDIPKTAFTTRYRLYECTVMSFGLTNAPAFFMNLMNKVFMEFLDKFVVVFIDDILIYSKSEEEHEQHLRLVLEKLKEHQLYAKFSKCDFWLTEVKFLGHVITAQGVAVDPLNVESVTKWTPPKTVSQIRSFLGLAGYYRRFIENFSRIARPMTQLLKKDEKFKWTAECDKSFEELKKKLVSAPVLILPDQMKDFQVYCDASRHGLG

SEQ ID NO: 18818 - protein, 1635 aa, Oryza sativa
  Clone ID: TF_OSC900034j.C1.p16.fg
MGCKMAGHPPNHCGEGMIDFVAELARMTLVVGYPNAPEYTTVPPLSGELPHRVRLEVHGYVGTCLANMVVEASGGTADHACQEAAYLMMARLRERHNYIFHDTAYRFHPRRASGDDVSTFRPTAGENDTTFGHMCAVMRGLDRMHSDLHKATKALNDGKLMRIVALKDEIARLKRENAQLKGLPAPGGVRIRTTPRKTTTKPVRIQLAPRNPPPPAAPAVPAAPAPAPVHVLAPASALSFAPASAARGPASGNGGCLFGMVYTRNGSRATGEGSNGEERTEGVHPNSNSGNGPPPLPENPTLAQVMAHQTQMIAAMMQQMQQQHQQMHQRMLQHAEQQHQQFGPPPPQSKLPEFLRVRPPTFSSTTNPMEANDWLHAIEKKLNLLQCNDQEKVAFATHQLQGPASAWWDNHMATRPPGTEVTWEEFCRSFRKAQVPDGVVAQKKREFRALHQGNRTVTEYLHEFNGLARYAPEDVRTDAEKQEKFMAGLDDELTNQLISGDYADFERLMDRKRKAALFRAPQGSHQRPRFTPGQQGGPTTMIVRQYRPFNPSNFPQGASGSQNHHGGQPSRGAAPRPPVAPAQSGPPAQAKKETGAKPGSCFNCGELGHFADKCPKPRRAGPRFIQARVNHASAEEAQATPEVVLGTFPVNSIPATILFDSGATHSFISKKFVGMHGLRKEELSTPMRVHTPGNSSTSVSFSPSVLIEIQRSPFLANLILLESKDLDVILGMDWLTKFKGVIDCANRTVTLTNEKGETVVYKSPDSPKRGVSLNQIETKIPEDTVEKNLRKLEDIPIVCEYPEVFPEDLTTMPPKREIEFRIDLAPGTAPIYKRPYRMAANELAEVKKQVDEQLQKGYIRPSTSPWGAPIIFVEKKDKTKRMCVDYRALNEVTIKNKYPLPRIDDLFEFDQLKGAKVFSKIDLRSGYHQLRIREEDIPKTAFTTRYGLYECTVMSFGLTNAPAFFMNLMNKVFMEFLDKFVVVFIDDILIYSKSEEEHEQHLRLVLKKLKEHQLTPCSATQGVVVDLSNVESVTKWTPPKTVSQIRSFLGLAGYYRRFIENFSRIARPMTQLLKKDEKFKWTAECDKSFEELKKKLVSAPVLILPDQMKDFQVYCDASRHGLGCVLMQEGRVVAYASRQLRPHEGNYPTHDLELAAVVHVLKIWRHYLIGNRCEVYTDHKSLKYIFTQPDLNLRQRRWLELIKDYDMSIHYHPGKANVVADALSRKSYCTALCIEGMCEELRQEFEHLNVGIVEHGQSRVNDSEIAELKKNMRVGKARDFHEDEHGTIWLGERLCVPDDKELKDLILTEAHQTQYSIHPGSTKMYQDLKEKFWWVSMRREIAEFVALCDVCQRVKAEHQRPAGLLQPLQIPEWKWEEIGMDFITGLPRTSSGHDSIWVVVDRLTKVAHFIPVHTTYTGKSTAYHPQTDGQTERVNQILEDMLRACALDFGGAWDKSLPYAEFSYNNSYQASLQMAPFEALYGRKCRTPLFWDQTGERQLFGTEVLAEAEEKVRIIRERLRIAQSRQKSYADNRRRELTFEAGDYVYLRVTPLRGVHRFQNKGKLAPRFVGPYKILERRGEVAYQLELPSNMIGIHDVFHVSQLKKCLRVPEEQADSEHIDIQEGPNLRGEAGSYT

SEQ ID NO: 18819 - protein, 1351 aa, Oryza sativa
  Clone ID: TF_OSC900034j.C1.p26.fg
MVYTRTGTRTTGEGSNGEERADGVHPNSDSGNGPPPLPENPTLAQVMAHQTQMMAAMMQQMQQQHQQMHQRMLQHAEQQHQQFGPPPPQSKLPEFLRVRPPTFSSITNPMEANDWLHAIEKKLNLLQCNDQEKVAFATHQLQGPASAWWDNHMATRPLGTEVTWAEFCRSFRKAQVPDGVVAQKKREFRALHQGNRTVTEYLHEFNRLARYALEDVRTDAEKQEKFMAGLDDELTNQLISGDYADFERLVDKAIRQEDQRNKMDGKRKAAQLRSNQGWTYHHDRPQHRPFNSSNFHQGASGSQHHGGQPNRGAAPRPPMAPTQSAPSAQAKKETGTKPGSCFNCGELGHFADKCPKPRHTGPRFVQARVNHASAEEAQAAPEVVLGTFPVNSIPATVLFDSGATHSFISKKFVGVHGLIREELSTPMRVHTPGNSSTSVQFSPSITIEIQKSPFLANLILLDSKDLDVILGMDWLTKFKGVIDCANRTVTLTNEKGETVVYKSLVSPKQGVSLNQIEAEIPVVTKEKSSRKLEEIPIREIEFRIDLAPGTAPIYKRPYRMAANELAKVKKQVDEQLQKGYIRPSTSPWGAPVIFVEKKDKTKRMCVDYRALNEVTIKNKYPLPRIDDLFDQLKGAKVFSKIDLRSGYHQLRIREEDIPKTAFTTRYGLYECTVMSFGLTNAPAFFMNLMNKVFMEFLDKFVVVFIDDILIYSKSEEEHEHHLRLVLEKLKEHQLYAKFSKCDFWLTEVKFLGHVITAQGVAVDPSNMESVTKWTPPKTVSQIRSFLGLAGYYRRFIENFSRIARPMTQLLKKDEKFKWTAECDKSFEELKKKLVSAPVLILPNQMKDFQVYCDTSRHGLGCVLMQEGRVVAYASRQLRPHEGNYPTHDLELAAVVHALKIWRHYLIGNRCEVYTDHKSLKYIFTQPDLNLLQRRWLELIKDYDMSIHYHPGKANVVADALSRKSYCTALCIEGMCEELRQELEHLNVGIVEHGFVAALEARPTLVDQVRATQVNDPEIAELKKNMRVGKARDFLEDEHGTIWMGERLCVPDNKELKDLVLTEAHQTQYYIHPGSTKMYQDLKEKFWWTDGQTERVNQILEDMLRACALDFGGAWDRCLPYAEFSYNNSYQASLQMAPFEALYGRKCHTPLFWDQTGERQLFGTEVLTEAEEKVRTIRERLRIAQSRQKSYADNRRRELTFEAGDYVYLWVTPLRGVHRFQTKGKLAPCFVGPYKILERRGEVAYQLELPSNMIGIHDVFHVSQLKKCLRVLEEQADSEHIDIQEDLTYVEKLIRILDTSERRTRNKVTRFCRVQWSHHSEEEATWEREDELKAAHPHLFASSSESRGRDSV

SEQ ID NO: 18820 - protein, 889 aa, Oryza sativa
  Clone ID: TF_OSC900063j.C1.p16.fg
MEANDWLHAIEKKLNLLQCNDQEKVAFATHQLQGPASPWWDNHMATRPPGTEVTWAEFCRSFRKAQVPDGVVAQKKREFRALNQGNRTVTEYLHEFNRLARYAPEDVRTDAEKQEKFLAGLDDELTNQLISGDYADFERLVDKAIRQEDQRNKMDRKRKAAQFRAHQGSHQRPRFAPGQQGGPTTMIVLQYRPFNPSNFPQGASGSQIHHGGQPNRSAAPRPPVAPAQSGPSAQAKKETGTKPGSCFNCGELGHFADKCPKPRRAGPRFVQARVNHASAEEAQAAPEVVLGTFPVNSIPTTVLFDSGATHSFISKKFVGMYGLIREELSTPMRVHTPGNSSTLVQFSPSITIEIQRSPFLANLILLEFKDLDVILGMDWLTKFKGVIDCANRTVTLTNEKGETRPYRMAANELAEVKKQVDEQLQKGYIRPSTSPWGAPVIFVEKKDKTKRMCVDYRALNEVTIKNKYPLPRIDDLFDQLKGAKVFSKIDLRSGYHQLRIREEDIPKTTFTTRYGLYECTVMSFGLTNAPAFFMNLMNKVFMEFLDNFVVVFIDDILIYSKSEEEHEQHLRLVLEKLKEHQLYAKFSKCDFWLTEVKFLGHVITAQGVAVDPSNVESVTKWTPPKTVSQIRSFLGLAGYYRRFIENFSRIARPMTQLLKKDEKFKWTAECDKSFEELKKKLVSAPVLILPDQMKDFQVYCDASRHGLGCVLMQEGRVVAYASRQLRPHEGNYPTHDLELAAVVHALKIWRHYLIGNRCEVYTDHKSLKYIFTQPDLNLRQRRWLELIKDYDMSVHYHPGKANVVADALSRKSYCTALCIEGMCEKLQQEFKRLNVGIVEHGFVAALEARPTLVDQVRAAQVNDPEIAELKKNMRVGKARDFLEDEYGTI

SEQ ID NO: 18821 - protein, 1783 aa, Oryza sativa
  unsure (1)..(1783): unsure at all Xaa locations
  Clone ID: TF_OSC900133j.C1.p2.np
MAGHPPNHRGEGMIDFVAELARMTLVVGYPNAPEYTTIPPLSGELPHRVRLEVHGYVGTCLANMAVEACGGTADHACQEAAYLMMARLRERHNYIFHDTAYRYHPRRANGDGVSSFRPTAGENDTTFGHMCAVMRGLDRMHSDLHKATKALNDGKLMRIVALKDEIARLKKENAQLKGLPAPGGVRIRTTPRKTTTAPVRIQLAPRNPPPPAAPAAPPVPPAAPAVPAPAPAPAPAPAFALSFAPASAARGPASGTGGCSLQMVYTRTGSRATGEDSNGEERADGVHPSSDSGNGPPPLPENPTLAQVMAHQTQMMAAMMQQMQQQHQQMHQRMLQHAEQQHQQLGPPPPQSKLPEFLRVRPPTFSSTTNPMEANDWLHAIEKKLNLLQCNDQEKVAFATHQLQGPASAWWDNHMATRPPGTEVTWAEFCRSFRKAQVPDGVVAQKKREFRALHQGNRTVTEYLHEFNRLARYAPEDVRTDAEKQEKFMAGLDDELTNQLISGDYADFERLVDKAIRQEDQRNKMDRKRKAAQFRAHQGSHQRPRFTSGQQGGPTTMIVRQHRPFNPSNFPQGASGSQNHHGGQPNRGAAPRPPMAPAQSGQPAQAKKETGAKPGSCFNCGELGHFADKCPKPRRAGPRFIQARVNHASAEEAQAAPEVVLGTFPVNSIPATVLFDSGATHSFISKKFVGMHGLIREELSTPMRVHTPGNSSTSVQFSPSITIEIQRSLFLANLILLESKDLDVILGMDWLTKFKGVIDCANRTVTLTNEKRETVVYKSLVSPKKGVSLNQIETEIPVDTVEKNLRKLEDIPIICEYPEVFPEDLTTMPPKREIEFRIDLAPGTAPIYKRPYRMAANELAEVKKQVDEQLQKGYIRPSTSPWGAPVIFVEKKDKTKRMCVDYCALNEVTIKNKYPLPRIDDLFDQLKGARVFSKIDLRSGYHQLRIREEDIPKTAFTTRYGLYECTVMSFGLTNAPAFFMNLMNKVFMEFLDKFVVVFIDDILIYSKSEEEHEQHLRLVLEKLKEHQLYAKFSKCDFWLTEVKFLGHVITAQGVAVDPSNVESVTKWTPPKTVSQIRSFLGLAGYYRRFIENFSRIARPMTQLLKKDEKFKWTAECDKSFEELKQKLVSAPVLILPDPMKDFQVYCDASHHGLGCVLMQEGRVVAYASRQLRPHEGNYPTHDLELAAVVHALKIWRHYLIGNRCEVYTDHKSLKYIFTQPDLNLRQRRWLELIKDYDMSIHYHPGKANVVADALSRKSYCTALCVEGMCEELRQEFEHLNVGIVEHGFVAALEARPTLVDQVRAAQVNDPEIAELKKNMRVGKARDFLEDEHGTIWIGERLCVPDDKELKDLILTEAHXTQYSIHPGSTKMYQDLKEKFWWVSMRREIAEFVALCDVCQRVKAEHQRPAGLLQPLQIPEWKWEEIGMDFITGLPRTSSGHDSIWVVVDRLTKVAHFIPVHTTYTGKRLAELYLARIMCLHGVPKKIVSDRGSQFTSKFWQKLQEEMGTRLNFSTAYHPQTDGQTERVNQILEDMLRACALDFVGAWDKSLPYAEFSYNNSYQASLQMAPFEALYGRKCRTPLFWDQTGERQLFGTEVLAEAEEKVRIIRERLRIAQSRQKSYADNRRRELTFEAGDYVYLRVTPLRGVHHFQTKGKLAPRFVGPYKILERRGEVAYQLELPSNMIGIHDVFHVSQLKKCLRVPEEQADSEHIDIQEDLTYVEKPVRILDTSERRTRNKVTRFCRVQWSHHSEEEATWEREDELKAAHPHLFTSSSESRGRDSV

SEQ ID NO: 18822 - protein, 1570 aa, Oryza sativa
  Clone ID: TF_OSC900157j.C1.p2.fg
MAGHPPNHRGEGMIDFVAELACMTLVVGYPNAPEYTTIPPLSGELPHRVRLEVHGYVGTCLANMVVEASGGTADHACQEAAYLMMARLRERHNYIFHDTAYWFHPRRASSDDVSTFRPTAGENDTTFGHMCAVMRGLDRMHSDLHKATKALNDGKLMRIVALKRENAQLKGLPAPGGVRIRTTPRKTTTAPVRIQLAPRNPPPSAAPAAPPVPPAVPATPAPAPASALSFAPASAARGPARGNGGCLFGMVYTRNGSRATGEGSNSEERTEGVHPNSNSGNGPPPLPENPTLAQVMAHQTQMMAAMMQQMQQQHQQMHQRMLQHAEQQHQQFGPPPPQSKLPEFLRVRPPTFSSTTNPMEANDWLHAIEKKLNLLQCNDQEKVAFATHQLQGPASAWWDNHMATRPPGTEVTWAEFCRSFRKAQVLDGVVAQKKREFRALHQGNRTVTEYLHEFNRLARYAPEDVRTDAEKQEKFMAGLDDELTNQLISGDYADFERLVDKAIRQEDQRNKMDRKRKAAQFRVPQGSHQRPRFAPGQQGGPTTMIVRQYRPFNPSNFPQGAGGSQTHHRGQSNRGAAPRPPMAPAQSGPPAQAKKETGAKPGSCFNCGELGHFADKCPKPRRAEPRFIQARVNHASAEEAQAAPEVVLGMFPVNSIPATVLFDSGATHSFISKKFVGMHGLIREELSTPMRVHTPGNSSTSVQFSPSITIEIQRSPFLANLILLESKDLDVILGMDWLTKFKGVIDCANRTVTLTNEKGETVVYKSLVSPKQEVSLNQIEAEIPVDTVEKSLRKLEDIPIVCEYPEVFPEDLTTMPPKREIEFRIDLAPGTAPIYKRPYRMAANELAEVKKQVDEQLQKGYIRPSTSPWGAPVIFVEKKDKTKRMCVDYRALNEVTTKNKYPLPRIDDLFDQLKGAKVFSKIDLRSGYHQLRIREEDIPKTAFTTRYGLYECTVMSFGLTNAPAFFMNLMNKVFMEFLDKFVVVFIDDILIYSKSEEEHEQHLRLVLEKLKEHQLYAKFSKCDFWSTEVKFLGHVITAQGVAVDPSNVESVTKWTPPKTVSQIRSFLGLAGYYRRFIENFSRIARPMTQLLKKDEKFKWTAECDKSFEELKKKLVSAPVLILPDQMKDFQVYCDASRHGLGCVLMQEGRVVAYASRQLRPHEGNYPTHDLELAAVVHALKIWRHYLIGNRCEVYTDHKSLKYIFTQPDLNLRQRRWLELIKDYDMGIHYHPGKANVVADALSRKSYCTALCIEGMCEELRQEFEHLNVGIVEHGFVAALKAWPTLVDQVKAAQVNDSEIAELKKNMRVGKARDFHEDEHGTIWLGERLCVPDDKELKDLILTEAHQTQYSIHPGSTKMYQDLKEKFWWVSMRREIAEFVALCDVCQRVKAEHQRPAGLLQPLQIPEWKWEEIGMDFITGLPRTSSGHDSIWVVVDRLTKVAHFIPVHTTYTGKRLAELYLSRIMCLHGVPKKIVSDRGSQFTSKFWQKLQEELGTRLNFSTAYHPQTDGQTERVNQILEDMLRACALDFGGAWDKSLPYAEFSYNNSYQASLQMAPFEALYGRKCRTPLF

SEQ ID NO: 18823 - protein, 2526 aa, Oryza sativa
  Clone ID: TF_OSC900164j.C1.p3.fg
MADTRSSAEDETKRPTEEETGRDGEMGSEPNLEERLKRLNMHGEEETDLDFSEELEGLIKDVRWLALFRVYTTKPFSHSALLNAMRNAWSSAQDISFKVMDSNLFMVQFQCLGDWNRVMEGGPWIFRGAPVVLKEYDGFTNVFDYKLDKIPVWTRIHGVPDGLMKKRELAERVAKKVGEQPFTVIVDEGRINPVKYLRARVFLDLSEPLVRFVPITIKERILYPRARANWLEHGDRNTSFFQQFAARRRRRKKIKGLIDENGCFQTDEDRMSSIVYGYFQSLFSAEVTQIDGSSLLDVQRKVTGDMNFGLLAPYTAEEVKNALFSIGDLKAPGPDGLHAVFYKRFWDMLESDLVKEVLDAINTMKIPDGWNDTTVVMIPKVDKPDRVTQFRPISLCNVVYKIISKMLANRLKCLLPEIISDQQSAFVPGRLITDNVLVAYECLHTMKKKKGRKVQYRVNFNGVLTEVIKPSRGLRQGDPLSPYLFLLVAEGLSSMLQGAENRGDLVGIRMVYTRNGSRATGEGSNGEERADGVHPSSDSGNGPPPLPENPTLAQVMAHQTQMMAAMMQQMQQQHQQMHQRMMQHVEQQHQQFGPPPPQSKLPEFLRVRPPTFSSTTNPMEANDWLHAIEKKLNRLQCNDQEKVAFATHQLQGPASAWWDNHMATRPPGTEVTWAEFCRSFWKAQVPDGVVAQKKREFRALHQGNRTVTEYLHEFNRLARYAPEDVRTDAEKQEKFMAGLDDELTNQLISGDYADFERLVDKAIRQEDQRNKMDRKRKAAQFRAPQGSHQRPRFAPGQQGGPTTMIVRQHRPFNPSNFPQGASGSQNHHGGQSNRGAASRPPMAPAQSGPPAQAKKETGAKPGSCFNCGELGHFADKCPKPRRAGPRFIQARVNHASAEEAQAAPEVVLGTFPVNSIPATVLFDSDLDVILGMDWLTKFKGVIDCANRTVTLINEKGESVVYKSLVSPKKGVSLNQIEAEIPVDTVEKNSRKLEDIPIVCEYPEVFPEDLTTMPPKREIEFRIDLAPGTAPIYKRPYRMAANELAEVKKQVDEQLQKGYIRPSTSPLGAPVIFVEKKDKTKRMCVDYHALNEVTIKNKYPLPRIDDLFDQLKGAKVFSKIDLRSGYHQLRIREEDIPKTAFTTRYGLYECTVMSFGLTNAPAFFMNLMNKVFMEFLDKFVVVFIDDILIYSKSEEKHEQHFRLVLEKLREHQLYAKFSKCDFWLTEVKFLGHVITAQGYYRRFIENFSRIARPMTQLLKKDEKFKWTAECDKSFEELKKKLVSAPVLILPDPMKDFQVYCDASRHGLGCVLMQEGRVVAYASRQLRPHEGNYPTHDLELAAVVHALKIWRHYLIGNRCEVYTDHKSLKYIFTQPDLNLRQRRWLELIKDYDMSIHYHPGKANVVADALSRKSYCTALCIEGIRSGGTAYAQANDSEIAELKKNMSVGKARDFHEDEHGTIWLGERLCVPDDKELKDLILTEAHQTQYSIHPGSTKMYQDLKEKFWWVSMRREIAEFVALCDVCQRVKAEHQRPAGLLQPLQIPEWKWEEIGMDFITGLPRTSSGHESIWVVVDRLTKVNLERHGLVPVGTSSGRDSRPRIHKYRVVPSTLHQCLKFLDGSGTQQRIVGNLSPYTTQESHHADAKYYFPVDDSDQTLGRTTPAADLLIAPGRTPTPEIRRLITAGPLAGATGSSTRNRRNNARHHSFMSAQYENKPYTGAGMSGVVVPVEKDTALTSPTFTPLLLKAGTSSRTPTTQTSVARVPVDLQAPSSKEILLTRNVAMVQGRKLLDISNDAPTVITIRARNNSRRSGYHYEGRCQINSFIGKGWDQRSTKQANAAATGYIYASMITEQEGELEDPFMLDELKEEKQPTIDDLVEINLGTMDDPRPTFVSAALSAEEQESYRSFLMEYRDCFAWTYKEMPGLDPRVATHKLAIDPQFRPVKQPPRRLRPEFQDQVIAEVDRLITAGFIKESIVAELFKKFAKRAQNEFSCTLVKIRSDNGSEYKNTNIKDYCDDLGIKHELSATYSPQQNGVVERKNHTLVEMASYASNSKAYRVYNKNKGIVEETVDVQFDETNGSQEGHENLDDVGDEGLMRAMKNMSIGDVKPIEVEDKPSTSTQGEPSTSAAPSQAQVEVEEEKAQDPPMPPRIHTALSKNHPIDQVLGDISKGVQTRSHVVSICEHYSFVFCFEPKHIDEALYDPDWINAMHEELSNFVRNKVWTLVERPRDHNAIGTKWVFRSKQDENGLVVRNKISLVAQGFTQVEAIRIILAFASCFDIELFQIDVKSAFLNGEIAELVFVEQPPGFEDPKNPNHDFKTGKVDTTLFTNIIGDDFFVCQIYVDDIIFGSTNEVFCKEFGGDMMSREFEMSMIGKLSFFLELHIKQLKDGTFMSQTKYIKNQLKRFGLEDAKPIKTPMATNEHRDLDEGGKPIDLKLYRSMIGSLLYLTASRSDIMFNVCKCARFQAAPKECHLVAVKRILRYLKYSSIIGLRYPKELLAWAKEKRPSIRNAWMIEEVDWGPNKDIL

SEQ ID NO: 18824 - protein, 1814 aa, Oryza sativa
  unsure (1)..(1814): unsure at all Xaa locations
  Clone ID: TF_OSC900176j.C1.p9.np
MAGHPPNHRGEGMIDFVAELARMTLVVGYPDAPEYTTIPPLSGELPHRVRLEVHGYVGTCLANMAVEASGGTADHACQEAAYLMMARLRERHNYIFHDTAYRYHPSRANGDGVSSFRPTAGENDTTFGHMCAVMRGLDRMHSDLHKATKALNDGKLMRIVALKDEIARLKKENAQLKGLPAPGGVRIRTTPRKTTTAPVRIQLAPRNPPPAAAPAAPPVLPAVPAAPAPAPAPAPASALSFAPASAARGPASGTGGWLSATPSGSSDRSSSGSQSGSGETYLPGSRSRSEGPGMVYTRTGNRTTGEGSNGEERVDGVHPNSDSGNGPPPLPENPTLAQVMAHQTQMMAAMMQQMQQQHQQMHQRMMQHVEQQHQHFGPPPPQSKLPEFLGVRPPTFSSTTNPMEANDWLHAIEKKLNLLQCNDQEKVAFATHQLQGPASAWWDNHMATRPPGTEVTWAEFCRSFRKAQVPDGVVAQKKREFRALHQGNRTVTEYLHEFNRLTRYAPEDVRTDAEKQEKFMAGLDDELTNQLISGYYADFERLVDKAIRQEDQRNKMDRKRKAAQFRAHQGSHQRPRFTPGQQGGPTTMIVRQHRPFNPSNFYQGTSDSQNHHGGQPNRGAAPRPPVASAQSGQPAQAKKETEAKPGSCFNCGELGHFADKCPKPRRAGPRFIQARVNHASAEEAQAAPEVVLGTFPVNSIPATVLFDSGATHSFISKKFVGMHGLIREELSTPMRVHTPGNSSTSVQFSPSITIEIQRSPVLANLILLESKDLDVILGMDWLTKFKGVIDCANRTVTLTNEKGETVVYKSLVSPKKGVSLNQIETEIPVDTVEKNLRKLDDIPIVCEYPEVFPEDLTTMPPKREIEFRIDLAPGTAPIYKRPYRMAANELTEVKKQVDEQLQKGYIRPSTSPWGAPVIFVEKKDKTKRMCVDYRALNEVTIKNKYPLPRIDDLFDQLKGAKVFSKIDLRSGYHQLRIREEDIPKTAFTTRYGLYECTVMSFGLTNAPAFFMNLMNKVFIEFLDKFVVVFIDDILIYSKSEEEHEQHLRLVLEKLKEHQLYAKFSKCDFWLTEVKFLGHVITAQGVAVDPSNVESVTKWTPPKTVSQIRSFLGLAGYYRRFIGNFSRIARPMTQLLKKDEKFKWTAECDKSFEELKKKLVSAPVLILPDQMKDFQVYCDASRHGLGCVLMQEGRVVAYASRQLRPHEGNYPTHDLELAAVVHALKIWRHYLIGNRCEVYTDHKSLKYIFTQPDLNFRQRRWLELIKDYDMSIHYHPGKANVVADALSRKSYCTALCIESMCEELRQEFEHLNIGIVEHGFVAALEARPTLVDQVRAAQVNDPEIAELKKNMRVGKARDFLKDEHGTIWMGERLCVPDDKELKDLILTEAHQTQYSIHPGSTKMYQDLKEKFWWVSMRREIAEFVALCDVCQRVKAEHQRPTGLLQPLQIPEWKWEEIGMDFITGLPRTSSGHDSIXVVVDRLTKVAHFIPVHTTYTGKRLAELYLSRIMCLHGVLKKIVSDRGSQFTSKFWQKLQEELGTRLNFSTAYHPQTDGQTERVNQILEDMLRACALDFGGAWDKSLPYAEFSYNNSYQASLQMAPFEALYGRKCRTPLFWDQTGERQLFGTEVLAEAEEKVRIIRERLRIAQSRQKSYADNRRRELTFEAGDHVYLRVTPLRGVHRFQTKGKLAPRFVGPYKILERRGEVAYQLELPSNMIGIHDVFHVSQLKKCLRVPEEQADSEHIDIQEDLTYVEKPVRILDTSERRTRNKVTRFCRVQWSHHSEEEATWEREDELKAAHPHLFTSSSESRGRDSV

SEQ ID NO: 18825 - protein, 1779 aa, Oryza sativa
  Clone ID: TF_OSC900200j.C1.p17.fg
MAGHPPNHRGEGMIDFVAELARMTLVVGYPNAPEYTTIPPLSGELPHRVRLEVHGYVGTCLANMAVEASGGTADHACQEAAYLMMARLRERHDYIFHDTAYRYHPRRAHGDGVSSFRPTAGENDTTFGHMCAVMRGLDRMHSDLHKATKALNDGKLMRIVALKDEIARLKKENAQLKGLPAPGGVRIRTTPRKRTTAPVRIQLAPRNPPPAAAAPAVPPAPAPAPAPAPAPAPAFTLSFAPASAARGPASGTGGCLFGMVYTRTGSRATGEGSNGEERADGVHPNSESGNGPPPLPENPTLAQVMAHQTQMMAAMMQQMQQQHQQMHQRMMQHAEQQHQQFGPPPPQSKLPEFLRVRLPTFSSTTNPMEANDWLHAIEKKLNLLQCNDQEKVAFATHQLQGPASAWWDNHMATRPPGTEVTWAEFCRSFRKAQVPDGVVAQKKREFRALHQGNRTVTEYLHEFNRLARYAPEDVRTDAEKQEKFMAGLDDELTNQLISGDYVDFERLVDKAIRQEDQRNKMDRKRKAAQFRAPQGSHQRPRFTPGQQGGPTTMIVRQHRPFNPSNFHQGTSGSQNHHGSQPNRGTAPRPPMAPAQSGQPAQAKKETGAKPGSCFNCGELGHFADKCPKPRRAGPRFIQARVNHASAEEAQAAPEVVLGTFPVNSIPATVLFDSGATHSFISKKFVGMHGLIREELSTPMRVHTPGNSSTSVQFSPSITIEIQRSPFLANLILLESKDLDVILGMDWLTKFKGVIDCASRTVTLTNEKGETVVYKSLVSPKKGVSLNQIETEIPVDTVEKNLRKLEDIPIVCEYPEVFPEDLTTMPPKREIEFRIDLAPGTAPIYKRPYRMAANELAEVKKQVDEQLQKGYIRPSTSPWGAPVIFVEKKDKTKRMCVDYRALNEVTIKNKYPLPRIDDLFDQLKGAKVFSKIDLRSGYHQLRIREEDIPKTAFTTRYGLYECTVMSFGLTNAPAFFMNLMNKVFMEFLDKFVVVFIDDILIYSKSGEEHEQHLRLVLEKLKEHQLYAKFSKCDFWLTEVKFLGHVITTQGVAVDPSNVESVTKWTPPKTVSQIRSFLGLAGYYRRFIENFSRIARPMTQLLKKDEKFKWTAECDKSFEELKKKLVSAPVLILPDPTKDFQVYCDASRHGLGCVLMQEGRVVAYASRQLRPHEGNYPTHDLELAAVVHALKIWRHYLIGNRCEVYTDHKSLKYIFTQPDLNLRQRRWLELIKDYDMSIHYHPGKANVVADALSRKSYCTALCIEGMCEELRQEFEHLNVGIVEHGFVAALEARPTLVDQVRAAQVNDPEIAELKKNMRVGKARDFHEDEHGTIWMGERLCVPDDKELKDLILTEAHHTQYSIHPGSTKMYQDLKEKFWWVSMRREIAEFVALCDVCQRVKAEHQRPAGLLQPLQIPEWKWEEIGMDFITGLPRTSSGHDSIWVVVDRLTKVAHFIPVHTTYTGKRLAELYLARIMCLHGVPRKIVSDRGSQFTSKFWQKLQEELGTRLNFSTAYHPQTDGQTERVNQILEDMLRACALDFGGAWDKSLPYAEFSYNNSYQASLQMAPFEALYGRKCRTPLFWDQTGERQLFGTEVLAEAEEKVRIIRERLRIAQSRQKSYADNRRRELIFEAGDYVYLRVTPLRGVHRFQTKGKLAPRFVGPYKILERRGEVAYQLELPSNMIGIHDVFHVSQLKKCLRVPEEQADSEHIDIQEDLTYVEKPVRILDTSERRTRNKVTRFCRVQWSHHSEEEATWEREDELKAAHPHLFTSSSESRGRDSV

SEQ ID NO: 18826 - protein, 1704 aa, Oryza sativa
  Clone ID: TF_OSC900232j.C1.p8.fg
MTLVVGYPNAPEYTTVPPLSGELPHRVRLEVHGYVGTCLANMVVEASGGTVDHACQEAAYLMMARLRERHNYIFHDTAYRFHPCRASGDDVSTFRPTADENYTTFGHMCTVMRGLDRMHSDLHKASKALNDGKLMRIVALKDEIARLKRENAQLKGLPAPGGVRIRTTPRKTTTAPVRIQLAPRNPPPPAAPAAPPVPPAVPAAPAPAPAPVHMSAPASALSFAPASAARGPASGNGGCLFGMVYTRNGSRATGEGSNGEERTEGVHPNSNSGNVPPPLPENPTLAQVMAHQTQMMAAMMQQMQQQHQQMYQRMLQHAEQQHQQFGPPPPQSKLPEFLRVRPPTFSSTTNPMEANDWLHAIEKKLNLLQCNDQEKVAFTTHQLQGPASAWWDNHMATRPPGTEVTWAEFCRSFRKAQVPDGVVAQKKREFRALHQGNRTVTEYLHEFNRLARYAPEDVRTDAEKQERFMAGLDDELTNQLISGDYADFERLVDKAIRQEDQRNKMDRKRKAAQFRAPQGSHQRPRFAPGQQGGPTTMIVRQYRPFHPSNFPQGASGSQNHHGGQPNRGAAPRPPMAPAQSGPSAQARKETGAKPGSCFNCGELGHFADKCPKPRRAGPRFIQARVNHASAEEAQAAPEVVLGTFPVNSIPTTVLFDSGATHSFISKKFVGMHGLIREELSTPMRLTKFKGVIDCVNRTVTLTNEKGETVVYKSPNSPKQGVSLNQIEAEIPVVTMEKNLRKLEDIPIVYEYPEVFPEDLTTMPPKREIEFRINLAPGTAPIYKRPYRMAANELAEVKKQVDEQLQKGYIRPSTSPWGAPVIFVEKKDKTKRMCVDYRALNEVTIKNKYPLPRIDDLFDQLKGAKVFSKIDLRSAYHQLIIREEDIPKTAFTTRYGLYECTVMSFGLTNAPAFFMNLMNKVFMEFLDKLVVVFIDDILIYSKSEEEHEQHLRLFSKCDFWLTEVKFLGHVITAQGVAVDPSNVESVTKWTPPKTVSQIQSFLGLAGYYRRFIENFSRIARPMTQLLKKDEKFKWTAECDKSFEELKKKLVSAPVLILPDQMKDFQVYCDASRHGLGCVLMQEGRVVAYASRQLRPHEGNYPTHDLELAAVVHALKIWRHYLIGNRCEVYTDHKNLKYIFTQPDLNLRQRRWLELIKDYNMSIHYHPGKANVVADALSRKSHCTALCIEGMCEELRQDFEHLNMGIVEYGFVAALEARPTLVDKVRVAQVNDSEIAELKKNMRVGKARDFHEDEHGTIWLGERLCVPDDKELKDLILTEAHQTQYSIHPGSTKMYQDLKEKFWWVSMRREIAEFVALCDVCQRVKAEHQRPAGLLQPLQIPEWKWEEIGMDFIIGLPWTSSGHDSIWIVMDRLTKVAHFIPVHTTYTGKRLAELYLSRIMCLHRVPKKIVSNRGSQFTSKFWQKLQEELGTRLNFSTAYHPQTDGQTERVNQILEDILRACALDFGGAWDKSLPYAEFSYNNSYQASLQMAPFEALYGRKCRTPLFWDQTGERQLFGTEVLAEAEEKVRIIKERLRIAQSRQKSYADNRRRELTFEAGDYVYLRVTPLRGVHRFQTKGKLVPRFVGPYKILERRGEVAYQLELPSNMIGIHDVFHVSQLKKCLRVPEEQADSEHIDFQEDLTYVEKPVHILDTSERRTRNKVTRFCRVQWSHHSEEEATWEREDELKAAHPHLFASSSESRGQDSV

SEQ ID NO: 18827 - protein, 947 aa, Oryza sativa
  Clone ID: TF_OSC900293j.C1.p13.gm
MVYTRTGTRTIGEGSNGEERTDGVHPSSDSGNGPPPLPENPTLAQVMAHQTQMMAAMMQQMQQQHQQMHQRMMQHAEQQHQQFGPPPPQSKLPEFLRVRPPTFSSTTNPMEANDWLHAIEKKLNLLQCNDQEKVAFATHQLQGPASAWWDNHMATRPPGTEVTWAEFCRSFRKAQVPDGVVAQKKREFRALHQGNRTVTEYLHEFNRLARYAPEDVRTDAEKQEKFMAGLDDELTNQLISGDYADFERLVDKAIHQEDQRNKMDRKRKAAQFRAPQGSHQRPRFTPGQQGGPTTMIVRQYRPFNPSNFPQGASGSQNHHGGQPNRGAAPRPPMAPAQSGPSAQARKETGAKPGSCFNCGELGHFADKCPKPRRAGPRFIQARVNHASAEEAQAAPEVVLVTLTNEKGETVAYKSLVSPKQGVSLNQIEAEIPVDTVEKNLGKMEDIPIVCEYPEVFPEDLTTMPPKREIEFRIDLAPGTAPIYKRPYRMAANELAEVKKQVDEQLQKGYIRPSTSPWGAPVIFVEKKDKTKRMCVDYRALNEVTIKNKYPLPRIDDLFDQLKGAKVFSKIDLRSGYHQLRIREEDIPKTAFTTRYGLYECTVMSFGLTNAPAFFMNLMNKVFMEFLDKFVVVFIDDILIYSKSEEEHEQHLRLVLEKLKEHQLYAKFSKCDFWLTEVKFLGHVITAQGVAVDPSNVESVTKWTPPKTVSQIRSFLGLAVGQPDTPADPTPSRPPSPPAGPTRQRVKGIGPPWTGTTGWSTAGPREPTAQISPKPIGRLRRAVAGHGHSRGWPDRPQRAAARRRPDNRRRRRRNAALAREAAGKEEKEEGGGSPRGAATEGTAAEGGGGAPWVDDAEGRTAVDGEGEEADEVQHTTTKPTKVTASGDRGYGGDDCRPETVNGCGGSAVDDVRRGVGMPTAWVARRGGGASSDEVRLEATNGSAASGAR

SEQ ID NO: 18828 - protein, 2225 aa, Oryza sativa
  Clone ID: TF_OSC900327j.C1.p24.fg
MVEVLEEEEAVAFTPTPSGSGDSSESRGPRHHRRDSPTPPRHEPSRREDPTRSGGSALSPPLGEERPRRVGARRRLTYGDGGSPRGTLQAAGALLRHPPVNSEPETPVQRWLDDVANLVTTAQRQLAAGGRPAATGMSRTPVTLSSSARRRARQSAMASRRSTAPTSSGASGSRRRHDGLYGEQDAQINIERRRDERRAARMGEGSSSSRVPGSSSRGGPPPTLTPGGTGCRAFVASLQNVRWPLKFRPNLTEKEARLQGAQDHRRALQVGGQGGSEGGGVGNSPDTGAAAAATPESAPRSKRRDRRGKRKPGRSDDEGHVLAADGPARAPRKGKATSDKPSSTAPSGEGRSADKWCSVHNTYRHSLADCRSVKNLAERFRKADQEKRQGRREGKAPATSAGDQREEAKNKAPADDGGDSEDLDFQVPQGTVATLDGGAYAHTSRRGFKAMRRELLAAVPTHEVARKARWSEKMDRKRKVAQFRSNQGSHQRPRFTPGQQGGPTTLIVRQQRPFNANNFHQGASGSQNHHGGQPNRSAAPRPPMAPAQTAPSAQAKKETGTKPGSCFNCGELGHFADKCPKPRRAGPRFVQARVNHASAEEAQAAPEVVLGTFLVNSIPATVLFDSGATHSFISKKFVGMHGLIRGELSTPMRVHTPGNSSTSVQFSPSITIEIQRSPFLANLILLESKDLDVILGMDWLTKFKGVIDCANRTVTLTNEKGETVVYKSPISPKQGVSLNQIEVEIPVVTEEKNSRKLEEIPIVCEYPEVFPEDLTTMPPKREIEFRIDLALGTAPIYKRPYRMAANELAEVKKQGAPVIFVEKKDKTKRMCIDYRALNEVTIKNKYPLPRIDDLFDQLKGAKVFSKIDLLSGYHQLRIREEDIPKTAFTTRYGLYECTVMSFGLTNAPAFFMNLMNNVFMEFLDKFVVVFIDDILIYSKFEEEHELHLRLLLEKLKEHQLYAKFSKCDFWLSEVKFLGHVIAAQGVAVDPSNVESVTKWTPPKTVSQIRSFLGLVGYYRRFIENFSRIARPMTQLLKKDEKIKWTAECDKSFEELKKKLVSTPVLILPDQMKDFQVYCDASHHGLRCVLMQEGRVVAYASWQLRPHEGNYPTHDLELAVVARPTLVDQVRAAQANDPEIAKLKKNMRVGKARDFHEDEHGTIWLGERLCVPDDKELKDLILIEAHQTQYSIHPGSTKMYQDLKEKFWWVSMRREIAEFVALCDVCQRVKAEHQRPASLLQPLQIPEWKWEEIGMDFITGLPRTSSGHDSIWVVVDRLTKVAHFIPVHTTYTGKRLAELYFSRIMCLHGVPKKIVSDRGSQFTSKFWQKLQEELGTRLNFSTAYHPQTDGQTERVNQILEDMLRACALDFGGAWDKSLPRLRCAQGPGDEAPVVAADHWRDSETHVELPVTFGDSTNFRTERIDFDVADLNLPYNAVLGRPTLVKFMATNHYAYLQMKMPGPAVPITVFGDVKVALACAEQRADNLAVATEPQAPEATASRASKKRLTSANEESALVSFLRANSNVFTWKPSDMPGVPREVIEHCLAVRPDARPIRQKVRHQAPERQAFIREEVVRLLEADFICEVIHPEWLANPVVVPKANGKLRMCIDYTDLNKACPKDPFPLPCIDQIVDSTVGCDLLCFLDAYSGYHQIRMAREDEEKPTFITPVGTFCYTTMPFGLKNAGPTFQRMTRITLSNQIGRNVEAYVDDLVVQRPVYFVSEALRDAKTRYPQAQKMLYAVLMASRKLRHYFQAHRVSVVTSYPLGQILHNQEGTGRVVKWAIELAEFDLHFKPRHAIKSQVLANFIAEWTPVDEPVPPNVSFLPRDVKDPNADIHGGHWVMHFDGSLNLQGAGARVTLTSPSGDVLKYVIWLDFRATNNMAEYEGLLAGLRAVARMGIHRLLVLGDSQLVVNQVSKEYQCTDPQMDAYVREVRRMEHHIDRLELRHVPRRDNTVADELSRVASARAPLPPGTFEERLAQPSARPNPSRDPDDTPSAPTLGDSRPSGPEGVDPDPPHQVVWMTDIRAYLDGNTLPEDRAEAEKLARISKRYVLIEGTLYRRAANGILLKCVSREQGIELIADTHQDILGPFKTARGGYQHLYVAIDKFTKWPEAYPVVKIDKHSALKFIRGITSRFGVPNRIITDNGTQFTSELFDNYCDDMGIKLCFASPAHPRSNGQVERANAEILKGLKTKTYNVLKKHGDSWLEELPAVLWANRTTPSRATG

SEQ ID NO: 18829 - protein, 999 aa, Oryza sativa
  Clone ID: TF_OSC900370j.C1.p19.fg
MVYTRNGTRTTSEGSNGEERADGVHPNSDSGNGPPPFPENLTLAQVMAHQTQMMAAMMQQMQQQHQQMHQRMLQHAEQQHQQFGPPPPQSKLPEFLRVRPPTFSSTTNPMEANDWLHAIEKKLNLLQCNDQEKVAFATHQLQGPASAWWDNHVATRPPGTEVTWAEFCRSFRKAQVPDGVVAQKKRGFRALHQGNRTVTEYLHEFNRLARYAPEDVCTDAEKQEKFLAGLDDELTNQLISGDYADFERLVDKAIRQEDQRNKMDRKRKAAQFRSNQGNHQRPRFTLGQQGGPTTMIVRQHRTFKSSNFHQGASGSQNHHGGQPNHGAAPHPPVAPAQSGPSAQAKETGAKPGSCFNCGELGHFADKCPKPRRAGSKFVQARVNHASAKEAQAAPEVVLGTFPVNSIPATVLFDSGATHSFISKKFVRMHGLIREELSTPMRVHTPGNSSTSVQFSPSITIEIQRSPFLANIILLDSKDLDVILGMDWLTKFKGVIDCANRTVTLTNEKGETIVYKSLVSPKQGVSLNQIEAETPVVTEGMNSRKLEEIPIVCEYPEVFPKDLTTMPPKREIEFRIDLAPGTAPIYKRPYRMAANELAEVKKQVDEQLQKGYIRPSTSPWGAPVIFVEKKDKTKRMCVDYRALNEVTIKNKYPLPRIDDLFDQLKGAKVFSKIDLRSGYHQLRIREEDIPKTAFTTRYGLHECTVMSFGLTNAPAFFMNLMNKVFMEFLDKFVVVFIDDILIYSKSEEEHEQHLRLVLEKLKEHQLYAKFSKCDFWLTEVKFLGHVRLLGMAVDPSNVESVTKWTPPKTVSQIRSFLRLAGYYRQFIENFSRIARPMTQLLKKDEKFKWTAECDKSFEELKKKLVSAPVLILPDQMKDFQIWRHYLIGNRCEVYTDHKSLKYIFTQPDLNLRQRRWLELIKDYDMSIHYHPGKANVVADALSRKSYCTALCIEGMCEELQQEFKRLNVGIVEHGFIAVGGWHESLRPNLPKPMAKTTSQG

SEQ ID NO: 18830 - protein, 1605 aa, Oryza sativa
  Clone ID: TF_OSC900376j.C1.p14.fg
MAGHPPNHRGEGMIDFVAELARMTLVVGYPNAPEYTTIPPLSGELPHRVRLEVHGYVGTCLANMAVEASGGTADHACQEAAYLMMARLRERHDYIFHDTAYRYHPRRAHGDGVSSFRPTAGENDTTFGHMCAVMRGLDRMHSDLHKATKALNDGKLMRIVALKDEIARLKKENAQLKGLPAPGGVRIRTTPRKTTTAPVRIQLAPRNPPPPAAPAAPSVPPAVPAAPVPAPAFTLSFAPASAARGSASGTGGCLFGMVYTRTGNRTTGEGSNGEERVDGVHPNSDSGNGPPPLPENPTLAQVMAHQTQMMAAMMQQMQQQHQQMHQRMMQHAEQQHQQFGPPPPQSKLPEFLRVRPPTFSSTTNPMEANDWLHAIEKKLNLLQCNDQEKVAFATHQLQGPASAWWDNHMATRPPGTEVTWAEFCRSFRKAQVPDGVVAQKKREFRALHQGNRTVTEYLHEFNRLARYAPEDVRTDAEKQEKFMAGLDDELTNQLISGDYADFERLVDKAIRQEDQRNKMDRKRKAAQFRAPQGSHQRPRFTPGQQGGPTTMIVRQHRPFNPSNFHQGTSGSQNHHGSQPNRGTAPRPPMAPAQSGQPAQAKKETGAKPGSCFNCGELGHFADKCPKPRRAGPRFIQARVNHASAEEAQTAPEVVLGTFPVNLIPATVLFDSGATHSFISKKFVGRYGLRKEELSTPMRVHTPGNSSTSVSFSPSVLIEIQRSPFLANLILLESKDLDVILGMDWLTKFKGVIDCANRTVTLTNEKGETVVYKSLVSPKQGVSLNQVEMEVPVDTVEKNLRKLEDIPIVCEYPEVFPEDLTTMPPKREIEFRIDLAPGTAPIYKRPYRMAANELAEVKKQVDEQLQKGYIRPSTSPWGAPVIFVEKKDKTKRMCVDYRALNEVTIKNKYPLPRIDDLFDQLKGAKVFSKIDLRSGYHQLRIREEDIPKTAFTTRYGLYECTVMSFGLTNAPAFFMNLMNKVFMEFLDKFVVVFIDDILIYSKSEEEHEQHLRLVLEKLKEHQLYAKFSKCDFWLTEVKFLGHVITAQGVAVDPSNVESVTKWTPPKTVSQIRSFLGLAGYYRRFIENFSRIARPMTQLLKKDEKFKWTAECDKSFEELKKKLVSAPVLILPDQMKDFQVYCDASRHGLGCVLMQEGRVVAYASRQLRPHEGNYPTHDLELAAVVHALKIWRHYLIGNRCEVYTDHKSLKYIFTQPDLNLRQRRWLELIKDYDMSIHYHPGKANVVADALSRKSYCTALCIEGMCEELRQEFEHLNMGIVEHGFVAALEARPTLVDQVRAAQVNDSEIAELKKNMRVGKARDFHEDEHGTIWMGERLCVPDDKELKDLILTEAHQTQYSIHPGSTKMYQDLKEKFWWVSMRREIAEFVALCDVCQRVKAEHQRPAGLLQPLQIPEWKWEEIGMDFITGLPRTSSGHDSIWVVVDRLTKVAHFIPVHTTYTGKRLAELYLAKIMCLHGVPRKIVSDRGSQFTSKFWQKLQEELGTRLNFSTAYHPQTDGQTERVNQILEDMLRACALDFGGAWDKSLPYAEFSYNNSYQASLQMAPFEALYGRKCRTPLFWDQTGERQLFGTEVLAEAEEKVKSSGKG

SEQ ID NO: 18831 - protein, 1760 aa, Oryza sativa
  Clone ID: TF_OSC900391j.C1.p17.fg
MGCKMAGHPPNHRGEGMIDFVAELARMTLVVGYPNAPEYTTVPPLSGKLPHRVRLEVHGYVGTCLANMVVEASGGTADHACQEAAYLMMARLRERHNFIFHDTAYRFHPCRASGDDVSTFRSTAGENDTTFGHMCAMMRGLDRMHSDLHKASKALNDGKLMRIVALKDEIARLKKENAQLKGLPAPGGVRIRTTPRKTTTAPVRIQLAPRNPPPSAAPAAPPVPPAAPVVPAAPVPAPAPVHVSAPASALSFAPASAARGPASGNGGCLLGMVYTKNGSRATGEGSNGEERTNGVHPHSDSGNGPPPLPENPTLPQVMAHQTQMMASMMQQMQQQHQQMHQRMLQHAEQQHQQFGPPPPQSKLPEFLRVRPPTFSNTTNPMEANDWLHAIEKKLNLLQCNDQEKVAFATHQLQGPASAWWDNHMATRPPGTEVTWAEFCRSFRKAQVPDGVVAQKKREFRALHQGNRTVTEYLHEFNRLTRYAPEDVRTDAEKQEKFMAGLDDELTNQLISGDYVDFERLVDKAIRQEDQRNKMDRKRKAAQFRAHQGSHQRPHFTPGQQGGPTTMIVRQYRPFNPSNFPRAPVAVRTTMESGPSAQAKETGAKPGSCFNCGELGHFADKCPKPRRAGPRFIQARVNHVSAEEAQTAPEVVLGTFPVNSIPATVLFDSGATHSFISKKFVGMHGLIREELSTLMRVHTPGNSSTSVQFSPSITIEIQRSPFLANLILLESKDLDVILGMDWLTKFKGVIDCANRTVTLTNEKGETVVYKSPDSPKQGVSLNQIEAEIPVDTVEKKLRKLEDIPIVCEYPEVFPEDLTTMPPKREIEFRIDLAPGIAPIYKRPYRMAANELAEVKKQVDEQLQKGYIRPSTSPWGAPVIFVEKKDKTKRMCVDYRALNEVTIKNKYPLPRIDDLFDQLKGAKVFSKIDLRSGYHQLRIREEDIPKTAFTTRYGLYECTVMSFRLTNAPAFFMNLMNKVFMEFLDKFVVVFIDDILIYSKTEEEHEQHLRLVLEKLKEHQLYAKFSKCDFWLTEVKFLGHVITAQGVAVDPSNVESVTKWTPPKTVSQIRSFLGLAGYYRRFIENFSRIARPMTRLLKKDEKFKWTAECDKSFEELKKKLVSAPVLILPDQMKDFQVYCDASRHGLGCVLMQEGRVVAYASRQLRPHEGNYPTHDLELAAVVHALKIWRHYLIGNRCEVYTDHKSLKYIFTQPDLNLRQRRWLELIKDYDMSIHYHPGKANVVADALSRKSYCTALCIEGMCEELRFVAALEARPTLVDQVRAAQVNDSEIAELKKNMRVGKARDFHEDEHGTIWLGERLCVPDDKELKDLILTEAHQTQYSIHPGSTKMYQDLKEKFWWVSMRREIAEFVALCDVCQRVKAEHQRPAGLLQPLQIPEWKWEEIGMDFITGLPRTSSGHDSIWVVVDRLTKVAHFIPVHTTYTGKRLAELYLSRIICLHGVPKKIVSDRGSQFTSKFWQKLQEELGTRLNFSTAYHPQTDGQTERVNQILEDMLRACALDFGGAWDKNLPYAEFSYNNSYQASLQMAPFEALYGRKCRTPLFWDQTGERQLFGTEVLTEAEEKVRIIRERLRIAQSRQKSYADNRRRELTFEAGDYVYLRVTPLWGVHRFQTKGKLAPRFVGPYKILERRGEVAYQLELPSNMIGIHDVFHVSQLKKCLRVPEEQADSEHIDIQEDLTYVEKPVRILDTSERGTRNKVTRFCRVQWSHHSEEEATWEREDELKAAHPHLFASSSESRGRDSV

SEQ ID NO: 18832 - protein, 791 aa, Oryza sativa
  Clone ID: TF_OSC900406j.C1.p13.fg
MERPKSPLNPFHCICSLQLDFVPGKWGSVLVVQGKNLGRSFKMAGHPPNHRGEGMIDFVAELARMTLVVGYPDAPEYTTIPPLSGELPHRVRLEVHGYVGTCLANMAVEASGGTADHACQEAAYLMMARLRERHDYIFHDTAYRYHPRRAHGDGVSSFRPTAGENDTTFGHMCAVMRGLDQMHSDLHKATKALNDGKLMRIVALKDEIARLKKENAQLKGLPAPGGVRIRTTPRKRTTAPVRIQLAPRNPPPPAAPAAPPVPPAAPAVPAVPPAPAPAFTLSFAPASAARGPASGTGGCLFGMVYTRTGNRTTGEGSNGEERADGVHPNSDSGNGPPPLPENPTLAQVMAHQTQMMAAMMQQMQQQHQQMHQRMMQHAEQQHQQFGPPPPQSKLPEFLRVRPPTFSSTTNTMEANDWLHAIEKKLNLLQCNDQEKVAFATHQLQGPASAWWDNHMATRPPGTEVTWAEFCRSFRKAQVPDGVVAQKKREFRALHQGSRTVTEYLHEFNRLARYAPEDVRTDAEKQEKFMAGLDDELTNQLISGDYADFERLVDKAIRQEDQRNKMDRKRKAAQFRAHQGSHQRPRFTPGQQGGPTTMIVRQHRPFNPSNFHQGSSGSQNHHGSQPNRGTAPRPPMAPAQSGQPAQAKKETGAKPGSCFNCGELGHFADKCPKPRRAGPRFIQARVNHASAEEAQAAPEVVLGTFPVNSIPATVLFDSGATHSFISKKFVGMHGLIREELSTPMRVHTPGNSSTSVQFSPSITIEIQRSPGFAEFSGVIIRKRKRPGKGKMS

SEQ ID NO: 18833 - protein, 1628 aa, Oryza sativa
  Clone ID: TF_OSC9142j.C1.p1.fg
MGCKMAGHPPNHCGEGMIDFVAELARMTLVVGYPNAPEYTTVPPLSGELPHRVRLEVHGYVGTCLANMVVEASGGTADHACQEAAYLMMARLRERHNYIFHDTAYRFHPRRASGDDVSTFRPTAGENDTTFGHMCAVMRGLDRMHSDLHKATKALNDGKLMRIVALKDEIARLKRENAQLKGLPAPGGVRIRTTPRKTTTKPVRIQLAPRNPPPPAAPAVPAAPAPAPVHVLAPASALSFAPASAARGPASGNGGCLFGMVYTRNGSRATGEGSNGEERTEGVHPNSNSGNGPPPLPENPTLAQVMAHQTQMIAAMMQQMQQQHQQMHQRMLQHAEQQHQQFGPPPPQSKLPEFLRVRPPTFSSTTNPMEANDWLHAIEKKLNLLQCNDQEKVAFATHQLQGPASAWWDNHMATRPPGTEVTWEEFCRSFRKAQVPDGVVAQKKREFRALHQGNRTVTEYLHEFNGLARYAPEDVRTDAEKQEKFMAGLDDELTNQLISGDYADFERLMDRKRKAALFRAPQGSHQRPRFTPGQQGGPTTMIVRQYRPFNPSNFPQGASGSQNHHGGQPSRGAAPRPPVAPAQSGPPAQAKKETGAKPGSCFNCGELGHFADKCPKPRRAGPRFIQARVNHASAEEAQATPEVVLGTFPVNSIPATILFDSGATHSFISKKFVGMHGLRKEELSTPMRVHTPGNSSTSVSFSPSVLIEIQRSPFLANLILLESKDLDVILGMDWLTKFKGVIDCANRTVTLTNEKGETVVYKSPDSPKRGVSLNQIETKIPEDTVEKNLRKLEDIPIVCEYPEVFPEDLTTMPPKREIEFRIDLAPGTAPIYKRPYRMAANELAEVKKQVDEQLQKGYIRPSTSPWGAPIIFVEKKDKTKRMCVDYRALNEVTIKNKYPLPRIDDLFEFDQLKGAKVFSKIDLRSGYHQLRIREEDIPKTAFTTRYGLYECTVMSFGLTNAPAFFMNLMNKVFMEFLDKFVVVFIDDILIYSKSEEEHEQHLRLVLKKLKEHQLTPCSATQGVVVDLSNVESVTKWTPPKTVSQIRSFLGLAGYYRRFIENFSRIARPMTQLLKKDEKFKWTAECDKSFEELKKKLVSAPVLILPDQMKDFQVYCDASRHGLGCVLMQEGRVVAYASRQLRPHEGNYPTHDLELAAVVHVLKIWRHYLIGNRCEVYTDHKSLKYIFTQPDLNLRQRRWLELIKDYDMSIHYHPGKANVVADALSRKSYCTALCIEGIRSGGTAYARGSSQSRVNDSEIAELKKNMRVGKARDFHEDEHGTIWLGERLCVPDDKELKDLILTEAHQTQYSIHPGSTKMYQDLKEKFWWVSMRREIAEFVALCDVCQRVKAEHQRPAGLLQPLQIPEWKWEEIGMDFITGLPRTSSGHDSIWVVVDRLTKVAHFIPVHTTYTGKSTAYHPQTDGQTERVNQILEDMLRACALDFGGAWDKSLPYAEFSYNNSYQASLQMAPFEALYGRKCRTPLFWDQTGERQLFGTEVLAEAEEKVRIIRERLRIAQSRQKSYADNRRRELTFEAGDYVYLRVTPLRGVHRFQNKGKLAPRFVGPYKILERRGEVAYQLELPSNMIGIHDVFHVSQLKKCLRVPEEQADSEHIDIQEGPNLRGEAGSYT

SEQ ID NO: 18834 - protein, 1940 aa, Oryza sativa
  Clone ID: TF_OSC400653j.C1.p7.fg
MAAELVGEGDGGRRRRSGVEAAGSNGWRCGGGGCRWIGQAAVGWRRRRRLVVGGEAPDLRPPNVLRLAVVRQERRRRLAIGTRRRKWPTVRGEAAVAGSVPCKNERQQLQAGAAAAAAAGGISIEYPFCVEPGCYHPGFNLTCNHSYSPPRLFLGDGTVQVLEIAIPQATVRINSGRMVFNSTGNHAVNRSLLDQVGRPYFVAASNRIALLSCNARVDVRAAGRNNNKTSTKLLSSCTAICPTDDGGGATTILDIGPEGPCSGIGCCETSMLLAGSSTAAYSIQVQNLQEQAVVLNRTDDLVYLVDERFNYTLDMSFGYSSPEELPARLDWYINSSSACPLPASAPECRSAHSYCDSTYDNKAYICRCSEGYEGNPYVPDGCHDTDECSSGYCSYGECRNTPGSFICNCPRGYEGNPSPKDGCKARDLGLRIGLGVGGGTILLLLALSAPFISSKMKLRKMKRMKETFFRQNHGLLLGRLVSQNADIGQRMIMTLQELEKATDNFDKSREIGGGGHGVVYKGILDLQVVAIKKSRIVVKREIDDFINEVAILSQVNHRNVVKLLGCCLETEVPLLVYEFISNGSLDHHLHVDGPISLPWDDRIRIALEVARALTYLHSATTIPIFHRDIKACNILLDENLISKNCSLEKGPCIGLITVKVLCYILPRFIDKMSYKATRNRMPKPEGEIKATNLRAFNSSSVEIPSGVDFELGNTTTGTVSSSLPWDDRLRIAFEVVRALSYLHSAASMPIFHRDIKYSNILLDDSLTAKLLTRKKPIGGTFDNGDGLVSHFVSLVSKGNLYDIIDSQVREEEDGEVQEVATLAATCTKFKGEERPTMREVEMENDLQENRSAMKKCPDLKIERRFLGSARRDYSLFVNIYFTFTNMSNTGDNGNTGYKETEAPVNTNGGNTASNSSGGPFLGYNLLTLFQLEVLLLMFIAMSTLCYYVIVDAYSILSMLMLITFTTITGSNPIVNIMFIILLFWIKICRIMTKFPTIQKPDRSFSVVGFAATLKPHAFDGSNYKRWKARALLWLTAMQCFYVSRGKRSEPPLSPEEEAKFEASDCLFRGALISVLADNIVDVYIHMPLGKDMWDALEAKFRVSDAGSELYVMEQFYDYKMVDDRSVVEQAHEIQMLAKELENNNCELPDKFVAGGIIAKLPPSWSDFTISLKHKRQEFNVTDLIGSLGVEEKARAKDNWGKNIEGNSSANLATTNFKKKDKGKGKGDCFVCDKPGHWAKNCPDRKDKKSANMVISEGGGTSGYGNFLPTVLSVFHSPDWWVDTGANIHVGRGSSLLMGNESLAAVHGVGTVDLKFTSGKTVQLKNVQHVPSIKKNLVSGSLLCRDGFRLVFESNKCVVSKYGTFIGKGYDSEGSKCHTCVQSKQPRKPHKASEARNLAPLELVHSDLCEMNGVLTKGGKKYFMTLIDDCTRYCYVYLLKTKDEALHYFKIYKAEEWWGEAIFTACHVLNKIPVKHKEVTLFKEWERKKLNLSYLRTWGCLAKNEFPMKNTPSTSSQEPVLPHEHLAPIKHNDQTPEENPEEVNIVATRKSKRQRTAKSFGDDYIVYLVDDTPRTIEEAYSSPDADYWKEAVRSEMDSIMSNGTWEVVERPYGCKPVGCKWVFKKKLRPDGTIENLNVIEEVKDFLSKSFEIKDLEVADVILNIKLLRGDEGGITLVQSHYVDKVLSRFGYSDCKPAPTPYDSNVLLRKNGRIARDQLRYSQIIGSLMYLASATRPDISFAVSKLSRFVSNPGDDHCQALERVMRYLKGTISYGIHYTGYPKILEGYSDSNWISDADEIKATSGYVFTLGGGAVSWKSCKQTILTRSTMEAELTALDTATVKAEWLRELLMDLPVVEKPVPAILMNCDNQTVIIKVNSSKDNMKSSRHVKRRLKSVRKQKNSGVIALDYVQTAKNLADQFTKGLPRNVIDSASREMGLRPT

SEQ ID NO: 18835 - protein, 1809 aa, Oryza sativa
  Clone ID: TF_OSC900283j.C1.p5.fg
MAVNASFSSHGLGEGHHVAQLRDLTRFLGFSCPEYTGYSVDRVPPHCELSVYLYPRGGIHGAGLRPHHFTVARPTLQIAYQDLSWTALRRLAHDYSHRLGGSAFRQLPRLPSGHSDARYPCPYSESQPVLTRMVELSEAQATQHDLLLEAYRSLARRYAALEARLAEEGVTSVDTISWDSGRLCHASHLSSHSSRGSARTPSGPRSPSSRAPYSPVYSPYPHPVSPSYTPGHTPVASSRRGPRFIRTAWKRVVGSSTVFRFHHPAPPPPAARAAAGPRQMASRPRRAARAPARFGFEDGRVEAEANHEPANEQSHHSNRSHRTSPRNAEVEQPRRSNRSHRTVSRDAEMEQSLRSHRTASHNSGEERIPSPPHVENNIQHIMAVQTQILQGLTTAIASFQHNAYGNGHPHVGNNRSKLTDFLRSRPPEFSQTVEPVEADDWLKDVDRKLNLVQCTPVEKTLYASHQLRGPAADWWENYCNAHPEPTNIAWDEFATAFRAAHVPESTIDMKKEEFNRLRQGNSNVNEYLSQFNKLARYAPEEVNTDKKKIRRFLKGVAVGMRLQLLAHDFPTFQHMINKALLLEDARKEATEEYKKRKSNHQGNSSRGAPRPRYGQPMQYHQSVTQANRQPGYAPRPQMNRPAPQPQQRAPSGNTAPNSVTSFKSPQGPSAVQCFRCNQMSHYARQCPQNPTNTNSGHANGSTARTPTPAAAQSRPSSQASGQGSRASNNFGRGRVNHIQAETAQDAPDVVMGMFSVNSVPAIVLFDSGASHSFISQAFVKRNGWKTQNLRVPMIVHSPGRNIRATQICPEVNLRIEEVDFLAKPIVLDSQSLDIILGMDWLAKHKGQIDCAEKSITLQGPGGKQVRFTPNTPTASRSVLTCLQVTSLESVPIVCEYPDVFPEELTRMPPDREIEFAIELAPGTAPIAKRPYRMAANELAEVKRQIEELESKGYVRPSSSPWGAPVLLVKKKDGSERMVIDYRALNEVTIKNKYPLPRIDDLFNQLKGARVFSKIDLRSGYHQLKIRSEDIPKTAFSTRYGLYEFTVMSFGLTNAPAFFINLMNKIFMEYLDRFVVVFIDDILIYSKNEEEHAEHLRLIMEKLRDHQLFAKFSKCEFWLDRVAFLGHVISSNGVEVDPSKVEAVLAWNPPKNVSEIRSFLGLAGYYRRFIEGFSKLARPMTELLKKEKKFQWSAACEDSFQEMKKRLTTAPVLTLPDIRKDFEIFCDASRQGLGCVLMQERKVVAYASRQLRPHEVNYPTHDLELAAVIHALKIWRHYLIGNRCEVYTDHKSLKYIFTQTELNMRQRRWLELIKDYDLGIHYHPGVPASLTVQPTLESQIREAQKDDEGIKELIKRIQEKEDTNFSIDDQGTVWCGPRICVPAKKELRDLILKEAHESAYSIHPGSTKMYQDIKAYFWWAGMKRDVAEYVALCDICQRVKAEHQRPAGLLQPLPIPEWKWEEIGMDFITGLPRTPSGYDSIWVIVDRLTKSAHFVPVKTTYDGKKLAELYMTHVVCRFGCPKKIVSDRGTQFTSRFWKQLHEALGTDLNFSTAYHPQTDGQTERVNQILEDMLRACALDFEGTWDRCLPYAEFSYNNSYQASIQMSPNEALFGRKCRTPLCWNEVGEALVFGPDILQSVEEQVKLIRERLKTAQNRQKNYADNRRRDLEFEKGDHVYLRVSPLRGMKRFGMSGKLAPRYIGPYLITARRGEVAYQLELPEGLADVHNVFHVSQLKKCLRVPEEQVPLGNIELEKNLTYKERPIKVLEEAERQTRRKTIKFYKVQWSNHSEDEATWEREDLLRAEFPELLP

SEQ ID NO: 18836 - protein, 536 aa, Oryza sativa
  unsure (1)..(536): unsure at all Xaa locations
  Clone ID: TF_OSC28236j.C1.p1.np
MSDLGGKNGENGNEDGTSSKETPSPKGATIPFDYSKLTIPPHNFVSVPSRRAPQFDGTHYAAWKHKMKLHLIFLHPSIWKVVCIGIDVPHDDMELTSEQEQLIHRNAXASNPILSALSPEEFNKVDGLEEAKEIWDTLQLAHEGSPAVREAKIELLEERLGRFVMDDKETPQEMYDRMMILVNKIKGLGSEDMTNHFVVKRLLHAFGPRNPTLVSMIWERKAFKRLTPSDILGRIVSYEMQEETAREVRQMVKNPTMIKNQEVALKAKHEEMTFIVKRFKHFLRKSGYGKGRKLKAKHEEMTFIVKRFKHFLRKSGYGKGRKDDDKGKRQSKRACFNCGEYGHFIADCLKSNEAKAKGGKKKPERAHVAEAHMAEVWYSGDEEDLEVKPKPKPKDKVEGEGGVATVAFKSSSSSKERLFNNLSDDDDDSYHYSCFMAQGHKVMTQKPSHTSLDVDSSDEESDNELDDVLKSFSKPAMQHLAKLMRALDSKEQSLERQEELLILEKERNLALVESLAKECAKNEQLANELNLANGSL

SEQ ID NO: 18837 - protein, 749 aa, Oryza sativa
  Clone ID: TF_OSC402966j.C1.p1.fg
MAEKTIREFAAPSAENVLIGPQINLGDTDFDLKSSLITMAQASSFCGKPNENASVHLQQFLEICSTYTVKGVSPDAVRIRLFPFSLLGKVKQWSYANRATINTWDMCSTTFLSKFFPMGKTNALRGKISVFQQTRDELIPKAWERLQEYVAACPHHGMDEWLILQSFYNGLTPTSRDHLDVAAGRAFFSKTCEVCGSTGHFGNDCPETREETMYMGNDNNGFRPQGGQGWNSPAHISKEATIMVSTVNKSSNFKRPTTGSSKGPISNAESLNVVPVKSVFDRLRFPEIAAGKAPARDQGVRCASCHKLDHRALACWNKKKAQVWRPKKDSMPAAKKSIVERAVLGKEIICFKNQGSPSSSSQQLQSVPLLLSTSSPSAPMAVLLEPWDHQLERADLCLQEDPPKRNEGMAVACIEPPPTPEQYEGFRHLVINYVQNVLGYHVLEASRHPIEFMYVRVASALLRDTLIAGGPYEVDNQFMLRFVPHDLTSSCRNSPFTSEGWIMFLDFPLDFKTPAIIDKAVSLFGKVIKVQLDDNVRGRLMVKALYSSTLEVPRRIVVKRAIAFGGVGRSWTVSVFLCHEELPDVMPGDEDLPPVNHIPIPDPVQLLAPQVDAFGDNMEEDAPAVEQNSQPLSAVSVVAGNQNFALLAAVLLVVGNETEVEQAEGDLGHEYMNEAHIEDAEMVEPISCVLPEQQVLPQDPFQQSASSCLPSLKKSRKTKAKIVAIVDTDRRRNSRINKLTGGYMSPDPK

SEQ ID NO: 18838 - protein, 842 aa, Oryza sativa
  Clone ID: TF_OSC408676j.C1.p4.fg
MSTTGDNNNTGDKEKEPLVNTNRGDTVSNSSGGPFSGVLADNIVDVYMHMPSGKDMWDALEAKFEVSDAGSKLYVMEQFYDYKMVDDRSVVEQAHEIQMLAKELENNNCELPDKFVAGGIIAKLPPSWTDFATSLKHKRQEFSVTDLIGSLGVEEKSGAKDNRAKKIKGGSSANLVQKKNLHASHYNKKVKPNVKPKATTNFKKKGKGKTKGGCFVCGKSGHWAKHCPERKDKKYANTVISEGGGTSRYGKYLPTVLSVCHSPDWSVDTGANIHVCADISLFSSYQVGRGSSLLMGNGSLAAVHGVGMVDLKFTSGKIVQLKNVQHVPSIKKNLVSGFLLCRDGFRLVFESNKCVVPKYGTFIGKEYGIIHERTPPYSPQSNGVAERKNRTLTEMVNTMLDTAGHSKEWWGEAILTVCHVLNRIPTKYKKVTPFEEWERKKLNLSHLRTWGCLAKVNVPIAKKHKLGPKTVDCVFLGYAIHSVGYRFLIVNSGVPDMRVGTITESRDATFFGNEFLMKNAPSTSSQEPILSPEHFVPIEHIDQTLEENLEEDNIVATRKSKRQRTAKYFGDDYIVYLVDDTPRTIEEAHSSPDADYWKEAVRSEMDSLMSNGTWEVVEHPYGCKPVGCTWVFKKKLRPDGTIEKYKARLVAKGYTQKEGEDFFDTYSLVARLTTIRVLLALATSHGLLIHQMDVKTAFLNGELEEEIYMDQPDGYVLEGQEEMVYKLLKSLYGPKQAPKQWHEKFDNTLTSVGFVVNEADKCVYYRYGGGEGVILCLYVDDILIFGTSLNVIEEVKDFLSKSFEMKDLGVADIILNIKLLRGGWDYTCAISLCRQGLESLWL

SEQ ID NO: 18839 - protein, 1386 aa, Oryza sativa
  unsure (1)..(1386): unsure at all Xaa locations
  Clone ID: TF_OSC417436j.C1.p8.np
MVAGGGHRHGGAAAERGEGKGEKRWRSTAHPGSTSGGAEEGGGAARVDGDDGAPAVGELGEVVDGVGGGAAKPEEATPEAGDGPASGEGRPEVVGDGXXRRRRELDSGGEKVRQGVETGEGGAGRVXIGLEGREGGRQEGNRRGRFFLPAMRRRELRDQIRPFEGEREGKRKGEEITGSNCLTIWLILQSRWLXYQLVTPTPIRKPYLLGVEGFIRELCTMAFAIGFKTAPLYDQIPHDRDEEKCRVKVTITSDHEDIPSVMFEAGGRRYHACQEVARVAIGELRNLYNDQLVNTEYRYHPCQTHDRTQASYVDPEGLEDDATLCHVVELLWAMDGHRTEEALAAQEREDKNNGMINKLLDKVDRLEKELAELKGEAPPHRARACLTTWKRALVAPRFQLAPKVRVVEEAAPPVDSPVIQLCDDEEEPVDSPVIQLCDDEEEDSEEDPERTHSVVEWGATQENDDEGEPLVLRCQEALDNTRNTGSGSANNENPSLAQVLAQQTQLMNLMMQQLQNQQNQGNNHAPPQNKLAEFLRVRPPTFSSTTNPVEADDWLHAIEKKPDMLQCTDQEKVSFASHQLHGSASEWWDHFRLNRATAELIIWLEFTAAFKKTHKPSGVVALKKKEFRALTQGSRSVTEYLHEFNRLARYALEDVHTDKERQEKLTEGLNDELSYPLMTGDYADFQKLVDKIICQEDKYNRMEXKKRRITHFKAQQGNSQRPRLTLGPQAALQGGSSSAVHPQRQFYNNNTGSGNGNRNLAPRPAAAPAQHQPVKKEXGNKPGVCFKCGDPGHYADKCPKLRGVRTAHVXNNSNAPTSKARVNHVAAAEAQSAPDVILGTYPVNSVPATVLFDSGATHSFLSKSFAGSHGMEIEELRCPLMFSTPSNQALSSYRSPSVRIEIQGVPFLANLILLESKDFDVILGMDXLTKNRGMIDCANRKVKLTNSYGQVVTVHALPPASSQVSLNQVTVEEILIVCEYPDLFPDDLPGMPPKRDIEFRIDLVPGTAPIHKRPYRMAANELVEVKKQVDDLLQKGYIRPSSSPWGAPVIFVEKKDHTQRMCVDYRALNDVTIKNKYPLPRIDDLFDQLKGATVFSKIDLRSGYHQLSFREYGLFECTVMSFGLTNAPAFFMNLMNKFREYGLFECTVMSFGLTNAPAFFMNLMNKVFMEYLDKFVVVFIDDILNYSXTKEEHEVHLRLALEKLREHQMYAKFSKCDFWLSEVKFLGHVISAGGVAVNPSNVESVTNWKQPKTISEIRFLGLAGYYRWFIENFSKIAKPMTCLLQKDVKYKWSAECEQSFQELKKRLVSAPILILPNPKKGLQVYCDASQLGLGCVLMQDGKVVAYASRQLRPHEKNYLTQDLELAAVVHALKIWRHYLFGTRPEV

SEQ ID NO: 18840 - protein, 1491 aa, Oryza sativa
  Clone ID: TF_OSC900336j.C1.p19.gm
MDDKETPQEMYDRMMILVNKIKGLGSEDMTNHFVVKRLLHAFGPRNPTLVSMIWERKDFKRLTPSDILGRIVSHEMQEEEAREVRQMVKNATMIKNQEVALKAKQEEESSCEESEDEEMTFIVKRFKHFLRKSGYGKGRKDDDKGKRQSKRACFNCGEYGHFIADCLKSNEAKAKGGKKKPERAHVAEAHMAEVWYSGDEEDLEVKPKPKPKDKVEGEGGVATVAFKSSSSSKERLFNNLSDDDDDSYHYSCFMAQGHKVMTQKPSHTSLDVDSSDEESDNELDDVLKSFSKPAMQHLAKLMRALDSKEQSLERQEELLILEKERNLALVESLAKECAKNEQLANELNLANGSLASLRDVNETLQEKFASLDKSHKDLEVQFDTLWNSTSQPNVVSNSSNPSTSNGCARYYNIDLNSHATNVDAMQALKKENERLGTLVKYGCMKTYHSKDALYKTITAHPNKDGHGLRKFRASDRPKGLAGSSGYNARKFWPEGLYYDSYAYSSDGSSWVVDSGCTNHMTGERSMFTSLDEEGGSRENIVFGDDGKGKRVRSNNGGEFKNTQVEEFLDEEGIKHEFSAPYDPPQNGIVERKNRTLIEVARAMLDEYKTSDVFWAEAVSTACLAINRLYLHKILKKTSYELLSGKKPNVSYFHVFGSKCFILSKRSRSSKFSPKVDEGFLLGYESNAHAYRVFYKTSGIVEVTRDVTFDESNGSQGEQVVVHVVGDVDPNQAIGTNAIGDIRPVETQDDQEDRDQPPSSTSNSPTSAVSAEPEVPGPIDRNLRTSPDPEVPGSTVRNLRISGSEDVPTAQVDGIDAEGTLEHSDQAQVPPVHHPRIHHTVQRDHPVDNILGFEDPKLPNHVYKLHKALYGLKQAPRAWFEMSMMGELTFFLGLQVKQALEGTFISQTKYVKDILKKFGMEDAKPIKTPMPTNGYLDLDDNGRKFRCSWPGTSVVIMPREKRQKLSQDVPADSSPPVRGPRGRLGKEKVGVFYSGSQIPIHSRRAGSIVIRDAPRSPSPAASESDDGGNEDEPGSKSNPLRLYKTRAVDPDPKRTRVNYLKNLLQCGKDRMVSPDTLPADSQDDRFRTLVQVDWYNSMIMGRSHLVVEMKWLDWQYMSSKNNIVFNEVRKVCERKHVVDLLALQYSWNEEVIGQFYFTAFFGITKKGLDFVKWTIQGQQYRVSMAQFAAALGLDDDDLSRPHIFVEDALSPTSTTFMYEKDAPKDCLGTIRGLRPYYRVLYSIFRWSLLPKVGDATALPGRHALLLSRMRYNKPDFSIMKLIWSEIYKTMCEPKRGCIYAPYIMKMIEAKTGICYFKDNQHKLFRPHAPTTSATPTTRVTRASTSAAPSSSAAPQRSESSSPIKKALRAIFCMCAKTAKKVKKIERRQKEDWIAAGKDVSDISDDEEFVDPFAAYETARDIASGEGPSGTSRFFNEESSHSEESSDDEESNAPTENVLTDPDEAVDAAGQDIDSPHSGDTEIIPSDGDDDEA

SEQ ID NO: 18841 - protein, 256 aa, Oryza sativa
  Clone ID: TF_OSC29212j.C1.p2.fg
MASKRGEKKPQARMSRRRQQPGSDSDGEDDSFLYRYPLPSAAAPGASGPSSHGGKPGGGGGSGGLAPSKSTVYVSNLDFALTNSDLHTLFSRFGRVARVTVLKDRDSPRSRGVASVLFVRREDAAAAAARDARQAEFIRRRVYRDKSRCYECGEEGHLSYECPRNQLGPRERPPPSKKSRRGGGSGGGGGGGGGGRGASWQSDDEDSAAAFEDDRWASVVDTRGEEEKAAGKGEGKAMKKEKRKGYFSDESDEDED

SEQ ID NO: 18842 - protein, 1379 aa, Oryza sativa
  unsure (1)..(1379): unsure at all Xaa locations
  Clone ID: TF_OSC401338j.C1.p7.np
TIAQKADFENNCKARNIILNAISRSDFDRVSHLATANEIWKAFNDFHTGSSNIKELQKDVFKKEYIKFEMNSGESLDDYLGRFNKILSDLGSVDASYNVNYSQSKVACYFMNGLDMKIWDVKVTSIQESVGMNTLTLDILYTKLKTYEMNILSKRTDSKSTALVSSSSSSIDSTPMSIFSAFNALSEDQLEGVSEEDLVLIANRASKALSNTRSRRRGGPQRCFECGQLGHIRSQCPKLRRGTKAVDQDEVKTKNTKDDKQSKKQFKNMKMKNYQKAIDEAYAAIQESSDVDFDSDGDDDKGKNIVGVCLMARSIDEDSGDDNEVIPPSSVEYYQDIIARLGFKISKFEKRSPYEATIESLKAENSSIKSLVPDNDECQSCEVLCAEIKSNRDVCIKKLDVESRKTKKFESCVALSFAMNTRLVDELFLTKRALNKCQVALFASSIFNLISSKRIKQSSTKLFSTTCVANEMKLKYALGRVKHMEEIVKQDEVMSCSTCRKXKSVLDACKNCATLSQEVFYLKSSLQRFSKGKKNLNMILDQSKVNTNNRDLVVRMENVWIVDSGCMQHMTSFSFLKKASRRDSIIFGDASTSSITTTGSVKVSDKFTLNDVTLVENLKYNLLSVSQIVDEDFDVLFKKTRSKVFNSSGDVVLNVSRYGRVFKADFENSVSSEVTCLVAKFSKDVMFXHRRLGHVGFDHLTRISGSDLVRGLPKLKKNLDLVCSPYRYAKMVASSHAPIISVMTDAPGHLLHMDTVGPTRVQFVGGKWYVLVVVDDFSRYSWVFFMATKDEPFEHFKSLYLRLSLEFAGSLRTIRSDNGISHLRVFGCKCFVLKSRNLDKFESHSTNGLMLGYSTHSRGYRVLVLETNKIVETCEVTFDEASPGTRPDVSGTLSXVQGEDIFVDESNDEEEDEMAAVQTGATAGQTAGEDRSDRPGGSSSGASGDDGRGPPETSTSIGQGAEHEISSYATTPLHIQXRHPPQQMIGNIGEHTTRSKVTTRDHHVNSAFVANFEPKDVTHALTDESWINAMHEELENFERNKVWSLVEPPVGHNIIGTKWINEDGLIVRNKARLVAQGFTQMXGLDYDETFAPVARIEAIRLLLTFTASKGFKLYLMDVKSAFLNGYIQEEVYVKQPPGFENSEFPNHVFRLSKALYGLKQSPRAWHDRLENFLLAKGFIMGKVDKTLFVLKHGDDQLFVQIYVDDIIFGCSSHPLVVEFAETMRMEFEKSMMGELTYFLGLQIKQTKQGTFVHQTKYTKDLLRRFKMEDCKPMSTPIGSTPVLDPDEDGEVVDQKEYRSMIGSLLYLTASRPDIQFVVCLCACFQASPRASHRQAVKRIMRYLQXTLEFGIWYSTYSSICLSGYLDNKHRGTQTDNLIY

SEQ ID NO: 18843 - protein, 267 aa, Oryza sativa
  Clone ID: TF_OSC900093j.C1.p1.fg
MASKRGEKKPQARMSRRRQQPGSDSDGEDDSFLYRYPLPSAAAPGASGPSSHGGKPGGGGGSGGLAPSKSTVYVSNLDFALTNSDLHTLFFRFGRGPDLPRRPGGGLRPLRPPGGGPPAPPAEMHGKVLNGRTLSASIAEDNGRAAEFIRRRVYRDKSRCYECGEEGHLSYECPRNQLGPRERPPPSKKSRRGGGSGGGGGGGGGGRGASWQSDDEDSAAAFEDDRWASVVDTRGEEEKAAGKGEGKAMKKEKRKGYFSDESDEDED

SEQ ID NO: 18844 - protein, 255 aa, Oryza sativa
  Clone ID: TF_OSC900155j.C1.p15.fg
MASKRGEKKPQARMSRRRQQPGSDSDGEDDSFLYRYPLPSAADPGLAPSKSTVYVSNLDFALTNSDLHTLFSRFGRVARVTVLKDRDSRRSRGVAFVLFVRREDAAAAAAEMHGKVLNGRTLSASIAEDNGRAAEFIRRRVYRDKSRCYECGEEGHLSYECPRNQLGPRERPPPSKKSRRGGGSGGGGGGGGGGRGASWQSDDEDSAAAFEDDRWASVVDTRGEEEKAAGKGEGKAMKKEKRKGYFSDESDEDED

SEQ ID NO: 18845 - protein, 1072 aa, Oryza sativa
  Clone ID: TF_OSC11309j.C1.p1.fg
MQCFYVSRGKRSEPPLSPEEEAKFEASDCLFRGALISVLADNIVDVYMHMPSGKDMWDALEAKFGVSDAGSELYVMEQFYDYKMVDDRSVVEQAHEIQMLAKELENNNCELPDKFVAGGIIAKLPPSWSDFATSLKHKRQEFSVPDLIGSLGVEEKARAKDVRGKKVEGGSSANMVQKKNPHASHNNKKVKPDVKPKAATNFKKKSKGKAKGDCFVCGKSRHWAKDCPERKDRKSANMIISEGGGTSGYGKILPTVLSVFHSLDWWVDTGANIHVGRGSSLLMGNGSLAAVHGVGTVDLKFTSGKTVQLKNVQHVPSIKKNLVSGSLLCREGFRLVFESNKCVVSKYGTFVGKDYDSGGLFRFSLNDMCNNHNAVNHISENDESNVWHSRLCHVNFGCMTRLANMSLIPKFTLVKGSKCHTCVQSKQPRKPHKASEARNLAPLELVHSDLCEMNGVLTKGGKKYFMTLIDDCTRFCYVYLLKTKDEALHFFKIYKAEVENQLERKIKRLRSDRGGEYFSNEFASFCEEFGIIHEMTPPYSPQSNGVAERKNRTLTEMVNAMLDTAGLSKEWWGEAVLTACHVLNKIPMKHKEITPFEEWERKKLNLSYLRTWGCLAKVNVPIAKKRKLGPKTVDCVFLGYAIHSVGYRFLIVNSGVPDMHVGTILESRDATFFENEFPMKYTPSTSSKETVMPHEHFAPIEHNDQTPEENPEEDNIVDTRKSKRQRVAKSFGDDYIVYLVDDTPRTIEEAYSSPNADYWKEAVRSEMDSIMSNGTWEVVERPYGCKPVGCKWVFKKKLRLDGTIEKYKARLVAKGYTQKEGEDFFDTYSLVARLTTIRVLLALAASHGLLVHQMDVKTAFLNGELEEEIYMDQPDGYVLEGQEGMVCKLLKSLYGLKQAPKQCHEKFDTTLTSAGFVVNEADKCVCYRYGGGEGVILCLYVDDILIFGTSLNVIEEVKDYLSKSFEMKDLGEADVILNIKLQRGDEGGITLVQSHYVDKVLSRFGYSDCKPAPTPYDPSVLLRKNRRIARDQLRYSQIIGSLMYLASATRPDISFAVSKLSRFVSNPGDDHW

SEQ ID NO: 18846 - protein, 161 aa, Oryza sativa
  Clone ID: TF_OSC16291j.C1.p1.np
KACSRCGEIGHVASSCATTCVHCEEDHPPDRCPTSRITCFFCEGTDHVPKDCRFSFLLTKKMANQPVSSNGEKHQGNTNPRQDYSKQCTNAPPAAPDSAINHSNHSLHRQPQQRIVVDGRSCVSPRPTPGRAKSNQPPEGDTKQKTVIRFNQQSEGSFSCE

SEQ ID NO: 18847 - protein, 796 aa, Oryza sativa
  Clone ID: TF_OSC16541j.C1.p2.fg
MQCFYISRKKRSELPLSPEEEARFEDSDCLFRGTLISILADNIVDVYMHMPSGKVMWNAFEAKFGVSDTSSELYVMEQFYDYEMVDYREGESKGQQGKNIEGGSSANLVQKKNPHASHNNNNKKVKPDVKPKATTNFKDKGKGKAKGDCFVCGKPRHWAKNCPNRKDKKSANMVISEGGGTSGYGKFLPTILSVFHSPDWWVDTGANIHVCADISMFSSYQVGRDSSLLMGNGSLAVVHGVGMVDLKFTSGKTVQLKNVQHVPLIKKNLVSSSLLCRDAFRLVFESNKCAVSKYGTFIGKGYVSGVLFRFSLDDMRNNNNDVNHISENDEFNVWHSRLCHMNFGCMTRLANMSLIAKFTLVKGSKCHTCVQSKQPRKPHNASEARNLAPLELVHFDLCEMNGVLSKEGKKYFMTLIDDCTRFCYVYLLKPKDEALYYFKIYKAEEWWGEAILTTFHVLNKIPVKHKKVAPFKEWERKKLNLSYLRTWGCLAKNTVIKRLRKILRRITLYTRKSKRQRVAKSFGDDYIVYLVDDTPRTIEEAYSSPDADYWKEAVRSEMDSIISNSTWEVVERPYGCKPVGCKLVFKKKLRPDGTIKKYKVRLVAKGYKKRSLNVIEEVKDFLSQSFEMKDLGVANVVLNIKLLRGDEGGITLVQSHYVDNVLSRFGYSDCKPSPTPYDSSVLLRKNRRIARDQLRYSHIIGSLIYLASATSPDISFAVSKLSRFVSNPGDDHWQALERVIRYLKGTVSYGIHYTVYPKVLEGYSDSNLISDADEIKATSGYVFTLGGGAVSDHLNE

SEQ ID NO: 18848 - protein, 592 aa, Oryza sativa
  Clone ID: TF_OSC19063j.C1.p1.fg
MQCFYISRKKRSELPLSPEEEARFEDSDCLFRGTLISILADNIVDVYMHMPSGKVMWNAFEAKFGVSDTSSELYVMEQFYDYEMVDYREGESKGQQGKNIEGGSSANLVQKKNPHASHNNNNKKVKPDVKPKATTNFKDKGKGKAKGDCFVCGKPRHWAKNCPNRKDKKSANMVISEGGGTSGYGKFLPTILSVFHSPDWWVDTGANIHVCADISMFSSYQVGRDSSLLMGNGSLAVVHGVGMVDLKFTSGKTVQLKNVQHVPLIKKNLVSSSLLCRDAFRLVFESNKCAVSKYGTFIGKGYVSGVLFRFSLDDMRNNNNDVNHISENDEFNVWHSRLCHMNFGCMTRLANMSLIAKFTLVKGSKCHTCVQWKQPRKPHNASEARNLAPLELVHFDLCEMNGVLSKEGKKYFMTLIDDCTRFCYVYLLKTKDEALYYFKIYKAEEWWGEAILTTFHVLNKIPVKHKKVAPFKEWERKKLNLSYLRTWGCLAKNTVIKRLRKILRRITLYTRKSKRQRVAKSFGDDYIVYLVDDTPRTIEEAYSSPDADYWKEAVRSEMDSIISNSTWEVVERPYGCKPVGCKLVFKKKLRPD

SEQ ID NO: 18849 - protein, 1163 aa, Oryza sativa
  Clone ID: TF_OSC413690j.C1.p2.fg
MAAPDRRGSREIGKGGGRRRGRRPSDLLRPVGEDGRAIRFLGSARRDYSLFVNIYFIFTNMSNTGDKEKETPVNTNGGNTASNSSGGPFLGYNLITLFQLEVLLLMFIAMSTLCHYVIVDANSTLSMLMLITFTTITGSNPIVNIMFIILLFWIKICRIMTKFPTIQKPDRSFSVVGFAATLKPHAFDGSNYKRWKARALLWLTAMQCFYVSRGKRSEPPLSPEEEAKFEASDCLFRGALISVLADNIVDVYMHMPSGKDMWDALEAKFGVSDAGSELYVMEQFYDYKMVDDRSVVEQAHEIQMLAKELENNNCELPDKFVAGDIIAKLPPSWSDFATSLKHKRQEFSVPDLIGSLGVEEKARAKDVRGKKVEGGSSANMVQKKNPFASHNNKKVKPNVKPKAATNFKKKSKGKAKGDCFVCGKSRHWAKDCPERKDRKSANMIISEGGGTSGSGKILPIVLSVFHSPDWWVDTGANIHVGRGSSLLMGNGSLAAVHGVGTVDLKFTSGKTVQLKNVQHVPSIKKNLVSGSLLCREGFRLVFESNKCVVSKYGTFVGKDTAGLSKEWWGEAVLTACHVLNKIPMKHKEITPFEEWERKKLNLSYLRTWGCLAKINVPIAKKRKLGPKTVDCVFLGYAIHSVGYRFLIVNSGVPDMHVGTIHESRDATFFENEFPMKYTPSTSSKETVMPHEHFAPIEHNDQTPEENPEEDNIVDTRKSKRQRVAKSFGDDYIVYLVDDTPRTIEEAYSSPNADYWKEAVRSEMDSIMSNGTWEVVERPYGCKPVGCKWVFKKKLRPDGTIEKYKARLVAKGYTQKEGEDFFDTYSPVARLTTIRVLLALAASHGLLVHQMDVKTAFLNGELEEEIYMDQPEGQEGMVCKLLKSLYGLKQAPKQWHEKFDTTLTSAGFVVNEADKCVYYRYGGGEGVILCLYVDDILSNQLRYSQIIGSLMYLASATRPDISFAVSKLSRFVSNPGDDHWQALERVMCYLKGTMSYGIHYTGYPKVLEGYSDSNWISDADEIKATSGYVFTLGGGAVSWKSCKQTILTRSTMEAELTALDTATVEAEWLRELLMDLPVVEKPVPAILMNCDNQTVIIKVNSSKDNMKSSRHIKRRLKSVRKQKNSGVIALDYVQTARNLADQFTKGLPRNVIDSASREMGLIPT

SEQ ID NO: 18850 - protein, 1633 aa, Oryza sativa
  Clone ID: TF_OSC414105j.C1.p11.fg
MAVNASFSSHGFGEGHHVAQLRDLARFLGFSCLEYTGYSVDRVPPRCELSVYLYPRGGIHGVGLRPHHFTVARPTLQIAYQDLSWTALRRLAHDYSHRLGGSAFWQLPRLPSGHADARYPCPYSESQPVLTRMVELSEAQATQHDLLLEAYRSLAHRYAALEARLAEEGVTSVDTVSWDSGRLCHASYLSSHSFRGSARTPSGPHSPSSRAPYSPVYSPYPHPVSPSYTPGHTPVASSRRGPRFIRTARKRVVGSSTVFRFDYPAPPPPVARAAVGPRQMASRPRRAARAPARFGFEGGRVEPEANHESANEQSHHSNRSHCTASRNAEVEQPHRSNRLHHTASRNAEVEQSHHSHRTASHNSGEERLPSPPHVENNMQHLMAVQTQILQGLAAAVAGFQHNAHGNGHPHMSNNRFKLTDFLRSRPPEFSQTVEPVEADDWLKDVDRKLNLVQSHVPESTIDMKKEEFNKLKQGNSSVNEYLSMFNKLARYTPEEVDTDKKKIRKFLKGIAVGMRLQLLAHDFPTFQHMINKALLLEDARKEATEEYKKRKSNHQGNSSPGAPRPRYGQPMQYHQSVTQANRQPGYAPRPQMNRPAPQPQQRAPSGNTAPNSVTSFKSPPGPSSVQCFWCNQMGHYARQCPQNPTNTNSGHANGSTARTPTPAAAQSLHSPGKNIRATQICPEVNLRIEEVDFVAKPIVLDSQSLDIILGMDWLAKHKGQIDCAEKSITLQGPGGKQVRFTSNTPTASRSILTCLQVTSLESMPIVCEYPDVFPEELTSMPPDREIEFAIELAPGTAPIAKRPYRLAANELAEVKRQIEELESKGYVRPSSSPWGAPVLLVKKKDGSERMVIDYRALNEVTIKNKYPLPRIDDLFDQLKGARVFSKIDLRSGYHQLKIRSEDIPKTAFSTRYGLYEFTVMSFGLTNAPAFFMNLMNKIFMEYLDQFVVVFIDDILIYSKNEEEHAEHLRLIMEKLRDHQLFAKFSKCEFWLDRVAFLGHVISSNSVEVDPSKVEAVLAWNPPKNVSEIRSFLGLAGYYRRFIEGFSKLARPMTELLKKEKKFQWSAACEDSFQEMKKRLTTAPVLTLPDIRKDFEIFCDASRQGLGCVLMQERKVVAYASRQFRPHEVNYPTHDLELAAVVHALKIWRHYLIGNRCEVYTDHKSLKYIFTQTELNMRQRRWLELIKDYDLGIHYHPGKANVVADALSRKAYCNIAQIRPDQDRLCRELEKLRLTVVQSGVPASLTVQPTLESQIREAQKDDEGIKELIKRIQEKKDTDFSIDDQGTVWCGPRICVPAKKELRDLILKEAHESAYSIHPGSTKMYQDIKAYFWWAGMKRDVTEYWKWEEIGMDFITGLPRTPSGYDSTWVIVDRLTKSAHFVPVKTTFDGKKLAELYMTHVVCRFGCPKKIVSDRSTQFTSSYQASIQMLPNEAMFGRKCRTPLCWNEVGEALVFGPDILKAAKEQVKLIRERLKTAQNRQKDYADNRRRDLEFEKGDHVYLRVSPLRGMRRFGMSGKLAPRCIGPYLITARRGEVAYQLELPEGLADVHNVFHVSQLKKCLRVPEEQVPLGNIVLEKNLTYKERPIKVLEEAERQTRRKTVKFYKVQWSNHSEDEATWEREDLLRAEFPELLP

SEQ ID NO: 18851 - protein, 1357 aa, Oryza sativa
  unsure (1)..(1357): unsure at all Xaa locations
  Clone ID: TF_OSC900076j.C1.p3.np
MPVNLXAQGLWSAVEPGDNDRVDRQALAAILRAVPPEMLSTLAIKETVQEAWQAIKIRRIGVRRVREANEQQLRREFADMCFKDGESVDDFSLRLCGPANNLHTLGDEITEAEVVKKLLHVVPENLQQIAISIETLLIDEMSLEEVTGRLRSVEQRSNGDHVDANGRLLYTEEKWLAKFRKSASLLDGGQSGSSSSGGNGGRQGXGRGKKKTMALPKRPSPSQTTRAAILECTYCGKRGHWAKDCRSKPKPQAHVAQEDDEGPTLLLARAVPVPPLPRATPATPPPVPPLPRATPATPPQSKPLEVVQAKVFASLDDAAERSQRRWILDTGATNHMTGSRSLFAELDTAITGTVKFGDGLVVSIEGRDTILFACKTGEHRALTGVYFIPRLTANIVSLRQIDEAGSKVLIYHEVLRIWDPQGRLLVRVDRGVTRLYTIDLDVDRPVCLAARSSEPAWRWHARYGHLNFQALRKLSQKSIVRGLPMLDQVNKVCDGCLVGKQXRASFPSCSKYRATTHLNLVHGDLCGPVEPATPAGNRYFLLLVDDMSRYMWLTLIRSKDEAASTIKHFQARAEVESGRKLHVLRTDRGGEFNSIEFGEYCVDRGVHRQLTAPYSPQXNGAVEHRNQTIIATARSMMKAKGMPGLFWGEAVSTAVFLLNRSPTKFLANKTPYRAWYGERPAVHFLRTFGCIGHVNNDKPGLKKLDDRSAPIVLLGYEQGSKAYRLYDPVGDRVHVSRDIVFDEDAAWSWCREHGLAEXEPFTVEHAVSTTKEEVVTASSPPRSQSPPTPVSPTPEQGMQATEAEVEHASPPSTTPSSTPTPTPRNASRYRTLDNILGPASPSGMATRLLEQLELHAVSAEEPSSLAEAEAEVDPNWKGAMEDEMKSIEENNTWSLTDLPAGHRAIGLKWVYKLKRDEQGAVVCHKARLVAKGYVQRQGVDFDEVFTPVARLESVHLLLAVAAHQAWEVHHMDVKSAFLNSELQEMVFVXQPPGFINANDQGKVYKLHKVLYGLRQAPXAWNAKLDSSLLSLGFCCSSSEHGVYTRATAGKRLIVGVDLGTLKYYLGDLGTLKYYLGIXVTQRSGCITLGQSAYATKILEKAGLQDCNPSQTPMEVCLKLSKNSDSPLMDSTFYCILVGSLRYLVNTRPDLAYAIGYVSRFMETPREEHLSAVRRIQRYVAGTRNWGLTYLGGKEEKPSLLGYSDSDLAGDTDDRRSTSGQIFFTGGSPVTWQSSKQRVVVALSSCEAEYIAAAVAACQGVLLARLLTDVLEADAPAPKLMVDNQSTISLVKNPVHHDRTKHVDIKFHYLRECAEQKLIEVAFVGTADQLGDIFTKSLGRTRFHELCSKIGVSDLRQR

SEQ ID NO: 18852 - protein, 261 aa, Oryza sativa
  unsure (1)..(261): unsure at all Xaa locations
  Clone ID: TF_OSC33028j.C1.p2.np
FHGRGMQSKDQKRKASMRTEDEVRKMTITGIEWPPPGMTKRQIGNFFRGAQQLTEHLLANGGRVSDSEDSDQVSSDDEDEKYLHFKQNKMEHKACSRCGEIGHVASSCATTCVHYEEDHPSDGCPTSRITCFWCEGTDHVPKECQFSFLLTKKMANQPASSDGEKHQGNTNPRQDFVIHASRSSPIARVATAXTPMSALPQGVNAQFQPQQPVDKTEASICVVPLDVPAQQPRNQVQDEEPECKKVIVCYNCSEEGHYSRN

SEQ ID NO: 18853 - protein, 725 aa, Oryza sativa
  Clone ID: TF_OSC4448j.C1.p1.fg
EKLDLLQCTDQEKVSFASHQLHGPASEWWDHFRLNRTTAEPITWLEFTAAFRTTHIPSGVVSLKKKEFRSLTQGSRSVTEYLHKFNRLARYAPENVRNDEERQEKFLEGLNDELSYPLMTGEYHDFQKLVDKAIRQEDKYNRMEQKKRRIAQFKAQQGNSQRPRLTLGPQSMPQGGSSSVVRPQRQIFNNNTGNNIRNQAPRPVAVLTQQQPAKREQGSKPVVCFNCGDLGHYADKCPKPRRVKVVPTQSNSTVPASKARVNHVAAAEAQDAPDVILGTFLVNLVPATVLFDSGATHSFLSMSFAGNHGMEVEDLRRPLMVSTPSNQALSLQRSPSVRIEIQGVPFLANLILLESKDLDVILGMDWLARHKGVIDCANRKVTLTSNDGRVVTVHALFFESLRSRLNQIYFGKDSYSPGVSQCVPRRFTWVSALKGYRVQNRFGTRTTPIHKRPYRMAANELAEVKRQVDDLLQKGYIRPSSSPWGAPVIFVEKKDHTQRMCVDYRALNDVTIKNKYPLPRIDDLFDQLKGATVFSKIDLRSGYHQLRIKEEDIPKPAFTTSKVFMEYLDKFVVVFIDDILIYSRTKEEHEEHLRLALEKLQEHQLYAKFSKCEFWLSEVKFLGHVFSAESAVDPSNVESVTNWKQPKIVSEIRSFLGLAGYYRRFIENFSKIDKPMTRLLQKEVEYKWSEECVTTGNNPTGFPDVRALILVPGGKVHQKLIQFRV

SEQ ID NO: 18854 - protein, 1384 aa, Oryza sativa
  Clone ID: TF_OSC900056j.C1.p5.gm
MDQYRPLVEDLKLLWKKEGVLPVWDEDKQGMLVAASVSLVDIEQPLSFDGVGTTRIEGLVEAAGSAREVDGGERGVGGGSGLGGECRRSVETPVGQVASGVGEEEATTTRKDVTGLAAPGSVEAAASGSARKAAAPGSVEGVAGDPRCLLYPPPPSLSPLVVGNALAPCALAPPSPPSLQPSFAAVPVVAVAREDRRRGRQVVAVLVRPFAVAVDRRSTVAVVKPKSAAASSSLPSPSVPLPPLFWSPRCRSPASVRRPSRRAAAAGGDVTADVIVALSRGDYDPGKVRCSGLCYARGIVTTPFRGTVVMPRYKPEYLFGVEGFVQELSTMSFVIGFGTAPFYAQIPHDRHEEKCRVKVTLNSNSEDIPSVMFEAGGRNYIHACQEVARIAIGELRDRYSDQLADTEYRYHPRQPQGSDRGSYLETEGIENDATTRHLVEMLWAMDESRAETVLAAQDREDRNRGKICKLEDKVDRLERELAALKGEAPPQKARIRLTARKRALFVPRYQLAPKVRVVEKEVAPTLADPPVIIISDDEEEESKRNHSKIEWEATQDDEDEPNEPSIDLRCSEELDNGNGPNNNNNNNNEGNPTLAQVLAQQTQLMNMMMQQLQNQQNQGNNHAPPQNKLAEFLRVRPPIFSSTSNPVEAGDWLHAIEKKLDLLQCTDQEKVSFASHQLHGPASEWWDHFRLNRTTAEPITWLEFTAAFRKTHIPSGVVSLKKKEFRSLTQGSRSVTEYLHEFNRLARYAPEDVRNDEERQEKFLEGLNDELSYPLMTGDYSDFQKLVDKAIRQEDKNNRMEQKKRRIAQFKTQQGNNQKPRLTLGPQTMPHGGSSSVVRPQRQFFNNNAGNNICNQAPRPVAAPTQQQPSKREQGSKPVVCFNCGDLGHYADKCPKPRRVKVVPTQSNSTVPASKARVNHVAAAEAQDAPDVILVREYPDVFPDDLPANELAEVKRQVDDLLQKGYIRPSLSPWGAPVIFVEKKDHTQRMCVDYRALNDVTIKNKYPLPRIDDLFDQLKGATVFSKIDLRSGYHQLRIKEEDIPKTAFTTRYGLFECTVMSFGLTNAPAFFMNLMNKVFMEYLDKFVVVFIDDILIYSRTKEEHEEHLRLALEKLREHQLYAKFSKCEFWLSEVKFLGHVISAGGVAVDPSNVESVTNWKQPKTVSEIRSFLGLAGYYRRFIENFSKIAKPMTRLLQKDVKYKWSEECEQSFQELKNRLISAPILILPDPKKGFQVYCDASKLGLSCVLMQDGKPSFAAVPVVAVAREDRRRGRQVVAVLVRPFAVTVDRRSTVAVVKPKSAAASSSLPSPSVPLPPLFWSPRCRSPASVHRPSRRAAAAGGDVTADVIVALSREPAGPPAALADGWVPPVISLLAPRRRPPVP

SEQ ID NO: 18855 - protein, 1078 aa, Oryza sativa
  Clone ID: TF_OSC900175j.C1.p11.fg
MDEVGGRWTFSRANEGYTSCGPMPRYKPEYLFGVEGFVQELRTMSFVIGFGTAPFYAQIPHDRHEEKCRVKVTLNSNSEDIPSVMFEAGGRNYIHACQEVARIAIGELRDRYSDQLADTEYRYHPCQPQGSDRGSYLETEGIENDATTRHLVEMLWAMDETRAEIVLAAQDREDRNRGKICKLEDKVDCLEKELAALKGEAPPQKARIRLTARKRALFVPRYQLAPKVRVVEKEVTPALADPPMVLTRSNGNGPNNNNNNNNNGENPTLAQVLAQQAQLMNMMMQQLQNQQNQLNQGNNNAPPPQNKLAEFLRCTDQEKVSFASHQLHGPASEWWDHFRLNRTTAEPITWLEFTAAFRKTHIPSGVVSLKKKEFRSLTQGSRSVTEYLHEFNRLARYAPEDVRNDEERQEKFLEGLNDELSYPLMTGEYHDFQKLVDKAIRQEDKYNRMEQKKRRIAQFKAQQGNSQRPRLTLGPQSMPQGGSSSVVRPQRQIFNNNTGNNIRNQAPRPVAVLTQQQPAKREQGSKPVVCFNCGDLGHYADKCPKPRRVKVVPTQSNSTVPASKARVNHVAAAEAQDAPDVILGTFLVNLVPATVLFDSGATHSFLSMSFAGNHGMEVEDLRRPLMVSTPSNQALSLQRSPSVRIEIQGVPFLANLILLESKDLDVILGMDWLARHKGVIDCANRKVTLTSNDGRVVTVHALSSESLRSRLNQITLEEIPIVREYPDVFPDDLPGMPPKRDIEFRIDLVPGTTPIHKRPYRMAANELAEVKRQVDDLLQKGYIRPSSSPWGAPVIFVEKKDHTQRMCVDYRALNDVTIKNKYPLPRIDDLFDQLKGATVFSKIDLRSGYHQLRIKEEDIPKTAFTTRYGLFECTVMSFGLTNAPAFFMNLMNKVFMEYLDKFVVVFIDDILIYSRTKEEHEEHLRLALEKLQEHQLYAKFRGVAVDPSNVESVTNWKQPKIVSEIRSFLGLAGYYRRFIENFSKIDKPMTRLLQKEVEYKWSEECVTTGNNPTGFPDVRALILVPGGKTEPQTKPYPLDMWKYGSALQQRPEDRSLYGRGATIKTMHPEPSLKPFWGF

SEQ ID NO: 18856 - protein, 469 aa, Oryza sativa
  unsure (1)..(469): unsure at all Xaa locations
  Clone ID: TF_OSC1516j.C1.p2.np
MSWHRAGVLLGGSVLPTCPGGSGRRGVGSVLLFMARMGWELCHVFRPYTVVMFNREKGKNVSRYASSNSSFQLNPPLASRELTRAHPWSIPSMLLSSQLPLVGSPDQNQYVFDRAFATQVDELPMPEEDVPFCHDCREQGHYALNCPWVYAKEAPSFGLAGQTSLNQPPRTKSSLQPSVQRREPNGENPLNPGNCSPPSFSYHVGSHTKQAKGQKSKNQKRKAPMRTEEEVRKMTITSTEWPPARITIPTRQRGNAFRGARQLTQHLLIHGGRVSDSEGSDQVSSHDEDESPRHVXEEETESKACPRCGEIGHVASMCITLCTHCEEDHPPGECPTRKVTCFLCEGTNHVPKDCQLSVLLTKTAEIQRTTLRLSHQLVSSNSNIDDIIHSTNAPPAALDSAINHSNNTFSTNHSRHRQPQQXIVVDGRSCFSPRPTPGRAKGNQPQEGDTKQKTVIHFNQQSEGIFLLX

SEQ ID NO: 18857 - protein, 1471 aa, Oryza sativa
  unsure (1)..(1471): unsure at all Xaa locations
  Clone ID: TF_OSC400773j.C1.p40.np
MGENQGIEQVMGKLVDMLAKKLSETSTTINAIVPHAESVQKIELMQNDIKLEGVKNYLSWTRRAMLILKTKGLEGYVIGEVKEPESTSVEWKTXSTTNSLVVAWXLTSLIPAIATTVETISSASEMWKTLTNLYSEEGNMMLMMVAQEKISALKQGERMAEYVAELKCLXFDLDYYDPLGLEHSNYIAKMKKWVERKRVLEFLKGLNPEFKGRRDAMFHQTTLPTLDVAIATMAQEELKKKLFPATSSSSSPTYAIVQGNKTRECFNCGEMGHLMCDCRASHKPSYGRGRNGDRGGARGGRGYESRDNRGRGYEYRGDHKANVVTLEGGSSEPINVDVTNFVHSTSDNSNQAFMSINGSYPNWILDSSATHVTSMRGAFASYKPYPFTRKETIQIADGTSCPLKGEGTVQCTPSITLSSVLYISSFPVNLVSKSFLVDHMDCQVSLDRENCLIQERQTGKKLGIGVRHDGLSYLDRGRTNEAMCLALMASTSEEAKVLFLHCRLGHISFEIISKIFPVEFSRVDKHKLVCDACEYGKHTKMSYVSRGLRSMLPFMLIHSDIWTSPVVSMSGMKYFVTFIDCYSRMTWIYLMRHKDEVLKCFQNFYAYIKNHFNARVXFIRTDNGGEYINCFQNFYAYIKNHFNARVXFIRTDNGGEYINEFSNFLSSEGILHQTSCPDTPPQNGVAEKKNHHHLETARSLMYTMNVPKFLWSVAVMAATYLINRTPSGILGMKTPYEMIFHKNVFVLPPKVFGCTCFVRNNRPSVAKLDFIGYSSGQKGYKCWSPSEQXTFVSTDVTFREFVPFYDEKIDLSSFFVDLDNSTSNHDKQREDKIMGSKEDEQAKEKIVIGQIPVDMNDPIXEQELRKPHEEENLQVYKRRARFPVIQXVVEDNXVVGDASHVQVPLELGGEEDEVREEESNLPIAVRKGVKSNVGKPPRYGFEAQDEGNDENNISNYISYDSLSSTYKAFVASVDLVGILKNWREAKQDPKXHQTMLDDLEALEKNKTWNLVPFPEGKKVVNCKWVYTIKQNLNGKKERXKARLVAKGYSQTYGIDYDETCTTNFDWSLHQLDVKNAFLHGDLQEVVYMDIPPGFSTSQTEGKVLRLKKSLYGLKQSPGEWFDCFQRVMCGMGYKQCNGDHTSFYHHKGCHATIFAVYVDDMIIIGDDSIEIARLKENLSKEFELKNLGQLKYLGIEIARSPRGIVLSQXKYALDLLSDTGMLGCRPASTQIEQNHKLCAELGDPVNKESYQRLVGQVIYLCHTRPDITHAVSVISQYMHNPRSGHMDAVYRILRYLKGSLGKGLWFKNXHLDVEGYCDADQGNCLDDRRSISGYCVFVRGNLVSWRSKKQLVVSRSTAEAEYKSMSISLSELLWVRDLLTELKLMINIPMKLWCDSKSAINIANNSVQHDRTKHVETDRFFIKERIDDKTLKLNFVNSREQVVDCLTKALGVKXCMSSCSEMGMIDIYRPS

SEQ ID NO: 18858 - protein, 1899 aa, Oryza sativa
  unsure (1)..(1899): unsure at all Xaa locations
  Clone ID: TF_OSC32500j.C1.p1.np
FQPNSRDSIREKIDDVVIDYNLFSSWFGMVYSWFGDRTVXPMPRFKPEYLFGVEGFVQELRTMSFTIGFGTAPLYAQIPHDRDKEKCCVKVTLNSDREDLPSVIFEAGGGSYPHACQEVARIAIGELDRYNDLLADTEYRYHPHQPQGRDRASYVDPEGIENDASTRHLVEMLWAMDESHAEVVSATQAREDRNHGKIYKLEDKVDRLEKELTELKGEAPPQKARVRLTARKRALFIPRYQLVPKIRVVAREAVPIPVDPRVVNLSDDEKEDSERTHSKVEWGVTXDDEDEPNELSILRCQEDLDNGNGPNNNNNNNKXEIPTLAQVLAQQAQLMNMMMQQLQNQQNXGNNHAPPQNKLAEFLRVRPPTFSSTTNPVEAGDWLHVIEKKLDLLQGTNQEKVSFASHQLHGPASKWWDHFRLNRATAEPITWLEFTAAFRKTHVPSRVVSLKKKEFRALTQGSRSVTKYMHEFNRLARYAPEDVCTDEERQEKFLEGLNDELSYPLMTRDYSDFQKLVDKAIRQEDKYNRMEQKKRRIAHFKAQQRNSQRSRLTMGPQAVSQGGSSSVVRPQRQFFNNNAGNNNRNQAPRPVATPVQHQPVKREQGNKPGVCFNCGEAGHYSDKCPKPRRVKIVPVQNNSNAPTSKARVNHVAAAEAQGAPDVILGMFPVNSVPATVLFDSGATHSFLSMSFAGNHGMEMEDLRRPLMVSPSNQGLSSQRSPSVRIEIQGVPFLANFILLESKDLDVILGMDWLARYKGVIDCDNSKVTLTSNDGQVVTVHALPTEPLRSSLNQITLEEIPIVRDYPDVFPDDLPGMPPKRDIXFRIDLVPGTTPIHKRPYRMAANELAEVKRQVDDLLQKGYIRPSSSPWGAPVIFVEKKDHTQRMCVDYRALNNVTIKNKYPMPRIDDLFDQLKGATVFSKIDLRSGYHQLRIKEYGLFECIVMSFRYGLFECIVMSFRLTNAPAFFMNLMNKVFMEYLDKFVVVFIDDILIYSRTKEEHEEHLRLALEKLREHQLFAKFSKYEFWLSEVKFLGHVISARGVAVDPSNVESVTNWKQPNTVSEIRSFLGLAGYYRRFIENFSKIAKHMTRLLQKDVKYKWSKECEQSFQELKNRLISAPILILPDPKMGFQVYCDASKLGLGCVLMXDGKVVAYASRQLCPHEKNYPTHDLELAAVVHALKIWRHYLFGTHTEEFERLNLGIVSRGFVAALEAKSTLIDXXLVREAQTNDPDIQEIKKNMRRGKAIGYLEDEQGTIWLGERICVPDNKELKGTVLKEAHDTLYSIHPGSTKMYQDLMEKFWWASRKREIAEYVAVCDVCQRVKAEHQKPAGLLQPLKIPEWKWEEIGMDFITGLPRMSSGHDSIWVIVDRLTKVAHCIPVRTTYSGNRLAELYMARIVCLHGVPKKIVSDQASQFTSKFWKKLLEEMASKLNFSTSYHPQTDGQTERVNQILEDMLRACVLDFDGSCYKNLPYAEFSYNNSYQASLQMAPYEALYGRKCRTPLLWDQTGERQVYGTDILREAEEKVKIIQERLRIAQCRHKRYADNRRRDLSFEKGDHVYLRVTPLRGVYRFHTKGKLAPRFVGPYKIVSRRGEVAYQLELPQSLAGVHNVFHVSQLKXCLRVPTEEANPEQIEIQEDLTYVEKPIRILETDERRTRNRVIRFCKVQWSNHSEEEATWEREDELNVGFDLDSDLIFPSNPKPSIAAVGRCGPSRRLLATIKGSPGRPLFAATFALARRRLXRRFRVSPCAAVVAASAVAREGRHRVRQVVAVAREGRHRVRQVVAVLVPSSVSAKGHRSTAVAVDPNVFAASTSPPSPSTRRCCPFAPPSPSTRRCCPFAPPRRRSPASMRCRAAVGNDVIIDVSTTSADFALLCLDSDVPGESGFEKTEEFQGQQGK

SEQ ID NO: 18859 - protein, 881 aa, Oryza sativa
  Clone ID: TF_OSC13800j.C1.p1.fg
MEAEDWLRIIEKKLTLVRVRETDKVIFAVNQLEGPASDWWDTYKEARENDAGEPTWEEFTAAFRENFVPAAVMRMKKNEFRWLRQGNTTVQEYLNKFTQLARYAIGDLADEEEKIDKFIEGLNDELRGPMIGQDHESFQSLINKVVRLENDQRTVEHNRKRRLAMSRLPQIVPQRLKGATSSGWKPPIVATNRPAAPSNFNRPVAIQNRTPTPTLAAPGAKMNVNCFNCGGYGHYANNCPHPRKTPVRTGTNAMTVRGTTTPVTGRGLFKTPQSNRTATGLGRGQVNHVRAEEAQEDQGILMGMFSINSTPVKVLFDSGASHSFISLKASQKHNLTLVGLRKPMIVHSPGGEITVSHACIDVPIRLRDVVFPSNLMILIPQTLDVILGMDWLTKNRGVIDCGRREVTLTTPWGSDMRATMDQDPRLTERAGGIFTMLPLKGMPVVQRFPDVFPEDLPGMPPDRDIKFIIDLIPGTAPISKRPYRMPVNELEELKKQIRELQEKGFVRPSSSPWGAPVLFVKKKDGSMRMCVDYRSLNEVTIKNKYLLPRIDDLFDQLKGAKVFSKIDIRSGYHQLKIRTKDIPKTAFSTHYGLYEFTVMSFGLTNAPAYFMNLMNKINTLDIQPLLRTQIEEAQKDNEEIRELKERLAAGRAKEFSIDEKDVLWYKKRIYVPEQGGLRGLILKEAHESAYSLHPGSTKMYQDLKEGYWWPNMKRDVAEYVALCDVCQKVKAEHQRPAGLLQPLRIPEWKWDEIVCLHGIPKRIISDRGTQFTSHFWEKVHEALGSYLAFSTAYHPQTDGQTERTNQVLEDMLRACALDFSKDWERCLPYAEFSYNNSFQASLKMSPNEALFGRRCRTPLMWSETGERAVFGPDIINEAEEK

SEQ ID NO: 18860 - protein, 1333 aa, Oryza sativa
  unsure (1)..(1333): unsure at all Xaa locations
  Clone ID: TF_OSC15177j.C1.p4.np
MRVNLQAQGLWTAIDPCYAEYREDRAALSAILQAVPREMLRGLAKHDTAKAAWDAIKTMRVGVDRVSEAREQGFRRQFEAMRFKDGETPEEFAMRLTAIVADMRNMGGVMEDEHINKKLLRVVPKKYKPVAISLEQLLDVKTMALEELIEWLSTVDSYSDDEEASDGGKLYLTKEQWQAGVKQREXEGSGSSNKGRAGSGNQNRRGKAGDSPKGKEMATSGHGCRDISKVKCFNCDEYGHYSKQCRMPRRQCRGEANANLVQAEEEPTLLMAHVMGVSLAGEAAVGRTPCVQEVHLTEKKVVLDHEDGRKEEKTGEWFLDTGATNHLTGARSAFAELDTGVVGTVKFSDGSVVDIXGRGTVVFQSKNGDHRSLEAVYYIPKLRKNIVSVGRLDARGYDAHIWHGVFTLRDPEGMQLAKVNRDSSYLYVLKLNLATLICMAASGSELAWRWHARFGHLNFLALRRLAKGGVVRRIPQIDHIDQLCDGYLAGKQHRTPFPEEAQYRAQTALELVHGDLCGPITPATTGGKKYFLLLVDDMSHHMWIRLLSAKHEASAAIKGVEKDSNRKLMALRTDRGGEFTSIEFMEYYADTGVKRXITAPYSRQQNSVVERRNQTVVAAARSMLKAANMLAYFWGEAVVAAVYVLSKSPMKSLDGVTPYEAWYGRRPTVEHLRVFECVGYVKTAKPNLRKLDDRSTRMVFIGYEQGSKAYKMYDFVVRRVCVSRDVVFYETTFWDWGSNTDEEGDQEEFTVENFTIPVQGSETHAQDAAATPTMLATSPTSSTGTATTLPSGVEFCSPPTDASEGTDEGPRSYRTVVNTLATLTPILDFNYSDQCLMAAEEPASFLEAEQESCWRKAMLEEMESIEGNNTWTLYDLPSSHRATGLKWVYKIKRDAKDVIVKYKARLVAKGYVHQQGVDFDEVFAPVTRMETVRLLIATAAHQGWEVHQMDVKLAFLNRELEEDAXVVQPPGFVVDGKEDKVLKLKKALYGLKQAPRACYAKLDSSLVSLNFVKSGVKSAVYTRGEKNSXLVVGVDLGLLSYYLGDLGLLSYYLGMEVKHAKEGITVSQGAYAAKILDKAGMRDCNPCQTPMDARLKLRKEGGECMEETQFRSIIGSLRYLVNTRPHLSYSVGYVSRFMEKPTSEHWAAMKHILRYVAGTLNLGVEFRKKQQQVPQLNGYSDSDMAGDIDDRKSTTGVLFKLGDSLISWQSQKQKVVAISSCEAEYIAAATAAVQGVWLARPIGELEGQEPGCALIKVDNKSAISLLKNPVLHDRSKHIDTKFYFIWDCVDQKRVEVEYIRLEEQHADILTKPLGKIRFLELRGKLGLVPVXCF

SEQ ID NO: 18861 - protein, 896 aa, Oryza sativa
  Clone ID: TF_OSC16862j.C1.p1.gm
YLHEFNRLARYAPEDVRTDAEKQEKFLFGLDDELTNQLISGVYEDFEKLVDKAIRQEEQRNKMDRKRKAAQISFPQGNNQKPRFMTGQLGGPSTLIVCQHRPYHPSNFDNDYNGGSHNNSKQHNHNSTPPPLMAPAQSDPPAVSAQSEQPKKRAVGKPGPCFNCGKHGHFASKCPKLNRTGPRFIQAHANHVSAVEAQAAPEVVLGTFPVNSYPATVLFDSGASHSFISKRFAGTHGLSVVELKIPMQVHTPGNDMRTAHYCPSVTIEIRRSPFLSNLILLESKDLDVILGMDWLTRNKGVIDCASRTITLTNDKGEKITFRSPASQKSVASLNQAAIEGQTETVEKSPRKLEDIPIVQEYPEVFPEDLTTMPPKREIEFRIDLAPGTTPIYKRPYRMAANELAEVKKQVDEQLQKGYIRPSTSPWGAPVIFVEKKDKTKRMCVDYRALNEVTIKNKYPLPRIDDLFDQLKGAKVFSKIDLRSGYHQLRIREEDIPKTAFTTRYGLFECTVMSFGLTNAPAFFMNLMNKVFMEFLDKFVVVFIDDILIYSKSEEEHEQHLRLVLEKLKEHQLYAKFSKCDFWLSEVKFLGHVISAQGVAVDPSNVESVTKWTPPKTVSQIRSFLGLAGYYRRFIENFSKIARPMTQLLKKDKKFKWSAECNQSFEELKKKLVSAPVLILPDQTKDFQLRPHETNYPTHDLELAAVVHALKIWRHYLIGNRCEVYTDHKSLKYIFTQPDLNLRQRRWLELIKDYDMGIHYHPGKANVVADALSRKSYCNAVCTEGMCDKLQQDLEHLNLGIVEHGYVAALEARPTLVDQVRAAQVNDPEIAELKKNMRVGKARDFHEDENGTIWLGERLCVPDDKELKDLILTEAHQTQYSIHPGSTKMYQDLKEKF

SEQ ID NO: 18862 - protein, 1408 aa, Oryza sativa
  Clone ID: TF_OSC18686j.C1.p1.fg
MVKTRNDPRDSNDASGSEEQTDGAHVSGASGSRSSPPPENPTVTQMMTMMMQQMQQHYHQMLQQAQQNQQFGPPPSHVSKLLDFLRIQPPTFSSTTNPMEANDWLRAIEKKLNLLQCNDQEKVAFATHQLQGPASAWWDNYVATRLDATEKREFRALQQGTMSVTEYLHEFNRLARYAPEDVRTDAEKQEKFLFGLDDELTNQLISGVYEDFEKLVDKAIRQEEQRNKMDRKRKAAQISFPQGNNQKPRFMTGQLGGPSTLIVCQHRPYHPSNFDNDYNGGSHNNSKQHNHNSTPPPLMAPAQSDPPAVSAQSEQPKKRAVGKPGPCFNCGKHGHFASKCPKLNRTGPRFIQAHANHVSAVEAQAAPEVVLGTFPVNSYPATVLFDSGASHSFISKRFAGTHGLSVVELKIPMQVHTPGNDMRTAHYCPSVTIEIRRSPFLSNLILLESKDLDVILGMDWLTRNKGVIDCASRTITLTNDKGEKITFRSPASQKSVASLNQAAIEGQTETVEKSPRKLEDIPIVQEYPEVFPEDLTTMPPKREIEFRIDLAPGTTPIYKRPYRMAANELAEVKKQVDEQLQKGYIRPSTSPWGAPVIFVEKKDKTKRMCVDYRALNEVTIKNKYPLPRIDDLFDQLKGAKVFSKIDLRSGYHQLRIREEDIPKTAFTTRYGLFECTVMSFGLTNAPAFFMNLMNKVFMEFLDKFVVVFIDDILIYSKSEEEHEQHLRLVLEKLKEHQLYAKFSKCDFWLSEVKFLGHVISAQGVAVDPSNVESVTKWTPPKTVSQIRSFLGLAGYYRRFIENFSKIARPMTQLLKKDKKFKWSAECNQSFEELKKKLVSAPVLILPDQTKDFQVYCDASRQGLGCVLMQEGRVVAYASRQLRPHETNYPTHDLELAAVVHALKIWRHYLIGNRCEVYTDHKSLKYIFTQPDLNLRQRRWLELIKDYDMGIHYHPGKANVVADALSRKSYCNAVCTEGMCDKLQQDLEHLNLGIVEHGYVAALEARPTLVDQVRAAQVNDPEIAELKKNMRVGKARDFHEDENGTIWLGERLCVPDDKELKDLILTEAHQTQYSIHPGSTKMYQDLKEKFWWVSMRREIAEFVALCDVCQRVKAEHQRPAGLLQPLQIPEWKWEEIGMDFITGLPRTSSGHDSIWVVVDRLTKVAHFIPVHTTYTGKRLAELYLSRIMCLHGVPKKIVSDRGSQFTSKFWQKLQEELGTRLNFSTAYHPQTDAISPVCKWYRLKHCTDESAAHHFSGIKQGIMCTLRVTPLRGVHRFQTKGKLAPRFVRPYRILERRGEVAYQLELPPNMVGIHDVFHVSQLKKCLRVPEEQASSEHIDIQEDLTYVEKPVRILETSERRTRSKVIRFCKVQWSHHSEEEATWEREDELKAAHPHLFASSSESRGRDSV

SEQ ID NO: 18863 - protein, 1516 aa, Oryza sativa
  Clone ID: TF_OSC400481j.C1.p14.fg
MVKTRNDPRDSNDASGSEEQTDEAHTSGAPGSSSSPPPENPTVTQMMTMMMQQMQQHYHQMLQQAQQNQRFGPPPSHLSKLLDFLRIQPPTFSSTTNPMEANDWLRAIEKKLNLLQCNDREKVAFATHQLQGPASAWWDNYVATRLGATEVTWAEFCQNFRKAQIPKGIMAQQKREFRALQQGTRTITEYLHEFNRLARYAPEDVRTDAEKQEKFLFGLDDELTNQLISGVYEDFEKLVDKAIRQEEQRNKMDRKRKAAQISFPQGNDQKPRFMTGQLGGPSTLIVCQHRPYHPSNFNNDYNGGSHNNSKQHNHNSTPPPLMAPAQSDPPAVSVQSEQPKKGAVGKPGPCFNCGKHGHFASKCPKLNRTRPRFIQARAHDVSAKEAQAAPEVVLGTFPVNSYPATVLFDSGASHSFISKRFAGTHGLSVVELKIPMQVHTPGNDMRTAHYCPSVTIEIKRSPFLSNLILLESKDLDVILGMDWLTRNKGVIDCASRTITLTNDKGEKITFRSPASQKSVASLNQAAIEGQTETVEKSPRKLEDIPIVQEYPEVFPEDLTTMPPKREIEFRIDLAPGTAPIYKRPYRMAANELAEVKKQVDEQLQKGYIRPSTSPWGAPVIFVEKKDKTKRMCVDYRALNEVTIRNKYSLPRIDDLFDQLKGAKVFSKIDLRSGYHQLRIREEDIPKTAFTTRYGLFECTVMSFGLTNAPAFFMNLMNKVFMEFLDKFVVVFIDDILIYSKSEEEHEQHLRLVLEKLKEHQLYAKFSKCDFWLSEVKFLGHIISAQGVAVDPSNVESVTKWTPPKTVSQIRSFLGLAGYYRRFIENFSKIARPMTQLLKKDEKFKWSAECNQSFEELKKKLVSAPVLILPDQTKDFQVYCDASRQGLGCVLMQEGRVAAYASRQLRPHETNYPTHDLELAAVVHALKIWRHYLIGNRCEVYTDHKSLKYIFTQPNLNLRQRRWLELIKDYDMGIHYHPGKANVVADALSRKSYCNALCTEDMCGKLQQDLEHLNLGIVEHGYVAALEARPTLVDQVRAAQVNDPEIAELKKNMRVGKARDFHEDEHGTIWLGERLCVPDDKELKDLILTEAHQTQYSIHPGSTKMYQDLKEKFWWASMRREIAEFVALCDVCQRVKAEHQRPAGLLQPLQIPEWKWEEIGMDFITGLPRTSSGHDSIWVVVDRLTKVAHFIPVHTTYTGKRLAELYLARIMCLHGVPKKIVSDRGSQFTSKFWQKLQEELGTRLNFSTAYHPQTDGQTERVNQILEDMLRACALDFGGAWDKSLPYAEFSYNNSYQSSLQMAPFEALYGRKCRTPLFWDQTGERQLFGTEVLTEAEEKVRTVRERLRIAQSRQKSYADNRRRELTFEAGDYVYLRVTPLRGVHRFQTKGKLAPRFVGPYRILERRGEVAYQLELPSNMVGIHDVFHVSQLKKCLRVPEEQASSEHIDIQEDLTYVEKPIRILETSERRTRNKVIRFCKVQWSHHSEEEATWEREDELKAAHPHLFASPSESRGRDSV

SEQ ID NO: 18864 - protein, 1537 aa, Oryza sativa
  Clone ID: TF_OSC400738j.C1.p7.fg
MEAEDWLRIIEKKLTLVRVRETDKVIFAVNQLEGPASDWWDTYKEARENDAGEPTWEEFTAAFRENFVPAAVMRMKKNEFRWLRQGNTTVQEYLNKFTQLARYAIGDLADEEEKIDKFIEGLNDELRGPMIGQDHESFQSLINKVVRLENDQRTVEHNRKRRLAMSRLPQIVPQRLKGATSSGWKPPIVATNRPAAPSNFNRPVAIQNRTPTPTLAAPGAKMNVNCFNCGGYGHYANNCPHPRKTPVRTGTNAMTVRGTTTPVTGRGLFKTPQSNRTATGLGRGQVNHVRAEEAQEDQGILMGMFSINSTPVKVLFDSGASHSFISLKASQKHNLTLVGLRKPMIVHSPGGEITVSHACIDVPIRLRDVVFPSNLMILIPQTLDVILGMDWLTKNRGVIDCGRREVTLTTPWGSDMRATMDQDPRLTERAGGIFTMLPLKGMPVVQRFPDVFPEDLPGMPPDRDIKFIIDLIPGTAPISKRPYRMPVNELEELKKQIRELQEKGFVRPSSSPWGAPVLFVKKKDGSMRMCVDYRSLNEVTIKNKYLLPRFDDLFDQLKGAKVFSKIDIRSGYHQLKIRTKDIPKTAFSTHYGLYEFTVMSFGLTNAPAYFMNLMNKINTLDIQPLLRTQIEEAQKDNEEIRELKERLAAGRAKEFSIDEKDVLWYKKRIYVPEQGGLRGLILKEAHESAYSLHPGSTKMYQDLKEGYWWPNMKRDVAEYVALCDVCQKVKAEHQRPAGLLQPLRIPEWKWDEIGMDFIVGLPKTATGYDSIWVIVDRLTKTARFIPVKTNYSSAKLAELYMTRIVCLHGIPKRIISDRGTQFTSHFWEKVHEALGSYLAFSTAYHPQTDGQTERTNQVLEDMLRACALDFSKDWERCLPYAEFSYNNSFQASLKMSPNEALFGRRCRTPLMWSETGERAVFGPDIINEAEEKVRLIRDRLKVAQSRQKSYADTRRRNLEFKEGDYVYLKVSPMRGTKRFRVKGKLAPRYVGPFQITARRGEVAYQLQLPENIADVHPVFHVSQLKKCLRVPEEQAPLEEIHISNDLTYPEHPIRILDEAEKRTRSKVWRMNKEAVRSEIDSIMSNGTWEVVERLYGSKPVGCKWVFKKKLRPEVTIEKYKARLVAKGYTQKEGEDFFDTYSSVAHLTTIRVLLALAASHALLVHQMDVKTAFLNGELEEEIYMDQPNGYALEGREGMVCKLLKSLYGLKQAPKQWHEKFDTTLTSAGFVVNETDKCVYYRYGGGEGVILCLYVDDILIFRTSLNVIEEVKDFLSKSFEMKDLGEADVILNIKLLRGDEGGITLVQSHYVDKVLSRFGHNDCKPAPTPYDPSVLLRKNRRIARDQLRYSQIIGSLMYLASATRPDISFAVSKLSRFVSNLVDDHWQALERVMRYLKGTMSYGIHYTGYLKVLEGYSDSNWISDADEIKATSGYVFTLGGGTVSWKSCKQTILTRSTMEAELTGLDTATVEAEWLRELLMDLPVVEKPVPAILTNCDNQTVIIKVNSSKDNVKSSRHIKIRLKSVRKQKNSGVIALDYV

SEQ ID NO: 18865 - protein, 1399 aa, Oryza sativa
  unsure (1)..(1399): unsure at all Xaa locations
  Clone ID: TF_OSC401018j.C1.p41.np
MSYTPPGRRGGGGGGGSDNGCSLPLVDAGHTARLLILSRTNYIDXALLMRVNLQAQGLWTAIDPCYAEYREDRAALSAILQAVPREMLRGLAKHDTAKAAWDAIKTMRVGVDRVSEAREQGFRRQFEAMRFKDGETPEEFAMRLTAIVADMRNMGGVMEDEHINKKLLRVVPKKYKPVAISLEQLLDVKTMALEELIEWLSTVDSYSDDEEASDGGKLYLTKEQWQAGVKQREXEGSGSSNKGRAGSGNQNRRGKAGDSPKGKEMATSGHGCRDISKVKCFNCDEYGHYSKQCRMPRRQCRGEANANLVQAEEEPTLLMAHVMGVSLAGEAAVGRTPCVQEVHLTEKKVVLDHEDGRKEEKTGEWFLDTGATNHLTGARSAFAELDTGVVGTVKFSDGSVVDIXGRGTVVFQSKNGDHRSLEAVYYIPKLRKNIVSVGRLDARGYDAHIWHGVFTLRDPEGMQLAKVNRDSSYLYVLKLNLATLICMAASGSELAWRWHARFGHLNFLALRRLAKGGVVRRIPQIDHIDQLCDGYLAGKQHRTPFPEEAQYRAQTALELVHGDLCGPITPATTGGKKYFLLLVDDMSHHMWIRLLSAKHEASAAIKGVEKDSNRKLMALRTDRGGEFTSIEFMEYYADTGVKRXITAPYSRQQNSVVERRNQTVVAAARSMLKAANMLAYFWGEAVVAAVYVLSKSPMKSLDGVTPYEAWYGRRPTVEHLRVFECVGYVKTAKPNLRKLDDRSTRMVFIGYEQGSKAYKMYDFVVRRVCVSRDVVFYETTFWDWGSNTDEEGDQEEFTVENFTIPVQGSETHAQDAAATPTMLATSPTSSGTATTLPSGVEFCSPPTDASEGTDEGPRSYRTVVNTLATLTPILDFNYSDQCLMAAEEPASFLEAEQESCWRKAMLEEMESIEGNNTWTLYDLPSSHRATGLKWVYKIKRDAKDVIVKYKARLVAKGYVHQQGVDFDEVFAPVTRMETVRLLIATAAHQGWEVHQMDVKLAFLNRELEEDAXVVQPPGFVVDGKEDKVLKLKKALYGLKQAPRACYAKLDSSLVSLNFVKSGVKSAVYTRGEKNSXLVVGVYVDDLITTGASLMEINKFKEQMQALFKMSDLGLLSYYLGMEVKHAKEGITVSQGAYAAKILDKAGMRDCNPCQTPMDARLKLRKEGGECMEETQFRSIIGSLRYLVNTRPHLSYSVGYVSRFMEKPTSEHWAAMKHILRYVAGTLNLGVEFRKKQQQVPQLNGYSDSDMAGDIDDRKSTTGVLFKLGDSLISWQSQKQKVVAISSCEAEYIAAATAAVQGVWLARPIGELEGQEPGCALIKVDNKSAISLLKNPVLHDRSKHIDTKFYFIWDCVDQKRVEVEYIRLEEQHADILTKPLGKIRFLELRGKLGLVPVXCF

SEQ ID NO: 18866 - protein, 300 aa, Oryza sativa
  unsure (1)..(300): unsure at all Xaa locations
  Clone ID: TF_OSC401101j.C1.p2.np
CHCSGSGSGSALGGHLVVQQVKEVGLTLCYPMLEENNYGVWAVKMKIFMRAQGVWAAVEGNTADEKMDQMALTAIVQAMPEAVVMTIFEKETAKAAXDALKLMNMGEESIKKAXVQTLKSELDGMKMGNSEKINDFALKVTTIMNEIHSLGVKVEETTVVEKLLHSVPEKSXSLISTIEQWGDVSEMMVTKTIGHLRAFEDSSQGLRRDKEGEQQLFAAYAEPRLMRAEWEAKVAKERRSGGGSGSSSGGDKRKYHGKFDKAKVHCYNCQEYGHFADECPKPKKMAFLATVDADDEPTLV

SEQ ID NO: 18867 - protein, 1309 aa, Oryza sativa
  Clone ID: TF_OSC900319j.C1.p16.fg
MVKTRNDLRDSNGASGSEEQTDEAHTSGAPGSSSSPPPENPTVTQMMTMMMQQMQQHYHQMLQQVQQNQQFGPPPSHVSKLLDFLRIQPPTFSSTTNPMEANDWLRAIEKKLNLLQCNDQEKVAFATHQLQGRQLDRKRKTAQISFPQGNNQKPRFMTGQLGGPSTLIVCQHRPYRPSNFNNYYNGGSHNNSKQHNHNSTPPPLMAPAQSDPPAVSAQSEQPKKGAVGKPGPCFNCGKHGHFASKCPKLNRTGPRFIQAHANHVSAMEAQAAPEVVLGTFPVNSYPATVLFDSGASHSFISKRFAGTHGLSVVELKIPMQVHTPGNDMRTAHYCPSVTIEIRRSPFLSNLILLESKDLDVVLGMDWLTRNKGVIDCASRTITLTNDKGEKITFRSPASQKSVASLNQAAIEGQTETVEKSPRKLEDIPIVQEYPEVFPEDLTTMPPKREIEFRIDLAPGTAPIYKRPYRMAANELAEVKKQVDEQLQKGYIRPSTSPWGAPVIFVEKKDKTKRMCVDYRALNEVTIKNKYPLPRIDDLFDQLKGAKVFSKIDLRSGYHQLRIREEDIPKTAFTTRYGLFECTVMSFGLTNAPAFFMNLMNKVFMEFLDKFVVVFIDDILIYSKSEEQHEQHLRLVLEKLKEHQLYAKFSKCDFWLSEVKFLGHVISAQGVAVDPSNVESVTKWTPPKTVSQIRSFLGLAGYYRRFIENFSKIAKPMTQLLKKDEKFKWSAECNQSFEELKKKLVSAPVLILPDQTKDFQVYCDASRQGLGCKANVVADALSRKSYCNALCTEDMCGKLQQDLEHLNLGIVEHGYVAALEARPTLVDQVRAAQVNDPEIAELKKNMRVGKARDFHEDEHGTIWLGERLCVPDDKELKDLILTEAHQTQYSIHPGSTKMYQDLKEKFWWVSMRKEIAEFVALCDVCQRVKAEHQRPAGLLQPLQIPEWKWEEIGMDFITGLPRTSSGHDSIWVVMDRLTKVAHFIPVHTTYTGKRLAELYLARIMCLHGVPKKIVSDRGSQFTSKFWQKLQEELGTRLNFSTAYHPQTDGQTERVNQILEDMLRACALDFGGAWDKSLPYAEFSYNNSYQSSLQMAPFEALYGRKCRTPLFWNQTGERQLFGTEVLTEAEEKVRTVRERLRIAQSRQKSYADNRRRELTFEAGDYVYLRVTPLRGVHRFQTKGKLAPRFVGPYRILERRGEVAYQLELPSNMVGIHDVFHVSQLKKCLRVPEEQASSEHIDIQEDLTYVEKPIRILETSERRTRNKVIRFCKVQWSHHSEEEATWEREDELKAAHPHLFANSSESRGQDSV

SEQ ID NO: 18868 - protein, 1424 aa, Oryza sativa
  Clone ID: TF_OSC900325j.C1.p4.fg
MVKTRNDLRNSNDASGSEEQTDEAHTSGAPGSSSSPPPENPTVTQMMTMMMQQMQQHYHQMLQQAQQNQQFGPPPSHANDWLRAIEKKLNLLQCNDQEKVAFATHQLQGPASAWWDNYVVTRPDATKVTWAEFCQNFRKAQIPEGIMAQQKREFRALQQGTRTVIEYLHEFNRLARYAPEDVRSDTEKQEKFLFGLDDELTNQLISGVYEDFEKLVDKAIRQEEQRNKMDRKRKAAQISFPQGNNQKPRFMMGQLGGPSTLIVCQHRPYHPSNFNNDYNGGSHNNRKQHNHNSTPPPLMAPAQSDPPAVSAQSEQPKKGAVGKPGPCFNCGKHGHFASKCPKLNRTRPRFIQARANHVSAEEAQAAPEVVLGTFPMNSYPATVLFDSGASHSFISKRFAGTHGLSVVELKIPMQVHTPGNDMRTAHYCPSVTIEIKRSPFLSNLILLESKDLDVILGMDWLTRNKGVIDCASRTITLTNDKGEKITFRSPASQKPVASLNQAAIEGQTETVEKSPRKLEDIPIVQEYPEVFPEDLTTMPPKREIEFRIDLVPGTAPIYKRPYRMAANELADVKKQVDEQLQKGYIRPSTSPWGAPVIFVEKKDRTKRMCVDYRALNEVTIKNKYPLPRIDDLFDQLKGAKVFSKIDLRSGYHQLRIREEDIPKTAFTTRYGLFECTVMSFGLTNAPAFFMNLMNKVFMEFLDKFVVVFIDDILIYSKSEKQHEQHLRLVLEKLKEHQLYAKFSKCDFWLSEVKFLGHIISAQGVAVDPSNVESVTKWTPPKTVSQIRSFLGLAGYYRRFIENFSKIARPMTQLLKKDEKFKWSAECNQSFEELKNRLVSAPVLILPDQTKDFQVYCDASRQGLGCVLMQEGRVVAYASRQLRPHETNYPTHDLELAAVVHALKIWRHYLIGNRCEVYTDHKSLKYIFTQPDLNLRQRRWLELIKDYDMGIHYHPGKANVVADALSRKSCCNALCPEDMCGKLQQDLEHLNLGIVEHGYVAALEARPTLVDQVRAAQENDPEIAELKKNMRVGKARDFHEDEHGTIWLGERLCVPDDKELKDLILTEAHQTQYSIHPSSTKMYQDLKEKFWWASMRREIAEFVALCDVCQRVKAEHQRPAGLLQPLQIPEWKWEEIGMDFITGLPRTSSGHDSIWVVVDRLTKVAHFIPVHTTYTGKRLAELYLARIMCLHGVPKKIVSDRGSQFTSKFWQKLQEELGTRLNFSTAYHPQTDGQTERVNQILEDMLRACALDFGGAWDKSLPYAEFSYNNSYQSSLQMAPFEALYGRKCRTPLFWDQTGERQLFGTEVLTEAEEKVRTVRERLRIAQSRQKSYADNRRRELTFEAGDYVYLRVTPLRGVHRFQTKGKLAPRFVGPYRILERRGEVAYQLELPSNMVGIHDVFHVSQLKKCLRVPEEQASSEHIDI

SEQ ID NO: 18869 - protein, 1585 aa, Oryza sativa
  unsure (1)..(1585): unsure at all Xaa locations
  Clone ID: TF_OSC900398j.C1.p13.np
PGHRQVGPTCRPLLPPQPTAPPPPKPPPTPPVSPPAAHSARNPKPTSPPTFPAPPASRGPANGGGDLKFPMVKTRNDPRDSNDASGSEEQTDGAHVSGASGSRSSPPPENPTVTQMMTMMMQQMQQHYHQMLQQAQQNQQFGPPPSQSKLLDFLRIQPPTFSSTTNPMEANDWLRAIEKKLNLLQCNDQEKVAFATHQLQGPASAWWDNYVATRLDATEVTWAEFCQSFRKAQIPEGIMAQXKREFRALQQGTMSVTEYLHEFNRLARYAPEDVRTDAEKQEKFLFGLDDELTNQLISGVYEDFEKLVDKAIRQEEQRNKMDRKRKAAQISFPQGNNQKPRFMTGQLGGPSTLIVCQHRPYHPSNFDNDYNGGSHNNSKQHNHNSTPPPLMAPAQSDPPAVSAQSEQPKKRAVGKPGPCFNCGKHGHFASKCPKLNRTGPRFIQAHANHVSAVEAQAAPEVVLGTFPVNSYPATVLFDSGASHSFISKRFAGTHGLSVVELKIPMQVHTPGNDMRTAHYCPSVTIEIRRSPFLSNLILLESKDLDVILGMDWLTRNKGVIDCASRTITLTNDKGEKITFRSPASQKSVASLNQAAIEGQTETVEKSPRKLEDIPIVQEYPEVFPEDLTTMPPKREIEFRIDLAPGTTPIYKRPYRMAANELAEVKKQVDEQLQKGYIRPSTSPWGAPVIFVEKKDKTKRMCVDYRALNEVTIKNKYPLPRIDDLFDQLKGAKVFSKIDLRSGYHQLRIREEDIPKTAFTTRYGLFECTVMSFGLTNAPAFFMNLMNKVFMEFLDKFVVVFIDDILIYSKSEEEHEQHLRLVLEKLKEHQLYAKFSKCDFWLSEVKFLGHVISAQGVAVDPSNVESVTKWTPPKTVSQIRSFLGLAGYYRRFIENFSKIARPMTQLLKKDKKFKWSAECNQSFEELKKKLVSAPVLILPDQTKDFQVYCDASRQGLGCVLMQEGRVVAYASRQLRPHETNYPTHDLELAAVVHALKIWRHYLIGNRCEVYTDHKSLKYIFTQPDLNLRQRRWLELIKDYDMGIHYHPGKANVVADALSRKSYCNAVCTEGMCDKLQQDLEHLNLGIVEHGYVAALEARPTLVDQVRAAQVNDPEIAELKKNMRVGKARDFHEDENGTIWLGERLCVPDDKELKDLILTEAHQTQYSIHPGSTKMYQDLKEKFWWVSMRREIAEFVALCDVCQRVKAEHQRPAGLLQPLQIPEWKWEEIGMDFITGLPRTSSGHDSIWVVVDRLTKVAHFIPVHTTYTGKRLAELYLSRIMCLHGVPKKIVSDRGSQFTSKFWQKLQEELGTRLNFSTAYHPQTDGQTERVNQILXDMLRACALDFGGAWDKSLPYAEFSYNNSYQSSLQMVPFEALYGRKCRTPLFWDQTGERQLFGTEVLTEAEEKVRTVRERLRIAQSRQKSYADNRRRELTFEAGDYVYLRVTPLRGVHRFQTKGKLAPRFVRPYRILERRGEVAYQLELPPNMVGIHDVFHVSQLKKCLRVPEEQASSEHIDIQEDLTYVEKPVRILETSERRTRSKVIRFCKVQWSHHSEEEATWEREDELKAAHPHLFASSSESRGRDSV

SEQ ID NO: 18870 - protein, 1635 aa, Oryza sativa
  unsure (1)..(1635): unsure at all Xaa locations
  Clone ID: TF_OSC900414j.C1.p9.np
RRLSWFRPLAWGNTLRLVCRLDLCQLKRQECYRLGLVPGPYRARATDDMLRTVSLIIRLQPTAPPPPKPPPTPPVSPFPAPTPPVPHAHVAAPSPHLPPARAPANGGGFEISPTLSLLLHMVKTRNDPRDSNDASGSEEQTDGAHVSGASGSRSSPPPENPTVTQMMTMMMQQMQQHYHQMLQQAQQNQQFGPPPSQSKLLDFLRIQPPTFSSTTNPMEANDWLRAIEKKLNLLQCNDQEKVAFATHQLQGPASAWWDNYVATRLDATEVTWAEFCQSFRKAQIPEGIMAQXKREFRALQQGTMSVTEYLHEFNRLARYAPEDVRTDAEKQEKFLFGLDDELTNQLISGVYEDFEKLVDKAIRQEEQRNKMDRKRKAAQISFPQGNNQKPRFMTGQLGGPSTLIVCQHRPYHPSNFDNDYNGGSHNNSKQHNHNSTPPPLMAPAQSDPPAVSAQSEQPKKRAVGKPGPCFNCGKHGHFASKCPKLNRTGPRFIQAHANHVSAVEAQAAPEVVLGTFPVNSYPATVLFDSGASHSFISKRFAGTHGLSVVELKIPMQVHTPGNDMRTAHYCPSVTIEIRRSPFLSNLILLESKDLDVILGMDWLTRNKGVIDCASRTITLTNDKGEKITFRSPASQKSVASLNQAAIEGQTETVEKSPRKLEDIPIVQEYPEVFPEDLTTMPPKREIEFRIDLAPGTTPIYKRPYRMAANELAEVKKQVDEQLQKGYIRPSTSPWGAPVIFVEKKDKTKRMCVDYRALNEVTIKNKYPLPRIDDLFDQLKGAKVFSKIDLRSGYHQLRIREEDIPKTAFTTRYGLFECTVMSFGLTNAPAFFMNLMNKVFMEFLDKFVVVFIDDILIYSKSEEEHEQHLRLVLEKLKEHQLYAKFSKCDFWLSEVKFLGHVISAQGVAVDPSNVESVTKWTPPKTVSQIRSFLGLAGYYRRFIENFSKIARPMTQLLKKDKKFKWSAECNQSFEELKKKLVSAPVLILPDQTKDFQVYCDASRQGLGCVLMQEGRVVAYASRQLRPHETNYPTHDLELAAVVHALKIWRHYLIGNRCEVYTDHKSLKYIFTQPDLNLRQRRWLELIKDYDMGIHYHPGKANVVADALSRKSYCNAVCTEGMCDKLQQDLEHLNLGIVEHGYVAALEARPTLVDQVRAAQVNDPEIAELKKNMRVGKARDFHEDENGTIWLGERLCVPDDKELKDLILTEAHQTQYSIHPGSTKMYQDLKEKFWWVSMRREIAEFVALCDVCQRVKAEHQRPAGLLQPLQIPEWKWEEIGMDFITGLPRTSSGHDSIWVVVDRLTKVAHFIPVHTTYTGKRLAELYLSRIMCLHGVPKKIVSDRGSQFTSKFWQKLQEELGTRLNFSTAYHPQTDGQTERVNQILXDMLRACALDFGGAWDKSLPYAEFSYNNSYQSSLQMVPFEALYGRKCRTPLFWDQTGERQLFGTEVLTEAEEKVRTVRERLRIAQSRQKSYADNRRRELTFEAGDYVYLRVTPLRGVHRFQTKGKLAPRFVRPYRILERRGEVAYQLELPPNMVGIHDVFHVSQLKKCLRVPEEQASSEHIDIQEDLTYVEKPVRILETSERRTRSKVIRFCKVQWSHHSEEEATWEREDELKAAHPHLFASSSESRGRDSV

SEQ ID NO: 18871 - protein, 309 aa, Oryza sativa
  Clone ID: TF_OSC423524j.C1.p5.fg
MAEKEVGRIFVGGLSWDTTERTLERAFSEYGKVIETQMVVLERDTGRSRGFGFVTFSEPRAVDAAIRGMHNGELDGRTISVNKAQPRMNTDDGYGYGGGGGGGGTYSSGARGGYRGGGDAVPSANDDCFKCGRAGHWARECPYSSGGGGGRTGRYSPPSRYGSGTGGGRGDRFGGSDRFANRYVDDRYDGGRYVDDRYGGGGRDRYATDRYPPTADRFTGDRYGGSDRYASSGFTRERSYERDGGRSGGSYYRDEPRGSGGYDRGGMRMGSGDRYGTGGPARFAGSYRDRPAPYDRPSRAAARTYDDRY

SEQ ID NO: 18872 - protein, 199 aa, Oryza sativa
  unsure (1)..(199): unsure at all Xaa locations
  Clone ID: TF_OSC423524j.C1.p9.gp
GGYRGGGDAVPSANDDCFKCGRAGHWARECPYSSGGGGGRTGRYSPPSRYGSGTGGGRGDRFGGSDRFANRYVDDRYDGGRYVDDRYGGGGRDRYATDRYPPTADRFTGDRYGGSDRYASSGFTRERSYERDGGRSGGSYYRDEPRGSGGYDRGGMRMGSGDRYGTGGPARFAGSYRDRPAPYDRPSRAAARTYDDRYX

SEQ ID NO: 18873 - protein, 1868 aa, Oryza sativa
  Clone ID: TF_OSC400058j.C1.p8.fg
MAARMVTAGLRPPHAWAKRAVRGGALVVVPAVAEPRPWQAARTCLLGSEAGRINVGVEAGTREEMVQAWQAGAWMATVTGELVWHLIDHLHAGSLLVTLGGCRLLDGLWRSCPVTSPRRLWRRPGAGFAITGTLLMEIDHRNLQLNAQAMNALFNSLSQEEFDRVSNLETAYEIWNKLAEIHEGISEYKDAKLHFLKIQYETFSMLPHESVNDMYGRLNVIVNDLKGLGANYTDLEVAQKMLRALPEKYETLVTMLINSDMSRMTPASLLGKINTNDMYKLKKKEMEEVSHSKKCIVLQAEVKDKGKGKVNEANEDLEEEIALLARRCFECGEKGHFASKCPSKDDDGDKSSKKKSGGYKLMKKLKKEGKNIEAFIGEWDSNEESSASSGSEEEGGDDASSKKKKMAVVAIKEAPSLFAPLCLMAKDSSKVAFLSDSESDDDCDDVSYDELVSMFKELYAYSEKEIVKFKARKKDHASLEVLYEELKTSHERLTISHEKLKEAHDNLLSTTQHGVLIDVGISCDLLDDSAICHIAHVVSSSISTSCDDLVDMPSSSSSTCVSICDASLVVENNELKEQVVKLNKSLEMCFKGRLMMVALLLDMWVPLYSVVNYRTGGSHCVLDSGCTQHMTGDRAMFTIFEVGGKEQEKVTFGDNSKGKVIGLVAKTSMGWLWHRRLAHVCVNQLSKLSKRDLVVGLKDVKFEKDKLCSACQAGKQVACSHPTKSIMSTSRPLELLHMDLFGPTTYKSIGVERKNRTLIEMAMTMLDEYGVSDSFWAEAINTACHATNWLYLHRLMKKTFYERIIGRKPNVAYFRVFGCKCYIYQKGVRLTKFESRCDEGFLLGYASNSKAYRVYNKNKGIVEETADVQFDETNGSQEGHKNLDDVGDEGLMRAMKNMSIGDVKPTEVEDKPSTSTQDEPSTSATPSQAQVEVEEEKAQDPPMPPRIHTALSKDHPIDQVLSDISKGVQTRSRVASICEHYSFVSCLEPKHVDEALCDPDWMNAMHEELNNFARNNVWTLVERLRDHNVIGTKWVFRNKQDENGLVVRNKARLVAQGFTQVEGLDFGETFAPVARLEAIRILLAFALCFDIKLFQMDVKSAFLNGEIAELVFVEQPPGFEDPKNPNHVYKLSKALYGLKQAPRAWYERLRDFLLSKDFKIGKVDTTLFTKIIGDDFFVCQIYVDDFIFGSTNKVFCKGFGDMMSREFEMSMIEELSFFLGLQIKQLKDGTFVSQTKYIKDLLKRFGLEDAKPIKTPMATNGHLDLDEGGKPVDLKLYRSMIGSLLYLTASRPDIMFSVCMCARFQAAPKECHLVAVKRILRYLKHSSTIGLWYLKGAKFKLVGYSDSDYAGCKVDRKSTFGSCQMLGRSLVSWSSKKQNSVALYRRGGICFGGNYILIFGQNEIFLQNEIEREFEKSFKTKLRWSDRARSAVDGLTELGRRSDRHVDGGLTGRYPPQMPPRTRHSRREPTPDPVSEESSGDEYAQSDEEVEANVEGASEEESGDDVSGSGEDEDEGSDDMHIDPSIQFVVNMRNPSQYTILRHHDQFLRPRDTRNPRFHTAFQKMWVAGDYSEMKWMSDTLQCSISRRQFWRLLSIRLDFGDDLHEEHTHNPLSIDYVSQFYEDGVWYTHGKVAGLRTIPCVVNRIVRVTILPRLGNNDDIRGVAWHVIDAIIQGHQFDIVSLMMQEIAISKATFTQGIYYAPYIMRLIQDKLGAVGQNLKKHKQYKPRLQLGAPRAPRAAPSSHPGASSSSAPPPPHGYDPNAFFYPQYAYFGMQPNEYFNPVLGAINTLSESIQRLSTGHEALHENVRGLRTDVGDLNASVGRLHTRVGTLDSRVQMLESSQAFVYHRRRDAPHPSTSARPPPLQE

SEQ ID NO: 18874 - protein, 931 aa, Oryza sativa
  Clone ID: TF_OSC900191j.C1.p6.fg
MSNTGHNGNTGDKEKEVPVNINGVNTASNSNRGPFLGSFSVVGFAATLKHHAFDGSNYKRWKARALLWLTAMQCFYVSRGKQSEPPLSSEKEAKFEASDCLFRGALISVLADNIVDVYIHMPSRKDMYDALEAKFRVSDAGNELYVMEQFYDYKMVDDHSVVQQAHEIQMLAKELENNNCELPGKFVAGGIIAKLPPSWLDFATSLKHKRQKFSVTDLIGSLGVEEKERAKDNRGNKIEGGTRSPPTWLLARVDEHWGTATTNFKKKGKGKAKGNCFVCGKPRHWAKNCPDRRDKKSANMVISKGGGTLGYGRERFLFVDGKRIACGCSWCCMLTKGGNKYFMTLIDDCTRFCYVYLLKTKDEALHYFKIYKAETLRDFPRNGWGEAILTAFHVLNKIPVKHNLAKVNVPIAKKRKLGPKTVDCVFLGYAILSVGYWFLIVNSGVPDMCMGTITESRDATFFDNEFPMKNTPNTSSQEPVLPHEHFAPIEHNDQTPEENPEEDNIVDTRKSKRQRVAKFFGDDYIVYLMDYTPRTIEEAYSSPDADYWKEVKARLVAKGYTQKEREDFFDTYSLVARLTTIQVLLALAASHGLLVHQMDVKTAFLNRELEEKIYMDQPDEYVLEGQEGMVCKLLKSLYGLKQAPKQWHEKFDTTLTSAGFVVNEVDKCVYYRYGGGEGVILCLYVDDILIFGTSLKVIEEVKDFLSKSFEMKDLRVADVILNIKLLRGDEGGIILVQSHYVDKMIIGKLWKRVMRYLKGTVSYGIHYTGYPKVLEGYSDSNWISDADEIEATSGYVFTLGGGAVSWKSCKQTILTRSTMEAELTALDTATVEAEWLRELLMDLPVVKKPVPAILMNCDNQTMIIKVNSSKDNMKSARHVKRRLKSVGKQKKSRVIALDYVQTAKNLVDQFTKGLLHNVIDSASREMGLRPT

SEQ ID NO: 18875 - protein, 1824 aa, Oryza sativa
  unsure (1)..(1824): unsure at all Xaa locations
  Clone ID: TF_OSC28808j.C1.p2.np
RGDHPTNYRGEGIDDFVAELARMTLVVGYPNASEYSTVPPLSGKLPHRVRLEVHGXVGTCLANMVVVASGGTADHACQEAAYLMMARLRERDNYIFCNTAYRFHPRRASGDGVSTFRPTAGENDTTFGHMCAMMRGMDRMHSDLHKASKALNDGKLVRIIALKDEIARLKKENAHLKGLPIPGGVRIRTMPRKSTTAPVRIXLAPRNPPPPAALAAPPVPPAVPAAPAAPPPVPAPVPVSAPASALSFAPASAARGPASGNGGWLPATPSGSRDRSSSGSELGSGETYLLDSRSRSEGPGLFLQMANTRNGSRAAGEGSNGEERTDGGYPNSASGNGPPPLPENPTLAPVMAHQTQMMAAMMQQMQQRHQQMHQRMQQQAEQQXQQFGPPPPQSKLLEFLRVRPPTFSSTTNPMEANDWLHTIEKKLNLLQCNDQEKVAFATHQLQGPVSAWWDNHMATRPAGTEVTWVEFCRSFRKAXVPDGVVAQKKREFRALHQGNRTVTEYLHEFNRLAXYAPEDVRTDAEKQEKFLAGLDDELTNQLISGDYADFEKLVDKAIRQEDQRNKVDRKRKPAQFRSNQGSHQRPRFTPGQQGGPTTMIVRQHRPFNSSSFHPGASGSXNHQGGQLNCSAALRPPMAPAQSVPSAQAKKETRAKPRSCFNCGEHGHFANKCPKPRRAGPRFAQARVNHASAEEAQAAPEVVLGTFLVNSVPATVLFDSGATHSFISKKFVGMHGLRKEELSTPMRVHTPGNSSTSVSYSPLVLIEIHLSQFLANLILLESKDLDVILGLDGLTKFKGVIDCANRTVTLTNEKGETMVYKSPVSPKQRISLNQIEVENPVTTEEKSSRKLEDIPIVCEYPEVFPEDLTTMPPKREIEFRIDLAPGNAPIYKRPYRMVANELAEVKKQVDEQLQKGYIRLSTSPWGAPVIFVDKKDKTKRMCVDYRALNEVTIKNKYPLPRIDDLFDQLNGAKVFSKIDLRSGYHQLRIREDIPKTAFTTRYGLYECTVMSFGLTNAPAFFMNLMNKMFMEFLDKFVVVFIDDILIYSKLEEEHERHLRLVLEKLEEHQLYAKFSKCDFWLSEVKFLGHVITAQGVAVDPSNVESVTKWTPPKTVSQIRSFLGLAGYYRRFIENFSRIARPMTQLLKKDEKFKWTAECDKSFEEFNKKLVSTPVLILPDQTKDFQVYCNASRHGLGCVLMQEGRVVAYASRQLRPHEGNYPTHDLELAAVVYALKIWTRYLIGNRCEVYTDHKSLKYIFTQPDVNLRQRRWLELIKDYDMSIHYHPGKANVVADALSRKSYCNTLCTEGMCKELQQELEHLNLGLVEYGYVAALEARPTLVDQVRAAQVNDPEIADMKKNMRVGKARDFHEDEHGTIWLGERLCVPDDKELKDLILTEAHQTQYSIHPGNTKMXQDLKEKFWXVSMRREIAEFVALCDVCQRVKAEHQRPAGFLQPLQIPKWKWEEIGMDFITGLPRTSSGHDSIWVVVNRLTKVAHFIPVHTTYTGKKLAELYLARIMCLHGVPKKIVSDRGSQFTSKFWQKLQKELGTRLNFSTTYHPQTDGQTERVNQILEDMLRACVLDFGGAWDKSLPYAEFSYNNSYQASLQMAPFEALYGRKCRTPLYWDQTGERQLFATEVLTKAEEKVRTVRERLRIAQSRQKSYADNRRRELTFEAGDYMYLRVTPLRGVHRFQTKGKLAPRFVGPYKILEQRGEVAYQLELPSNMIGIHVMFHVSQLKKCLRVPEEQADSEHIDIQEDLTYVEKPVRILETSERRTRNKVTRFCRVQWSHHLEEXATWERENGLKAAHPHLFTSSSESRGRDSV

SEQ ID NO: 18876 - protein, 1595 aa, Oryza sativa
  Clone ID: TF_OSC416746j.C1.p20.fg
MGTPGDQGILDEFSTNPFHAKKNKNWILIADNEVIANVAASYMSFMSALNLGLWLQSGVGTRAAVDDSIKKATPDRWLVMGAIALRAEPEFWARLVQRLDVCTFTRESGSPPGVVFLNSGERSDSGEGRNTWYQSRRSSGGGMSRHSEPHGGRSHTPPRRRRLSISPEPTRGRGGPKIIVRRTIKEANATIQYPTLTRTNYDEWAMLMQVNMEAAGIWYAVEPYPDEEVEYRDDRLALAAILRSVPSEMLPTLRGKRSARAAWDAIKTIRVGVERVRESKAQQLRREFAALTWKEGETAEDFSVRITGLANNLRTLGDNISDADVVRKMLDVVPEHLEQIAVAVETLLDLNTVSVEEVTGRLRAVEQRRHRSAPVVNNQGRLLLTQEEWMAKLKNPGASGEKGTPSGSGGGGNKRTGGSRRHDRGKGGSRQAAGPGDGSNQPKKTDKCRYCGKKGHWAKECRSRLRDEAHLAQGEEEEEPMLMVATAQVNAISSSSPPRFTSLPALEQIHLDESKLFVQLGGEHGGEATRWILDTGATNHMTGTRSAFSELNTGIRGTVKFGDGSVVGIEGRGTVLFKCKDGEHQALEGVYHIPRLTTNIVSLGQLDEEKFKWSCEDGVLKIWNKQRRLLAKVVRSPNRLYVVKLNIGRPVCLAAQGGDIAWRWHARFGHLNFRALEKLGRAVMVRGLPLINHVDQVCDSCLVGKQRRLPFPSKAKYRAKEKLELVHGDICGPVTPATPSGNKLFLLLVDDLSRYMWLILLSSKDQASVAIKRFLACAEAEAGRKLRTLRTDRGGEFTAHAFAEYCAEHGIQRHLTAPYTPQQNGVVERRNQTVMGMARSMMKAKSLPGWFWGEAVNTAVFLLNRAPTQCVDGKTPFEVWHGVKPPVHFLRTFGCVAHVKNGGQRLAKLDDRSMPMVFVGYEAGTKAYRFYNPVSRRVHVSRDAVFEEERSWEWGAEKGAGPDDDIEPFVVEHLATGPTGQGGPVAATPTATQRSTSAPAPMAPPATPSQAGTPTHGAGPRTPASASSPAIEFASPPQGDLDLDNDHDDDVPLRFRTVDNLLGASSPPGLAEREVTEGLMVAIEDEPATAEEAKQVKEWREAMIEEMASIEHNKTWSLVELPAGQRAIGLKWVFKIKKDEHGNITKHKARLVAKGYVQRQGIDYEEVFAPVARIESVRVLLAVAAHRSWSVHHMDVKSAFLNGDLAEEVYVQQPPGFVAAGHERKVLKLHKALYGLKQAPRAWNSKLDSSLLMLGFARSECEHGLYTRSDGEKRLVVGIYVDDLIITGGSTEVINTFKTEMKTLFRMSDLGVLSYYLGIEVRQGRRGIELLQAAYAKKILEKAGMGTCNPCATPMEARLKLSKQSTSPAVDATEYRSLIGSLRYLMNTRPDMAFAVGYLSRFMENPRQEHLAAMKHLLRYVAGTIDYGLVYTSGDTEFNLVGYSDSDMAGDIDDRKSTSGIIYFLGGNPVAWQSQKQRVVALSSCEAEYIAGAAAACQGVWLRRLLQDVVGVSGPPPQLKMDNQSAIALSKNPVLHDRSKHIDTKFHFLRECVDSGAVRLAFVSTQAQLADIMTKALGRSKFQELRELIGVTKLK

SEQ ID NO: 18877 - protein, 347 aa, Oryza sativa
  Clone ID: TF_OSC10366j.C1.p2.fg
MSGHTGDGNDGEKGARIPFDYPSTSTSYVSTYSGKAPYFNGKDYAAWKHKMKMHLKSINPSIWRIVEKGYVLQNPEDPTKEDNENEHKNAQAANAILSALSRSEFNRVDGIESAKVIWDTLRNLHEGTDSVRESKVEILKGQFERFVMLDGEIPSDMYDRLSKIVNEIKGLGSKDMTDEVVVKKMVRAITPRNSTLVTIIRERPDYKTLTPYDLLGRILAHDMLVQDSKDVIQYINQSSTASIKKEDLALKAEEEEEENRKSKSKVEIDDEEMALFVKKFGKFMRQSGFFKGSSSKHYSNKSSGRHSARVCYVCKEPGHFIAECPHLKDGSHLKEDKKKGEKKDEKK

SEQ ID NO: 18878 - protein, 1517 aa, Oryza sativa
  Clone ID: TF_OSC401417j.C1.p15.np
TRLRSGGDKPTGVAGESMPYSARNQNNNHHNSQLPPPPTRNSGASGSRPTGAMDPTLAQILAAQSQLFDRLVATQEALGNALLQNNRQPQSKLAEVQRTQPPVFSAAADPLDADDWLRDIENKLNFVRCDDEEKATYAAYYLQGAAAAWWETYKSTLPQGTAITWNVFKQGFRTAHVPEGLMKAKRKEFLNLTQGDLPFMEFLSRFNYLARYATDELGTTEARKVQLCLDRLSPELKHGLSTHEIDSMKTLVDKALRWEASEKEVAVDRKRKFLARRATVSRSSRPRTWQPAPAARPASAPPQRLQYAPGGYNRAANVPGGYNRAANVNCFNCGKLGHYSNNCPYPRRTGAPPPRPAAPQPSSTGPWRPCCCSVGAEPLPSAQNFGRGRLNHATAEEAVDAPDVVLGTFLVHSVPVVLFDSGASHSFISTKVAKQNNIATTLLDTPMIIQSPGSTFKTRTICKDVPILIDKVEFKADLIQVSSLSLDVILGMDWLSKHKGNINCASKTISFVNTNGKTATFTSNKATTSKQPCINSLIKPELESIPVVCEYPDVFPDELPGMPPDRDIEFVIDLVPGATPVAKQPYRMTSDELVELKKQIDEQLEKGFIRHSSSPWGCPVLFAPKSDGTLRLCVDYRPLNEVTIKNKYPLPRIDDLFDQMTGAQVFSKIDLRSGYFQLKIRPEDIPKTAFRTRYGLFEYTVVSFGLTNAPATFMNLMNKVFMEYLDKFVVVFIDDILVFSKNEEEHAQHLRLVLDKLREHQLYAKFNKCEFWMNEVAFLGHVISGGGIAVDPSKVESVLNWEQPKTVTEVRAFLGLAGYYRRFIGNFSKIARPLTQLLKKENKFVWSEVCEASFQELKKRLTTAPVLIMPDIHKNFDVYCDASQNGLGCVLMQERKVVAYASRQLRPHELNYPTHDLELAAVVHALKIWRHYLIGKRCEIYTDHKSLKYFFTQPDLNLRQRRWLELIKDYDLGIHYHPGKANVVADALSWKLNHISASELVTQPELLLEFQKLNLGVVEEGFVTALALQPTLLSQIKEAQLTNQEVAEIKKEMASGKPTIFSLDDDGVVVHGKQLFVPDTQHLRELILTEAHESPMSIHPGCTKMYQDIRSLYWWPTMRRDIAAYVAICDVCQRVKAEHQRPAGLLQPLQIPEWKFNEVGMDFITGLPKTSNGHDSIWVIVDRLTKVAHFIPVNVSYNGAKLAKLYLTHIVRLHGVPKAIVSDRGPQFTSRFWENLHELLGTQLFFSTAFHPQTGGQTERTNQILEDMLRSCVLSYNTNWEKCLSFAEFSYNNSYQASLQMSPFEALYGRKCRTPLFWSEVGERQLFGPAVIKEAEQNVALIRNRLKEAQSRQKSYSDRRRRELSFEVGDYVYLKVSPLRGTRRFQVHGKLAPRYIGPYRVLAKRGQVAYKLQLPSQLSDVHDVFHVSQLKKCLRVPTELTPLEDINIQPDLSYQEYPIRILEEAERHMRSRSIKMLKIQWSNHTPEEATWEREDRLRADFPSFFSDPIKSRGRDFV

SEQ ID NO: 18879 - protein, 1299 aa, Oryza sativa
  Clone ID: TF_OSC418198j.C1.p21.fg
MGENQGLEQVMGKLVEMLAKKFNEAPTTSSAVVPHTESVQKIELMQNDIKLEGVKNYLSWSRRALLILKTKGLEGYVTGEIKEPENISSVEWKTWSTTNSLVVAWLLTSLIPAIATTVETISSASEMWKTLTNLYSGEGNVMLMVEAQEKISVLRQGERSVAEYVAELKHLWSDLDHYDPLGLEHPDCIAKMRKWIERRRVIEFLKGLNSEFEGRRDAMFHQTTLPSLDEAIAAMAQEELKKKVLPSATPSSPSPTYVVAQSKETRECFNCGEMGHLIRDYRAPRKPSYGRGRFGDRGGARGGRGYAGRGNRGRGYEYRSDHRANVVTLEESCSGSTNVDVANLVHSSSGNSNQAFMSINSSHSNWILDSGASRHVTVNLVSISSLVDHMNCRVSLDRENCLIQERETGKKLGIGVRRDGLWYLDRKETSEDVCLALMAPTSEEEAKFIRTDNGGEYINNEFSSFLSSEGILHQTSCPDTPPQNGVAERKNRHLLETARSLMYAMNVPKFLWSEAVMTATYLINRTPSRILGMKTPCEMIFGKNEFVVPPKVFGCTCFVRDHRPSIGKLDPRAVKCIFVGYSSGQKGYKCWSPSERRTFVSMDVTFRESVPFYGEKTDLSSLFIDLDDSTSGHDGHQMKDEILGPKGDEQPKKEKLVVGSIPCPMGGPVAQEQEWRKPHEEKNLQVYTRRTRCPVIQQVEEDNQVEEDVSREQGSLESGGEEEEVREESDLPIAIRKSVRSNAGKPPLRYGFEAQDEGDDENNISNYVSYDSLSSTYKAFIASLDSVQIPKDWREAKQDPRWHQAMLDELEALEKNKTWDLVPFPKGKKIVNCKWVYTVKQNPDGKVERYKARLVAKGYSQTYGIDYDETFAPVAKMSTVRTLISCAANFDWPLHQLDVKNAFLHRDLQEEVYMDVPPGFATSQTKGKVLRLKKSLYGLKQSPRAWFDRFRRAMCAMDYKQCNGDHTVFYHHSGDHITILAVYVDDMIITGNDCLEITRLKRNLSKEFEVKDLGQLRYFLGIEIARSPRGIVISQRKYVLDLLSETGMLGCCPVSTPIDQNHKLCAESGDPVNRERYQRLVGRLIYLCHTRPDITYAVSMVSRYMHDPRSSHMEAVYRILRYLKGSPGKGLWFKKNGHLKIEGYCDADWASCLDDRRSTSGYCVYVGGNLVSWRSKKQSVVSRSTAEAEYRAMAASLSELLWLRNLLVELKILGNTPMKLLCDNKSAINIANNPVQHDRTKHVEIDRFFIKEKLDEGVLELGFVTSGGQVADCLTKGLGVKECNCSCDKMGMIDIYHPS

SEQ ID NO: 18880 - protein, 1393 aa, Oryza sativa
  unsure (1)..(1393): unsure at all Xaa locations
  Clone ID: TF_OSC10678j.C1.p1.np
LCSXAAKSFPGSVHLHSQVYRTSSWNSVRLRTCTGRRAIKFLGSAKRDCSCFRDYYCYIDAFVNMSTEIGDKEVNVNGGNTASKSSGGTFLGSFSVVGFAASLKPHAFDGSNYKKWKARTLLWLTAMHCFFVSRGKPSEPPLSPEEEAKFEASDCLFRGVLISVLVDYIVDVYMHMPSGKDMWDALEAKFGVSDAGSERYVMEQFYDYNMVDDRSVVEQAHEIQMLAKELGNNNCELPDKFVADGIIAKLPLSWSDFATSLKHKRQEFSITDLIGSLGVEEKARANDNRGKKIEGGSSANLVQKKNPHTSHNNNKKVKLDVKPKATTNFKKKGKGKAKGDCFVCGKPGHXAMDCPERKDKKSANMVISEGGGTLWYGKFLPTVLSVCHSPDWWVDTGANIHVCADISLFSSYQVGRGSSLLMGNGSLVAVHGVGTVDLKFTSGKIVQLKNVQHVPSIKKNLVSGSLLCRDGFRLVFEYNKCVISKYGTFIGKGYDSGGLFRFSLNDMCNVVNHVSDDNDESNVWHSRLCHVNFGCMTGLANMSLIPKFTLVKGSKCHTCVQLKQPRKPHKASEARNLAPLELVHSDMCEMNGVLTKGGKKYFMTLIDDCTRFCYVYILKTKDEALHYFKIYKAEVKNQLERKIKRLRSDRGGEYFSNEFTSFCEEYGIIHERTSPYSPXSNRVAERKNRTLTEMVNAMLDTAELSKEWWGEAILTACHVLNRIPTKHKEVTPFEEWERKKLNLSHLRTWGCLAKINVPIAKKRKLGPKTVDCVFFGYAIHNVGDRFLIVNSGVPDMRVGTITESRDATFFENEFPMKNAPSTSSQEPILSPEHFVPIKHIDQTLEENPKEDNIVATRKSKRQRTAKSFGDDYIVYLVDDTSRTIEEAYSSPDADYWKEAIRCEMNSIMSNGTWEVVERIYGCKLVGCKWVFKKKLRPDGTIEKYKAMLVAKGYTQKEGEDFFDTYSPVARLTTIRVLLALAASHGLLVHQMDVKTAFLNGELEEEIYMDQSDGYVLEGQEGMMCKLLKSLYGLKQAPKQWHEKFDNTLTSAGFVVNEADKCVYYRYGGGEGVILCLYVDDILIFGTSLNVIEEVKDFLSKSFEMKDLGVADVILNIKLLRGDEGGITLVXSHYVDKVLSRFGYSDCKAAPTPYDPSVLLRKNRRIARDQLRYSQIIGSLMYLASATRPDISFAVSKLSRFVSNPGDDHWHALERVMRYLKGTMSYGINYAGYPKVLEGYSDSNWISDADEIKATGGYVFTLRGGVVSXKSCKQTILTRSTMEAELTALDTATVEAEWLRELLMDLPVVEKPVPAILMSCDNQTVIIKVNSLKDKMKSSRHVKRRLKSVRKQKNSGVIALDYVQMAKNLADQFTKGLPRNVIDCASRKMGLRPT

SEQ ID NO: 18881 - protein, 1008 aa, Oryza sativa
  Clone ID: TF_OSC19178j.C1.p1.fg
MSAPGAGAAAAAGGDGGGGAPPGAGAGGGAPGAGACAANNNTNGVNSASQSSGGPFSGYILLLFLFPLLALYCYVPVPDIHDVSSMLLRYCYVLVPDIHNAHDAISMLLVMLHVVTRSPYTVYAMIIVLTFWIKICRFMTIFLTIQKPDRLFSVVGFAAALKPHAFDGSNYKRWKARVLLWLTAMQCFYVSRGKRSEPPLSPEEEANFEASDCLFCGALISVLADNIVDVYMHMPSRKDMWDALEAKFGVSDTGSELYVMEQFYDYKMVDDRSVVEQAHEIQMLAKELENNNCELPDKFVAGGIIAKLPPSWSDFATSLKHKRQEFSVSDLIGSLGVEEKARAKDVRGKKVEGGSSANMVQKKNPHASHNNKKVKSDVKPKAATNFKKKGKGKAKGDCFVYGKYGHWAKDCPERKDRKSANMVISEGGGTSVYGKILPTVLSIFHSPDWWVDTGANIHVGRGSSLLMGNGSLAVVHGVGTVDLKFTSGKTVQLKNVQHVPSIKKNLVSGSLLCREGFRLVFESNKCVVSKYGTFVGKGSKCHTCVQSKQPRKPHKTSEARNLAPLELVHSDLCEMNGVLTKGGKKYFMTLIDDCTTFCYVYLLKTKDEALHYFKIYKAEFGIIHERTPPYSPQSNGVVERKNRTLTEMVNAMLDTVGLSKEWWGEAVLTVCHVLNKIPMKHKEVTPFEEWERKKLNLSYLRTWGCLAKVNVPIAKKQKLGPNTVDCVFLGYAIHSVGYRFLIVNSGVPDMHIGTIFESRDATFFENEFPMKHTPSTSSQETVMPHEHFAPIEHNDQTPEENPEEDNIVDTRKSKRQRVAKSFGDDYIVYLVDDTPRTIEEAYSSPDADYWKEAVRSEMDSIMSNGTWEVVERPYGCKPVGCKWVFKKKLRPDGTIEKYKTRLVAKGYTQKEGEDFFDTYSPVARLTTIRELLVLAASYGLLVHQMDVKTAFLNGELEEEIYMDQPDSLNVIEEVKDYLSKSFEMKDLGEADVILNIKLQRGDESGITL

SEQ ID NO: 18882 - protein, 216 aa, Oryza sativa
  Clone ID: TF_OSC2953j.C1.p1.fg
MADNLFVVEQAHEIQTMAKELELLKCVLPDKFVAGCIIVKLPPSWRGFGTALKHKILEYSVEGLIASLDVEEKAREKDAASKGDGGQSSANVVHKAQNKSKGKYKAQQTTNFKKKNINNNPNQDKMTCFVCGLPGHLAKKCPQRKGMKAPAGQTSKSTNMTIGNTVDESGYGRTGFHRPNGEWVTCFCSWCWHGRSEVYFGKDRAAEERTACPYYR

SEQ ID NO: 18883 - protein, 1108 aa, Oryza sativa
  Clone ID: TF_OSC421135j.C1.p6.fg
MSAPGAGAAAAAGGDGGGGAPPGAGAGGGAPGAGACAANNNTNGVNSASQSSGGPFSGYILLLFLFPLLALYCYVPVPDIHDVSSMLLRYCYVLVPDIHNAHDAISMLLVMLHVVTRSPYTVYAMIIVLTFWIKICRFMTIFLTIQKPDRLFSVVGFAAALKPHAFDGSNYKRWKARVLLWLTAMQCFYVSRGKRSEPPLSPEEEANFEASDCLFCGALISVLADNIVDVYMHMPSRKDMWDALEAKFGVSDTGSELYVMEQFYDYKMVDDRSVVEQAHEIQMLAKELENNNCELPDKFVAGGIIAKLPPSWSDFATSLKHKRQEFSVSDLIGSLGVEEKARAKDVRGKKVEGGSSANMVQKKNPHASHNNKKVKSDVKPKAATNFKKKGKGKAKGDCFVYGKYGHWAKDCPERKDRKSANMVISEGGGTSVYGKILPTVLSIFHSPDWWVDTGANIHVGRGSSLLMGNGSLAVVHGVGTVDLKFTSGKTVQLKNVQHVPSIKKNLVSGSLLCREGFRLVFESNKCVVSKYGTFVGKGSKCHTCVQSKHPRKPHKTSEARNLAPLELVHSDLCEMNGVLTKGGKKYFMTLIDDCTTFCYVYLLKTKDEALHYFKIYKAEFGIIHERTPPYSPQSNGVVERKNRTLTEMVNAMLDTVGLSKEWWGEAVLTVCHVLNKIPMKHKEVTPFEEWERKKLNLSYLRTWGCLAKVNVPIAKKQKLGPNTVDCVFLGYAIHSVGYRFLIVNSGVPDMHIGTIFESRDATFFENEFPMKHTPSTSSQETVMPHEHFAPIEHNDQTPEENPEEDNIVDTRKSKRQRVAKSFGDDYIVYLVDDTPRTIEEAYSSPDADYWKEAVRSEMDSIMSNGTWEVVERPYGCKPVGCKWVFKKKLRPDGTIEKYKTRLVAKMDVKTAFLNGELEEEIYMDQPDSLNVIEEVKDYLSKSFEMKDLGEADVILNIKLQRGDESGITLVQSHYVDKILSCFGYSDCKPTPTPYDPSVLLRKNRRIARDQLRYYQIIGSLMYLASATRPDISFAVSKLSRFVSNPGDDHWQALERVIRYLKGIMSYGIHYTGYPKVLEGYSDSNWISDADEIKATSGYVFTLGGGAVS

SEQ ID NO: 18884 - protein, 1413 aa, Oryza sativa
  Clone ID: TF_OSC401917j.C1.p9.fg
MSNTGDKEKETPVNTNGGNTASNSSGGPFLGYNLITLFQLEVLLLMFIAMSTLCHYVIVDAYSTLSMLMLITFTTITGSNPIVNIMIIILLFWIKICRIMTKFPTIQKPDRSFSVVGFAAALKPHAFDGSNYKRWKARALLWLTAMQCFYVSRGKRSEPPLSPEEEAKFEASDCLFRGALISVLADNIVDVYMHMPSGKDMWDALEAKFGVSDAGSELYVMEQFYDYKMVDDRSVVEQAHEIQMLAKELENNNCELPDKFVAGGIIAKLPSSWSDFATSLKHKRQEFSVPDLIGSLGVEEKARAKDVRGKKVEGGSSANMVQKKNPHASHNNKKVKPDVKPKAATNFKKKSKGKAKGDCFVCGKSGHWAKDYPERKDRKSANMIISEGGGTSGYGKILPTVLSVFHSPDWWVDTGANIHVCADISLFSSYQVGRGSSLLMGNGSLAAVHGVGTVDLKFTSGKTVQLKNVQHVPSIKKNLVSGSLLCREGFRLVFESNKCVVSKYGTFVGKGYDSGGLFRFSLNDMCNNHNAVNHISENDESNVWHSRLCHMNFGCMTRLANMSLIPKFTLVKGSKCHTCVQSKQPRKPHKASEARNLAPLELVHSDLCEMNGVLTKGGKKYFMTLIDDCTRFCYVYLLKTKDEALHFFKIYKAEVENQLERKIKRLRSDRGGEYFSNKFASFCEEFRIIHEMTPPYSPQSNGVAERKNRTLTEMVNAMLDTAGLSKEWWGEAVLTACHVLNKIPMKHKEVTPFEEWERKKLNLSYLRTWGCLAKVNVPIAKKRKLGPKTVDCVFLGYAIHSVGYRFLIVNSGVPDMHVGTILESRDATFFENEFPMKYTPSTSSKETVMPHEHFAPIEHNDQTPEENPEEDNIVDTRKSKRQRVAKSFGDDYIVYLVDDTPRTIEEAYSSPDADYWKEAVRSEMDSIMSNGTWEVVERPYGCKPVGCKWVFKKKLRPDGTIEKYKARLVAKGYTQKEGEDFFDTYSPVARLTTIRVLLALAASHGLLVHQMDVKTAFLNGELEEEIYMDQPDGYVLEGQEGMVCKLLKSLYGLKQAPKQWHEKFDTTLTSAGFVVNEADKCVYYRYGGGEGVILCLYVDDILIFGTSLNLIEEVKDYLSKSFEMKDLGEADVILNIKLQRGDEGGITLVQSHYVDKVLSRFGYSDCKPAPTPYDPSVLLRKNRRIARDQLRYSQIIGSLMYLASATRPDISFAVSKLSRFVSNPGDDHWQALERVMRYLKGTMSYGIHYTGYPKVLEGYSDSNWISDADEIKATSGYVFTLGGGAVSWKSCKQTILTRSTMEAELTALDTATVEAEWLRELLMDLPVVEKPVPAILMNCDNQTVIIKVNSSKDNMKSSRHIKRRLKSVRKQKNSGVIALDYVQTARNLADQFTKGLPRNVIDSASREMGLIPT

SEQ ID NO: 18885 - protein, 179 aa, Oryza sativa
  unsure (1)..(179): unsure at all Xaa locations
  Clone ID: TF_OSC13024j.C1.p3.np
MTGALGEEEMESKACTYCGEIGHVASMCLTLCPHCEEDHPPGECPTRKVTCFLCEGTNHVPKDCQLSVLLTKTAEIQXTTLRLSHQLVSSNSNIDDIIHSTNAPPAAPDSAINHSNNTFSTNHSLGRQPQQRIVVDGRSCVSPRPTPGRAKGNQPQEGDTKQKTVIRFNQQSEGSFSCE

SEQ ID NO: 18886 - protein, 1154 aa, Oryza sativa
  Clone ID: TF_OSC400479j.C1.p1.fg
MAGRTATTAALGYMVLGLYRRREAKARVAAGFLGCYKDDGHQRHCARNGEREDRFGKLKVTIPKFCGTNDPEEYLTWEFKVDKIFRMRNYTEETKLHMASLEFDEYALIWWEQMLNQREEHDELAVATWVEMKHEMRARFVPSHYKRDLFERLQNMRQGTRSVEEYYKEMEKAMIRAKIYNTIVQLVHQATKAEHQVQEDAKVAHNTSFTTRSLSSGGRPTPKFNLSKNFISSNSPSLNLASKKEESTQSASKKFVVPTGSSTSSVGSTPKSSNIQCFKCLGRGHMQKDCPNNKTMLILEDGEYESTSEDKDDLAADLTHFDDAQEEDEENGVVYYDFEEGPSLVVTPKVLTVQPKIDHEQRCNLFQTKAKVDGKVCKVIIDGGSCHSLASKEICNKLGLNLVRHPHPYHVQWFSDCGEVKIQFMVQVTFQIGDYCDTVECDVVPMTVCHLLLGRPWQYDRAAQHDGRTNQYKLRWKEKDIVLRPMTPSQIINENCQKLEVVVQSDKKREQKIVIHKSKDGTWRMCVDCRAINSISVRYRHPIPRLDDMLDELSGAVIFSKIDLRSGYHQIRMKEGDEWKIAFKTKFGLYEWLVMPFGLTNAPSTFMRLMNHVLRAFIGKFVVVYFDDILIYSKTMEEHLAHIRQVLEMLRSERLFANFEKCTFCREKEGKPIAYFSEKLGSAQLNYPVYDKELYALVRALETWQHYLWPKEFVIHSNHEALKYLRGQANLNRRHAKWVEFIESFPYIVRYKKGKENVVADALSRKSVLLTQLDVKVSSLESLKELYSKDSEFSDPYSKCLDGKGWEKYHVHDGFLFRADKLCVPESSLRHDVERYVQRCVTSHKAKSKLNPHGLYTPLPVPNAPWEDISMDFVLGLPRTRRGRDSIFVAVDRFSKMAHFIPCNKSDDASHVADLFFREVVRLHGVPRTIVSDRDVKFMSYFWKTLWAKLGTKLLFSTTCHSQIDGQMEVVNRTLSMLLRMMIKKNLKEWEDCLPHVEFAYNRVVHSTTQLSPFEVVYGFNPITPLDLLPLPLQERANMEATKRADYVKKMHEKTKETIERIIQSYAAKANKDRKKMLFQPGELVWVHLRKDRFPEKRKSKLMPHGDGPFRVLEKITDNAYKIDLPGDYTVSNTFNVVDLSPFFGTEETDSRTI

SEQ ID NO: 18887 - protein, 1040 aa, Oryza sativa
  Clone ID: TF_OSC401033j.C1.p4.fg
MADNRSVVEQAHEIQTMAKELELLKCVLPDKFLAGCIIAKLPPSWRGFGTALKHKRQEYSVEGWIASLDIEEKAQEKDAASKGDGGQSTANVVHKAQNKSKGKYKAQQTTNFKKKNNNNNSNQDERTCFVCDQPDHLARKCPQRKRMKALAGQTSKSANVTIGNTGDGSGYGHTGFHRPNGEWVTCFCSWCWHGRSKVYLGKIVQLKNVQHVPSIDRNLVSGSRLTRDGFKLVFESNKVVMSKHGYFIGKGYECGGLFRFSLSDFCNKSVNHICGSVDDEANVWHSRLCHINFGLMSRLSSMYLIPRFSIVKGSKCHSCVQSKQPRKPHKAAEERNLAPLEFLHSDLCEMIGVLTKGGKRYFMTLIDDATRFCYVYLLKMKDEALDYFKIYKAEVENQLDRKIKRLRSDRGGEFFSNEFDLFCEEHGIIHESAPPYSPESNGIAERKNRTLTNLVNAMLDTAGLPKAWWGEALLTSNHVLNRVPNRNKDKTPYEIWIGRKSSLSYLRTWGCLAKVNVPITKKRKLRPKTMDYVFLGYAHHSIADRFLIVKSEVPDMHVGTIMESRDPTFFESFFPMNDTHSSSSQPSEIIPSSITPPEQTEYTHEHVTEEDDSEAPQRSKRQRTTKSFGDDFTVYLVDETPKSISEAYASPDADYWKEAVRSEMNSIIANGTWEVTERPYGCKPVGCKWVFKKKLRPDGTIEKYKARLVAKGYTQKEGEDFFDTYSPVARLTIIRVLLSLAASHGLLVHQMDVKTAFLNGELDEEIYMDQPDGFVVEGQEGKVCKLLKSLYGLKQVPKQRHEKFDKTLTSAGFTVNEADKCVYYRHGGDLGVADVILNIKLIRGENVITLLQSHYVEKILNRFGYIDSTMELGLHYSGYSAVLEGYSDFNWISDVDEIKATSGYVFTLGGAAVSWRSCKQTILTRSTMEAELMALDTATVEAEWLRDLLMDLPIVEKPVPAILMNCDNQTVIVKVNSSKDNMKSSRHVKRRLKSVRKLRNSGVITLDYIQTARNLADPFTKGLSRNVIDNASKEMGLRPM

SEQ ID NO: 18888 - protein, 727 aa, Oryza sativa
  Clone ID: TF_OSC420097j.C1.p9.fg
MSDARSRRSVASSTRRQQDAELAAAEERRRATAQTAAAAARAARLAAAELAAARAEAEAEAAEDAARAAEVEVETLRSSINGSIAGDITADRELEELARGRARERAERWAAAHLHGGGGGPRDRASADGNPDGRRRAGGSPELARGPRRQHGSLSPDRRHGHHGVQTVVRDFGPGGGWPTLTKTNYIEWAAVMRVRLQVWHMWEAVRYSDVDYDEDRRALDALIAAVPPEMQFSLSQKRTAKEAWDAIAAARIGSDRARKSTLQALRKEWENLAFKPGEDVDDFALRLNTLLQKMVQYGDDTYDEERAVEKLFRCVPEKYRQIARSIESLLDLSTMSIEEALGRLKVVDGDEPQPLSGPITIGGKLHLTREQWEASQGDGRKGESSSPTGGRKPRKARGGVQLRWARRRAEGGARRGAQGIATGNHKPARDDACRNYGKLGHWAKDCRQPRRGQAHVARVEEEEPALLLAHASIELPPAAPAAAAFLHLDEPKVLVSLCNGSSNDKADGWYLDTGATHHMTGRREFFTEFDSSVRGSVKFGDASGVEIKGVGSVTFTAKSGEHRLLTGVYYIPALRNSIISVGQLDENGSRVLVEDGLMRIWDRRRHLLAKVTRGTNRLYILSAQVAQPVCLAARRDDEAWQWHERFGHLHFEALKQLSAKEMVRGMPCLDVTPRNSRIEFQAECALKSPSRTSRGTQTTMLTFRSTSYKHHKSLTKNAAENKRNWS

SEQ ID NO: 18889 - protein, 1789 aa, Oryza sativa
  Clone ID: TF_OSC100146j.C1.p1.fg
MSNEVNHVGKAPMFNGTNYSTWKIKMSTHLKAMSFHIWSIVDVGFAITGKPLTEIDHRNLQLNAQAMNALFNSLSQEEFDRVSNLETAYEIWNKLAEIHEGTSEYKDAKLHFLKIQYETFSMLPHESVNDMYGRLNVIVNDLKGLGTNYTDLEVAQKMLRALPEKYETLVTMLINSDMSMMTPASLLGKINTNDMYKLKKKEMEEASPSKKCIALQAEVEDKGKGKVNEANEDLEEEIALLARRFNDLLGRRKERGRGSNSNRRRNRRPNKTLSNLRCFECGEKGHFASKCPSKDDDGDKSCKKKSGGYKLMKKLKKEGKKIEAFIGEWDSNEESSASSGSEEEGGDDASSKKKKMAVVAIKEALSLFAPLCLMAKGSSKVTSLSDNESDDDCDDVSYDELVSMFEELHAYSEKEIVKFKALKKDHASLEVLYEELKTSHERLTISHEKLKEAHDNLLSTTQHGALIDVGISCDLLDDSATCHIAHVASSSISISCDDLVDMSSSSSCISICDASLVVENNELKEQVAKLNKSLERCFKGKNTLDKILSEQRCILNKEGLGFIPKKGKKPSNRATRFVKSNGRLMMVALLLDMWVPLYSVVNYHTGGSHWVLDSGCTQHMTGDRAMFTTFEVGGNEQEKVTFGDNSKGKSIVAELFKKFAKRAQNEFSCTLVKIRSDNGSEFKNTNIEDYCDDLGIKHELSATYSPQQNGVVERKNRTLIEMARTMLDEYGVSDSFGAEAINTACHATNRLYLHILLKKTFYELIVGRKPNVAYFQVFGCKCYIYRKGVRLTKFESRCDEGFLLGYASNSKAYRVYNKNKGIVEETADVQFDETNGSQEGHENLDDVGDEGLMRTMKNMSIGDVKPIEVEDKPSTSTQDEPSTSAMPSQAQVEVEEEKVQDPPMPPRIHTALSKDHPIDQVLGDISKGVQTRSRVASICEHYSFVSCLEPKHVDEALCDPDWMNAMHEELNNFARNKVWTLVERPRDHNVIGTKWVFRNKQDENGLVVRNKARLVAQGFTKVEGLDFGETFAPVARLEAIRILLAFASCFDIKLFQMDVKSAFLNGEIAELVFVEQPPGFEDSKYPNHVYKLSKALYGLKQAPRAWYERLRYFLLSKDFKIGKVDTTLFTKIIDDDFFVCQIYVDDIIFGSTNEVFCKKFGDMMSREFEMSMIGELSFFLGLQIKQLKDGTFVSQTKYIKDLLKRFGLEDAKPIKTPMATNGHLDLDEGGKPVDLKLYRSMIGSLLYLTASRPDIMFSVCTCARFQAAPKECHLVAVKRILRYLKYSSTIGLWYPKGAKFKLAGYSDSDYAGCKVDRKSTSGSCQMLGRSLVSWSSKKQNSVALSTAEAEYVSAAMPPRTRHGRREPMPNPVNENEESSGDEYVQSDDDNMENVEGDEMEVSDDGDDNGSGNGEDDEASDDGSPLDSTIQFVFNLRNAQQYTILRHHDQFRRPNDCNDPRFHTQFQKSVYEQVYANKAFAEHKWISWRHIGETPEFEDLQEMFWTVGIDRIVTMKQSFDEDLIRQFYATVWVSGDCDAMKWMSGTLQCSINRREFKELLHIRFNNGDDLHDEHTHNPFPIDHFSQIYEDGGRHTYGKVAVRATILPRCGNNDDIRGVAWHVIDAILDGRRFDVINLMMKEIAISKGTIGQGIYYAPYIMRLIQSKLGQIGHNLKEHKEYKPRLQLSSPKAPRVRQPTFDQGASSSAAPPPPHGSDPSAFFHPQYAYFGMQPNEFFNPVLGAINTLSESIQRLSTGHEALHEDVRGLRTDVGNLNTSVGRLHTRVGVLDS

SEQ ID NO: 18890 - protein, 721 aa, Oryza sativa
  Clone ID: TF_OSC102011j.C1.p13.fg
MALPHRTGTMVTTGFRPSSGKSALAVCGLNPTLTKTNYVEWAVVMRIRLQVRHMWEPVRHGDVNYDEDQRAPRSGLPRRPGTPSLRHASEATALASPHCRHFARSGRTWPSSQKLVSYGDDTYDEERAVKKLFRCIPEKYKQIARSIESLLDLSTMSIEEAIGSFISLESSGRPARVTGRRGSPLPRQAASAARDTSCEDAPRVAPAEAPKPARDDACRNYGKFGHWAKDCRQPRHGQANVAQVEEEEESALLLAHASIELSPAAPAAAAFLQLDEPKALKRLSAKEMVRGLPCLDHVKQLCDVCVLTKQRRLPFPQQISFRAKERLELVHGDLCGPVTPATPGGRRYFMLLVDDLSRFMWVMVLGSKGEVADAIRRAQAAAEADCGGEFTAAEFASYCADECIQHHYFAPYSPQQYGVVERHNQTVVGMARALLKQRGMPAVFWGEAVVTAVYILNRSTTKARTRLGMGASRRPRASTDSSSDTLSSYDFGCNEFFADTITTGDPTHSSTNSHPSGHIHSDARLCQAQPGGVRYSALSRRGAHRRIPRHRRGCLRPRGAIPGKEGKVLLLALAAQESWCVHHMNVKSAFLNDDLKEEVYVHQPPGFAIPDKEGKVLLLHMALYGLWQAPRAWNTKLDSTLKGMGFEQSPHEVAINRLGNGGNVLLVGVYVDNLVITGTKDAEVAAFKEEMKATFQMSDLGPLFFYLGIEVHQDDSGITFR

SEQ ID NO: 18891 - protein, 1290 aa, Oryza sativa
  Clone ID: TF_OSC10931j.C1.p1.fg
EVEDKGKGKVNEVNENLEEENALLARRFNDFLGRRKERGKGSNSNRRRNRRPNKTLSNLRCFECGEKGHFASKCPSKDDDGDKSSKKKSGGYKLMKKLKKEGKKIEAFIEEWDSNEESSPHPGSSKVTSLSDSESDDDCDDVSYDELVSMFEELHAYSEKEIVKFKALKKDHASLEVLYEELKTSHERLTISHEKLKEAHDNLLSTTQHGALIDVGISCDLLDDSATFHIAYVASSSISTSCDDLVDMSSSSSSSCVSICDASLVVENNELKEQVAKLNKRLERCFKGKNTLDKILSEQRCILNKEGLGFIPKKGKKPSHRATRFVKSNGRLMMVALFLDMWVPLYSVVNYHTGGSHWVLDSGCTQHMTGDRAMFTTFEVGRNEQEKVTFGDNSKGKVIGLGKIAISNDLSIDNVSLVKSLNFNLLSVAQICDLSLSCAFFPQEVIVSSLLDKSCVFKGFRYGNLYLVDFNSSEANLKTCLVAKTSLGWLWHRRLAHVGMNQLSKFSKRDLVMGLKDVKFEKDKLCSACQAGKQVACSHPTKSIMSTSKPLELLHMDLFDPTTYKSIGGNSHCLVIVDDYSRYTWVFFLHDKSIVADLFKKFAKRAQNEFSCTLVKIRSNIGSEFKNTNIEDYCDDLGIKHELFATYSPQQNGVVERKNRTLIEMARTMLDEYGVSDSFWAEAINTACHATNRLYLHRVLKKTSYEVIVGRKPNIAYFRVFGCKCYIHRKGVRLTKFESRCDEGFLLGYASKSKAYRVYNKNKGIVEETADVQFDETNGSQEGHENLDDVGDEGLMRVMKNMSIGDVKPIEVEDKPSTSTQDEPSTSAMPSQAQVEVEEEKAQEPPMPPRIHTALSKDHPIDQVLGDISKGVQTRSRVTSICEHYSFVSCLERKHVDEALCDPDWMNAMHEELKNFARNKVWTLVERPRDHNVIGTKWVFRNKQDENGLVVRNKARLVAQGFTQVEGLDFGETFAPVARLEAICILLAFASCFDIKLFQMDVKSAFLNDTKYPNHVYKLSKALYGLRQAPRAWYERLRDFLLSKDFKIGKVDITLFTKIIGDDFFVYQIYVDDIIFGSTNEVFCKEFGDMMSREFEMSMIGELSFFLGLQIKQLKNGTFVSQTKYIKDLLKRFGLEDAKPIKTPMATNGHLDLDEGGKPVDLKLYRSMIGSLLYLTVSRPDIMFSVCMCARFQAAPKECHLVAVKRILRYLKHSSTIGLWYPKGAKFKLVGYSDPDYAGCKVDRKSTSSSCQMLGRSLVSWSSKKQNSVALLLPRQNMFRRVVVVPNCFG

SEQ ID NO: 18892 - protein, 293 aa, Oryza sativa
  Clone ID: TF_OSC17329j.C1.p1.gm
GRSDRPHSGGLTGVPCPVTSPRRLWRRPGAGFAITGTPLMEIDHRNLQLNAQAMNALFNSLSQEEFDRVSNLETAYEIWNKLAEIHEGTSEYKDAKLHFLKIQYETFSMLPHESVNDMYGRLNVIVNDLKGLGANYTDLEVAQKMLRALPEKYETLVTMLINSDMSRMTPASLLGKINTNDMYKLKKKEMEEASPSKKFNDFLGRRKERGKGSNSNRRRNRRPNKTLSNLRCFECGEKGHFASKCPSKDDDGDKSSKKKSGGYKLMKKLKKEGKKIEAFIEEWDSNEESSPHP

SEQ ID NO: 18893 - protein, 1140 aa, Oryza sativa
  Clone ID: TF_OSC19010j.C1.p1.fg
MSNEVNHVGKAPMFNGTNYSTWKIKMSTHLKAMRFHIWSIVDVGFAITGTPLTEIDHRNLQLNVQAINDLFNSLSQEEFDRVSNLETAYEIWNKLAEIHEGTSEYKDAKLHFLKIQYETFSMLPHESVNDMYGRLNVIVNDLKGLGANYTDLEVAQKMLRALPEKYETLVTMLINSDMSRMTPASLLGKINTNDMYKLKKKEMEEASPSKKCIALQAEVEDKGKGKVNEANENLEEEIALLARRFNDLLGRRKERGRGCNSNRRRNRRPNKTLSNLRCFECGEKGHFASKCPSKDDDGDKSSKKKSGGYKLMKKLKKEGKKIEAFIGEWDSNEESSASSGSEEEDGDDASSKKMTVVAIKEAPSLFAPLCLMAKGSSKVTSLSDSESDDDCDDVSYDELVSMFEELHAYSEKEIVKFKALKKDHASLEVLYEELKTYHARLTISHEKLKEAHDNLLSTTQHGALIDVGISCDLLDDSATCYIAHVASSSISTSCDDLVDMSSSSSSSCVSICDASLVVENNELKEQVAKLNKSLERCFKGKNTLDKILSEQRCILNKEGLGFIPKKGKKPSHRATRFVKSNGRLMMVALLLDMWVPLYSVVNYHTGGSHWVLDSGCTQHMTGDRAMFTTFEVGGNEQEKVTFGDNSKGKSIVAELFKKFAKRAKNEFSCTLVKIRSDNGSEFKNTNIEDYCDDLGIKHELSATYSSQQNGVVERKNRTLIEMARTMLDEYGVSDSFWAEAINTACHATNILYLHPLLKKTSYELIVGRKPNVAYFRVFGCKCYIYQKGVRLTKFKSQCDEGFLLGYASNSKTYRVYNKNKGIVEETAVVQFDETNGSQEGHENLDDVGDEGLMRAMKNMSIGDVKPIEVEDKPSTSTQDEPSTSATPSQAQVEVEEEKAQDPPMPPRIHTALSKDHPIDQVLGDISKGVQTRSRVVSICEHYSFVSCLEPKHVDEALCDPEWMKAMHEELNNFARNKVWTLVERPRDHNVIGTKWVFRNKQDENGLVVRNKARLVAQGFTQVEGLDFGETFAPVARLEAVLILLAFASCFDIKLFQMDVKSTFLNGEIAELVFVEQPPDFEDPKNPNHVYKLSKALYGLKQAPRDWYVSVIWDREYHDQRLEADAIAHVAWHLRGRRARG

SEQ ID NO: 18894 - protein, 1076 aa, Oryza sativa
  Clone ID: TF_OSC27261j.C1.p6.gm
MERGGPCDGLCRFRIHLGTRGDCPLPARDGGFAITGTSLTEIDNRNLQLNAQAMNALFNSLSQEEFDRVSNLETAYEIWNKLAEIHEDTSEYKDAKLHFLKIQYETFSMLPHESVNDMYGRLNVIVNDLKGLGVNYTDLEVAQKMLRALPEKYETLVTMLINSDMSRMTPASLLGKINTNDMYKLKKKEMEEASPSKKCIALQAEVEDKGKGKVNEANEDLEEEIALLARRFNDLLGRRKERGRGSNSNRRRNRRPNKTLSNLRCFECGEKGHFASKCPSKDDDGDKSSKKKSGGYKLMKKLKKEGKKIEAFIGEWDSNEESSASSGSEEEGGDDASSKKKKMAVVAIKIVKFKALKKDHASLEVLYEELKTSHERLTISHEKLKEAHDNLISTTQLGALIDVGISCDLLDDSATRHIAHVASSSISTSCDDLVDMSSSSSSSCVSICDASLVVEKNELKEQMAKLNKSLERCFKGKNTLDKILSEQRCILNKEGLGFIPKKGYASKSKAYRVYNKNKGIVEETADVQFDETNGSQEGYENLDDVCDEGLMRAMKNMSIGDVKPIEVEDKPSTSTQDEPSTSATPSQAQVEVEEEKAQDPPMPPRIHTALSKDHPIDQVLGDISKDEALCDPDWMNAMHEELNNFARNKVWTLVERPRDHNVIGTKWVFRNKHDENGLVVRNKAREFEMSMIGELSFFLGLQIKQLKDGTFVSKTKYIKDLLKRFGLEDAKPIKTPMATNGYLDLDEGVMPPRTCHDRRAPTPDPVSEPGESSGEDYAQSDEEVEANVEGASEEASGDDDSGSGEDEDEGRKAFAEHKWISWRDINETPEFEGLQDLFKTVGIDRIMTLKQDYNEDLIRQFYATVWVAGDYSEMKWMSDTLQCSISRRQFWRLLNIRLDFGDDLHEEHTHNPLSIDYLSQFYEDGVRYTHGKVAGLRTIPSVVNRIVRATILPRLGNNDDIRGVAWHVIDAIIQGRQFDIVSLMMQEIAISKGTFTQGIYYAPYIMRLIQDKLGAAGQNLKKHKQYKPRLQLGTPRAPRAAPSSHPGASSSSAPPPPPHGYVPNAFFHPQYAYFGM

SEQ ID NO: 18895 - protein, 320 aa, Oryza sativa
  Clone ID: TF_OSC31820j.C1.p1.fg
MELGSPQQGVGNQRVSEPRLCYLTGTPLTEIDHSNLLLNAQVMNALFNSLSQEEFDRVSNLKIAYEIWNKLAEIHEGTSEYKDAKLHFLKIQYETFSMLPHESVNDMYGRLNVIVNDLKGLGATYTDLEVAQKMLSALPEKYETLIAMLINSDMSRMTPASLLGKINTNDMYKLKKKEMEEASPSKKCIALQAEVEDKWKSKVNEANDDLEEEIALLAKRFNDLLGRRKERGRGSNSNRRRNIIPNKTLSNLRCFECGEKGHFASKCPSKANDGDKSSKKKSGGYKLMKKLKKEGKKIEAFIGQWDSNEESSTSSGSEEE

SEQ ID NO: 18896 - protein, 1879 aa, Oryza sativa
  unsure (1)..(1879): unsure at all Xaa locations
  Clone ID: TF_OSC400192j.C1.p40.np
RFVINHRNQIKALELTPAAQLPSEADVVATAADGGRCGVGSTAVGGGGRIRLSRRWERRGWWEWTARQLVWHDHLHAGSSLVTLGGCRLLDGLWRSCPVTSPRRLWRRPGAGFAITGKPLTEIDHRNLQLNAQAMNALFNSLSQEEFDRVSNLETAYEIWNKLAEIHEGTSEYKDAKLHFLKIQYETFSMLPHESVNDMYGRLNVIVNDLKGLGANYTDLEIAQKMLRALPEKYETLVTMLINSDMSRMTPASLLGKINTNDMYKLKKKEMEEASPSKKCIALQTEVEDKGKGKERGRGSNSNRRRNRRPNKTLSNLRCFECGEKGHFASKCPSKDDDGDKSSKKKSGGYKLMKKLKKEGKKIEAFIGEWDSNKESSASSGSEEEGGDDASSKKKKMAVVAIKEAPSLFAPLCLMAKGSSKVTSLSDSESDDDCDDVSYDEFVSMFEELHAYSEKEIVKFKALKKNHASLKVLYEELKTSHERLTISHEKLKETHDNLLSTTQHGAHIDIGISCDLLNDSATCHIAHVASSSISTSCDDLVDMPSSSSSSCVSICDVSLVVENNELKEQVAKLNKSLERCFKGRLMIVVLLLDMWVPLYLVVNYHTDGSHWVLDSGCTQHMTGNRAMFTTFEVGGKEQEKVTFGGNSKGKVIGLVAKTSLGWLWHMRLAHVGMNQLSKLSKRDLVVGLKDVKFEKDKLCSACQAGKQVACSHPTKSIMSTSRPLELLHMDLFGPTTYKSIGVERKNRTLIEMAMTMLDEYGVSDSFWAEAINTACYATNRLYLHRLLKKTSYVLIVGRKPNVAYFRVFGCKCYIYRKGVRLTKFESRCCDEGFLLGYASNSKAYQVYNKNKGIVEETADVQFDETNGSQEGHENLDDVDDEGLMRDMKNMSIGDVKPIEVEDKPSTSTQDEPSTSASPSQAXIEVEEEKAQDPPMPPRIHTALSKDHPIDQVLGDISKGVQTRSRVASICEHYSFVSCLEPKHVDEALCDPDWMNAMHEXLNNFARNKVWTLIERPRDHNAIGTKWVFRNNQDENRLVVRNKARLVTQGFTQVEGLDFGETFAPVARLEAIRILLGFASCFDIKLFQMDVKSAFLNGEIAELVFVEQPPGFEDPKNSNHVCKLSKGLYGLKQAPRAWYERLRDFLLSKDFKIGKVDTTLFTKIIGDDFFVCQIYVDDIIFGSTNEVFCKEFGDMMSREFEMSMIGELSFFLRLQIKQLKDGTFLSQTKYIKDLLKRFGLEDAKPIKTPMVTNGHLDLDEGGKPVDLKLYHSMIGSLLYLTASRPDIMFSVCMCARFQVAPKECHLVAVKRILRYLKHSSIIGLWYPKGAKFKLVGYSDSDYAGCKVDRKSTSGSCQMLGRSLVSWSSKKQNSVALYCRSGICFSGNXILSFGQNEIYPQNKIEKEFEKSFKTKLRWSDRVPAAGLTALGRRSDRHMDGGLTGCWPSAMPPRTRRGRREPTLDPVSENEESNGDEYVQSDDEVMENIEGDEVEVSGDNGSGDGEDDEASDDGSPLDNGSGDGEDDEASDDGSPLDPTIQFVLNLRNAXQYTILRHHDQFRRPNDCNDLRFHTRYQKSVVSGDCDAMKWMSGTLRCSINCRAFKELLHIHFNNRDDLHDEQNHNPFPIDHFSQFYEEGRRHTYGKVVSLRAIPSLINRIVRATILPRCGNNDDICGVAWHVIEAIMDGRRFGVINLMMKEIAISKGTIGQGVYYAPYIMRLIQSKLRQIGNNLKEHKDYKPHLQLSTPRAPRVRQPTFDQGASSSAPPPPHGYDPSAFFHPQYAYFGMQPNEYFNPVLGAINTLSESIQRLSTGHXALHEDVHGLRTDVGDLNASVGRLHTRVGVLDSXVQMLESTQAFVYHRRRDAPHPSSLARPPSPPQ

SEQ ID NO: 18897 - protein, 1796 aa, Oryza sativa
  unsure (1)..(1796): unsure at all Xaa locations
  Clone ID: TF_OSC400703j.C1.p6.np
ELVWHLIDHLHAGSLLVTLGGCRLLDGLWRSCLVISPRRLWRRPGAGFAITGTPLTEIDHRNLQLNAQMNALFNSLSQEEFDRVSNLETAYEIWNKLAEIHEGTSEYKNAKLHFLKIXYETFSMLPHESVNDMYGRLNVIVNDLKGLGANYTDFEVAQKMLRALPENYETLFTMLINSDMSRMTPASLLGKINTNDMYKLKKKEMEEASPSKKCIALQAEVEDKGKGKERGRGSNSNRRERGRGSNSNRRRNRRPNKTFSNLRCFECGEKGHFASKCPSKDDDGDKSSKKKSGGYKLMKKLKKEGKKIEAFIGEWDSNEESSASSGSEEEGGDDVSSKKKKMAVVAIKEAPLFAKGSSKVTSLSDSEGDDDCDDVSYDEFVSMFEELQAYNEKEIVKFKALKKDHASLDVLYEELKTSHERLTISHEKLKEAHDNLLSTTQHGAHIDVGISCDLLDDSATCHIAHVASSSIPTSCDDLVDMPSSSSSSCVSICDASLVVENNELKEQVANDKSLERCFKGRLMMVALLLDMWVPLYSVVNYRTGGSHWVLDSGCTQHMTGDRAMFTTFEVGGNEQEKVTFGDNSKGKVIGLVKTSLGWLWHRRLAHVSMNQLSKLSKRDLVVGLKDVKFEKDKLCSACQAGKQVACSHPTKSIMSTSRPLELLHMDLFGPTTYKSIGVERKNRTLIEMARTMLDEYGVSDSFWAEAINTACYATNRLYLHHLLKKTSYELIVGRKPNVAYFRVFGCKCYIYRKGVRLTKFASRCDEGFLLGYASNSKAYRVYNKNKGIVEETANVHFDETNGSQEGHENLDDVGDEGLMRAMKNMSIRDVKPIKVEDKPSTFTQDEPSTSATPSQAQVEVEEEKAQDPPMPQRIHTALSKDHPIDQVLGDISKGVQTRSRVASICEYYSFVSCLEPKHVDEALCDSDWINAMHEELNNFARNKVWTLVKRPRDHNVIGRKWVFRNKQDENGLVVXNNARLVAQGFTQVEGLDFGETFAPVARLEAIRILLAFASCFDIKLFQMDVKSAFLNGEIAELVFVEQPPGFEDPKNPNHVYKLSKALYGLKQAPRAWYERLKDFLLSKDFKIGKVDTTLFTKIIGDDFFVCQIYVDDIIFGFTNEVFCKXFGDLMSRGFEMSMIGELSFFLGLQIKQLKDGTFVSQTKYIKDLLKRFGLEDAKPIKTPMATNGHLDLDEGGKPVDLKLYRSMIGSLLYLTASRPDIMFSVCMCARFQAAPKECHLVAVKRILRYLKHFSTIGLWYPKGAKFKLVGYSDSDYAGCKVDRKSTSVSCQMLGISLVSWSSKKQNSVALYRRGGICFGGNXILSFGQNEIYPQNEIEKEFEKIFKTKLGAWQSDRRYMRGLTGQVRRSDRPHRAGLTGRGGPMMPPRTRHGCRAPTLDPMSEPEESSGEDYAQSDEEVEANVEGASEEASGDDVSGSGEDEDEQSDEMNIDPSIQFVVNMRNPSQYTILRHHDQFLRPRDTPDPHFHTAFQKMWVAGDXSEMKWMSDTLQCSISRRQFRQLLNIRLDFGDDLHEEHTHNPLSIDYLSQFYEDGVRYTHGKVAGLRTIPSVVKRIMRATILPRLGNNDDIRGVAWHVIDAIIQGRQFDIVSLMMQEIAIFKRTFTQGIYYAPYIMRLIQDKLGAAGQNLKKHKQYKPRLQPRAPRAPRTVPSSHPGASSSPAPPPPHGYDPNFFHPHYAYFGMQPNEYFNPVLGAINTLSESIQRLSTRHEALHEDVRGLRTDVGDLNASMGRLHTRVGALDSRVQMLESTQAFVYHRRRDTPNPSSLALPPSPPQ

SEQ ID NO: 18898 - protein, 1627 aa, Oryza sativa
  Clone ID: TF_OSC400718j.C1.p73.fg
MSNEVNHVGKAPMFNGTNYSTWKIKMSTHLKAMSFHIWSIVDVGFAITGTPLTEIDHCNLQLNAQAMNALFNSFSQEEFDRVSNLETAYEIWNKLAEIHEGTSEYKDAKLHFLKIQYETFSMLPHESVNDMYGRLNVIVNDLKGLGATYTDLEVAQKMLRALPKKYETLVTMLINSDMSRMTPASLLGKINTNDMYKLKKKEMEEASPSKKCIALQAEVEDKGKSKVNEANDDLKEEIALLARRFNDLLGRRKERVRGSNSNRRRNRRPNKTLSNLRCFECGEKGHFASKCPSKDDDGDKSSKKKSGGYKLMKKLKKEGKKIEAFIGEWDSNEESSASSGSEEEGGDDASSKKKKMAVVVIKEAPTLFAPLCLMAKGSSKVTSLSDSESDDDCDDVSYDELVSMFEELHAYSEKEIVKFKALKMDHASLEVLYEELKTSHERLTISHKKLNSSSSSCVSICDASLVVENNELKEQVAKLNKSLERCFNGKNTLDKILSEQRCILNKEGLGFIPKKSKKPSHRATRFVKSNGKHCSKYCEVGHLVNYRTGGSHWVLDTGCHAQKFTSCDNGCTQHTTGDRAMFTTFEVGGKEQEKVTFGDNSKGKVIGLVAKTSLGWLWHRRLAHVGMNQLSKLSKRDLVVGLKDVKFEKDKLCSACQAGKQVACSHPTKSIMSTPRPMELLHIDLFGPTTYKSIGGNSHCLVIIDDYSRYTWVFFLHDKSIVAELFKKFANRAQNEFSCTLVKIRSDNGSEFKNTNIEDYCDDLGIKHELSATYSPQQNGVVERKNRTLIEMARTMLDEYGYASNSKAYRVYNKNKGIVEETADVQFNETNGSQEGHENLDDVGDEGLMRAMKNMSIGDVKPIEVEDKPSTSTQDEPSTSASPSQPQVEVEEEKAQDSPMPPRIHTVLSKHHPIDQFLGDISKGVQTRSRVASICEHYSFVSCLEPKHVDEALCDPDWMNAMHEELNNFARNKVWTLVERPRDHNVIGTKWVFRNKQDEIGLVVRNKPRLVAQGFTQDEGLDFGETFAPVARLEAIRILLAFASCFDIKLFQMDVKSAFLNGEIAELVFVEQPLGFEDPKNPNHVYKLSKALYGLKQAPRAWYERLRDFLLSKYFKIGKVDTTLFTKIIGDDFFVCQIYVDDIIFGSTNEVFCKEFGNMMSREFEMSMIGELSFFLGVQIKQLKDGTFVSQTKYIKDLLKRFGLEDAKSIKTPIATNGHLDLDEGGKPVDLKLYRSMIGSLLFLTASRPDIIFSVCMCARFQAAPKECHLVAVKRILRYLKHSSTIGLWYPKGEARGVLRFAPIEGSFLLCLPALVMVVVSPRRSQVRMRNQADRSMLKGDEVEVSGDDTGSGDGEDDEASDDGSPLDPTIQFVLNLRNAQQYTILRHHDQFRRPNDCNDSRFHTRYQKAVYEQVYANKAFTEHKWISWRHIGETPEFVDLQGLFKAVGIDRIITMKQPFDEDLIWQFYATFYEEGGRHTYGKVAGLRVIPSVINRIVKATILPRCGNNDDIRGVAWHVIDAIMDGRRFHFINLMMKEIAISKGTIGQGIYYAPYIMRLIQSKLGQVGNNLKEHKEYKPRLQLSTPRAPRVRQPTFDQGASSSATPPPPHGYDTNAFFHPQYAYFGM

SEQ ID NO: 18899 - protein, 1767 aa, Oryza sativa
  Clone ID: TF_OSC401716j.C1.p99.fg
MSNEVNHVGKASMFNGTNYSTWKIKMSTHLKAMSFHIWSIVDVGFDITGTPLTESDHRNLQLNAQAMNALFNSLSQEEFDRVSNLETAYEIWNKLAEIHEGTSEYKDAKLHFLKIQYETFSMLPHESVNDMYGRLNVIVNDLKGLGANYTDLEVAQKMLRALPEKYETLVTMLINSDMSRMTPASLLGKINTNDMYKLKKEMEEASPSKKCVALQAKVEDKSKSKVNEVNEDLRKERGRGSNSNRRRNRRPNKTLSNLRCFECGEKGHFASKCPSKDDDGDKSSKKKTGGYKLMKKLKKEGKKIEAFIGEWDSNEESSVSSGSEEEGGDDASSKKKKMAVVPIKEAPSLFAPLCLMAKGSSKVTSLSDSESDDDCDDVSYDELVSMFEELHAYSEKEIVKFKALKKDHVSLEVLYEELKTSHERLTISHEKLKEAHDNLLSTTQHGAHIDVGISCDLLDDSATCHIAHIASSSISTSWDDLMDMPSPSSSSSSCVSICDASLIVENNELKEQVAKLNKSLERCFKGKNTLDKILSEQRCILNKEGLGFTPKKGKKPSHHATRFVKSNGKYCSKCCEVGHLVNYRTGGSHWVLDSGYTQHMTGDRAMFTTFEVGENEQEKVTFGDNSKGKVIGLGKIVISNDLSNENVSLVKSLNFNLLSVAQICDLGLSCAFFPQEVIVSSLLDKSCVFKGFRYGNLYLVDFNSSEANLKTCLVAKTSLGWLWHRRLAHVGMNQLSKLSKRDLVVGLKDLKFEKDKLCSACQAGKQVAGSHSTKSIMSTSRPLELLHMNLFGPTTYKSIGGNSHCLVIVDDYSRYTWVFFLHDKSIVAEFFKKFAKRAQNEFSCTLVKIRSDNGSEFKNTNIEDYCDDLHIKHELSATYSPQQNGVVERKNRTLIEMARTMLDEYGVSDSFWAEAINTACHATNRLYLHRLLKKTFYELIVGRKPNVAYFRVFGCKCYIYRNGVRLTKFESRCDEGFLLGYASNSKAYRVYNKNKGIVEETADVQFDETNGSQEGHENLDVVGDEGLMRAMKNMSIRDVKSIEVEDKPSTSTQDEPSTSASPSQAQVEVEEEKAQDPPMPPRIHTALSKDHPIDQVLGDISKGVQTRSRVASICEHYSFVSCLEPKHVDEALCDPDWMNAMHEELNNFARNKVWTLVERPRDHNVIGTKWIFRNKVDWWEFEMSMIGELSFFLGLQIKQLKDGTFVSQTKYIKDLLKRFGLEDAKPIKTPMATNGHLDLDEGDYAGCKVDRKSTSGSCQMLGRSLVSWSSKKQNSVALSTAEAEYVSAGSCCAQLLWMKQTLLDYGISFTKTPLLCDNDSAIKIANNPVQHSRTKHIDIRHHFLRDHVAKCDIVISHIRTEDQLADIFTKPLDETRFSMPPRTRHGRREPTPDPVSENEESSGDEYVQSDDDNMENVEGDEMEVSDDGDDNGSGNGEDDEASDDGSPLDSSIQFVLNLRNAQQYTILRHHDQFRRPNDCNDPRFHTRFQKSVYAQVYANKAFAEHKWISWRHIGETPEFENLQEMFRTVGIDRIVTMKQPFDEDLIRQFYATVWVSGDCDAMKWMSGTLRCSINRHEFKELLHIRFNNGDDLHDEHTHNPFPIDHFSQFYEEGRRHTYGKVAGLRALPSVINRIVRATILPRGGNNDDIRGVAWHVIDAIMDGRRFDVINLMMKEIAISKGTLGQGIYYAPYIMRLIQSKLGQIGHNLKEHKEYKPRLKLSSPRAPRVRQPTFDQGASSSAAPLLLKGMIQVFFFPSTICLLWNATQ

SEQ ID NO: 18900 - protein, 1475 aa, Oryza sativa
  Clone ID: TF_OSC405965j.C1.p6.fg
MSNEVNHVGKAPMFNGTNYSTWKIKMSTHLKAMSFYIWSIVDVGFAITGTPLTEIDHRNLQLNAQAMNALFNSLSQEEFDRVSNLETAYEIWNKLAEIHEGTSEYKDAKLHFLKIQYETFSMLPHESVNDMYGRLNVIVNDLKGLGANYTDLEVAQKMLRALSEKYETLVTMLINSDMSRMTPASLLGKINTNDMYKLKKKEMKEASPSKKCIALQAEVEDKSKSKVNEVNEDLEEEMVLLARKFNDLLGRRKERGRGSNSNRRRNRRPNKTLSNLRCFECGEKGHFASKCPSKDDDGDKSSKKKSGGYKLMKKLKKEGKKIEAFIGEWDSNEESSASSGFEEQCSDDASSKKKKMAVVAIKEAPSLFAPLCLMAKGSSKVTSLSDSESDDDCDDVSYDELVSMFEELHAYSEKEIVKFKALKKDHASLEVLYEELKTSHERLTISHEKLKEAHDNLLSTTQHGAHIDIGISCNLLDDSATCHIAHVASSSISTSCDDLMDMPSPSSSSSSCVSICDASLIVENNELKRDLDSFQRRVRNLLTMPLVLSRAMVNYRTGGSHWVLDSGCTQHMTGDRAMFTIFEVGGHEQEKVTFGDNSKGKLFKKFAKRAQNEFSCTLVKIRSDNGSEFKNTNIEDYCDDLGIKHELSATYSPQQNGVVERLYLHRLLKKTSYELIVGRKPNVAYFRVFGCKCYIYRKGVRLTKFESRCDEGFLLGYASNSKAYRVYNKNKGIVEETADVQFDETNGSQEGHENLDDVGDEGLMRAMKNMPIGDVKPIEVEDKSSTSTQDEPSTSASPSQAQVEVEEEKAQDPPMPPRIHTALSKDHSIDQVLGDINEALCNPDWMNAMHEELNNFARNKVWTLVERPRDHNVIGTKWIFRNKQDENGLVVRNKARLVAQGFTQVEGLDFGETFAPVARLEAIRILLAFTSCFDIKLFQMDVKSAFLNGEIAELVFVEQPPGFEDPKNPNHVYKLSKALYGLKQAPRAWYEILRDFLLSKDFKIGKVDTTLFTKIIGDDFFVCQIYVDDIIFGSTNEVFCKEFGDMMSREFEMSMIGELSFFLGLQIKQLKDGTFVSQTKYIKDLLKRFGLEDAKPIKTPMATNGHLDLDEGAMPPRTRHSRREPTPDPVSENEDSSGDEYVQSDDDNMENVEGDEIESVYAQVYANKAFAEHKWISWRHIGETPEFENLQEMFQTVGIDRIVTMKQPFDEDLIQQFYATVWVSGNCDAMKWMSGSLRCSINRREFKELLHIRFNNGDDLHDEHTHNPFPIDHFSQFYEEGGRHTLERWREIAISKGTIGQGIYYAPYIMRLIQSKLGQIGHNLKEHKEYKPRLQLSSPRAPRVRQPTFDQGASSSVVPPPPPHGYDPSAFFHPQYAYFGMQPNEYFNPVLGAINTLSESIQRLSTGHEALHEDVRGLRTDVGNLNTSVGRLHARVGVLDSRVQTLESTQAFVYHRRHDASHPSTSARPPSPPQE

SEQ ID NO: 18901 - protein, 575 aa, Oryza sativa
  Clone ID: TF_OSC408741j.C1.p7.gm
MGPSDKATTASFIAVAEYHGLTGHTPPIQYEIFSLLLHESVNDMYGRLNVIVNDLKGLGEIYTDLEVAQKMLRALTEKYETLVTMLINSDMSRMTPARLLGKINTNDIYKLKKKEMEEASPSKKCIALQAEVEDKGEEQERRGRGSNSNRRRNRRPNKILSNLRCFECGEKGHFASKCPSKDDNGDKSSKKKSGGYKLMKKLKKEGKKIEAFIGQWDSNEESSASSGSEEEGDDDANSKKKKMAVVAIKEAPSLFAPLCLMAKGSFKVTSLTDGESDDDCDDISYDEFVSMFEDLNTYSEKEIVKFKALKKDHASLEVLYEELKTSRERLTISHEKLKEAHDNLLSTTQHGAHIDVDISCDLLDDSASCHIPHVASSSISTACDDVTPGISIQNSKRLHRLGFAVDRVDGGGSRDWTAEIHPSKTDDQDPSVHDRATGNDDDDITSGGGSGVHACRRTTARRRERRAPTGSGRHSELTGDQNGGGRSTDGDGVEEKAAALFGLTTATVLRRLTATMEGRTRTATRRRPRRRSSRATATTRATAAHSWSDGDDGGARSHGARALRTTAGKGEGGDG

SEQ ID NO: 18902 - protein, 1539 aa, Oryza sativa
  Clone ID: TF_OSC413734j.C1.p11.fg
MSNEVNHVGKAPMFNGTNYSTWKIKMSTHLKAMSFHIWSIVDVGFAITGTPLTEIDHRNLQLNAQAMNALFNSLSQEEFDRVSNLETAYEIWNKLAKIHEGTSEYKDAKLHFLKIQYETFSMLPHESVNDMYGRLNVIVNDLKGLGANYTDLEVAKKMLRALPEKYETLVTMLINSDMSRMTPASLLGKINTNDMYKLKKKEMEEASPSKKCIALQAEVEDKGKVNDVNKNLEEEIALLARRFNDFLGRRKERGKGSNSNRRRNKRPNKTLSNLRCFECGEKGHFASKCPSKDDDGDKSSKKKSGGYKLMKKLKKEGKKIEAFIGEWDSNEESSASSGSKEEDGDDASSKKKKMAVVAIKEAPSLFAPLCLMAKGSSKVTSLSDSESDDDCDDISYDELVSMFEELHAYSEKEIVKFKALKKDHASLEVLYEELKTSHERLTISHEKLKEAHDNLLSTTQHGALIDVGISCDLLDDTLALALVYLFVMPHLLLRTMSLSSKWLSSTRAWRGASRVNYHTGGSHWVLDSGCTQHMTGDRAMFTTFEVGGNEQEKVTFVDNSKRKVIGLGKIAISNDLSIDNVSFVKSLNFNLLSVAQICDLGLSCAFFPQEVIVSSLLDKSCVFKGFRYGNLYFVDFNSSEANLKTCLVAKTSLGWLWHRRLAHVGMNQLSKLSKRDLVVGLKDVKFEKDKLCSACQAGKQVACSHPTKSIMSTSRPLELLHMDLFGPTTYKSIGGNSHCLVIVDDYSRYTWVFFLHDKSIVAELFKKIAKRAQNEFSCTLVKIRSDNGSEFKNTNIEDYCDDLGIKHELSATYSPQQNGVVERKNRTLIEMARTMLDEYGVSDSFWAEAINTACHATNRFYLHRLLKNTSYELIVGRKPNVAYFRVFGCKCYIYRKGVRLTKFESRCDEGFLLGYASNSKAYRVYNKNKGTVEETADVQFDETNGSQEGHENLDDVGDEGLIRAMKNMSFGDVKPIEVEDKPSTSTQDEPSTFATPSQAQVEVEEEKAQDPPIPPRIHTTLSKDHPIDQVLGDISKGVQTLSRVASICEHYSFVSCLEPKHVDEALCDPDWMNAMHEELNNFARNKVWTLVERPRDHNVIGTKWVFRNKQDENGLVVRNKARLVAQGFTQVEGLDFGETFAPVARLEAICILLAFASWFDIKLFQMDVKSAFLNGEIAELVFVEQPPGFEDPKYPNHDFKIGKVDTTLFTKIIGDDFFVCQIYVDDIIFGSTNEVFCKEFGDMMSREFEMSMIGELSFFLGLQIKQLKDGTFVSQTKYIKDLLKRFGLEDAKPIKTPMATNGHLDLDEGGKPVDLKLYRSMIGSLLYLTASRPDIMFSVCMCAWFQAAPKECHLVAVKRILRYLKYSSTIGLWYPKGAKFKLVGYSDSDYAGCKVDRNSTSGSCQMLGRSLVSWSSKKQNSVALSTAEAEYVSAGSCCAQLLWMKQTLLDYGISFTKTPLLCDNDSAIKIANNPVQHSRTKHIDIRHHFLRDHVAKCDIVISHIRTEDQLADIFTKPLDETRFCKLRNELNVIDFSNVA

SEQ ID NO: 18903 - protein, 479 aa, Oryza sativa
  Clone ID: TF_OSC415632j.C1.p3.gm
MLPHESVNDMYGRLNVIVNGLKGFGANYTDLEVAQKMLRALPEKYETLVTMLINSDMSRMTPASLLGKINTNDMYKLKKKEMEEASPSKKCIALQAEVEDKGKGKVNEVNEDLEEEISLLARRFNDLLGRRKERESGSNSNRRRNRRPNKTLSNLRCFECGEKGHFASKCPSKDDDGDKSSKKKSGGYKLMKKLKKEGKKIEAFIGEWDSNEESSASSGSEEEGGDDASSKKKKMAVVAIKEAPSLFSPLCLMAKGSSKVTSLSDSESDDDCDDVSYDELVSMFEELYAYSEKEIVKFKALKKDHASFEALEFEMSELSFFLGLQIKQLKDGTFVSQTKYIKDVLNRFGLEDAKPIKTPMATNGHLDLDEGVMPPRTRHGRRAPTPDPVSEPEESSGDEYAQSDEEVEANVEGASEEASGDDDSGSGEDEDEGSDDMHIDLSIQFVVNMRNLSQYTILRHHDQFFSPRDTPDPRFHTAF

SEQ ID NO: 18904 - protein, 1374 aa, Oryza sativa
  Clone ID: TF_OSC421293j.C1.p7.fg
MSNEVNHVGKAPMFNGTNYSTWKIKMSTHLKAMSFHIWSIVDVGFAITGTPLTEIDHCILQLNAQAMNALFNSLSQEEFDRVSNLETAYEIWNKLAEIHEGTSEYKDAKLHFLKIQYETFSMLPHESVNDMYGRLNVIMNDLKGLGANYTDLKVAQKMLRALPEKYETLVTMLINSDMSSMTPASLLGKINTNDMYKLKKKEMEEASPSKKCIALQAEVEDKGKGKVNEANEDLEEDIALLARRFNDLLGRRKERRRGSNSNRRRNRRPNKTLSNLRCFECGEKGHFASKCPSKDDDGDKSSKKKSGGYKLMKKLKKEGKKIEAFIGEWDSNEESSASSGSKEEGGDDASSKKKKMAIVAIKEAPSLFAPLCLMAKGYSKVTSLSDSESDDDCDDVSYDELVSMFEELHAYNEKEIVKFKALKKDHASLNVFSSFSSCVSICDASLVVENNELKEQVAKLNKSLERCFKGKNTLDKILSEQRCILNKEGLGFIPKKGKKPSHRATRFVKSNGRLMMVALFLDMWVPLYSVVNYRTGGSHWVLDSGCTQHMTGDRAMFTTFEVGGNEQEKVTFGDNSKGKLFKKFVKRVQNEFNCTLVKIRSDNGSEFKNTNIEDYCDDLGIKHKLSATYSPQQNGVVERKNCTLIEMARTMLDEYGVSDSFWAETINTACHATNRLYLYRLLKKTSYELIVGRKPNVAYFRVFGCKCYIYRKGARLTKFESRCDEGFLLGYASNSKAYQVYNKNKGIVEETADVQFDETNGSQEGHKNLDDVGDEGLMRAMKNMSIGDVKPIEVEDKPSTSTQDEPSTSATPSQAQVEVEEEKAQEPPMPPRIHTALSKDHPIDQVLGDISKGVQTRSRVASICEHYSFVSCLEPKHMNAMHEELNNFARNKVWTLVERPRDHNVIGTKWVFRNKQDENGLVVRNKARLVAQGFTHVEGLDFGETFAPVARLEAIRILLAFASCFDIKLFQMDVKSAFLNGEIAELVFVEQPPGFEDTKNPNHVYKLSKALYALKQAPRAWYERLRDFLLSKDFKIEKVDTTLFTKIIGDDFFVCQIYVDDIIFGSTNEVFCKEFGDMISREFEMSMIGELSFFLGLQIKQLKDGTFVSQTKYIKDLLKRFGLEDAKPIKTPMATNGHLDLDDGGKPVDLKLYRSMIGSLLYLTASRPDIMISVCMCARFQAAPKECHLVAVKRILRYLNHSSTIGLWYPKGAKFKLVGNSDSDYAGCKVDRKSTSGSFQMLGRSLVSWSSKKQNSVALSTAGAEYVSAGSCCAQLLWMKQTLLDYGISFTKTPLLCDNDSAIKIANNPVQHSRTKHIDIRHHFLRDHVAKCDIVISHIRTENQLADIFTKPLDETRFCKLRNELNVIDFSNVA

SEQ ID NO: 18905 - protein, 195 aa, Oryza sativa
  Clone ID: TF_OSC421503j.C1.p11.fg
MARRGEGGTTLKRRARGGLGGAGGNSSVEMAAWGGRHRGYTDLEVAQKMLRTLPEKYETLVTMLINSDMSRMTPASLLGKINTNDMYKLKKKEMEEASPSKKCIALQAEVEDKGKSKVNEANDDLEEHTALLARRFNDLLGRRKQRGRDSNSNRRRNRRPNKTLSNLRCFECGEKGHFASKCPSKDDDGDKSSKK

SEQ ID NO: 18906 - protein, 181 aa, Oryza sativa
  Clone ID: TF_OSC4271j.C1.p1.fg
MEEASPSKKCIALQAEVEDKGKVNDVNKNLEEEIALLARRFNDFLGRRKERGKGSNSNRRRNKRPNKTLSNLRCFECGEKGHFASKCPSKDDDGDKSSKKKSGGYKLMKKLKKEGKKIEAFIGEWDSNEESSASSGSKEEDGDDASSKKKKMAVVAIKEAPSLFAPLCLMAKGSSKHFYLL

SEQ ID NO: 18907 - protein, 1020 aa, Oryza sativa
  Clone ID: TF_OSC5481j.C1.p1.fg
MSNEVNHVGKASMFNGTNYSTWKIKMSTHLKAMSFHIWSIVDVGFDITGTPLTESDHRNLQLNAQAMNALFNSLSQEEFDRVSNLETAYEIWNKLAEIHEGTSEYKDAKLHFLKIQYETFSMLPHESVNDMYGRLNVIVNDLKGLGANYTDLEVAQKMLRALPEKYETLVTMLINSDMSRMTPASLLGKINTNDMYKLKKEMEEASPSKKCVALQAKVEDKSKSKVNEVNEDLRKERGRGSNSNRRRNRRPNKTLSNLRCFECGEKGHFASKCPSKDDDGDKSSKKKTGGYKLMKKLKKEGKKIEAFIGEWDSNEESSVSSGSEEEGGDDASSKKKKMAVVPIKEAPSLFAPLCLMAKGSSKVTSLSDSESDDDCDDVSYDELVSMFEELHAYSEKEIVKFKALKKDHVSLEVLYEELKTSHERLTISHEKLKEAHDNLLSTTQHGAHIDVGISCDLLDDSATCHIAHIASSSISTSWDDLMDMPSPSSSSSSCVSICDASLIVENNELKEQVAKLNKSLERCFKGKNTLDKILSEQRCILNKEGLGFTPKKGKKPSHHATRFVKSNGKYCSKCCEVGHLVNYRTGGSHWVLDSGYTQHMTGDRAMFTTFEVGENEQEKVTFGDNSKGKVIGLVAKTSLGWLWHRRLAHVGMNQLSKLSKRDLVVGLKDLKFEKDKLCSACQAGKQVAGSHSTKSIMSTSRPLELLHMNLFGPTTYKSIGGNSHCLVIVDDYSRYTWVFFLHDKSIVAEFFKKFAKRAQNEFSCTLVKIRSDNGSEFKNTNIEDYCDDLHIKHELSATYSPQQNGVVERKNRTLIEMARTMLDEYGVSDSFWAEAINTACHATNRLYLHRLLKKTFYELIVGRKPNVAYFRVFGCKCYIYRNGVRLTKFESRCDEGFLLGYASNSKAYRVYNKNKGIVEETADVQFDETNGSQEGHENLDVVGDEGLMRAMKNMSIRDVKSIEVEDKPSTSTQDEPSTSASPSQAQVEVEEEKAQDPPMPPRIHTALSKDHPIDQVLGDI

SEQ ID NO: 18908 - protein, 536 aa, Oryza sativa
  Clone ID: TF_OSC6365j.C1.p1.np
LVWHDHLRARSSLVTLGGCRLLDGLWRSCPVTSPRRLWRRPGAGFAITGTLLMEIDHRNLQLNAQAMNALFNSLSQEEFDRVSNLETAYEIWNKLAEIHEGISEYKDAKLHFLKIQYETFSMLPHESVNDMYGRLNVIVNDLKGLGANYTDLEVAQKMLRALPEKYETLVTMLINSDMSRMTPASLLGKINTNDMYKLKKKEMEEVSHSKKCIVLQAEVKDKGKGKERGRDSNSNRRRERGRDSNSNRRRNRRPNKTLPNLRCFECGEKGHFASKCPSKDDDGDKSSKKKSGGYKLMKKLKKEGKNIEAFIGEWDSNEESSASSGSEEEGGDDASSKKKKMAVVAIKEAPSLFAPLCLMAKDSSKVAFLSDSESDDDCDDVSYDELVSMFKELYAYSEKEIVKFKARKKDHASLEVLYEELKTSHERLTISHEKLKEAHDNLLSTTQHGVLIDVGISCDLLDDSAICHIAHVVSSSISTSCDDLVDMPSSSSSTCVSICDASLVVENNELKEQVVKLNSLEMCFKGKDTLDKILSE

SEQ ID NO: 18909 - protein, 1011 aa, Oryza sativa
  Clone ID: TF_OSC900219j.C1.p12.gm
MNRSNMRNILNTYRGDGKTGCVKTANPAGSHDRRLPGGGGNGSGGGCCALPSARSGKRGFGGLPRPAADRRRQQRRRWPHPLHLAGLTGWHRRSDRHVKAGFAITGTPLTEIDHRNLQLNAHAMNALFNSLCQEEFDRVSSLETAYEIWNKLVEIHEGTSEYKDAKLHFLKIQYETFSMLPHESVNDMYGRLNVIVNDLKGLGANYTDLEVAQKMLRALPEKYETLVTMLINSDMSRMTPASLLGKINTNDMYKLKKKEMEEASPSKKCIAFQAEVEDKGKVKVNEANKDLEEEIALLARRFNDLLGRRKERGRGSNSNRRRNRRPNKTLSNLRCFECGEKGHFASKCPSKDDDGDKSSKKKSGGYKLMKKLKKEGKKIEAFIGEWDSNEESSVSSGSEEEGGDDASSKKKKMAVVAIKEAPSLFAPLCLMAKGSSKVTSLSDSESDDDCDDISYDELVSMFEELHAYSEKDIVKFKALKKDHASLEVLYEELKTSYERLTISHEKLKEAHDNLLSTTQHGAHIDVGISCDLLDYSATCHIAHVASSSISTSCDDLVDMPSSSSCVSICDASLVVENNELKEQVAKLNNSLEKCFKGKNTLDKILSEQWCILNKEGLGFIPKKGKKPSHRATHFVKSNGRLMMVALLLDLWVPLYLVVNYRTGGSHWVLDSGCTQHMTGFLLSYASNSKAYWVYNKNKGIVEETADVQFDETNGSQEGHENLDDVGDEGLMIAMKNMSVRDVKPIEVEHKPSTSTQGEPSTSASPSQAQVEMEEEKAQDPPMPPRIHTALSKDHPINQVLGDISKDEALCDPDWMNAMHEELNNFTRNKVWTLVERPRDHNVIGTKWVFRNKQDENELVQLKDGTFVSQTKYIKDLLKRFGLEDAKPIKTPMATNRYLDLDEGVGWGRRSDRPYRLGLTGLELAPEMTSDKQYTCLLLRSSALPVDARFILHSMASDFLATLALKPGMDLTGTDIPTPGVSTPASARDESQEALIILTGWGEACDRPPVAT

SEQ ID NO: 18910 - protein, 1648 aa, Oryza sativa
  Clone ID: TF_OSC401828j.C1.p6.fg
MSDARSRRSDASSTRRQQDAELAAAEERRRATAQTAAAAARAARLAAAELAAARAEAEAEAAEDAACAAEVEVETLRSSINGSIAGDITADRELEELARGRARERAERWAAAHLHGGGGGPRDHGPANGNPDGRGRAGGSPEPARGPRRQRGSFSPDRRHGHHGVQTVVRDFGPGGGWPTLTKTNYIEWAAVMRVRLQVRHMWEAVRYGDVDYDEDRRALDALIAAVPPEMQFSLSQKRTAKEAWDAIAAARIGSDRARKSTLQALRKEWENLAFKPGEDVDDFALRLNTLLQKMVQYGDDTYDEERAVEKLFRCVPEKYRQIARSIESLLDLSTMSIEEALGRLKVVDGDEPQPLSGPITIGGKLHLTREQWEASQGDGRKGESSSPTGGRKPRKARGGVQLRWARRRAEGGARRGAQGVATGNHKPARDDACRNCVKLGHWAKDCRQPRRGQAHVARVEEEEPALLLAHASIELPPAAPAAAAFLHLDEPKVLVSLCDGSSNDKADGWYLDTGATHHMTGRREFFTEFDSSVRGSVKFGDASGVEIKGVGSVTFTAKSGEHRLLTGVYYIPALRNSIISVGQLDENGSCVLVEDGLMRIWDRRRRLLAKVTRGTNRLYILSAQVAQPVCLAARRDDEAWQWHERFGHLHFEALKRLSAKEMVRGMPCLDHVEQLCDVCVVTKQRRLPFPQQTSFRAKERLELVHGDLCGPVTPATPGGRRYFLLLVDDLSRYMWVMVLGSKGEAADAIRRAQAAAEAECGRKLRVLRTDNGGEFTAAEFASYCADEGIQRHYTAPYSPQQNGVVERRNQTVVGMARALLKQRGMPAIFWGEAVVTAVYILNRSPTKALDGRTPYEAWHGHKPAVSHLRVFGCLAFAKELGHIGKLDDRSTPGVFIGYAEGSKAYRILDPETQRVRTARDVVFDEGRGWVWDKAVDDGSTPTYDDFTIEYVHFEGAGGVGSFSSSVSTPAPESPPTPTPTHPRATTSTTTSSSSTPPQPVTPHAPAPTATPPSTSTPTPARVERSPVEFATPLSHDGERIDAYHDGEQLRYRTMEDLLGDQPVPGLVPRDLEAQLHLACDDGEPRSFAEAEKHAAWRAAMQSEMDAVQENRTWELADLPRGHRAITLKWVFKLKRDEAGAIVKHKARLVARGFVQQEGIDYDDAFAPVARMESVRLLFALAAQEGWGVHHMDVKSAFLNGDLKEEVYVHQPPGFVIPGKEGKVLRLHKALYGLRQAPRAWNAKLDSTLKGMGFEQSPHEVAIYRRGIGGNALLVGVYVDDLVITGTKDAEVAAFKEEMKATFQMSDLGPLSFYLGIEVHQDNSGITLRQTAYAKRVVELAGLTDCNPALTPMEERLKLSRDSTAEEVDATQYRRLVGSLRYLTHTRPDLAFFVGYVSRFMQRPTTEHQQAVKRIIRYVAGTLDHGLYYPRCPGKAHFVGYSDSDHAGDIDTSKSTSGILFFLGECLVSWQSIKQQVVALSSCEAEYMAASAASTQALWLARLLSDLLGRDTGAVELRVDSKSALALAKNPVFHERSKHIRVSCCLVCDHDGDGHPDGAGEQSDGPQEVERDDGADKREPGQEQELGAGGDEREEADNLGGAGRVSLHFAPAGAASSTTSLAPWARTHGATVPDRARAAADMPFSRLT

SEQ ID NO: 18911 - protein, 1443 aa, Oryza sativa
  Clone ID: TF_OSC10374j.C1.p1.fg
MVVQNDWAYATGMPRYKPEYLFGVEGFVQELRTMSFVIGFGTAPFYAQIPHDRHEEKCRVKVTLNSNSEDIPSVMFEARGRNYIHACQEVARIAIGELRDRYSDQLADTEYRYHPRQPQGSDRGSYLETEGIENDATTRHLVEMLRAMDETRAEVVLAAQDREDRNRGKICKLEDKVDRLEKELAALKGEAPPQKARIRLTARKRALFVPRYQLAPKVRVVEKEVTPALADPPVVNMVLTRSNGNGPNNNNNNNNNGENPTLAQVLAQQAQLMNMMMQQLQNQQNQGNNHAPPQNKLAEFLRVRPPTFSSTTNPVEAGDWLHDIEKKLDLLQCTDQEKVSFASHQLHGPASEWWDHFRLNRTTAEPITWLEFTAAFRKTHIPSGVVSLKKEFRSLTQGSRSVTEYLHEFNRLARYAPEDVRTDEERQEKFLEGLNDELSYPLMTGDYHDFQKLVDKAIRQEDKYNRMEQKKRRIAQFKAQQGNSQRPRLTLGPQSMPQGGSSSVVRPHRQFFNHNAGNNIRNQAPRPVAASTQQQPAKKEQGSKPGVCFNCGDLGHYADKCPKPRRVKVVPTQSNSTAPASKARVNHVAAAEAQGAPDVILGTFLVNLVPATVLFDSGASHSFLSMSFAGNHGMEVEDLRRPLMVSTPSNQALSLQRSPSVRIEIQGVPFLANLILLESKDLDVILGMDWLARYKGVIDCANRKVTLTSNDGRVVTVHALSSESLRSRLNQITLDEIPVVREYPDVFPDNLPGMPPKRDIEFRIDLVPGTTPIHKRPYRMAANELAEVKRQVDDLLQKGYIRPSSSPWGAPIDLRSGYHQLRINEEDIPKTAFTTRYELFECTGMSFGLTNAPAFFMNLMNKVFMEYLDKFVVVFIDDILIYSRTKEEHEEHLRLALEKLREHQLYAKFSKCEFWLSEVKFLGHVISAGGVAVDPSNVESVTNWKQPKTVSEIRSFLGLAGYYQRFIENFSKIAKPMTRLLQKDVKYKWSEECEQSFQELKNRLISAPILILPDPKKGFQVYCDASKLGLGCVLMQDGKVVAYASRQLRPHEKNYPTHDLELAAVVHALKIWRHYLFGTRTEDEQGTVWLGERICVPDNKDLKDAILKEAHDTLYSIHPGSTKMYQDLKERFWWASMKREIAEYVAVCDVCQRVKAEHQKPAGLLQPLKIPEWKWEEIGMDFITGLPRTSSGHDSIWVIVDRLTKVAHFIPVKTTYSGSRLAELYMARIVCLHGVPKKIVSDRGSQFTSKFWKKLQEEMGSKLNFSTAYHPQTDGQTERTYAEFSYNNSYQASLQMAPYEALYGWKCRTPLLWDQTGERQVFGTDILREAEEKVKTIQERLRVAQSRHKSYADNRRRDLSFDEGDYVYLRVTPLQGVHRFHTKGKLAPRFVGPYKIVSRRGEVAYQLKLPQSLAGVHNVFHVSQLKMCLRVPTEETNLEQIEV

SEQ ID NO: 18912 - protein, 406 aa, Oryza sativa
  Clone ID: TF_OSC400044j.C1.p80.fg
MLLRLPCARGPAPAAAARWRPPGRAARTAPRLGRGHAAASSADGSGAPSSPLFVLCHSQALTLALPPQSLHYDYDPLADLLGPDVDPTSSQRSFNAGVILVTWLIWKEHNESLRGVQSLRNTAPVAEKGKLRSWVGPNGQYYRELPCPSCRGRGYTPCKQCGIDRSSLDCPMCNGKGIRECVQCAGECVIWQESIDEQPWEKVRSSSPLKVKEDDEVDKLEIKINTSKRSRRTYPSPSPEVALKISRSLRSLNAKTGLFTKHMKIIHQDPKLHAQRVAAIKKTKGTAAARKHASETQKAFFSNPENRLKRSIAMKGVKFFCSKCGQEGHRSFYCPTVREISGRAHFRCRLCGGKGHNSRTCGKPKSENECQRQPRHCSQCGERGHNRRNCPRSTTVEVEDVKIYSE

SEQ ID NO: 18913 - protein, 1731 aa, Oryza sativa
  unsure (1)..(1731): unsure at all Xaa locations
  Clone ID: TF_OSC401692j.C1.p10.np
IPTFPESPNLQENILRNFKASKATPGLEXYIPGLEIELCSRDGCSEWLGLCNRIRRSPGQAAYGVESFVQELRTMSFLIGFETAPLYAQIPHDRDEEKCRVKVTLNSNREDIPSVMFEAGEGSYNHACXEVARIAIGELRESYNDRLADTEYRYHPRQPQGSDRGSYLEPAGIENDATTRHLVEMLWAMDETRAKIVIAAQDREDRNRGKICKLEDKVDRLEKELAALKGEAPPQKARVRLTARKRALFVPRYQLAPKMVLTRSNGNGPNPNNNNNNAENPTLAQVLAQQAQLMNLMMQQLQNQQNQGNNHAPPPNKLAEFLRVRPPTFSSTTNPVEAGDCLHAIEKKLDLLQCTDQEKVSFASHQLHGPASEWWDHFRLNRTTAEPISWLEFTAAFRKTHIPSGVVSLKKKEFRALIQGSRSVTEYLHEFNRLARCAPEDVRTDEERQEKFFEGLNDELSYPLMTGDYHDFQKLVDKAIRQEDKYNCMEQKKRRIAHFKAQQGNSQRQRLAMGPQSMLEGGSXSVVRPQRQFFNNNAGNNNRNQAPRPVAALTXNQLAKREQGSKPGVCFNCGDLGHYADKCPKPRRAKVVPAQNNSSAPATKARVNHVAAAEAQGAPDVILGTFPVNSVPTTVLFDSGATHSFLSLSFAGNHGMEVEDLRRPLMVSTPSNQALSSQRSPSVRTEIQGVPFLANLILLESKDLDVILGMDWLARYKGVIDCANRKVTLTSNDGQVVTVHALPSELLRSSLNQITLEEIPIVREYPDVFPDDLPGMPPKRDIEFRIDLVPGTTPIHKRPYRMAANELAEVKRQVDDLLQKGYIRPSSSPWGAPVIFVEKKDHTQRMCVDYRALNDVTIKNKYPLPRIDDLFDQLKGATVFSKIDLRSGYHQLRIKEEDIPKTAFTTKYGLFECTVMSFGLTNAPAFFMNLMNKVFIEYLDKFVVVFIDDILIYSRTNEEHEEHLRLALEKLREHQLYAKFSKCEFWLSEVKFLGHIISAGGVAVDPSNVESVTNWKQPKTVSEIRSFLGLAGYYRRFIENFSKIAKPMTRLLQKDVKYKWSEECEQSFQELKSRLISAPILILHDPKKGFQVYCDASKLGLGCVLMQDGKVVAYASRXLRPHEKNYPTHDLELAAVVHALKIWRHYLFGTRTEVYTDHKSLKYIFIXSDLNMRQQRWLELIKDYDMGIHYHPGKANVVADALSRKGYCNATEGRQLPLKLCKEFERLNLEIVSRGFVAALEAKPTLIDQVREAQINDPDIHEIKKNMRRGKAIGFLEDEQGTVWLGERICVPDNKDLKDAILKEAHDTLYSIHPGSTKMYQDLKERFWWASMKREIAEYVAVCDVCXXVEAEHQKPVGLLQPLKIPEWKWEEIGMDFITGLPRTSSGHHSIWVIVDKLTKMAHFILVRTTYSGSRLAELYMARIVCLHGVPKKIVSDRSSQFTSKFWKKLXEEMGSKLNFSTAYHPQTDGQTERVNQILEDMLRACALDFGGCWDKNLLYAEFSYNNSYQASLQMAPYEALYGRKCRTPLLWDQMGERQVFGTDILREAEEKVKIIQERLRVAHSRHKSYANNRRRDLSFEEGDHVYLRVTPLQGVHRFHTKGKLAPRFVGPYKIVSRRGEVAYQLELPQSLAGVHNVFHVSQLKKCLRVPTEEANLEQIVVQEDLTYIEKPIRILETDERRTKNRVIRFYKVQWSNHSEEESTWEREDELKSAHPHLFASSSKSRGRDSV

SEQ ID NO: 18914 - protein, 1732 aa, Oryza sativa
  unsure (1)..(1732): unsure at all Xaa locations
  Clone ID: TF_OSC422791j.C1.p7.np
IPTFPESPFLQEKNLKSSKASKASPGLEWYIPGLEIELCSRDGCSGWLGLCSMMPRFKPEYLFGVEGFVQELRTMSFAIGFGTAPLYAQIPHDRDEEKCRVKVTLNSNSEDIPSVMFEAGGGNYIHACQEVARIAIGELRDRYSDQLADTEYRYHPRQPQGRDRGSYLETEGIENDATTRHLVEMLWAMDETRAETVLAAQDREDWNRGKICKLEDKVDHLEKELAALKGEAPPQKARVRLTARKRALFVPRYQLAPKMVFTRSNGNGPNINNNNNNNGKNPTLAQVLAQQAQLMNMMMQQLQNQQNQGNNHAPPQNKLAEFLRVRLPTFSSTTNPVEAGDWLHAIEKKLDLLQCTDQEKVSFASHQLHGPASEWWDHFRLNRTTAEPITWLEFTAAFRKTHIPSGVVSLKKKEFRSLTQGSHTVTEYLHEFNRLARYAPEDVRTDEERQERFLEGLNDELSYPLMTGDYHDFQKLVDKAIRQEDKYNRMEQKKRRIAHFKAQQGNSQRPHLTLGPQSMPQGGSSSVVRPQRQFFNNNAGNNIRNQAPRPVAAPTQQQPAKREQGSKPGVCFNCGDLGHYADKCPKPRRVKVVPAQSNSTAPASKARVNHVAAAEAQGAPDVILGTFLVNSVPATVLFDSGATHSFLSMGFAGNHGMEVEDLRRPLMVSTPSNQALSLQRSPSVRIEIQGVPFLANLILLESKDLDVILGMDWLARYKGVIDCANRKVTLTNNDGRVVTVHALSSESLRSSLNQIALEEIPIEQEYPDVFPDDLPGMPPKRDIEFRIDLVPGTTPIHKRPYRMAANELAEVKRQVDDLLQKGYIRPSSSPWGAPVIFVEKKDHTQRMCVDYRALNDVTIKNKYPLPRIDDLFDQLKGATVFSKIDPRSGYHQLRIKEEDIPKTAFTTRYGLFECTVMSFGLTNAPAFFMNLMNKVFMEYLDKFEVVFIDDILIYSRTKEEHEEHLCLALEKLREHQLYAKFSKCEFWLSEVKFLGHVISAGGVAVDPSNVESVTNWKQPKTVSEIRSFLGLAGYYRRFIENFSKIAKPMTRLLQKDVKYKWSEECEQSFQELKNRLISAPILIXPDPKKGFQVYCDASKLGLGCVLMQDGKVVAYASRQLRPHEKNYPTHDLELAAVVHALKIWRHYLFGTRTEVYTDHKSLKYIFTQPDLNMRQRRWLELIKDYDMGIHYHPGKVNVVADALSRKGYCNATEGRQLPLELCKEFERLNLGIVSRGFVAALEAKPTLIDQVREAQINDPDIQEIKKNMRRGKAIGFLEDEQGTVWLGERICVPDNKDLKDAILKEAHNTLYSIHPGSTKMYQDLKERFWWASMKREIAEYEAVCDVCQQVKAEHQKPAGLLQPLKIPEWKWEEIGMDFITGLPRTSSGHDSIWVIVDRLTKVAHFIPVKTTYSGSRLAELYMARIVCLHGVPKKIVSDRGSQFTSKFWKKLQEEMGSKLNFSTAYHPQTDGQTERVNQILEDMLRACALDFGGSWDKNLPYAGFSYNNSYQASLQMAPYEALYGRKCHTPLLWDQTGERQVFGTDILREAEEKVKIIQEGLRMAQSRHKCYADNRRRDLSFEEGDYVYLRVTPLRGVHRFHTKGKLAPRFVGPYKIVSRRGEVAYQLELPQSLAGVHNVFHVSQLKKCFRVSIEEANLEQIEVQEDLTYVEKPILILETDERRTRNRVIRFCKVQWSNHSEEESTWEREDELQSAHPHLFASSPESRGRDSV

SEQ ID NO: 18915 - protein, 506 aa, Oryza sativa
  Clone ID: TF_OSC15750j.C1.p3.gm
MEAEDWLCIIEKKLTLVRMREADKVIFTVNQLEGPAGDWWDTYKEAREEDAGEPTWDEFTAAFHENFVPAAVMRMKKNEFRRPRQGNTTVQEYLNRFTQLTRYAIGDLADEEEKIDKFIEGLNDELRGPMIGQDHESFQSLINKVVRLENDRKVVEHNRKRRLAMNRPPQVATQHPKGAASSGWKPTVVTTNRPTAHSNFHRPVTTQNRAPAPNQAATGVMRPGSCFNCGEYGHFANKCPHLNKTPIRTGANAMAIHGAATPAGGRGVRKPMIVHSPGGETLDIILGMDWLTKNKGIIDCRRREVTLTTPWGSDMRATMDQDPRLTERAGGIFTMLPMKGMPVVQRFPDVFPEDLPGMPPDRDIEFIIDLIPGTAPISKRPYRMSVNELEELKKQIRELQEKGFVRPSSSPWGAPVLFVKKKDGSMRMCVDYRSLNEVTIKNKYLLPRIDDLFDQLKGAKVFSKIDLRSGYHQLKIRIGDIPKTAFLTRYGLYEFTVMSFGLTNAP

SEQ ID NO: 18916 - protein, 1493 aa, Oryza sativa
  Clone ID: TF_OSC17805j.C1.p1.np
LSLPQSEGYVIELHRMLRRLRYPGFPSYRVRQCGPVWEARVEIHPRVPSELDYSFQTRHHRDLPETAMQDAAREAFLRLSSIHRAELVSTEFAHHPFREEGNSVCTVQDTPCCYNPIVTRLSRWAEAVDDYYEEALLEIDDHQRRMGELETELTDLSVQQLQLEEEHQAWGSEIDSLKAQLQLGSGLETPIQIDSEIEGTDTEPEIEPDITDPSEDEAPVPRITFLGGPRTLSTARKSTRPPGKRPKPDPEATTSEPWGLRVIEKKLTLVRVREADKVIFAANQLEGPAGDWWDTYKEAREEDAGEPNWEEFTTAFRDNFVPAAVMRMKKNEFKRLRQGNTTVQEYLNRFTQLARYATGDLADEEEKIDKFIEGLNDELRGPMIGQDHDSFQSLINKVVRLENDRKVMEHNRKRRLAMNRPPQTAPQRPKGTTSLAWRPTVVTTSRPAASSNFHRPVTIQNRAPAPNQAATGSVRPGSCFNCGEYGHFANKCPHPNKTPIRTGANATAIHGTATPATGRGLFRTPQTNRTATGFGRGQVNHVRAEEAQEDQGVLMGMFSLNSTPVKVLFDSGASHSFISLKASQQHNLTRVKLRQPMLVHSPGGEIAVDTACIDVPIRLDVVFPSNLMVLIPQTLDVILGMDWLAKHRGVIDCGRREVTLTTPWGSDMRATMDQDPRLTERAGGIFTMLPLKGMPVVQRFPDVFPEDLPGMPPDRDIEFIIDLIPGTAPISKRPYRMPVNELEELKKQIRELQEKGFVPSSSPWGAPVLFVKKKDGSMRMCVDYRSLNEVTIKNKYPLPRIDDLFDQLKGAKVFSKIDLRSGYHQLKIRTEDIPKTAFSTRYGLYEFTVMSFGLTNAPAYFMNLMNKVFMDYLDKFVVVFIDDILVYSKDEEEHAEHLRLVLQKLRKHKLYAKFSKCEFWLKEVAFLGHVISAGGVAVDPAKVEAVTEWKAPKSVTEIRSFLGLAGYYRRFIEGFSKIARPMTQLLKKEKKFVWSEQCQESFEQLKEKLTSAPILVLPDIRKDFVIYCDASRQGLGGVLMQEGKVVAYASRQLRPYEENYPTHDLELATVVHTLKIWRHYLIGNHCDIYTDHKSLKYIFTQSDLNLRQRRWLELIKDYDLEVHYHPGKANVVADALSRKSHCNHLRMEGMVPELRKEIAQLNLHIEAHESAYSLHPGSTKMYQDLKVGYWWPNMKRDVAEYVALCDVCQKVKAEHQRPADRLTKTARFIPVKTNYSSAKLAELYMTRIVCLHGIPKKIISDRGTQFTSHFWEKVHEALGSYLAFSTAYHPQTDGQTERTNQVLEDMLRACALDFSKDWERCLPYAEFSYNNSFQASLKMSPNEALFGRRCRTPLMWSETGERAVFGPDIIQEAEEKIRLVRDRLKVAQSRQKSYADTRRRNLEFKEGDYIYLKVSPMRPFPFSPTSPPQPPPLPRAPRARPPRAPCRRIAASKPPGRRPCAVVPPRLCPRAAAPVCRTVGRCCRRRRCRCRRR

SEQ ID NO: 18917 - protein, 1402 aa, Oryza sativa
  Clone ID: TF_OSC20335j.C1.p2.fg
MASRRWATTSNDETQTPDLTTLAGVMATQTQLLQAIANNQGNRGGSSFGEFMRTKPPTFATAEEPMDAEDWLRIIEKKLTLVRVPEADKVIFAANQLEGPAGDWWDMYKEAREEDAGEPNWEEFTIAFRDNFVPAAVMRMKKNEFRRLRQGNTTVQEYLNRFTQLARYATRDLADEEEKIDKFIEGLNDELRGPMIGQDHDSFQSLINKVVRLENDRKVVEHNRKRRLAMNRPPQTAPQRPKGTTPSAWRPTVVTTSRPAASSNFHWPVTIQNRSPAPNQAATGSVRPGSCFNCGEYGHFANKCPHPNKTPIRTGANATAIHGTATPVAGRGLFRTPQTNRTATGFGRGQVNHVRAEEAQEDQGVLMGMFSLNSTPVKVLFDSGASHSFISLKASQQHNLTRVKLRQPMLVHSPGGEIAVDTACIDVPIRLRDVVFPSNLMVLIPQTLDVILGMDWLAKHRGIIDYRRREVTLTTPWGSDMRATMDQDPRLTERVGGIFTMLPLKGMPVVQRFPDVFPEDLPGMPPDRDIEFIIDLIPGTALISKRPYRMPVNELEELKKQIRELQEKGFVRPSSSPWGAPVLFVKKKDGSIRMCVDYRSLNEVTIKNKYPLPRIDDLFDQLKGAKVFSKIDLRSGYHQLKIRTRDIPKTAFSTRYGLYEFTVMSFGLTNAPAYFMNLMNKVFMDYLDKFVVVFIDDILIYSKDEEEHAEHLQLVLEKLRKHKLYAKFSKCEFWLKEVAFLGHVISAGGVAVDPAKVEAVTEWKAPKSVTEIRSFLGLAGYYRRFIKGFSKIARPMTQLLKKEKKFVWQGLGGVLMQDGKVVAYASRQLRPHEENYPTHDLELAAVVHALKIWRHYLIGNHCDIYTDHKSLKYIFTQSDLNLRQRRWLELIKDYDLEVHYHPGKANVVADALSRKSHCNHLRMEGMVPELREEIAQLNLHIVPRGQINTLDIQPLLRTQIEEAQKDNEEIREVKERLAAGRAKEFSTDENDVLWYKKRIYVPEQGGLRGLILKEAHESAYSLHPGSTEMYQDLKEGYWWPNMKRDVAEYVALCDVCQKVKAEHQRPAVCLHGVPKKIISDRGTLFTSHFWEKVHEAVGSYLAFSTAYHPQTDGQTERTNQVLEDMLRACAMDFSKDWERCLPYTEFSYNNSFQASLKMSPNEALFGRRCRTPLMWSETRERAVFGPGIIQEAEEKVRLIRDRLKVAQSRQKIYADTRRRILEFKEADYVYLKVSPMRGTKRFKVKGKLAPKYVGPFQIIARRGEVAYQLQLPENIADVHPVFHVSQLKKCLRMPEEQAPLEEIHISNDLTYPEHPIRILDEAEKRTRSKVWRMYKVQWSNHTEDEATWESEEFLRTEYPHLFENWYEISGRALFKGKREMKPRRIPMPTTRREMKTMAFSRS

SEQ ID NO: 18918 - protein, 1221 aa, Oryza sativa
  Clone ID: TF_OSC20639j.C1.p2.fg
MASRRRATTSNDETQTPDLTTLAGVMATQTQLLQAIANNQGNRGRSSFGEFMRTKPPTFATAEEPMDAEDWLRIIEKKLTLVRVREADKVIFAANQLEGPAGDWWDTYKEAREEDAVEPNWEEFTTAFRDNFVPAAVMRMKNNEFRRLQQGNTTVQEYLNRFTQLARYATRDLADEEEKIDKFIEGLNDELRGPMIGQDHDSFQSLINKVVRLENDRKVVEHNRKRRLAMNRSPQTAPQRPKGTTSSAWRPTVVTTSRPAASSNFHRPVTIQNRAPAPNQAATGSVRPGSCFNCGEYGHFANKCPHPNKTPICTGANATAIHGTATPAVGRGLFRTPQTNRTATGFGRGQVNHVRAEEAQEDQGVLMEDLPGMPPDRDIEFIIDLIPGTAPISKRPYRMPVNELEELKKQIRELQEKGFVRPSSSPWGAPVLFVKKKDGSMRMCVDYRSLNEVTIKNKYPLPRIDDLFDQLKGAKVFSKIDLRSGYHQLKIRTGDIPKTAFSTRYGLYEFTVMSFGLTNAPAYFMNLMNKVFMDYLDKFVVVFIDDILIYSKDEEEHAEHLRLVLEKLRKHKLYAKFSKCEFWLKEVAFLGHVISAGGVAVDPAKVEAVTEWKAPKSVTEIRSFLGLARYYRRFIEGFSKIARPMTQLLKKEKKFVWSEQCQESFEQLKEKLTSAPILVLPDIRKDFVIYCDASRQGLGGVLMQDGKVVAYASRQLRPHEENYPTHDLELAAVVHALKIWRHYLIGNHCDIYTDHKSLKYIFTQSDLNLRQRRWLELIKDYDLEVHYHPGKANVVADALSRKSHCNYLRMEGMVPELREEIAQLNLPRGQINTLDIQSLLRTQIEEAQKDNEEIREVKERLAAGRAKEFSTDEKDVLWYKKRIYVPEQGGLRGLILKEAHESAYSLHPGSTKMYQDLKEGYWWPNMKRDVAEYVALCDVCQKVKAEHQRPAGLLQPLRIPEWKWDETDGQTERTNQVLEDMLRACALDFSKDWERCLPYAEFSYNNSFQASLKMSPNEALFGRRCRTPLMWSETGEQAVFGPDIIQEAEEKVRLIRDRLKVAQSRQKSYADTRRRNLEFKEGDYVYLKVSPMRGTKRFKVKGKLAPRYVGPFQIIARRGEVAYQLQLPENIADVHPVFHVSQLKKCLRVPEEQAPLEEIHISNDLTYPEHPIRILDEAEKRTRSKVWRMYKVQWSNHTEDEATWESEEFLRTEYPHLFENW

SEQ ID NO: 18919 - protein, 1297 aa, Oryza sativa
  Clone ID: TF_OSC400179j.C1.p9.fg
MASRRRATTSNDETQTPDLATLAGVMATQTQLLQAIANNQGNRGGPSFGEFMRTKPPTFATAEEPMDAEDWLRIIEKKLTLIRVREADKVIFAANQLEGPAGDWWDTYKESREEDAGEPNWEEFTTAFRDNFVPAAVMRMKKNEFRRLRQGNTTVQEYLNHFTQLARYATRDLANEEEKIDKFIEGLNDELRGPMIGQDHDSFQSLINKVVRLENDRKVVEHNRKRRLAMNRPPQTAPQRPKGTTSSAWRPTVVTTSRPAASSNFHRPVTIQNRAPAPNQAATGSVRPGSCFNCGEYGHFANKCPHPNKTPIRTGANATAIHGTATPAAGRGLFRTPQTNRTATEFGRGQVNHVRAEEAQEDQGVLMGASHSFISLKASQQHNLIRVKLRQPMLVHSPGGEIAVDTACIDVPIRLRDVVFPSNLMVLIPQTLDVILGMDWLAKHRGIIDCRRREVTLTTPWGSDMRATMDQDPRLTERAGGIFTMLPLKGMPVVQRFPDVFPEDLPGMPPDRDTEFIIDLIPGTAPISKRPYRMPVNELDELKKQIRELQEKGFVRPSSSPWGAPVLFVKKKDGSMRMCVDYRSLNEVTIKNKYPLPRIDDLFDQLKGAKVFSKIDHRSGYHQLKIRTGDIPKTAFSTRYGLYEFTVMSFGLTNAPAYFMNLMNKVFMDYLDKFVVVFIDDILIYSKDEEEHAEHLRLVLEKLRKHKLYAKFSKCEFWLKEVAFLGHVISAGGVAVDPAKVEAVTEWKAPKSVTEIRSFLGLAGYYRRFIEGFSKIARPMTQLLKKEKKFVWSEQCQESFEQLKEKLTSAPILVLPDIRKDFVIYCDASRQGLGGVLMQDGKVVAYASRQLQPHEENYPTRDLELAAVVHALKIWRHYLIGNHCDIYTDHKSLKYIFTQSDLNLRQRRWLELIKDYDLEVHYHPGKANVVADALSRKSHCNHLRMEGMIPELREEIAQLNLHIVPRGQINTLDIQPLLRTQIEEAQKDNEEVREVKERLATGRAKEFSTDEKDVLWYKKRIYVPEQGGLRGLILKEAHESAYSLHPGSTKMYQDLKEGYWWPNMKRDVAEYIALCDVCQKVKAEHQRPVGLLQPLRIPEWKWDEIGMDFIVGLPKTATGYDSIWVIVDRLTKTARFIPVKTNYSSAKLAELYMTRIVCLHGVPKKITSDRGTQFTSHFWEKVHEALGSYLAFSTAYHPQTDGQTERTNQVLEEMLRACALDFSKDWERCLPYAEFSYNNSFQASLKMSPNEALFGRRCRTLLMWSETGEQAVFGPDIIQEAEEKVRLIRDRLKVAQS

SEQ ID NO: 18920 - protein, 1030 aa, Oryza sativa
  Clone ID: TF_OSC400477j.C1.p39.fg
METNSGDNASSNFHRPVTIQNRAPAPNQAATGPVRPGSCFNCGEYGHFANKCPHPNKTPIRTGANATTIHGTATPAAGRGASHSFISLKASQQHKLTRVKLRQPMLVHSPGGEIAVDTACIDVPIRLRDVVFPSNLMVLIPQTLDVILGMDWLAKHRGVIDCRRREVTLTTPWGSDMRATMDQDPRLTERAGGIFTMLPLKGMPVVQLFPDVFPEDLPGMPPDRDIEFIIDLIPGTAPISKRPYRMLVNELEEHKKQIRELQEKGFVRPSSSPWGAPVLFVKKKDGSMRMCVDYRSLNEVTIKNKYPLPRIDDLFDQLKGAKVFSKIDLRLGYHQLKIRTGDIPKTAFSTRYGLYEFTVMSFGLTNAPAYFMNLMNKVFMDYLEKFVVVFIDDILIYSKDEEEHAEHLRLVLEKLRKHKLYAKFSKCEFWLKEVAFLGHVISAGGVAVDPTKVEAVTEWKAPKSVTEIQSFLGLAGYYRRFIEGFSKIARPMTQLLKKEKKFVWSEQCQESFEQLKEKLTSAPILVLPNIRKDFVIYCDASRQGLGGVLMQDGKVVAYASRQLRPHEENYPTYDLELAAVVHALKIWRHYLIGNHCDIYTDHKSLKYIFTQSDLNLRQKRWLELIKDYDLEVNTLDIQPLLRTQIEEAQKDNGEIQEVKERMATGHVKEFSMDEKKTLWYKKRIYVPEQGGLRGLILKEAHESAYSLHPGSTKMYQDLKEGYWWPNMKRDVKEYVALCDVCQKVIVDRLTKMARFIPVKTNYSSAKLAELYMTRITDGQTERTNQVLEDMLRACALDFSKDGERCLPYAEFSYNNSFQASLKMSPNEALFGRRCRTPLMWSETGERAVFGADIIQEAEEKVCLIRDRLKVAQSRQKSYTDTRRRNLEFKEGDYVYLKVSPIRGIKRFKVKGKLAPRYVGPFQIIARQGEVAYQLQLPENIADVHPVFHVSQLKKCLRVPEEQATLEEIHISNDLTYPEHPVRILDEAEKRTRTKVWHMYKVQWSNHTEDEATWESEEFLRTEYPHLFENW

SEQ ID NO: 18921 - protein, 1494 aa, Oryza sativa
  unsure (1)..(1494): unsure at all Xaa locations
  Clone ID: TF_OSC400603j.C1.p12.np
MGVPRSEGYVIELHRLMRRLRYPRFPIYRVRQCGSVWEARVEVHTLVPSELDYSFPTRHRRDLPETAMQDAAREAFLRLSSIHRAELASTEFAHHPFREESNSVCTVQDTPCCYNPIVTRLSRWAEVVDDFYEEALLEIDDQQRRVGELETEVTDLTAQQLQLEEEHQAWGSEIDSLKAQLQPGSSLETPIQVDSETEGTDTEPETEPDITDPSEDETLVPRITFLGGPRTLSTARKSTRPPGKKPKPDPEATTSEPWGLRVIEKKLTLVRVREADKVIFEANQLEGPAGDWWDTYKEAREEDAGEPNWEEFTTAFRDNFVPAAVMRMKKNEFRRLRQGNTTVQEYLNRFTQLARYATGDLADEEEKIDKFIEGLNDELRGPMIGQDHDSFQSLINKVVRLENDRKVVEHNRKRRLAMNRPPQPVPXRHKGTTSSVWRPTVVTTNRPTASSNFHRLITIQNRAPAPNQAATGSVRLGSCFNCGEYGHFANKCPHPNKTPICTGANATAIHGTATPAAGRGLFGTPQTNRTTTGFGRGQVNHVRAEEAQEDQGVLMGMFSINSTPVKVLFDSGASHSFISLKVSQQHNLTRVKLRQPMLVHSPGGEIAVDTACIDVPIRLRDVVFPSNLMVLMPQTLDVILGMDWLTKHRGVIDCRRREVTLTTPWGSDMRATMDQDPRLTERAGGIFTMLPQKGIPVVQRFPDVFPEDLPGMPPDRDIEFLIDLIPGTAPISKRPYRMPVNELEELKKQIRELQEKGFVRPSSSPWGAPVLFVKKKDGSMRMCVDYRSLNEVTIKNKYPLPRIDDLFDQLKGAKVFSKIDLRSGYHQLKIRTGDIPKTAFSTRYGLYEFTVLSFGLTNAPAYFMNLMNKVFMDYLDKFVVVFIDDILIYSRDEEEHAEHLRLVLEKLRKHKLYAKFSKCEFWLKEVAFLGHVISAGGVAVDPAKVEAVTEWKAPKSVTEIRSFLGLAGYYRRFTEGLSKIARPMRQLLKKEKKFVWSEQCQESFEQLKEKLTSAPILVLPDIRKDFVIYCDASRQGLGGVLMQDGKVVAYASRKLRPHEENYPTHDLELAAVVHALKIWRHYLIGNHCDIYTDHKSLKYIFTQSDLNLRQRRWLELIKDYDLEVHYHLGKANVVADALSRKSHCNHLRTEGMAPELKEEIAQLNLHIEAHESAYSLHPGSTKMYQDLKDGYWWPNMKRDVAEYVALCDVCQKVKAEYQRPADRLTKTARFIPVKTNYSSAKLVELYMTRIVCLHGIPKRIISDRGTQFTSHFWEKVHEALGSYLAFSTAYHPQTDGQTERTNQVLEDMLRACALDFSKDWERCLPYTEFSYNNSFQANLKMSPNEALFGRRCRTPLMWSETGERAVFGPDIIQEAEEKVRLIRDRLKVAQSRQKSYTDTRRRNLEFKEGDYVYLKVSPMRAPPFSPLLTPSPPPLPLPLLHAPPSSCRRVAAFEPPRRRPRAVVPPHSCHRATASVCRAVRRRRRRRRRXAAAP

SEQ ID NO: 18922 - protein, 1470 aa, Oryza sativa
  Clone ID: TF_OSC400800j.C1.p10.fg
MASRRRATTSNDETQTPDLNTLAGIMATQTQLLQAIASNQGNRGGSSFGEFMRTKPPTFATAEEPMDAEDWLRIIEKKLTLVRVREADKVIFAANQLEGPAGDWWDTYKEAREEDAGEPNWEEFTTAFRDNFVPAAVMRMKKNEFRKLRQGNTTVQEYLNRFTQLARYATRDLADEEEKIDKFIEGLNDELRGPMIGQDHDSFQSLINKVVRLENDRKVVEHNRKRRLAMNRPPQTAPQRPKGTTPSAWRPTVVTTSRPAASSNFHRPVTIQNRAPTPNQAATGSVRPGSCFNCGEYGHFANKCPHPNKTPIRTGANATAIHGTATPAAGRGLFRTPQTNRTATGFGRGQVNHVRAEEAQEDQGVLMGMFSLNSTPVKVLFDSGASHSFISLKASQQHNLTRVKLRQPMLVHSPGGEIAVDTACIDVPIRLRDVVFPSNLMVLIPQTLDVILGMDWLAKHRGVIDCRRREVTLTTPWGSDMRATMDQDPRLTERAGGIFTMLPLKGMPIVQRFPDVFPEDLPGMPPDRDIEFIIDLIPGTAPISKRPYRMPVNELEELKKQIRELQEKGFVRPSSSPWGAQVLFVKKKDGSMRMCVDYRSLNEVTIKNKYPLPRIDNLFDQLKGAKVFSKIDLRSGYHQLKIRTEDIPKTAFSTRYGLYEFTVMSFGLTNAPAYFMNLMNKVFMEYLDKFVVVFIDDILIYSKDEEEHAEHLRLVLQKLRKHKLYAKFSKCEFWLKEVAFLGHVISAGGVAVDPAKVEAVTEWKAPKSVTEIRSFLGLARYYRRFIEGFSKIARPMTQLLKKEKKFVWSEQCQESFEQLKEKLTSAPILVLPDIRKDFVIYCDASRQGLGGVLMQDGKVVAYASRQLRPHEENYPTHDLELAAVVHALKIWRHYLIGNHCDIYTDHKSLKYIFTQSDLNLRQRRWLELIKDYDLEVHYHPGKANVVADALSRKIHCNHLRMEGMVPELREEIAQLNLHIVPRGQINTLDIQPLLRTQIEEAQKDNEEVREVKERLAAGRAKEFSTDEKDVLWYKKRIYVPEQGGLRGLILKEAHESAYSLHPGSTKMYQDLKEGYWWPNMKRDVAEYVALCDVCQKVKAEHQRPAGLLQPLRIPEWKWDEIGMDFIVGLPKTATGYDSIWVIVDRLTKTARFIPVKTNYSSAKLAELYMTRIVCLHGVPKKIISDRGTQFTSHFWEKVHEALGSYLAFSTAYHPQTDGQTERTNQVLEDMLRACALDFSKDWERCLPYAEFSYNNSFQASLKMSPNEALFGRRCRTPLMWSETGERAVFGPDIIQEAEEKVRLIRDRLKIAQSRQKSYADTRRRNLEFKEGDYIYLKVSPMRGTKRFKVKGKLAPRYVGPFQIIARRGEVAYQLQLPENIADVHPVFHVSQLKKCLRVPEEQAPLEEVHISNDLTYPEHPIRILDEAAKRTRSKVWRMYKVQWSNHTEEEATWESEEFLRTEYPHLFEDW

SEQ ID NO: 18923 - protein, 1421 aa, Oryza sativa
  Clone ID: TF_OSC401478j.C1.p74.fg
MASRRRATTSNDETQTPDLNTLAGIMATQTQLLQAIANNQGNRGGSSFGEFMRTKPPTFATAEEPMDAEDWLRIIEKKLTLVRVREADKVIFAANQLEGPAGDWWDTYKEAREEDAGEPNWEEFTTAFRDNFVPAAVMRMKKNEFRRLRQGNTTVQEYLNRFTQLARYATRDLADEEEKIDKFIEGLNDELRGPMIGQDHDSFQSLINKVVRLENDRKVVEHNRKRRLAMNRTPQTAPQRPKGTTSSAWRPTVVTTSRPAASSNFHRPVTIQNRAPAPNQAATGSVRPGSCFNCGEYGHFANKCPHPNKTPIRTGTNATAIHGTATPAAGRGLFRTPQTNRTATGFGRGQVNHVRAEEAQEDQGVLMGMFSLNSTPVKVLFDSGASHSFISLKASQQHNLTRVKLRQPMLVHSPGGEIAVDTACINVPIRLRDVVFPSNLMVLIPQTLDVILGMDWLAKHRGVIDCRRREVTLTTPWGSDMRATMDQDPRLTERAGGIFTMLPLKGMPVVQRFPDVFPEDLPGMPPDRDIEFIIDLIPGTAPISKRPYRMPVNELEELKKQIRELQEKGFVRPSSSPWGAPVLFVKKKDGSMRMCVDYRSLNEVTIKNKYPLPRIDDLFDQLEGAKVFSKIDLRSGYHQLKIRTEDIPKTAFSTRYGLYEFTVMSFGLTNAPAYFMNLMNKVFMDYLDKFVVVFIDDILIYSKDEEEHAEHLRLVLQKLRKHKLYAKFSKCEFWLKEVAFLGHVISAGGVAVDPAKVEAVTEWKAPKSVTEIWSFLGLAGYYRRFIEGFSKIARPMTQLLKKEKKFVWSEQCQESFEQLKEKLTSAPILVLPDIRKDFVIYCDASRQGLGGVLMQDGKVVAYASRQLRPHEENYPTHDLELAAVVHALKIWRHYLIGNHCDIYTDHKSLKYIFTQSDLNLRQRRWLELIKDYDLEINTLDIQPLLRTQIEEAQKDNEEVREVKERLAAGRAKEFSTNEKDVLWYKKRIYVPEQGGLRGLILKEAHESAYSLHPGSTKMYQDLKEGYWWPNMKRDVAEYVALCDVCQKVKAEHQRPAGLLQPLRIPEWKWDEIGMDFIVGLPKTATGHDSIWVIVDRLTKTARFIPVKTNYSSAKLAELYMTRIVCLHCVPKKIISDRGTQFTYHFWEKVHEALGSYLAFSTAYHPQTDGQTERTNQVLEDMLRACALDFNKDWERCLPYAEFSYNNSFQASLKMSPNEALFGRRCRTPLMWSETGERAVFGPDIIQEAEEKVRLIRDRLKIAQSRQKSYADTRRRNLEFKEGDYVYLKVSPMRGTKRFKVKGKLAPRYVGPFQIIARRGEVAYQIQLPENIADVHPVFHVSQLKKCLRVPEEQAPLEEIHISNDLTYPEHPIRILDEAEKRTRSKVWHMYKVQWSNHTEDEATWESEEFLRTEYPHLFEDW

SEQ ID NO: 18924 - protein, 1579 aa, Oryza sativa
  Clone ID: TF_OSC401834j.C1.p7.fg
MGVPRSEGYVIELHQLMRRLRYPRFPIYRVRQCGPVWEVLVEVLTRVPSESDYSFPTRHCHDLPETAMQDAAWEAFLQLSSIHRAELAIDDFYEEALLEIDDQQRRVGELETEVTDLTVQQLQLEEEHQAWGSEINLLKAQLQVHGDQFQQLSDQYNDRRGMMDTLEEQLRESQEHVSQLEEQLRAATVNTTGASTSTAVGRDRYFFLTPPYPPAFHALLGELGSSMETPIQVDSETEGTDTEPEIEPDITDPSEDETPVPRITFIGGPRTLSTAHKSTRPPGKKPKPDPEATTSEPWGLSNEETQAPDLTTLAGVMAAQTQLLQAIANNQGNRGGSSFGEFMRTKPPTFATADEPMEAEDWLRIIEKKLTLVRVREADKVIFAANQLEEAREEDAGEPNWEEFTTAFRNNFVPAADHDNFYSLINKVVRMENDRKVVEHNRKRRFAMNRLSQAAPQRPKGTTSSVWRPTVVTTNRLAASSNFHRPVTIQNRAPAPNQAATGSVRPGSCFNCGEYGHFANKCPHPKKTPVRTGANTTAIHGTTTPAAGRGLFKTPQTNRTATGFGRGQVNHVRAEEAQEDQGVLMGMFSINSTPVKVLFDSGASHSFISLKASQQHKLTRVKLRQPMLVHSPGGEIAVDTACIDVPIRLRDVVFPSNLMVLIPQTLYVVLGMDWLTKHRGVIDCRRREVTLTTPWGSDMRATMDQDPRLAERAEGIFTMLPMKGMPVVQRFPDVFLEDLPGMPLDRDIEFIIDLIPGTAPISKRPYRMPVNELEELKKQIRELQEKGFVRPSSSPWGAPVLFVRKKDGSMRMCVDYRSLNEVTIKNKYPLPRIDDLFDQLKGAKVFSKIDLRSGYHQLKIRTENIPKTAFSTRYGLYEFTVMSFGLTNAPAYFMNLMNKVFMDYLDKFVVVFIDDILIYSKDEEEHAEHLRLVLEKLRKHKLYAKFGKCEFWLKEVAFLGHVISAGGVAVDPAKVEAVTEWKAPKSVTEIRSFLGLAGYYRRKDFVIYCDASRQGLGGVLMQDGKVVAYALRQLRPHEENYPTHDLELAAVVHALKIWRHYLIGNHCDIYIDHKSLKYIFTQSDLNLRQRRWLELIKDYDLEVHYHPGKANVVADALSRKSHCNHLRMEGMAPELKEEIAQLNLHIVPHGQINTLDIQPLLRTQIEEAQKDNEEIQEVKERLAAGFAKEFSTDEKDVLWYKKRIYVPERGGLRGLILKEAHESAYSLHPGNTKMYQDLKEGYWWPNMKRDVAEYVALCDVCQKTATGYDSIWVIVDRLTKTARFIPVKTNYSGAKLAELYMTRIVYLHGVPKRIVSDRGTQFTSHFWEKVHETLGSYLAFSTAYHPQTDGQTERTNQVLEDMLRACALDFSKDWERCLPYAEFSYNNSFQASLKMSPNEALFGRRCRTPLMWSETCERAVFGPDIIKEAKEKVRLIRDRLKVAQSRQKSYADTRKRNLEFKEGDYVYLKVSPIRGTKRFKVKGKLAPRYVGPFQITARRGEVAYQLQLPENIADVHLVFHVSQLKKCLRVPEEQAPLEEIHISNDLTYPEHPVRILDEAEKRTRNKVWRMYKVQWSNHT

SEQ ID NO: 18925 - protein, 1470 aa, Oryza sativa
  Clone ID: TF_OSC410570j.C1.p1.fg
MASRRRATTGNDETQTPDLNTLAGIMATQTQLLQAIASNQGNRRGSSFGEFMRTKPPTFATAEEPMDAEDWLRIIEKKLTLVRVREADKVIFAANQLEGPAGDWWDTYKEAREEDAGEPNWEEFTTAFCDNFVPAAVMRMKKNEFRRLRQGNTTVQEYLNRFTQLARYATGDLADEEEKIDKFIEGLNDELRGPMIGQDHDSFQSLINKVVRLENDRKVVEHNRKRRLAMSRPPQTAPQRPKGTTPSAWRPTVVTTSRPAASSNFHRPVTIQNRAPTPNQAATGSVRPGSCFNCGEYGHFANKCPHPNKTPIRTGANATAIHGTATPAAGRGLFRTPQTNRTATGFGRGQVNHVRAEEAQEDQGVLMGMFSLNSTPVKVLFDSGASHSFISLKASQQHNLTRVKLRQPMLVHSPGGEIAVDTACIDVPIRLRDVVFPSNLMVLIPQTLDVILGMDWLAKHRGVIDCRRREVTLTTPWGSDMRATMDQDPRLTERAGGIFTMLPLKGMPVVQRFPDVFPEDLPGMPPDRDIEFIIDLIPGTAPISKRPYRMPVNELEELKKQIRELQEKGFVRPSSSPWGAPVLFVKKKDGSMRMCVDYRSLNEVTIKNKYPLPRIDDLFDQLKGAKVFSKIDLRSGYHQLKIRTEDIPKTAFSTRYGLYEFTVMSFGLTNAPAYFMNLMNKVFMEYLDKFVVVFIDDILIYSKDEEEHAEHLRLVLQKLRKHKLYAKFSKCEFWLKEVAFLGHVISAGGVAVDPAKVEAVTEWKAPKSVTEIRSFLGLAGYYRRFIEGFSKIARPITQLLKKEKKFAWSEQCQESFEQLKEKLTSAPILVLPDIRKDFVIYCDASRQGLGGVLMQEGKVVAYASRQLRPHEENYPTHDLELAAVVHALKIWRHYLIGNHCDIYTDHKSLKYIFTQSDLNLRQRRWLELIKDYDLEVHYHPGKANVVADALSRKSHCNHLRTEGMVPELREEMAQLNLHIVPRGQINTLDIQPLLRTQIEEAQKDNEEVREVKERLAVGRAKEFSTDEKDVLWYKKRIYVPEQGGLRGLILKEAHESAYSLHPGSTKMYQDLKEGYWWPNMKRDVAEYVALCDVCQKVKAEHQRPAGLLQPLRIPEWKWDEIGMDFIVGLPKTATGYDSIWVIVDRLTKTARFIPVKTNYSSAKLAELYMTRIVCLHGIPKRIISDRGTQFTSHFWEKVHEALGSYLAFSTAYHPQTDGQTERTNQVLEDMLRACALDFSKDWERCLPYAEFSYNNSFQASLKMSPNEALFGRRCRTPLIWSETGERAVFGPDIIQEAEEKVRLIRDRLKVAQSRQKSYADTRRRDLEFKEGDYVYLKVSPMRGTKRFKVKGKLAPRYVGPFQIIARRGEVAYQLQLPENIADVHLVFHVSQLKKCLRVSEEQAPLEEIHISNDLTYPEHPIRILDEAEKRTRSKVWRMYKVQWSNHTEDEATWESEEFLRTEYPHLFYNW

SEQ ID NO: 18926 - protein, 1691 aa, Oryza sativa
  Clone ID: TF_OSC416395j.C1.p15.fg
MERTTEDDERPTVPLLEPKPASNEEEEEVGSVRRRVVEENKKLWVVAGPSICARFSSFGVTVISQAFIGHIGGTELAAYALVSTVLMRFSNGILLGMASALETLCGQSYGAKQYHMLGVYLQRSWLVLFCCAVILLPVYIFTTPLLIALGQDPEISAVAGTISLWYIPVMFSYIWAFMLQMYLQAQSKNMIVTYLAFLNLGIHLFLSWLLTVKFQLGLAGVMGSMVISFWIPVFGQLAFVFFGGCPLTWTGFSSSAFTDLGAIMKLSLSSGVMLCLELWYNTILVLLTGYMKNAEVALDALSICLAYIFTESKAVADEVADLAPLLAFSILLNSVQPVLSGVAIGSGWQSVVAYVNVTSYYLIGIPLGAILGYVLGFQAKGIWIGMLLGTLVQTLVLLFITLRTNWKKQLGSSLETPIQVDSETEGTDTEPEIEPDITDPSEDETPVPRITFLGGPRTLSTARKSTRPPGKRPKLDPEMASRRWASTSNEETETPDLTTLAGVMATQTQLLQAIANNQGNRCGSSFGEFMRTKPPTFATAEEPMDAEDWLRIIEKKLTLVRVREADKVIFAANQLEGPAGDSWDTYKGAREEDAGEPNWEEFTTAFRDNFVPAAVMLMKKNEFRRLRQGNTTVQEYLNRFTQLARYATRDLADEEETIDKFIEGLNDELRGPMIGQDHDSFQSLINKAATGPVRPGSCFNCGEYGHFANKCPHPNKTPIRTGANATAIHGTTTPAVRRGLFRTPQTNRTATGFGRGQVNHVRAEEAQEDQGVLMGMFSLNSTPVKVLFDSGASYLFISLKASQQHNLTRVKLRQPMLVHSPGGEIAVDTACIDVPIRLRDVVFPSNLMVLIPQTLDVILAMDWLAKHRGVIDCRRREVTLTTPWGSDMRATMDQDPRLTERVGGIFTMLPLKGMPVVQRFPDVFPEDLPGMPPNRDIEFIIDLIPGTAPISKRPYRMPVNELEELKKQIRELQEKGFVRPSSSPWGAPVLFVKKKDGSMRMCVDYRSLNEVTIKNKYPLPRIDDLFDQLKGAKMFSKIDLRSGYHQLKIRTEDIPKTALSTRYGLYEFTVMSFGLTNAPAYFMNLMNKVFMDYLDKFVVVFIDDILIYSKDEEEHAEHLRLVLQKLRKHKLYAKFSKCEFWLKEVAFLGHVISAGGVAVDPAKVEAVMEWKAPKSVTEIRSFLGLVGYYRRFIEGFSKIARPMTQLLKKEKKFVWSEQCQESFEQLKEKLTSAPILVLPDIRKDFVIYCDASRQGLGGVLMQDGKVVAYASRQLRPHEENYPTHDLELAAVVHALNIWRHYLIGNHCDIYTDHKNLKYIFTQSDLNLRQRRWLELIKDYDLEIWRHYLIGNHCDIYTDHKSLKYIFIQSDLNLRQRRWLELIKDYDLEVHYHPGKANVVADALSRKSHCNHLEMEGMAPELKEELAQLNLHIVPRGQVNTLDIQPLLRTQIEEAQKDNEEIREVKERLAAGFAKEFSTDEKDVLWYKKRIYVPKQGGLRGLILKEAHESAYSLHPGSTKMYQDLKEVYWWPNMKRDVAEYVALCDVCQKTATGYDSIWVIVDRLTKTARFIPVKTNYSSAKLAELYMTRIVCLHGVPKRIISDRGTQFTSHFWEKVHEALGSYLAFSTAYHPQTDGQTERTNQVLEDMLRACALDFSKDWERCLPYAEFSYNNSFQASLKMSPNEALFGRR

SEQ ID NO: 18927 - protein, 1418 aa, Oryza sativa
  Clone ID: TF_OSC420750j.C1.p6.fg
MASRRRATTSNDETQTPDLTTLAGVMTTQTQLLQAIANNQGNRGGSSFGEFMRTKPPTFATAEEPMDAEDWLRIIEKKLTLVQVREADKVIFAANQLEGPTGDWWDTYKEAREEDAGEPNWEEFTTAFRDNFVPAAVMRMKKNEFRRLRQGNTTVQEYLNRFTQLARYATRDLADEEEKIDKFIEGLNDELRGPMIGQDHDSFQSLINKVVRLENDRKVVEHNRKRRLAMNRSPQTAPQRPKGTTPSAWRPTVVTTSRPAASSNFHKPVTIQNRAPAPNQAATGSVRPGSCFNCGEYGHFANKCPHPNKTPIRTGANATANHGTATPAAGRGLFRTPQTNRTATGFGRGQVKHVRAEEAQEDQGVLMGMFSLNSTPVKVLFDSGASHSFISLKASQQHNLIRVKLRQPMLVHSPGGEIAVDTACIDVPIRLRDVVFPSNLMVLIPQTLDVILGMDWLAKHRGVIDCRRREVTLTTPWGSDMRATMDQDPRLTEHAGGIFTMLPLKGMPVVQRFPDVFPEDLPGMPPDRDIEFIIDLIPGTAPISKRPYRMPVNELEEIKKQIRELQEKGFVRPSSSPWGAPVLFVKKKDGSMRMCVDYRSLNEVTIKNKYPLPRIDDLFDQLKGAKVFSKIDLRSGYHQLKIRTEDIPKTAFSTRYGLYEFTVMSFGLTNAPAYFMNLMNKVFMDYLDKFVVVFIDDILIYSKDEEEHTEHLRLVLQRLRKHKLYAKFSKCEFWLKEVAFLGHVISAGGVAVDPAKVEAVTEWKAPKSVTEIRSFLGLAGYYRRFIEGFSKIARPMTQLLKKEKKFVWSEQCQESFEQLKEKLTSAPILVLPDIRKDFVIYCDASRQGLGGIWRHYLIGNHCDIYTDHKSLKYIFTQSDLNLRQRRWLELIKDYDLEVHYHPGKANVVADALSRKSHCNHLRMEGMVPELREEIAQLNLHIVPHGQINTLDIQPLLRTQIEEAQKDNEEIREVKERLAAGRAKEFSTDEKDVLWYKKRIYVPEQGGLRGLILKEAHESAYSLHPGSTKMYQDLKEGYWWPNMKRDVAEYVALCDVCQKVKAEHQRPAGLLQPLRIPEWKWDEIGMDFIVGLPKIATGYDSIWVIVDRLTKTARFIPVKTNYSSAKLAELYMTRIVCLHGVPMKIISDRGTQFTSHFWEKVHEALGSYLAFSTAYHPQTDGQTERTNQVLEDMLRACALDFSKDWERCLPYAEFSYNNSFQASLKMSLNESLFGRRCRTPLMWSETGERAVLGPDIIQEAEEKVRLIRDRLKVAQSRQKSYADTRRRNLEFKEGDYVYLKVSPMRGTKRFKIIARRGEVAYQLQLPENIADVHPVFHVSQLKKCLRVPEEQAPLEEIHISNDLTYPEHPIRILDEAEKRTRSKVWRMYKVQWSNHTEDEATWESEEFLRTEYPHLFEDW

SEQ ID NO: 18928 - protein, 1074 aa, Oryza sativa
  Clone ID: TF_OSC900173j.C1.p6.fg
MASRRRATTSNDETQTPDLTTLAGVMATQTQLLQAIANNQGNRGGSSFGEFMRTKPPTFARAEEPMDAKDWLRIIEKKLTLVRVREADKVIFAANQLEGPVGDWWDTYKEAREEDAGEPNWEEFTTDFRDNFVPAAVMRMKKNEFRRLRQGNTTVQEYLNCFTQLARYATRDLADEEEKIDKFIEGLNDELRGPMIGQDHDKNDRKVVEHNRKRRLAMNRPPQTAPQRPKGATSSAWRPTVVTTSRPATSSNFHRPVTIQNRAPAPNQAATGSVRPGSCFNCGEYGHFANKCPHPNKTPIRTGANATAIHGTATPAAGRGLFRTPQTNRTATGFGRGQVNHVRAEEAQEDQGVLMGMFSLNFTPVKVLFDSGASHSFISLKASQQHNLTRVKLRQPMLVHSPGGEIAVDTACIDVPIRLRDVVFPSNLMVLIPQTLDVILGMDWLAKHRGVIDCRRREVTLITPWGSDMRATMDQNPRLTERAGGIFTMLPLKGMPVVQRFPDVFPEDLPGMPPDRDIEFIIDLIPATAPISKRPYRMPVNELKELKKQIRELQEKGFVRPSSSPWGAPVLFVKKKDGSMRMCVDYRSLKEVTIKNKYPLPRIDDLFDQLKGAKVFSKINLRSGYHQLKIRTEDIPKTAFSTRYGLYEFTVMSFGLTNAPAYFMNLMNKVFMDYLDKFVVVFIDDILIYSKDEEEHAEHLRLVLQKLRKHKLYAKFSKCEFRLKEVAFLGHVISASGVAVDPAKVEAVTEWKAPKSVTEIRSFLGLAGYYRTFIEGFSKIARPMTQLLKKEKKFDLKEGYWWPNMKRDVAEYVALCDICQKVKAEHQRPAGLLQPLRISEWKWDEIGMDFIVGLPKTATGFQASLKMSPNEALLGRRCRTPLMWSETGERAVFGPDIINEAEEKVRLIRDRLKVTQSRQKSYADTRRRDLEFKKRDYVYLKVSPMRGTKRFKVKGKLAPRYGGPFQITARRGEVAYQLQLPENIADVHPVFHVSQLKKCLPVPEEQAPLEEIHISNDLTYPEHPIRILDEVEKRTRSKVWRMYKVQWSNHTEDEATWESEEFLRTEYPHLFENW

SEQ ID NO: 18929 - protein, 1428 aa, Oryza sativa
  Clone ID: TF_OSC900324j.C1.p13.fg
MASRRRATTSNDETQTPDLNTLAGIMATQTQLLQAIASNQGNRGGSSFGEFMRTKPPTFATAEEPMDAEDWLRIIEKKLTLVRVREADKVIFAANQLEGPAGDWWDTYKEAREEDAGEPNWEEFTTAFRDNFVPAAVMRMKKNEFRRLRQGNTTVQEYLNRFTQLARYATRDLADEEEKIDKFIEGLNDELRGPMIGQDHDSFQSLINKVVRLENDRKVVEHNRKRRLAMNRPPQTAPQRPKGTTPSAWRPTVVTTSRPAASSNFHRPVTIQNRAPTPNQAATGSVRPGSCFNCGEYGHFANKCPHPNKTPIRTGANATAIHGTATPAAGRGLFRTPQTNRTATGFGRGVKLRQPMLIHSPGGEIAVDTACIDVPIRLRDVVFPSNLMVLIPQTLDVILGMDWLAKHRGVIDCRRREVTLTTPWGSDMRATMDQDPRLTERAGGIFTMLPLKGMPVVQRFPDVFPEDLPGMPPDRDIEFIIDLIPGTAPISKRPYRMPVNELEELKKQIRELQEKGFVRPSSSPWGAPVLFVKKKDGSMRMCVDYRSLNEVTIKNKYPLPRIDDLFDQLKGAKVFSKIDLRSGYHQLKIRTEDIPKTAFSTRYGLYEFTVMSFGLTNAPAYFMNLMSKVFMDYLDKFVVVFIDDILIYSKDEEEHAEHLRLVLQKLRKHKLYAKFSKCEFWLKEVAFLGHVISAGGVAVDPAKVEAVTEWKASKSVTEIQSFLGLAGYYRRFIEGFSKIARPMTQLFKKEKKFVWSEQCQESFEQLKEKLTSAPILVLPDIRKDFVIYCDASRQGLGGVLMQDGKVVAYASRQLRPHEENYPTHDLELAAVVHALKIWRHYLIGNHCDIYTDHKSLKYIFTQSDLNLRQRRWLELIKDYDLEVHYHPGKANVVADALSRKSHCNHLRMEGMVPELREEIAQLNLYIVPHGQINTLDIQPLLRTQIEEAQKDNEEVREVKERLAAGRAKEFSTDEKDVLWYKKRIYVPKQGGLRGLILKEAHESAYSLHPGSTKMYQDLKEGYWWPNMKRDVAEYVALCDVCQKVKAEHQRPAGLLQPLRIPEWKWDEIGMDFIVGLPKTATGYDSIWVIVDRLTKTARFIPVKTNYSSAKLAELYMTRIVCLHGIPKRIISDRGTQFTSHFWEKVHEALGSYLAFSTAYHPQTDGQTERTNQVLEDMLRACALDFSKDWERCLPYAEFSYNNSFQASLKMSPTEALFGRRCRTPLMWSETGERAVFGPDIIQEAEEKVRLIRDRLKVAQSRQKSYADTRRRNLEFKEGDYVYLKVSPMRGTKRFKVKGKLAPRYVGPFQITARRGEVAYQLQLPENIADVHPIFHVSQLKKCLRVPEEQAPLEEIHISNDLTYPEHPIRILDEAEKRTRSKVWRMYKVQWSNHTEDEATWESEEFLRTEYPHLFENWNCGIKFIWEIL

SEQ ID NO: 18930 - protein, 1427 aa, Oryza sativa
  Clone ID: TF_OSC100949j.C1.p4.fg
MALVPAGAAADPARGSSGSAFSYPQLTATNYTSWCIRVQAMMEDQGVWDAIEPAAGVAVDPRRDKKSKSHLLQSLPEDLLMQVAKKRSAKEVWDCLKTRFVGADRVREARLQTLKGEFGAMVMEPGETLDQYAGRITAMSVRHSVLGSTLSDSAIVKKLFDTVPEKFISLVAGIEQFYEIDNMPFEEAVGRLKAYEERVRKKKAAAGGVTADGQVLLTQAEWEARFRKDGSESSSPQKNKPPSDRGNRAQGGRGRGRGHGGGGGRGSAPRNSGAGGSGGGGRDKSHIKCYNCEEFGHYSTQCPHPKKKKVEAHLAQTDDANPALLLAVTEDEPASGLVVHEERVWPQLLLADSGAATGDIWFLDNGASNHMTGDRAKFRDLDVSITGSVKFGDASTVKIQGKGSILFSCKNGDQWLLQDVFYIPSLCCNMVSLGQLTETGHRVVMDEDVLEVFDKSPLRLVMRVRRTPNRLYRIELKLATPVCLLTRMDEPAWLWHARLGHVNFQAMKLLADKGMAGGIPAITHPNQLCQACLVAKQIRQPFPATANFRAEEPLELLHIDLCGPITPTTMAGNRYFMLIVDDFSRWMWMFVIKTKDQALEAFTKFKPLAENTAGRRIKTLRSDRGGEFLSGEFAQLCEQAGIQRHLTAPYSPQQNGVVERRNRSVMAMARSLMKGMSVPGRFWGEAVRHAVYLLNRLPTKAMGDRTPFEAWTGRKPQLGHLRVFGCIAHAKITTPNQKKLDDRSAPYVYLGVEKGSKAHRLFDPRCGRIHVSRDVIFEENVPWQWSVVAGEQNSTEFTVEEDGVDAPPAGAPAYPVPRYRAPSPAVPQSPPASPVGASSSLPTSPQSSPSSTPPSTPATGSAGPVASPGSGGDLRSDEGPVRFRSLEDIMREAPRVDLVEDEHDGDALLAEMEEPSSYREAAGQPAWENAMAQELQAIEKNSTWALTALPAGHKPIGLKWVYKLKKNTAGEVIKHKARLVAKGYVQRQGVDFEEVFAPVARLDTVRVILAIAADRRWEVHHLDVKSAFLNGDLEEEVYVAQPEGFVKRGEEHLVLRLSKALYGLRQAPRAWNTRLDKCLKELGFARCTQEQAVYTRGKGQAGVIVGVYVDDLIVTGENPHEIAMFKQQMMGEFEMSDLGLLSYYLGIEVIQGENGIAIKQAAYAKKILSQFGMQGCNPTSIPMEPRSLLHKDADGNPIDATEYRRVIGCLRYLLHTRPDLSYAVGVASRFMERPTTMHLKAVKMILRYLKGTLDSGLVFASGSGSLDITGFTDSDLAGDMDDRRSTGGMAFYVNSSLVSWCSQKQKTVALSSCEAEFMAATAAACHALWLRALLSEMMGTEAKRVKLFVDNKSAIALMKNPVFHGRSKHIDTRYHFIRECVESGQILIEFVRSEEQRADAMTKGLPAAKLATARHLLGVRDLRPRQD

SEQ ID NO: 18931 - protein, 1427 aa, Oryza sativa
  Clone ID: TF_OSC24132j.C1.p4.fg
MALVPAGAAADPARGSSGSAFSYPQLTATNYTSWCIRVQAMMEDQGVWDAIEPAAGVAVDPRRDKKSKSHLLQSLPEDLLMQVAKKRSAKEVWDCLKTRFVGADRVREARLQTLKGEFGAMVMEPGETLDQYAGRITAMSVRHSVLGSTLSDSAIVKKLFDTVPEKFISLVAGIEQFYEIDNMPFEEAVGRLKAYEERVRKKKAAAGGVTADGQVLLTQAEWEARFRKDGSESSSPQKNKPPSDRGNRAQGGRGRGRGHGGGGGRGSAPRNSGAGGSGGGGRDKSHIKCYNCEEFGHYSTQCPHPKKKKVEAHLAQTDDANPALLLAVTEDEPASGLVVHEERVWPQLLLADSGAATGDIWFLDNGASNHMTGDRAKFRDLDVSITGSVKFGDASTVKIQGKGSILFSCKNGDQWLLQDVFYIPSLCCNMVSLGQLTETGHRVVMDEDVLEVFDKSPLRLVMRVRRTPNRLYRIELKLATPVCLLTRMDEPAWLWHARLGHVNFQAMKLLADKGMAGGIPAITHPNQLCQACLVAKQIRQPFPATANFRAEEPLELLHIDLCGPITPTTMAGNRYFMLIVDDFSRWMWMFVIKTKDQALEAFTKFKPLAENTAGRRIKTLRSDRGGEFLSGEFAQLCEQAGIQRHLTAPYSPQQNGVVERRNRSVMAMARSLMKGMSVPGRFWGEAVRHAVYLLNRLPTKAMGDRTPFEAWTGRKPQLGHLRVFGCIAHAKITTPNQKKLDDRSAPYVYLGVEEGSKAHRLFDPRCGRIHVSRDVIFEENVPWQWSVVAGEQNSTEFTVEEDGVDAPPAGAPAYPVPRYRAPSPAVPQSPPASPVGASSSLPTSPQSSPSSTPPSTPATGSAGPVASPGSGGDLRSDEGPVRFRSLEDIMREAPRVDLVEDEHDGDALLAEMEEPSSYREAAGQPAWENAMAQELQAIEKNSTWALTALPAGHKPIGLKWVYKLKKNTAGEVIKHKARLVAKGYVQRQGVDFEEVFAPVARLDTVRVILAIAADRRWEVHHLDVKSAFLNGDLEEEVYVAQPEGFVKRGEEHLVLRLSKALYGLRQAPRAWNTRLDKCLKELGFARCTQEQAVYTRGKGQAGVIVGVYVDDLIVTGENPHEIAMFKQQMMGEFEMSDLGLLSYYLGIEVIQGENGIAIKQAAYAKKILSQFGMQGCNPTSIPMEPRSLLHKDADGNPIDATEYRRVIGCLRYLLHTRPDLSYAVGVASRFMERPTTMHLKAVKMILRYLKGTLDSGLVFASGSGSLDITGFTDSDLAGDMDDRRSTGGMAFYVNSSLVSWCSQKQKTVALSSCEAEFMAATAAACHALWLRALLSEMMGTEAKRVKLFVDNKSAIALMKNPVFHGRSKHIDTRYHFIRECVESGQILIEFVRSEEQRADAMTKGLPAAKLATARHLLGVRDLRPRQD

SEQ ID NO: 18932 - protein, 1528 aa, Oryza sativa
  Clone ID: TF_OSC400181j.C1.p4.fg
MSDARSRRSVASSTQRQQDAELAAAEERRRATAQTAAAAARAARLAAAELAAARAEAEAEAAEDAARAAEVEVETLRSSINGSIAGDITADRELEELARGRARERAERWAAAHLHGGGGGPRDRAPADGNPDGRGRAGGSPEPTRGPHRQRGSPLTGAMVTTASRRWSGTLVPAVRHMWEAVRYGDVDYDEDRQALDALIAAVPPEMQFSLSQKRTAKEAWDAITTARIDSDRARKSTLQALRKEWENLAFKPGEDVDDFALRLNTLLQKMVQYGDDTYDEERAVEKLFRCVPEKYRQIARSIESLLDLSTMSIEEALGRLKVVDGDEPQPLSGPITIGGKLHLTREQWEASQGDGRKRESSSPTGGRKPRKARGGVQLRWARRRAEGGARRGAQGVATGNHKQARDDACRNCGKLGHWAKDYRQPRRGQAHVAQVEEEEPALLLAHASIELPPAAPAAAAFLHLDEPKVLVSLCNGSSNDKADEWYLDTGATHHMTSRREFFTEFDSGVRGSVKFGDASGVEIKGVGSVTFTAKSGEHRLLTGIYYIPALRNSIISVGQLDENGSRVLVEDGLMRIWDRRRRLLAKVTRGTNRLYILSAQVAQPVCLAARRDDEAWQWHERFGHLHFEALKQLSAKEMVRGMPCLDHVEQLCDVCVVTKQRRLPFPQQTSFRAKEWLELVHGDLCGPVTPATPGGRRYFLLLVDDLSRYMWVMVLGSKGEAADAIRHAQAAAEAECGRKLRVLRTDNGGEFTAAEFASYCADEGIQRHYTTPYSPQQNGVVERRNQTVVGMARALLKQRGMPAIFWGEAVVTAAYILNRSPTKALDGRTPYEAWHGRKPAVSHLRVFGCLAFAKELGHIGKLDDRSTPGVFIGYAEGSKAYRILDPGDTAWRGWVWDKAVDDGSTPTYDDFTVEYIHFEGAGGVGSSSSPSVSTPALESPPTPTPTHPRATTSTTTSSSSTPPQPVTPHAPAPTATPPSTSTPTPARVERSPVEFATPLSHDRERIDAYHDGEQLRYRTMEDLLGDQPVPGLVPRDLEAQLHLACDDGEPRSFAEAEKHAAWRAAMQSEMDAVQENRTWELADLPRGHRAITLKWVFKLKRDEAGAIVKHKARLVARGFVQQEGIDYDDAFAPVARMESVRLLLALAAQEGWGVHHMDVKSAFLNGDLKEEVYVHQPPGFVIPGKEGKVLRLHKALYGLRQAPRAWNAKLDSTLKGMASSKARTRRPSTGGAMEEMPCWMRRSRRSSEEMKATFQMSDLGPLSFYLGIEVHQDDSGITLRQTAYAKRVVELPGLTDCNPALTPMEERLKLSRDSTAEEVDATQYRRLVGSLRYLTHTRPDLAFSVGYVNRFMQRPTTEHQQAVKRIIRYVAGTLDHGLYYPRCPGKAHFVGYSDSDHAGDIDTSKSTSGILFFLGKCLVSWQSVKQQVVALSSCEAEDTGTVELRVDSKSALALAKNPVFHERSKHIRVRYHFIQSYLEEGSIKASYINTKDQLADLLTKPLGRIKFLELYSRIGMAQLPHKTTHKT

SEQ ID NO: 18933 - protein, 1470 aa, Oryza sativa
  unsure (1)..(1470): unsure at all Xaa locations
  Clone ID: TF_OSC407196j.C1.p1.np
MASRRRASTSNEETQTPDLTTLAGVMATQTQLLQAIANNQGNYGGSSFGEFMRTKPPTFATAEEPMDAEDWLRIIEKKITLVRVREADKVIFAANQLDGPAGDRWDTYKEAREEDAGEPNWEEFTTAFLDNFVPAAVMRMKKNEFRRLWQGNTTVQEYLNRFTQLARYATRDLADEEEKIDKFIKGLNDELRGPMIRQDHDSFQSLINKVVRLENDRKVVEHNRKRRLTMNRPPQTAPQRPKGTTSSAWRPTVVTTSRPTASSNFHRPVTIQNRAPAPNQATTGSVRPESCFNCGEYGHFANKCPHPNKTPIRTGANATAIHGTATPAAGRDLFRTPQTNRTATGFGRGQVNHVRAEEAXEDQGVLMGMFSLNSTPVKVLFDSGASHSFISLKASQQHNLTRVKLRQPMLVHSPRGEVAVDTACIDVPIRLRDVVFPSNLMVLIPQTLDVILGMDWLAKHRGVIDCRRREVTLTTPWGSDIRATMDQDPRLTECAGGIFTMLPQKGMPVVQRFPDVFPEDLPGMPPDRDIEFIIDLIPGTAPISKRPYRMPVNELEELKKQIRELQEKGFVRPSSSPWGAPVLFVKKKDGSMRMYVDYRSLNEVTIKNKYPLPQIDDLFDQLKGAKVFSKINLRSGYHQLKIRTGDIPKTAFSTRYGLYEFTVMSFGLTNAPAYFMNLMNKVFMDYLDKFVVVFIDDILIYSKDEEEHAEHLRLVLEKLRKHKLYAKFSKCEFWLKEVAFLGHVISAGGVAVDPAKVEAVTEWKAPKSVTEIQSFLGLAGYYRRFIEGFSKIARPMTQLLKKEKKFVWSEQCQGSFEQLKEKLTLAPILVLSDNRKDFVIYCDASRQGLGGVLMQDGKVVAYASRQLXPHEENYPIHDLELAAVVHALKIWRHYLIGNHCDIYTDHKSLKYIFTQSDLNLRQRRWLELIKDYDLEVHYHLGKANVVADALSRKNHCNHLRMEGMAPELRKEIAQLNLHIVSRGQINTLDIQPLLRTQIEEAXKDNGEIQEVKERIATGRAKEFSMDEKEILWYKKRIYVPEQGGLRGLILKEAHESAYSLHPGSTKMYQDLKEGYWWPNMKRDVAEYVALCDVCQKVKAEHQRPVGLLQPLRIPEWKWDEIGMDFVVGLPKTATGYDSIXVIVDRLTKTARFIPVKTNYSSAKLAELYMTRIVCLHGVPKRIISDRGTQFTSHFWEKVHEALGSYLVFSTAYHPQTDGQTERTNQVLEDMLRACALDFSKDWERCLPYAEFSYNNSFQASLKMSSNEALFGRRCRTPLMWTETGEQVVFGPDIIKEAEEKVRLIRDRLKVAQSRQKSYADTRRRNLEFKEGDYVYLKVSPMRGTKRFKVKGKLAPRYVGPFQIIARRGEVAYQLQLPENIADVHPVFHVSQLKKCLRVPEEQAPLEEIHISNDLTYPEHPVXILDEAEKRTRTKVWHMYKVQWSNHTEDEATWESEEFLRTEYPHLFETX

SEQ ID NO: 18934 - protein, 1004 aa, Oryza sativa
  Clone ID: TF_OSC101460j.C1.p3.fg
MAPSNSYDDAMKPERFNGAAARMMYWLTALDLFSVITDQEPQPGEFFPGAIPYADFYQTRNFNCVGRILSMLSDKFYDIYMHHTSARVLWETLEKKYSVPDAGKDLYLVEKYHDFKMTNGKSMVEQTQELQLLVGELNHSKIALPDKFQVGMVIAKLPPSWRDFATALKHRREEMTMDDLVASLDVEEKARAKDAPLVNEDYNSRVNLTDTHQRRNKKNPKENNSGMKPRGKIDKGNGKKNGKGPMSCFECGKPGHFARNCRYKKRNEKVQKDKSDDQTDAKVNMVIDEAEVARTKDEAFEHFKIFKAEAENQLDLKIKILRSDRGGEYLSIEFSKFHQEHGIIHETTPPYSPQSNGVVERKNRTLTDLVNAMLSNSGLPNNMWGEALYTACFVLNRVPAKGTEVNIPVVKKRKLGPKTVDCVFIGYAQNSPAYRFLVVKSETTEVRENTVMESCDATFFEDTFPLKVKSPSSEPISVEPRISILSDDSLNLRRSKRSRTEKMFGEDFIIYLVNDVPSTLSEAFASAEAAYWKEAVQSEMDSILSNDTWEITHLPQGCRAIGCKWIFKKKLKPDGTIDKFKARLVAKGYTQRQGEDYFDTFSPVARMPTIRALVALAAAYGYKIHQMDVKTAFLNGELEEEIYMQQPDGFVIPGQEDKVCKLEKSLYGLKQAPMQWHEKFDKTLISAGFTVNDADKCVYSRFDGDIDLGEAKVILNIKIQEKDKGFELNQSHYVEKLLHRFGHFNSKSAATPYDPCLKLHKNQGHGLDQVKFAQIIGSLMYLANTTRPNISYAVSRLSRYSSKPDSNHWHALECVLRYLKGTINQGLFYSGFPAVLEGYSDANWITYSNEMKSTSGFVFTLGGAAISWKSAKQTILTRSTMEAELVALETACCEAEWLRELLMDIPIVEKPIPAVLLYCDNQAVIAKVTSKKENMKSSRHVKRRLKSVRDLRNTGVVTFDYIKTEKNLADPFTKGLARKPILELSKGMGLRPANELLTVATQPV

SEQ ID NO: 18935 - protein, 1400 aa, Oryza sativa
  Clone ID: TF_OSC400798j.C1.p12.fg
MATATGGDGDVGAAAGDGATGRLSLTLSSMMYPNVEECKGWTRLSPPAAYLTFLGAHNKRRARFRAWTRDRALEEALMPRRRTSSPRCWSVSPSERTPGGSGGRASGSGGKDSGLVIHRVVKESGSSANYPVLTKTNYNDWALLMKIKLQARCLWDAVERGRAAVELHEDQMALDAIYSAVPPEMISILATKASAKEAWDCIKTMRVGDNRIRKASAQRVRTEYERIAFRDGESVEEFAMWLTSVVNQLATHGDPEPDDKVVEKYLHVARPRFSQLAAEDYQTPPSSQNTDGKLYLTEEEWLEHHKKEQEAKRSGAGSSGRNKRRGGKGCIGGGSDGSTSSPARRDDKCRNCGKLSHWAKECRSKPKHEDQAHVAQDDKPTLMLLTGGYVETAGSMLPPPPPRATPAPQRVCVELVEKKVFAGLDHEADRDQRSWIMDSGVSNHMAGCRAAFSDLDTGITGNVWLGDGSIIPIEGCGMVLFACKNGEHRTLANTYFLPRLAANIVSIGQLDETSFQVLVEDGIMRVRDKQRRLLARIPRSPGRLYVLDIILARPVCLTARAGEDAWHWHARFGHINFTVLKKMSRETLVRGLPLLTQVDQVCEACLAGKHRRAPFPRRALSRSSKPLQLLHGDLCGPISPVTPSGNRYFLLLIDDYSRFMWIKLLPSKDAEPATIKQIQAAAERKSGKRLRALRMHRGGEYTAGHFNEYWAELGLRRELTALYSPQQNGVVERRNQSVVGTARSMLKAKGLPGHHRRESAKNSIRAMERRFAGGSSSSYIWVCGPCEELDDRSKPMIFVGYEPGSKAYCAYNPVTRQVHISRNIVFDEEAQWRWDGQAETGVDTDFVIEYTTVQQSDAAPPSPAAAPPSPGSPFRTIDNVLGPATPQGQAVREFDEDLLMVSAEEPASFDEAEQHQCWRHAMIEEIKSIEANNTWRLADGPSRQCPIGLKWVFKTKKDVAGNITRYKAYLVAKGYVQRQGIDFDEVFALVARLESVRLLLAHAAPRAWYAKLDASLLALGFHQSSSEHAVYFRATGARRLVVGVYVDDLVITGGDSAELEQFKDEMKGTFQMSDLGLLKYYLGLEVNQTEDGITVCQRAYAEKILEMAGMSSTNPSLTPMESRLKLSKSSAAPAVDATDYRRIVGSLRYLVNSRSDLAFLVGYVSRFMEKPTTEHMAAVKRVLRYIAGTTNYGCQYRRKKDAVCLVGYSDSDLAGDVDSRKSTTGVLFFLGDNLITWQSQKQKVVALSSYEAEYIAATTVACQGVWLALLLAELRGEEGSAITLKVDNQSAILLSKNLCFTIVANILTLGIISFGSVSRKRMSPNVWKPIGIENPDTEMKSNIIEYRYRRNTKLNEYGNEDLLERESAISDLAGHKLEEEDYPVVDYESDLQTAISKTVR

SEQ ID NO: 18936 - protein, 1029 aa, Oryza sativa
  Clone ID: TF_OSC410421j.C1.p8.fg
MAPSNSYDDAMKPERFNGAAARMMYWLTALDLFSVITDQEPQPGEFFPGAIPYADFYQTRNFNCVGRILSMLSDKFYDIYMHHTSARVLWETLEKKYSVPDAGKDLYLVEKYHDFKMTNGKSMVEQTQELQLLVGELNHSKIALPDKFQVGMVIAKLPPSWRDFATALKHRREEMTMDDLVASLDVEEKARAKDAPLVNEDYNSRVNLTDTHQRRNKKNPKENNSGMKPRGKIDKGNGKKNGKGPMSCFECGKPGHFARNCRYKKRNEKVQKDKSDDQTDAKVNMVIDEAEVARTKDEAFEHFKIFKAEAENQLDLKIKILRSDRGGEYLSIEFSKFHQEHGIIHETTPPYSPQSNGVVERKNRTLTDLVNAMLSNSGLPNNMWGEALYTACFVLNRVPAKGTEVTPYELWKGRKPNLNFLKVWGCLAKVNIPVVKKRKLGPKTVDCVFIGYAQNSPAYRFLVVKSETTEVRENTVMESCDATFFEDTFPLKVKSPSSEPISVEPRISILSDDSLNLRRSKRSRTEKMFGEDFIIYLVNDVPSTLSEAFASAEAAYWKEAVQSEMDSILSNDTWEITHLPQGCRAIGCKWIFKKKLKPDGTIDKFKARLVAKGYTQRQGEDYFDTFSPVARMPTIRALVALAAAYGYKIHQMDVKTAFLNGELEEEIYMQQPDGFVIPGQEDKVCKLEKSLYGLKQAPMQWHEKFDKTLISAGFTVNDADKCVYSRFDGDIDLGEAKVILNIKIQEKDKGFELNQSHYVEKLLHRFGHFNSKSAATPYDPCLKLHKNQGHGLDQVKFAQIIGSLMYLANTTRPNISYAVSRLSRYSSKPDSNHWHALECVLRYLKGTINQGLFYSGFPAVLEGYSDANWITYSNEMKSTSGFVFTLGGAAISWKSAKQTILTRSTMEAELVALETACCEAEWLRELLMDIPIVEKPIPAVLLYCDNQAVIAKVTSKKENMKSSRHVKRRLKSVRDLRNTGVVTFDYIKTEKNLADPFTKGLARKPILELSKGMGLRPANELLTVATQPV

SEQ ID NO: 18937 - protein, 1075 aa, Oryza sativa
  Clone ID: TF_OSC900212j.C1.p7.fg
MDGGGGHTHARARYLVEKKASCGVTVSMAPSNSYDDAMKPEKFNGNHFERWQTRIMYWLTALDLFSVITDQEPQPGEFFPRAVPYADFYQTRNFNCVGRILSMLSDKFYDIYMHHTSARVLRETLEKKYSVPDAGKDLYLVEKYHDFKMTNGKSVVEQTQELQLLVGELNHSKIALPDKFQVGMVIAKLPPSWRDFATALKHRMEEMTMDDLVASLDVEEKARAKDAPLVNEDDNSRVNLTDTHQRRNKKNPKENNSGMKPRGKIDKGNGKKNGKGPMSCFECGKPGHFARNCRYKKRNEKVQKDKSDDQTDAKVNMVIDEAKVARCVSNMSQKFDKCQPVDWWVDTGATIHEQQGGRSVIGLESKSRVLGSGRVDLKLSSRKVLTLHNVLFVPAAKANLISMNGILTKGGRRYFITFIDDCSKYCYVYLLRTKDEAFEHFKIFKAEAENQLDLKIKILRSDRGGEYLSIEFSKFHQEHGIIHETTPPYSPQSNGVAERKNRTLTNLVNAMLSNSGLPNYMWGEALYTACFVLNRVPAKGTEVTPYELWKGRKPNLNFLKVWGCLAKVNIPVVKKRKLGPKTVDCVFIGYAQNSLAYRFLVVKSETTEVRENTVMESRDTTFFEDTFPLKVKSPSSEPISVEPRISISSDDSLNLRRSKRSRTEKTFGDDFIIYLVDDVPSTLSEAFASAEAAYWKEAVQSEMDSILSNGTWEITHLPQGYRAIGYRAIGCKKLKPDGTIDKFKARLVAKGYTQRQGEDYFDTFSPVAHMPTIRALVALAAAYGYKIHQMDVKTAFLNGELEEEIYMQQPDGFVIPGQEDKVCKLEKSLYGLKQAPMQWHEKFDKTLISAGFTVNDADKCVYSRFDGDIGVILCLYVDDILILGTNLNIISEIKSYLSNKFDMKDLGEAKVILNIKIQKKDKGFELNQSHYVEKLLHRFGHFNSKSTATPYDPCLKLHKNQGQGLDQVKFAQIIGSLMYLANTTRPNISYAVSRLSRYSSKPDSNHWHALERVLRYLKGTMNQGLFYSGFPAVLEGYSDANWITDSDEMKSTSGFVFTLGGAAISWKSAKQTILT

SEQ ID NO: 18938 - protein, 1549 aa, Oryza sativa
  Clone ID: TF_OSC401668j.C1.p29.fg
MSDARSRRLVASSTRRQQDAELAAAEERRQATAQTAAAAARVARLAAAELAAARAEAEAEAAEDAARAAEVEVETLRSSINGSIAGDITADRELEELARERARERAERWAAAHLHGGGGGPRDRAPADGNPDGRRRAGGSPELSRGPRRQHGSLSPDRRHGHHGVQTVVRDFGPGGGWPTLTKTNYIEWAAVMRVRLQVRHMWEAVRYGDVDYDEDRRALDALIAAVPPEMQFSLSQKRTAKEAWDAIAAARIGSDRARKSTLQALRKEWENLAFKPGENVDDFALRLNTLLQKMVQYGDDTYDEERAVEKLFRCVPEKYRQIARSIESLLDLSTMSIEEALGRLKVVDGDEPQPLSGPITIGGKLHLTREQWEASQGDGRKGESSSPTGGRKPRKARGGVQLRWARRRAEGGARRGAQGVATGNHKPARDDACHNCGKLGHWAKDYRQPRRGQAHVARVEEKEPALLLAHASIELPQAAPAAAAFLHLDEPKVLVSLCNGSSNDKADGWYLDTGATHHMTGRREFFTEFDSSVRGSVKFGDASGVEIKGVGSVTFTAKSGEHRLLTGVYYIPALRNSIISVGQLDENGSRVLVEDGLMRIWDRRRRLLAKITRGTNRLYILSAQVAQPVCLAARRDDEAWQWHERFGHLHFEALKQLSAKEMVRGMPCLDHVEQLCDVCVVTKQRRLPFPQQTSFRAKERLELVHGDLCGPVTPATPGGRPREAADAIRHAQAAAEAECGRKLRVLRTDNGGEFTAAEFASYCADEGIQRHYTAPYSPQQNGVVERRNQTVVGMARALLKQRGMPAIFWGEAVVTAVYILNRSPTKALDGRTPYEAWHGHKPAVSHLRVFGCLAFAKELGHIGKLDDRSTPGVFIGYAEGSKAYRILDPETQRVRTVRDVVFDEGRGWVWDKAVDDGSTPTYDDFTIEYVHFEGAGGVGSSSSPSVSTPIPEPPPTPTPTHPRATTSTTTSSSSTPPQPVSPRAPAPIATPPGTSTPTPARVERSPVEFATPLSHDGERIDAYHDGEQLRYRTMEDLLGDQPVPGLVPRDLEAQLHLACDDGEPRFFAEAEKHAAWRAAMQSEMDAVQENRTWELADLPRGHRAITLKWVFKLKRDEAGAIVKHKTRLVARGFVQQEGIDYDDAFAPVARMESVRLLLALAAQEGWGVHHMDVKSAFLNGDLKEEVYVHQPPGFVIPGKEGKVLRLHKALYGLRQAPRAWNAKLDSTLKGMGFEQSPHEAAIYRRGNGGNALLVGVYVDDLVITGTKDAEVAAFKEEMKATFQMSDLGPLSFYLGIEVHQDNSGITLRQTAYAKRVVELAGLTDCNPAHSDGGETEAEPRQHDGGGGCYTRPTTEHQQAVKRIIRYVAGTLDHGLYYPRCPGKAHFVGYSDSDHAGDIDTSKSTSGILFFLGECLVSWQSVKQQVVALSSCEAEYMAASAASTQALWLARLLGDLLGRDTGAVELRVDSKSALALAKNPVFHERSKHIWVRYHFIQSYLEEGSIKASYINTKDQLADLLTKPLGRIKFLELCSRIGMAQLSHKTTHKT

SEQ ID NO: 18939 - protein, 200 aa, Oryza sativa
  Clone ID: TF_OSC30776j.C1.p1.fg
MADNRFVVEQAHEIQTIAKELELLKCVLPDKFVAGCIIAKLPPSWRSFGTAFKHKRQEYSIEGLIASLDVEEKAREKDAASKDDAQQTTNFKRQKKNNNNPNQDERICFVCGQPGHLARKYPQRKGMKAPAGQTSKSANVTIGNTGDGSGYGRTGFHLPNGEWVTCFCSWCWHGRCEVYFGKDRAAEERAACPFYQQESC

SEQ ID NO: 18940 - protein, 556 aa, Oryza sativa
  Clone ID: TF_OSC401836j.C1.p4.fg
MADNRFVVEQAHEIQTIAKELELLKCVLPDKFVAGCIIAKLPPSWRSFGTAFKHKRQEYSIEGLIASLDVEEKAREKDAASKDDAQQTTNFKRQKKNNNNPNQDERICFVCGQPGHLARKYPQRKGMKAPAGQTSKSANVTIGNTGDGSGYGNLPTVFSVNQSTNWWVDTGANVARGSTFLMANGSHASVHGVGTVDVKFTSGKIVQLRNVQHVPSINRNLVSGSRLTRDGFKLVFESNKVVVSKHGYFISKGYECGGLFRFSLSDFCNKSVNNICGSVDDEANVWHSRLCHINFGLMSRLSSMCLISKFSIVKGSKCHSCVQSKQPRKPHKAAEERNLAPLELLHSDLCEMNEVLTKGGKQYFMTLIDDATRFCYVYLLKTKDEALDYFKIYKAEVENQLDRKIKRLRSDRGGEFFSNEFDLFCDEHDIIHERTPPYSPESNGIAERKNRTLTDLVNAMLDTAGQPKAWWGEALLTTNHVLNRVPNRNKNKTPYEIWIGRKPSLSYLRTWGVVGRSEVKLDYPFRNAADNVFVSHDFAKREGGDNCDPVGLEVVV

SEQ ID NO: 18941 - protein, 1185 aa, Oryza sativa
  Clone ID: TF_OSC23905j.C1.p5.gm
MSVVEHGTSAMVLPVPYMSVSGTSAAPEEEKDDPCSAGGRRGSLLTRQKEMRYDVRRIEPTESLKDTAARGAKPRVSSSRNAGSRTELTVRALHGSMTDVQLTCSCAVPLRLVVETLLADEDRKATRLRNRAENTRFGNMAIISAGRDYSLFVNIYFIFTNMSNTGDKEKETPVNTNGGNTASNSSGGPFLGVLADNIVDVYMHMPSGKDMWDALEAKFGVSDAGSELYVMEQFYDYNMVDDRSVVEQAHEIQMLAKELENNNCELPDKFVAGGIIAKLPPSWSDFATSLKHKRQEFSVPDLIGSLGVEEKARAKDVRGKKVEGGSSANMVQKKNPHASHNNKKVKPDVKPKAATNFKKKSKGKAKGDCFVCGKSGHWPKDCPERKDKKSANMIISEGGGTSGDATFFENEFPMKYTPSTSSKETVMPHEHFAPIEHNDQTPEENPEEDNIVDTRKSKRQRVAKSFGDDYIVYLVDDTPRTIEEAYSSPDADYWKEAVRSEMDSIMSNGTWEVVERPYGCKPVGCKWVFKKKLRPDGTIEKYKARLVAKGYTQKEGEDFFDTYSPVARLTTIRVLLALAASHGLLVHQMDVKTAFINGELEEEIYMDQPDGYVLEGQEGMVCKLLKSLYGLKQAPKQWHEKFDTTLTSAGFVVNEADKCVYYRYGGGEGVILCLYVDDILIFGTSLNVIEEVKDYLSKSFEMKDLGEADVILNIKLQRGDEGGITLVQSHYVDKVLSRFGYSDCKPAPTPYDPSVLLRKNRRIARDQLRYSQIIGSLMYLANATRPDISFAVSKLSRFVSNPGDDHWQALERVMRYLKGTMSYGIHYTGYPKVLEGYSDSNWISDADEIKATSGYVFTLGGGAVSWKSCKQTILTRSTMEAELTALDTAIVEAEWLRELLMDLPVVEKPVPAILMNCDNQTVIIKVNSSKDNMKSSRHIKRRLKSVRKQKNSGVIALDYVQTARNLADQFTKGLPHGRAIRFLGSARRDYSLFVNIYFIFTNMSNTGDKEKETPVNTNGGNTASNSSGGPFLGLFDRRIPEEEEEEEKMSYYGQQPPVGVPPQQGYPGKDGYPPPGYPPAGYPPAQGYPPAGYPPQQGYPPPYAQPPPQQQQHSSGPSFMEGCNYRTLVSDLSTPTGAVAGASAAAAAAAAAHLGCPLLLLSPGRLLLRIEATGARELKRFVSWS

SEQ ID NO: 18942 - protein, 1388 aa, Oryza sativa
  unsure (1)..(1388): unsure at all Xaa locations
  Clone ID: TF_OSC401841j.C1.p20.np
VYFYILNACKDLKKIFCKILCASVFSXNHIIPFKDGWVISFLRSARRDYSLFINIYFTFTNMSNTGDNSNTGYKEKEPPVNTNRGNASNSSGGPFLGSFSVVGFAATLKPHAFDGSNYKRWKARALLWLTACFYVSRGKRCEPPLSPEEEAKFEVSDCLFRGALISVLADNIVDVYMHMPSGKDMWDALEAKFRVSDAGNELYVMEQFYDYKMVDNRSVVEQDHEIXMLANELENNNCELPDKFVVGGIIAKLPPSWSDFATSLKHKRQEFSVIDLIGSLGVEEKARAKENRGKNIEGGSSANLVQKKNPHASHNNNNKKVKSDVKPKATTNFKKKGKGKAKGDCFVCGKPRHWAKNCPDRKDKKSANMVISEGGGTSGYDNFLPTVLSVFHSPDWWVDTGANIHVCADISLFSSYQVGRGSSLLMGNGSLAAVHGVGTVDLKFTSGKTVXLKNVQHVPSIKKNLVSGSLLCRDGFRLVFEFNKCVISKYXTFIGKGYDNGGLFRFSLDDMCNNNNNVVNHISENDESNVWHSXLANMSLILKFTLVKGSKCHTCVQLKQPCKPHKASEARNLAPLELVHSDLCEMNGVLTKGGKKYFMTLIDDCTRYCYVYLLKTKDETLHYFKIYKAEVENQLERKIKRLRSDRGGEYFSNEFTSFCKKFGIIHERTHPYSPQSNGVAERKNRTLTEMVNAMLDTAGLSKEWWGEAILTVCHVLNKIPVKHKKVTPFEEWERKKLNLSYLRTWGCLAKVNIPIAKKRKLGPKTVDCFLGYAIHSVGYRFLIVNSGVPDMRVGTITESRDATFFENEFPMKNTLSTSSQEPVLPHEHFAPIEHNDQTAEENPEEDNIVATRKSKRQRTAKSFGDDYIVYLVDDTPRTIEEAYSSPDADYWKEAVRSEMDSIMSNGTWEVVERPYGCKPVGCKWVFKKKLRPDGTIEKYKARLVAKGYTQKEGEDFFDTYSPVARLTTIRVLLAFEASHGLLVHQMDVKTAFLNGELEEEIYMDQPDGYVLEGQEGMVCKLLKSLYSLKQAPKQWHEKFDTTLTSAGFVVNEADKCLYYHYGGGEGVILYLYVDDILIFGTSLNVIEEVKDFLSKSFEMKDLGVADVILNIKLLRGDEGGITLVQSYYVDKVLSRFGYSDCKPAPTPYNSSVLLRKNRRIERDQLRYSQIIGSLMYLASATRPDISFAVSKLSRFVXNLGDDHWQALEMVMRYLKDTTSYGIHYTSYPKVLXGYSDSNWISDADEIKATSGYVFTLGGGAVSWKSCKQTILTRSTMEAELTALDTATVEAEWLRELLMDLPVIEKPVPAILMNCDNQTVIIKVNSSKDNMKSFRHVKRRLKSIRKQKNSRVIALDYVQTAKNLADQFTKGLPRNVIDSASREMGLRPT

SEQ ID NO: 18943 - protein, 374 aa, Oryza sativa
  Clone ID: TF_OSC11678j.C1.p1.fg
MSGDGEKSVKGAMGPQIEQVIVVSISPPSDQMLSFEEEEKCIHLNAQATNVLFSALSEDVFESIMPLEDAHLIWNTLKERYDKSECDETHVFIEGNEMVSSVNVDTSTSYSACETNLLKEEVCGKKWPSEEFTSPRCSSPRSDEYSCIMEKSSLEKENLELKAQLVELTSKHVDLQEKYDELLCSHGNIVDSHAMLEVTHEVIITTVKSYVPHIQVDFTCANSYCSQANIFPSTICDLDYVEKKDKRIDHGLVGNAQPSQDNRESMVKKLEKGTTVACNKFYQEDIKSNNKIKGQDQRKNKTSITCFKCKKMGHHVRDCPWKKEKKLNKNEDLAHKFFKSTKEGHFASSCPRKIDDEITLPTKTSRINKRKCYG

SEQ ID NO: 18944 - protein, 362 aa, Oryza sativa
  Clone ID: TF_OSC402680j.C1.p1.fg
MGPQIEQVIVVSISPPSDQMLSFEEEEKCIHLNAQATNVLFSALSEDVFESIMPLEDAHLIWNTLKERYDKSECDETHVFIEGNEMVSSVNVDTSTSYSACETNLLKEEVCGKKWPSEEFTSPRCSSPRSDEYSCIMEKSSLEKENLELKAQLVELTSKHVDLQEKYDELLCSHGNIVDSHAMLEVTHEVIITTVKSYVPHIQVDFTCANSYCSQANIFPSTICDLDYVEKKDKRIDHGLVGNAQPSQDNRESMVKKLEKGTTVACNKFYQEDIKSNNKIKGQDQRKNKTSITCFKCKKMGHHVRDCPWKKEKKLNKNEDLAHKFFKSTKEGHFASSCPRKIDDEITLPTKTSRINKRKCYG

SEQ ID NO: 18945 - protein, 1179 aa, Oryza sativa
  Clone ID: TF_OSC100566j.C1.p19.gm
MPCKTHAHNARLTRSSTPAARHISRRVGGALQERRGRNLVATEEQALCGRDKSHIKCFNCEEFGHYSTQCPHPKKKKAEAHLAQTEDAGPALLLAVTEAVQNAPCQDALCGLVVHEERVWPRLMLAEKGAAAGDLWYLDNGASNHMSGDRRKFRELDETVTGQVRFGDASSVQIMGQGSILFSCKNGDQWLLDDVYYIPSLCCNMVSLGQLTETGHRVVMDGDDLEVFDKNPWRLVMKVRRTSNRLYRIELQLASPLLVDKEMVAGVPAVHHPNQLCQACLVAKQVRQSFPGMANYRAEAPLELLHMDLCGPITPSTFAGNRYFMLIVDDFSRWMWVFVIKSKDQALAASEKFKPLAENTAGRTIKTLRTDRGSEFLSGEFARVCDAAGIERHLTAPYSPQQNGVVEHRNRTVMAMARSLLKGMSVPGRMWGEAVRHAVFLLNRLPTKAMGNRTSFEAWMGKKPHLGHLWVFGCTAHTKVTAPHLMKLDDRSNPFVYLGVEEGSKAHRLFDPRRRQIIVSRDVVFDENTPWQWSAAAGEVTSTEFEVEEPVGAEQAASVPWYRAPPAGRRAGKEPEVAEQRGTPPASPARFSPTLPSTPTLGSSSTHSAEVQASPRTPGSDDGPVRYRSLVEIMLEAPRVDLVEDDDDAEALLAEMEEPTSYREAAGETAWVNAMNKELEAIEKNRTWSLCMLPAGRKAIGLKWVFKLKKNTAGEVIKHKARLVAKGYVQRQGVDFDEVYAPVARLDTVRAILAVAADRRWQVHHLDVKSAFLNGDLEEEVYVFQPEGRLPLLSSVPRPAQADGGLPARCRCALTPPPDRVGPTRQADRLCRLARAPAGRAVASSSVAATSSTPACPPFRAVTAGGAFPPSSFFFLRAGRLQPPLPPRRSAVRPRRLLPRPRSHLLSLGQPSVSRGKHRRRVLAGKTVALPPLFHLRPPLSRFPCAGRRRHHLPRLRDATLIPGITSSSPEVRRNAAAAPTTHSSSSARRPAAPPPSPTSQQRVPLRPLLRSAAAACHHRFHVTVRPRRSTSRRSPGSSSRGAASVIVIAAACSTPSSSPCSRCRLSSSPPRRSRSSSSSSSSRRSRPVLVFVLGSASSSLVPAVSRLRPRIAAEVVPSPSVSAAPVRRCRSLASSRGGKDLSSRCPVLVLSVSPRIRCAVVDPGTRVPVSVVVHVCGW

SEQ ID NO: 18946 - protein, 1224 aa, Oryza sativa
  Clone ID: TF_OSC401435j.C1.p49.np
MALVPVTADPAMGSSGSAFLYPQLMSTNYTSWVIRVQAMMEDQGIWEAIEPAAGAAVDPRKDKKAKSHLLQSLPEDLLMQVAKKRSAKEVWDCLKTRFVGVDRVRDARLQTLKGEFTSMVMEAGETLDQYAGRITTMGWLNDAAMVKKLFDTVPEKFVSLVAGIEQFYDVDTMPFEEAVGRLKAYEEWMWKKKATAGGVTADGQVLLTQGEWEARFKKGGGETSSPQKNKPSGEGANHGQAERGRGRGRGRGGTQRSGGGSSGGGRDKSHIKCFNCEEFGHYSTQCPHPKKKKAEAHLVQTEDAGPALLLAVTEAVQNAPRQDAHCGLVVHEERVWPRLMLAEKGAAAGDLWYLDNGASNHMSGDRRKFRELDETMTGQVRFGDASSVQIMGMGSILFSCKNGDQWLLDDVYYIPSLCCNMVSLGQLTETGHRVMMDGDDLKVFDKNPWRLVMKVRRTSNRLYRIELQLASQVCLLASLDNPAWLWHARIGHVNFHALKLLVDKEMASGVPTVHHPNQLCQACLVAKQVRQPFPGMANYRAEAPLELLHMDLCGPITPSTFAGNRYFMLIVDDFSNWMWVFVIKLKDQALAVFEKFKPLAKNTVGRTIKTLRTDRGGEFLSGKFARVCDAASIERHLTAPYSPQQNDVVERRNRTVMAMARSLLKGMSVPGRMWGEAVRHAIFLLNWLPTKAMGNRTPFEAWTGKKPHLGHLRVFGCVEEGSKAVEEGSKAHRLFDPRRRQIIVSRDVVFDENTPWQWSAAAGEVTSTEFEVEEPVGAEQPALAEQAGLVPWYRAPPAGRRAGKEPEVAEHDVGPVRYRSLAEIMLEAPRVDLVEDDDDARALLAEMEEPLSYREATGEPAWVNAMNKELEAIEKNKTWSLCMLPAGHKAIGLKWVFKLKKNTAGEVIKHKARLVANGYVQQQGVDFDEVFAPVARLDTVRAILAVAADRRWQVHHLDVKSAFLNGDLEEEVYVSQLEGFVEKGKEHLVYELSKALYGLRQAPRAWNTRLDRSMKELGFSRCAQEQAVYTRGVVSKFMEQLTVMHFKAVKQILRYLKGTINCGLMFSGGNDAVEITGFTDSDLAGDSDDRRSTSGMAFYFNSSLVSWSSQKQKTVALSSCEAEFMAATAAACQALWLRGLLIEMIGAEARPVKLYVDNKSAIALMKNPVFHGRKSGDGGDGDGAGGGGGVAVGVTSTGRRRWGWEGLGGWEDAGGGWLDKVVGG

SEQ ID NO: 18947 - protein, 1331 aa, Oryza sativa
  Clone ID: TF_OSC405457j.C1.p13.fg
MAGECNGGPPPLLPLPPLAAHRVTAPTRLAAAGGRWTARFLVDGDAPELHAMMEDQGVWEAIEPAAGAAVDPRKDKKAKSHLLQSLPEDLLMQVAKKCSAKEVWDCLKTRFVGADRVRDARLQTLKGEFTNMVMEAGETLDQYAGRITTMGVRYSALGATLNDAAMVKKLFDTVPEKFISLVAGIEQFYDVDTMPFEEVVGRLKAYEERMRKKKATTGGVTADRQKNKPSGEGANRGQAGRGRGRGRGRGGTQSSGGGSGGGGGGRDKSHIKCFNCEEFGHYSTQCPHPKKKKVEAHLAQTEDAGPALLLAVTEAVQNAPRQDALCGLVVHEERVWPRLMLAEKGAAAGDLWYLDNGASNHMSGDRRKFRELDKTVTGQVRFGDASSVQIMGKGSILFSCKNGDQWLLDDVYYIPSLRCNMVSLGQLTETGHRVVMDGDDLEVFDKNPWRLVMKVRRSSNRLYRIELQLASPLLVDKEMAAGVPAVHHPNQLCQACLVAKQVRQPFPGMANYRAEAPLELLHMDLCGPITPSTFAGNRYFMFIVDDFSRWMWVFVIKSKDQALAAFEKFKPLAENTAGRTIKTLRTDRGGEFLSGEFARVCDAAGIERHLTAPYSPQQNGVVERRNRMVMAMARSLLKGMSVPGRMWGEAVRHAVFLLNRLPTKAMGNRTPFEAWTGKKPHLGPCGCSGWSVAAGEVTSTEFEVEEPVGAEQPAPAEQAGSVPWYRAPPAGRRAGKEPEVAEQRGTPPASPARFSPTLPSTPTLGSSSTHSAEVQASPRTADSDDGPVWYRSLAEIMIEAPRVDLVEDDDDTEALLAEMEEPTSYREAAGEPAWVNAMNKELEAIEKNKTWSLCMLPAGHKAIGLKWVFKLKKNTAGEVIKHKARLVAKGYFQRQGVDFDEVFAPVARLDMVRAILAVAADRRWQVHHLDVKSAFLNGDLEEEVYVSQPEGFVEKGKEHLVYKLSKALYGLRQAPWAWNTQLDRSMKELGFSRCAQEQAVYTRGTGSAGIIVGVYVDDLIVTGESPSEITAFKQQMMGEFEMSDLGLLTYYLGIEVLQGTDGIAIKQVAYARKILTQFRMLDCNSTSIPIEHRSQLHKDAQGSTVDPTEYRRVIGCLRYLLHTRPDLSYTVGVVSRFMERPTVMHFKAVKQILRYLKGTINCGLMFSGGNGAVEITGFTDCDLAGDSDDRRSTSGMAFYFNGSLVSWSSQKQKTVALSSCEAEFMAATAAACHALWLRGLLIEMIGAEARPVKLYVDNKSAIALMKNPVFHGRSKHIDTRYHFIRECVESGKIQIEFVRTEEQRADALTKGLPAARLATARHLLGVRDFGP

SEQ ID NO: 18948 - protein, 1339 aa, Oryza sativa
  Clone ID: TF_OSC8960j.C1.p8.fg
MALVPATADPARGSSGSAFLYPQLTSTNYTSWVAKKRSAKEVWDCLKTRFIGADRVRDARLQTLKEEFTNMVMEAGETLDQYAGRITTMGVRYSALGATLNDAAMVKRLFDTVPEKFISLVAGIEQFYDVDTMPFEEAVGRLKAYEERMRKKKATTGGVTADGQVLLTQAEWEARFKKGGGETSSPQKNKPSGEGANRGQAGRGRGRGRGRGGTQSSGGGSGGGSGGRDKSHIKCFNCEEFGHYSTQCPHPKKKKAEAHLAQTEDAGPTLLLAVTEAVQNASRQDALCGLVVHEERVWPRLMLAEKGAAAGDLWYLDNGASNHMSGDHRKFRELDETVTGQVRFGDASSVQIMGKGSILFSCKNGDQWLLDDVYYIPSLYCNMVSLGQLTETGHRVVMDGDDLEVFDKNPWRLVMKVRRSSNRLYRIELQLASPVCLLASLDDPAWLWHARLGHVNFHALKLLVDKEMAAGVPAVHHPNQLCQACLVAKQVRQPFPGMANYLAEAPLELLHMDLCGPITPSTFTGNRYFMLIVDDFSHWMWVFVIKSKDQALAAFEKFKPLAENTAGRTIKTLRTDRGGEFLSGEFARVCDAAGIERHLTVPYSPQQNGVVERRNRTVMAMARSLLKGMSVPGRMWGEAVRHAVFLLNRLPTKAMGNRTPFEAWTGKKPHLGHLRVFGCTAHAKVTAPHLKKLDDRSNPVVYLGVEEGSKAHRLFDPRRRQIIVSRDVVFDENTPWQWSAAAGEVTSTEFEVEEPVGAEQPAPAEQAGSVPWYRAPPAGRRAGKEPEVAEQRGTPPASPARFSPTLPSTPTLGSSSTHSAEVQASPRTAGSDDEPVRYRSLAEIMIEAPRVDLVEDDDDTEALLVEMEEPTSYREAAGEPAWVNAMNKELEAIEKNKTWSLCMLPASHKAIGLKWVFKLKKNTAGEVIKHKARLVAKGYVQRQGVDFDEVFAPVARLDTVRAILPVAVDRRWQVHHLDVKSAFLNGDLEEEVYVSQPEGFVEKGKEHLVYKLSKALYGLRQAPRAWNTRLDRSMKELGFSRCAQEQAVYTRGTGSTGIIVGVYVDDLIVTGESPSDITAFKQQMMGEFEMSDLGLLTYYLGIELHKDAQGSTVDPTEYRRVIGCLRYLLHTRPDLSYAVGVASRFMERPTVMHFKAVKQILRYLKGTINCGLMFSGGNGAVEITGFTDSDLAGDSDDRRSTSGMAFYFNGSLVSWSSQKQKTVALSSCEAEFMAATAAACHALWLRGLLIEMIGAEARPVKLYVDNKSAIALMKNPVFHGRSKHIDTRYHFIRECVESGKIQIEFVRIEEQRADALTKGLPAARLATARHLLGVRDFGL

SEQ ID NO: 18949 - protein, 1349 aa, Oryza sativa
  Clone ID: TF_OSC900206j.C1.p25.fg
MAGECNGGPPPLLPLPPLAAHRVTAPTRLAAAGGRWTARFLVDGDAPELHAMMEDQGVWEAIEPAAGAAVDPRKDKKAKSHLLQSLPEDLLMQVAKKCSAKEVWDCLKTRFVGADRVRDARLQTLKGEFTNMVMEAGETLDQYAGRITTMGVRYSALGATLNDAAMVKKLFDTVPEKFISLVAGIEQFYDVDTMPFEEVVGRLKAYEERMRKKKATTGGVTADRQKNKPSGEGANRGQAGRGRGRGRGRGGTQSSGGGSGGGGGGRDKSHIKCFNCEEFGHYSTQCPHPKKKKVEAHLAQTEDAGPALLLAVTEAVQNAPRQDALCGLVVHEERVWPRLMLAEKGAAAGDLWYLDNGASNHMSGDRRKFRELDKTVTGQVRFGDASSVQIMGKGSILFSCKNGDQWLLDDVYYIPSLRCNMVSLGQLTETGHRVVMDGDDLEVFDKNPWRLVMKVRRSSNRLYRIELQLASPLLVDKEMAAGVPAVHHPNQLCQACLVAKQVRQPFPGMANYRAEAPLELLHMDLCGPITPSTFAGNRYFMFIVDDFSRWMWVFVIKSKDQALAAFEKFKPLAENTAGRTIKTLRTDRGGEFLSGEFARVCDAAGIERHLTAPYSPQQNGVVERRNRMVMAMARSLLKGMSVPGRMWGEAVRHAVFLLNRLPTKAMGNRTPFEAWTGKKPHLGPCGCSGVRRTRSRDVVFDENTPWQWSVAAGEVTSTEFEVEEPVGAEQPAPAEQAGSVPWYRAPPAGRRAGKEPEVAEQRGTPPASPARFSPTLPSTPTLGSSSTHSAEVQASPRTADSDDGPVWYRSLAEIMIEAPRVDLVEDDDDTEALLAEMEEPTSYREAAGEPAWVNAMNKELEAIEKNKTWSLCMLPAGHKAIGLKWVFKLKKNTAGEVIKHKARLVAKGYFQRQGVDFDEVFAPVARLDMVRAILAVAADRRWQVHHLDVKSAFLNGDLEEEVYVSQPEGFVEKGKEHLVYKLSKALYGLRQAPWAWNTQLDRSMKELGFSRCAQEQAVYTRGTGSAGIIVGVYVDDLIVTGESPSEITAFKQQMMGEFEMSDLGLLTYYLGIEVLQGTDGIAIKQVAYARKILTQFRMLDCNSTSIPIEHRSQLHKDAQGSTVDPTEYRRVIGCLRYLLHTRPDLSYTVGVVSRFMERPTVMHFKAVKQILRYLKGTINCGLMFSGGNGAVEITGFTDCDLAGDSDDRRSTSGMAFYFNGSLVSWSSQKQKTVALSSCEAEFMAATAAACHALWLRGLLIEMIGAEARPVKLYVDNKSAIALMKNPVFHGRSKHIDTRYHFIRECVESGKIQIEFVRTEEQRADALTKGLPAARLATARHLLGVRDFGP

SEQ ID NO: 18950 - protein, 1785 aa, Oryza sativa
  unsure (1)..(1785): unsure at all Xaa locations
  Clone ID: TF_OSC900365j.C1.p11.np
RKEGIDEEASTSKEEVEETKAVDLESTFRERTFISCVFNFVXSESKVKIPTFSESPILQEKTLKSSKASKATPGLEWYIPGLEIELYSRDGCSEWLGLCNTMPRFKPEYLFGTEGFVLELRTMSFLIGFGTAPLYAQIPHDRDEEKCRVKVTLNSNREDIPSVMFEAGGGNCIHACQEVARITIGELRERYNDQLADTEYRYHPCQPQGSGRGSYLELAGIENDATTRHLVEMLWAMDETRAEIVLAAQDHEDRNRGKICKLEDKVDRLEKELAALKGEAPPQKARVRLTARKRALFVPRYQLAPKMVLTRSNGNGPNNNNNNNNNNNGENPTLAQVLAQQAQLMNMMMHQLQNQQNQGNNHAPPQNKLAXFLRVRPPTFSSTTNPVEAGDWLHAIEKKLDLLQCTDQEKVSFASHQLHGPASEWWDHFRLNRTTAEPITWLEFTAAFRKTHIPSGVVSLKKKEFRALTQGSRSVTEYLHEFNRLARYAPKDVCTDDGRQEKFLEGLNDEFSYPLMTGDYHDFQKLVDKAIRQEDKYNHMEQKKRRIAHFKALQGNSQRPRLAMGPQAVLQGGSSSVVRPQRQFFNNNAGNNNRNQAPRPVATPVQHQPAKREQGSKPGVCFNCGEQGHYSDKCPKPRRVKVVPAXSNSTAPATKARVNHVAAVEAQGALDVILGTFPVNSIPATVLFDSGATHSFLSMSFAGNHGMQVEDLRRPLMVSTPSKQALTSQRSPSVRIEIQGVPFLANLILLESKDLDVILGMDWLARYKGVIDCANRKVTLTSNDGQVVTVHALPSEPLWSSLNQITLEEIPIVREYPDVFLDDLPGMPPKRDIEFRIDLVPGTPIHKRPYRMAANELAEDKRQVDDLLQKGYIRPSSSPWRAPVIFVEKKDHTQRMCVDYRALNDVTIKNKYPLPRIDDLFDQLKGATVFSKIDLRSGYHQLRIKEEHIPKTVFTTRYGLFECTVMSFGLTNALAFFMNLMNKVFIEYLDKFVVVFINDILIYSRTKEEHEEYLRHALEKLREHQLYAKFSKCEFWLSEIKFLGHIISAGGVAVDPSNVESVTNWKQPKTVSEIRSFMGLAGYYWRFIENFSKIAKPMTRLLQKNVKYKRSEECEQSFQELKSRLISAPILILPDPKKGFQVYCDASKLGLGCVLMQDGKVVAYAGCLCSRQLRPHEKNYPTLDLELAAVVHALKIWRHYLFGTRTEVYTDHKSLKYIFTQPDLNMRQRRWLELIKDYDMGIHYHPGKANVVADALSRKGYCNATEGRQLPLELCKEFERLNLGIVSRGFVAALEATPTLIDQVREAQVNDPDIQEIKKNIRRGKAISFLEDEQGTVWLGERIYVPENKELKDVILKEAHDTLYSIHPGSTKMYQDLKEKFWWASMKHEIAEYVAVCDVCQRVKAEHQKPTGLLQPLKLPEWKWEEIGMDFITGLPRTSSGHDSILVIVDRLTKVAHFIPVWTTYSGSRLAELYMARIVCLHGVPKKIVSDRGNQFTSKFWKKLQEEMGSKLNFSTAYHPQTDGQTERVNQILEDMLRAYALDFGGSWDKNLPYAEFSYNNSYQASLQMAPYEALYGRKCRTPLFWDQTGERQVFRTDILREVEEKVKIIQKRLRIAQSRHKSYADNRRRDLSFEEGDHVYLRVTPLRGVHRFHTKGKLAPCFAGPYMIVSRRGEVAYQLELPQSLAGVYNVFHVSQLKKCLRVPTEEANLEQIEIQKDLTYVEKPIRILETDEIRTKNRVIRFCKVQWSNHTEEEATWEREDELKSAHPHLFDSSSESRGRDSV

SEQ ID NO: 18951 - protein, 932 aa, Oryza sativa
  Clone ID: TF_OSC400321j.C1.p28.fg
MDHGAYEPIMLSIGPYHHGLSYLLAFEKEKWNCLDLFLKLNREIKLEDYLNLVKDLEEEARACYEDIDMQHDKFLQMLLLDSCLFVHHFRGLEGILPSTLGANICSADSSDIIMERTIHKSTTSQGNFGEQCSRDNSICTQRELVLAGSSREVTSQGTDFDHTEELESSQCNNWQIGTWFDSCIEQDLMLLENQIPFFIVRRIYELFAGNERPISFLTDKVAQSLENFIQYHPRAIQEAHRPKDFHHMLHLFQMYLKPSKKLVEGSQYLERGRYFHSFANICYRYLKIGRKLADSNHDMSPDPLLNCFQDHHPRIRGRRAVQYHQAGVQFKKKSFDRNNPHSLLDISFDNGTLMVPYLFVDQSTVSHFRNLIAFEQTCPQFGNDVTAYSAFMSFLLCRADDIAFLGRKGIIVHHLCSDGEVSAIFAKLGKNVDFDLNGRHFLKHVCHAMEEHYQSRINSECNSIVTHWRKMINLLNFPTSVVKASLINAPPHGIAHGQGRISKDDVMSIVPQNPNADEGPEAWSGSILCCEEEMDPTMQGEGVVGSQEKEVVIASSSLVIKDEMKDLLEDLVKLGMIGTRGGGSAELKLELMPNELRLEGSKNCLSWSRRAQLMLRAKGVDHFLQEDYKEPADKESSAWRMWNTTNSTVVSWLRNSVAPSIARMLETIQNAAVVWKTLSSMYSEEGSVMMMVEAQNKGLNNEFEDRRAAMFHQATLPTMEEAISAMVQEEMRLKLMRGTNPMGSAYIVADDRECYNCGQVGHVSCNCPTPRNSGGRGSMRGWYGGFGGNHGGFGGSHGGRGGDRGGRIGDHGRGRGAPQANAAMEDGKAISLTVNLLSVSSAIDQFKCIVAFDENSCLFQEKGTGRRIGTRGSSVPILGTPDSDSDSGSGLASGLAPAVGDIDATPDIAVASGIFGTDVASVVTTLPLFEFD

SEQ ID NO: 18952 - protein, 1325 aa, Oryza sativa
  unsure (1)..(1325): unsure at all Xaa locations
  Clone ID: TF_OSC400685j.C1.p16.np
MLGAKKLLNCIQDPTIATSAGGVNNLPTSAEKNQALHFLMHHLNTTLKNEYMTEEDPKVLWDSLKDRYGHQVKALLPKAKREWLHLCFQDYKSVEXYNSVLHRIVTCLKLCGEKITDADMIDKTLSTFHANHVNIQRQYRQAKYEKYSELISVLMEAQGEDETLVENHTSRPTGSSAAPEANASSFKKGKNQNNQNKGKNFWKNNGKVNKMSFKKKGNQNSKSKKGSTSGEYGKQYQVCFKCGTRGHWSRICRTPKHLIELYQEKHGKKKSEHESHFTVEIQHSEEKMAAMHIDKQTSQIATIAGSNAHIVGVGRASVVLPHSTKIIINYALLYPESSRTLLSFKDIRANGYHVETKDENKLEFLLITKLDGNRKTIVEKLPSLKSGLYYTHIKPENVALKTIFKNPESYRIWHDRLGHPGLGMMRRIISTSNGYNLRPNDFPNQEDFVCTDCATWKLIVRPSNLKVNAESPVFLQQIQGDICGPINPMSGSFRFPGNRIQSIRMDNAGEFTSKVFNEYCMALGIKVEHSVPHVHTQNGLAESLIKRIKLIARPLLLHSNLPTTCWGHTVLHAAALLQIRPTAYNVVSPMXLTRGYAPNISHLRKFGCAVYVPIPPPKRTSMGPHRKLGIYVRFESPSIIKFLEPLTGDLHMGRYADCIFNEDHFPALGGGKYLQKVECREIEWETKNLLHLDPRTKESDQEVXTIIDSQRITNNLPEAFTNLKGIMKSHIPAVNAPERVEIPPDAEELVFKLISTSTPTSRKKGRPPVAHNQTKVSRRRPTKQQIGQNTTAPENSEGAHQVDEPPAVTCPDGNEPSENARAITTSTRRPEIPDLNIAGNNEDQECERIEEISTSYVDTGETYNRETTIVDIYFAEKIAKIIDLDPEPKSMAECKKRSDWVKWKEAIKAELISLNKRKLFGPIDRTPVGISSVGYKWVFVRKRDENNQVVRYKARLVAXGFTQRPGIDFDETNSPVMDGITFRFLISMAVNLNLEIQLMDVVTAYLYGSLDFEIYMKVPDGIQVPEEKHNIYSVKLQRSLYGLKQSGRMWYNRLSEFLEGKGFIKNDDSCKTKYCLGLQLEHTHEGVLLHQSAYIQKIMEKFNMKDLYPTRTPMVVRSLAVESDPFRPXENNEELLGPECPYLSAIGALMYLANGTRPDIAFAVNLLARFSLAPTKRHLNGVKQIFRYLRGTQDLGLFFRKNQDLTMVGYADAGYLSDPHKALSQTGYVFLCGGTAISWKSTKQTMVATSTNHLEIIALFEASKECMWLRRVIQHVQNTCGLNITPTPTIIFEDNSACVAQIQTGYVKTSLTKHISPKFFYMHEL

SEQ ID NO: 18953 - protein, 1335 aa, Oryza sativa
  unsure (1)..(1335): unsure at all Xaa locations
  Clone ID: TF_OSC401807j.C1.p5.np
MLGAKKLLNCIQDPTIATSAGGVNNLPTSAEKNQALHFLRHHLNTTLKNEYMTEEDPKVLWDSLKDRYGHQVKALLPKAKREWLHLRFQDYKYMEQYNSVLHRIVTFLKLCGEKITDADMIDKTLSTFHANHVNIQRQYRQAKYEKYSELVSVLMEVQGEDETLVENHTSRPNESSATPEANASSFKKGENQNNQNKGKNFWKNGGKVNKMSFKKKGNSKSKKGSTSGEYGKQDQVCFKCGTRGHWSRICRTPKHLIELYQEKHGKKKSEHESHFTVEIQHSEEKMAAMHIDKHTGQIATIAGSNAHIVGVGRATVVLPHGTKIIINNALLYPESSRTLLSFKDIRANGYHVETKDENKLEFLLITKLDGNRKTVVEKLPSLKSGLYYTHIKPENVALKTIFKNPESYRIWHDRLGHPGLGMMRRIISTSNGHNLRTNDFPNQEDFVCTDCATGKLIVRPSNLKVNAESPVFLQRIQGDICGPINPMSGSFRFPDNRIQSIRMDNAGEFTSKVFNEYCMALGIKVEHSVPHVHTQNGLAESLIKRIKLIARPLLLHSNLPTTCWGHAVLHAAALLQIRPTAYNAVSPMQLTRGYAPNISHLRKFGCAVYAPIPPPKRTSMGPHRKLGIYVGFESPSIIKFLEPLTGDLHMGRYADCIFKEDHFPALGGGKYLQKVECREIEWETKNLLHLDPRTKESDQEVQTIIDLQRIENNLPEAFTNPKGIMKSHIPVVNAPERVEIPHDAEEPVFKLISTSTPTSRKRGRPPVAHNQTKVSRRRPMKQQIGXNTTAPENSEGAHQVDEPPAVICPDGNEPSENARAITTSTGRPEIPDLNIAGNNEDQECERIEEISTSYVDTGETYNRETTIVDIYFAEKIAKIIDLDPEPKSMAECKKRSDWVKWKEAIKAELISLNKRKVFGPVDRTPVGISPVGYKWVFVRKRDENNQVVRYKARLVAQGFTQRPGIDFDETYSPLMDGITFRFLISMAVNLNLEMQLMDVVTAYLYGSLDSEIYMKVPDGIQVPEETKCNIYSVKLQTSLYGLKQSGRMWYNRLSEFLEGKGFIKNDDSCKTKYCLGLQLEHTHEGVLLHQSAYIQKILEKFNMKDSYPTRTPMVVRSLAVESDPFRPQENNDELLGPECPYLSAIGALMYLANGTRPDIAFAVNLLARFSSVPTKRHWNGIKQIFRYLRGTQDIDLTMAGYANAGYLSDPHKALLTMAGYANAGYLSDPHKALSQTGYVFLCGGTAISWKSTKQTMVATSTNHSEIIALFEASKECMWLRRVIQHVLNRCGLNITPTPTIIYEDNSACVAQIQTGYVKTSLTKHISPKFFYMHEL

SEQ ID NO: 18954 - protein, 364 aa, Oryza sativa
  Clone ID: TF_OSC422281j.C1.p1.fg
MTDIAKRDFAELAVSGKNYLTWALDAKIMLGAKKLLNCIQDPTIATSAGGVNNLPTSAEKNQALHFLRHHLNTTLKNEYMTEEDPKVLWDSLKDRYGHQVKALLLKTKREWLHLRFQDYKSVEQYNSVLHRNVTCLKLCGEKITDADMIDKTLSTFHANHVNIQRQYRQAKYEKYSELVSMLIEAQGEDETLVENHTSRPTGSSAAPEANASSFKKGKNQNNQNKGKNFWKNGGKVNKTSFKKKGNQNSKSKKGSTSGEYGKQDQVCFKCGTRGHWSRICRTPKHLIELYQEKHRKKKSEHESHFTVEIQHSEEKMAAMHIDKQVDEKAVVAMHIDDKMEKNAADAELKLSDDLMDSDQLYGDI

SEQ ID NO: 18955 - protein, 1329 aa, Oryza sativa
  unsure (1)..(1329): unsure at all Xaa locations
  Clone ID: TF_OSC422283j.C1.p4.np
MLGAKKLLNCIQDPTIATSAGGVNNLPTSAEKNQALHFLRHHLNTTLKNEYMTEEDPKVLWDSLKDRYGHQVKALLLKTKREWLHLRFQDYKSVEQYNSVLHRNVTCLKLCGEKITDADMIDKTLSTFHANHVNIQRQYRQAKYEKYSELVSMLIEAQGEDETLVENHTSRPTGSSAAPEANASSFKKGKNQNNQNKGKNFWKNGGKVNKTSFKKKGNQNSKSKKGSTSGEYGKQDQVCFKCGTRGHWSRICRTPKHLIELYQEKHRKKKSEHESHFTVEIQHSEEKMAAMHIDKQTGQIATIAGSNAPIVGVGRATVVLPHGTKIIINDALLYLKSSRTLLIFKDIRAYGYHVETKDENKLEFLLITKLDGNHKTVVEKLPSLKSGLYYTHIKPENVALKTIFKNPESYRIGLGMMRRIILTSNGHNLLTNDFPNQEDFVCTDCATGKLIVRPSNLKVATGKLIVRPSNLKVDAESPVFLQRIQGDICGPINPMSGSFRFLDNRIQSIRMDNAGEFTSKVFNAYCMALGIKVEHSVPHVHTHNGLAESLIKRIKLIARPLLLHSNLPTTCWGHAVLHAAALLQIRPTAYNVVSPMQLTRGYAPNISHLHNFGCVVYVPIPPPKRTSMGPHRKLVIYVGFESPSIIKFLEPLTGDVHTGRYADCIFNEDHFPALGGGKYLQKVECREIEWETKNLLHLDPRTKESDHEVQSIIDLQRIANNLLEAFTNPKGIMKSHIPAVNAPERIEIPHDAEEPVFKLISTSTLTSRKRGRPPVAHNQTKVSRRRPTKQQIGQNTTAPENSEGAHQEDEPPAVICPDGNEPSENARAITTSTGRPEIPDLNIAGNNEDQECERIEEISTNYVDTGETYNKETTIVDIYFAEKIAKIIDLDPEPKSMAECKKRXDWVKWKEAIKAELISLNKRKVFGPVDRTPVGISPVGYKWVFVRKQDENNQVVRYKARLVAQGFTHRPGIDFDETYSPVMDGITFRFLISMAVNLNLEVQLMDVVTAYLYGSLDSEIYMKVSDGIQVPEETKRNIYSVKLQRSLYGLKQSGRMWYNRLSEFLKGFIKNDDSCKAKYCLGLQLEHTPEGVLLHQSAYIQKILEKFNMKDSYPTRTPMVVRSLAVESDPFRPQENNEELLGHECPYLSAIGALMYLANGTRPDIAFVVNLLARFSSAPTKRHWNDIKQILRYLRGTQDLGLFFRKNQDLTMAGYADSGYLSDPHKALSQTGYVFLCGGTTISWKSTKQTMVATSTNHSEIIGLFEVSKECMWLRRVIQHVQNTCGLNITPTPAIIYEDNSACVAQIQMGYVKTSLTKHISPKFYMHEL

SEQ ID NO: 18956 - protein, 1452 aa, Oryza sativa
  Clone ID: TF_OSC400761j.C1.p70.fg
MSDLGGKNGENGNEYGASSKGTPSPKGATIPFDYSKLTIPPHNFVSVPFGRAPQFDGTHYAAWKHKMKLHLISLHPSIWKVVCTGVDVPHDDMELTSEQEQLIHRNAQASNAILSALSPEEFNKVDGLEEAKEIWDTLQLAHEGSPAVPEAKIELLEGRLGRFVMDDKLLRAFGPRNPTLVSMIQERKDFKRLTPSDILRRIVSHEMQEEEAREVRQMVKNAAMIKNQEVVLKAKQEEESSCEESEDEEMAFIVKIFKHFLRKSGYGKGRKDDDKGKRQSKRACFNCGEYGHFIADFPKSNEAKAKGGNKKPEHAHVAEVWYSGDEEDPEVKPKPKPKDKVEGEDGVAIVAFKSSSSSKERLFNNLSDDDDDSYHYSCFMAQGRKVMTQKPSHTSLNVDSSDEETSLRVVNETLQEKFANLDKSHKDLEVQFDTLWNSTSQPNVVSNSSNPSTSNGCARCYNIDLNSYATNVDAMQALKKENEKLGTLVKYGCMKTYHSKDALYKTITAHPNKDGHGLKFSGGSPVSKRVMINGKECLMFVREGKAPQASEVTCPFTGQTPRSSGQNDQKFLSCKTGSSGHFVRKFRASDRPKGVTGSSGYNARKFRPEGLYYDSYAYSSGGSSWVVDSSCTNHMTRERRMFTSLDEEGGSRKNIVFGDDGKGKVMGLGKIAISKNQSLSNVLLVNSLSYNLLSVSQLCKLGFNCLFTDVDVTVFRRDDSSIAFKGVLKGDLYLVNFDMDRVNPEACLIAKSSMGWLWHRRLAHVGMRNLASLLKGEHILGLSNVSFEKDRVCSACQAGKQVGSPHAIKNIMTTTRPLELLHMDLFGPMAYISIGGNKYGFVIVDDFSRFTWVYFLHDKSEAQDVFKRFAKQAQNLYDLTIKKNTQVEEFLDEEGIKHEFSAPYDPPQNGIVERKNQTLIEAARAMLDEYKTSDVFWAEAVSTACHTINRLYLHKILKKTSYELLSGKKPNVSYFRVFGSKCFILSKKPRSSKFSPKVDEGFLLGYESNAHAYRVFNKTSGIVEVTRDVTFDESNGSQGEQVVVHVVGDVDPSQAIGTKAIGDIRPIETQDDQEDRDQPPSSTSNSPTSVVSAEPEVPSPIDRNLRTSPGPEVPDFTVRNLRTCGSEDVPTAQVPSVHHPRIHHTVQRDHSVDNILGDIRKGVTTRSCVAGFCQHFSFVSSLEPIRVEDTLGDPDWVMAMQEELNNFTRNQIWTLVERPKQNVIGTKLFQMDIKSAFLNGPISELVYVEQPPGFEDPKLPNHVYKLHKALYGLKQAPRAWYECLRNFLLKNGFEIGKADTTLFTKKFKSDLFICQIYVDDIIFGSTNASFCEEFSSIMTKRFEMSMIGELTFFLGLQVKQAQEDTFISQTKYVKDILKKFGMEDAKLIKTPMPTNGHLDLDDNGKYVDQKGCDFEVLGYSDSDYAGCKVDRKSTTGTCQFLGPSLVNWSSKK

SEQ ID NO: 18957 - protein, 1933 aa, Oryza sativa
  Clone ID: TF_OSC401324j.C1.p2.fg
MKLHLISLHPSIWKVVCTGVDVPHDDMELTSEQEQLIHRNAQASNAILSTLSLEEFNKVDGLEEAKEICDTLQLAHEGSPAVREAKIELLEGRLGRFVMDDKETPQEMYDRMMILVNKIKGLGSEDMTNHFVVKRLLREFGPRNPTLVSMIREKKDFKRLTLSDILGRIVSHEMQEEEARKTRRRVKRFKHFLRKSGYGKGRKDDDKGKKQSKRACFNCGEYGHFIADFPKSNEAKAKGGKKKPERAHVAEAHMPEVWYSGDEEDPEVKPKPKPKDKVDGEGGVATVTFKSSSSSKERLFNNLSDDDDDSYHYSCFMAQGRKVMTQKPSHTSLDVDSSDEESDNELDDVLKSFSKPAMQHLAKLMRALDSKEQSLERQEELLILEVGLLASPILLLAMVVLALKKENERLGTLVKYGCMKTYHSKDALYKTITAHPNKDGHGLGFSSESPVSKRVMVNGKECLMFVREESKVVAYFNGNYNDEYHTCVWVPKALAYSYDGSSWVVDSGCTNHMTGERSMFTSLDEKGGSRENIVFGDDGKEKLQFIIRVSIVRDDSSIAFKGVLKGDLYLVDFDVDRVNPEACLIAKSSMGWLWHRRLAHVGMRNLASLLKGEHILGLSNVSFEMDRVCSACQAGKQVGSPHPIKNIMTTTRPLELLHMDLFGPVAYISIGGNKYGFVIVDDFSCFTWVYFLHDKSEAQDVFKRFTKQAQNLYDLTIKRVRSDNGGEFKNTQVEEFLDEEGIKHEFSAPYDPPQNGIVERKNRTLIEAARAMLDEYKTSDVFWAEAVSTACHAINRLYLHKILKKTSYELLSGKKPNVSYFRVFGSKFFILSKMPRSSKFSPKVDEGFLLGYESNAHAYRVFNKTSGEQVVIHVVRDVDPSQAIGTKAIGDIRPVETQDDQEDRDQPPSSTSNSPTSVVSAEPEVPGPIDRNLRTSPGPEVPGSTVRNLRTSGSEDVPTAQVDGIDAAGTLGHTDQAQVPLVHHPRIHHTVQRDHPVDNILGDIRKGVTTRSRVASFCQHYSFVSSLEPTRVEDALGDSDWVMAMQEELNNFARNQVWNLVERPKQNVIGTKWIFRNKQDEHVVVVRNKARLVTQGFTQVEGLDFGETFAPVARLESIRILLAYAAHHDFRLFQMDVKSAFLNGPISELVYVEQPPGFEDPKLPNHVYKLHKALYGLKQAPRAWYECLRDFLLKNGFEIGNADTTLFTKKFKSDLFICQIYVDDIIFGSTNASFCEEFSSIMTKRFEMSMMGELTFFLWLQVKQAQEGTFISQTKYVKDILKKFGMEDAKPIKTPMPTNGHLDLDDNGKCVDQKVYRSMIGSLLYLCASRPDIMLSVCMCARFQAEPKECHLIAVKRIQRYLVHTPNLGLWYPKGCDFELLGYSDSDYAGCKVDRKSITGTCQFLGPSLVSWFPKKQNSIVLSTTEAEYVAAGSCCAQLLWMKQTLKDFGYNFTKTPLLCDNESAIKIANNPVQHSKTKHIDIHHHFLRDHETKGDICLTHFCRAEVPVSVQPASNLDSSTVSFNHCTPTLLILVAVVSMPREKRQKLSQDVPADSSPPVHGPRGRLGKEKVGDFFSGSHIPIHSKRAGSIVIRDAPRSPSPVASESDDGGNEDEPGSDSNPLRLYKTRAVDPDPRRPRVNYLKNLLKCGKDRMDDRFRTLVQVDWYNSVIMGRSYPVYSWNEEVIGQFYSTAFFGTTKKGLDFVKWTIQGQQYRVSMAQFAAALGLDDDDLSRPHIFVEDALSSTSTTFLYEKDAPKDCLGTTRGLRPYYRMLYYKVKSYYGISRNLLIKFKDDQIDETSILAQVLSSESAISSLLDMSIRSLPGDHGLPLQQVLPDVPPAMADAVNRGGELLTNLATGTPWEAVAKEVGTGGAQYCTVLSANLQFSFTRNVHLVATEDGYFIRLLQQQQQQQLILSHMGSTYPDIKYCMCV

SEQ ID NO: 18958 - protein, 800 aa, Oryza sativa
  Clone ID: TF_OSC410643j.C1.p22.fg
MAESKATSTAALGRACLPERRPPSPATPKRGGNRDVSIGGKWCWNTHGLAQGPDTIHAGWSGGARGIRHGWSMRDLLPSPIKEVFLSASWVWVPKGGSLSPHLGFPATRREVVRFGATTRRIWRAPARLTDGRSFLEVAKGSMDRKPQFQRPDQWVPNKRRAFEEEGGGGNWGNRNLQEREERELRNRLMGQQQQREEGRWQQVERRGANKQWQGDRNREGGAWEGGDRRPTRGKEKLGEEGRSGPSQKEEIKCFNCGESGYHQVNCQKPPLCYVCKNPGHISSHCPVHVGGSSSNLSKLEVKLKGYGIPEQGFFSLNVDNLGVAEKGAQFRGILTVEKGAGSVQKVANEMSHLFREKNWDWNVKQISSNNFLIDFPSEDARRQVTKSGGFAKKQEIIRAISDIVGEFKEVDEKSLKGEGAVRIKVGCLDPSAINYSVIIYINDIGYKIKWEAEVDTEGTGSIDWGGTMMMMMLMIWMMITLQEERKVGVRMPKGVQRKRNLLRMQIAKEGLSVENEVGVTAKGEDPIESITVEKKADKAVVLWKSEEFSQPELFEQVSQEEDKSGDLLKRMDVDLKLGGVRLFTDEEGEKCAIPADSDIELMRAEEDDDSEQLDLESEAEIQLKEVNFQKVRHKKKQVSLVKRQSSRVKDKEVSVHLKAELRKSKMNMTSGMSSKNSYAIFHSVSQDYLINIARARGISLGDNSVEVRCNLDAICARELAQATIFDADKSLQQMAEKASLEEEGGQEVPPNGNSVILGFSVVEMENDQFVEGLKEENRDELDDADKESSDNLGDFDLHD

SEQ ID NO: 18959 - protein, 1433 aa, Oryza sativa
  Clone ID: TF_OSC400225j.C1.p6.fg
MALVPAGAGADPARESSGSAFSYPQLTATNYTSWCIRVQAMMEDQGVWDAIEPAAGVAVDPRRDKKARSHLLQSLPEDLLMQVAKKRSAKEVWDCLKTRFVGADRVREARLQTLKGEFGAMVMEPGETLDQYAGRITAMSVRHSALGSTLGDSAMVKKLFDTVPEKFVSLVAGIEQFYDIDTMPFEEAVGRPKAYEERMRKKKAAAGGVTTDGQVLLTQAEWEAHFKKNGGESSPPQKNKPSGEGAGRGQGGRGRGRGRGAGGRGGTPRGDSGAGSGGGGRDKSHIKCFNCEEYGHYSNQCPHPKKKKGEAHLAQTEDAGPALLLAMTEDVPERASCGLVVREQRVWPKLLLVDAGGHAGDVWFLDNGASNHMTGDRSKFRELDESITGRVKFGDASTVQIKGKGSILFSCKNGDQWLLQDVYYIPSLQCNMVSLGQLTETGHRVVMDEDVLEVFDKSPWRLVMKVRRTVNRLYRIELKLAHPVSLLSSLDDPAWLWHARLGHVNFQAMKLLVDKEMAGGVPAIVHPNQLCQSCLVAKQARAPFPAAAHFRAEEPLELLHIDLCGPITPSTMSGNRYFFLIVDDYSRWMWVFVLKTKDQSLDAFVKFKPLAENTAGRRVKTLRSDRGGEFLSGEFAQVCEEAGIQRHLTAPYSPQQNGAVERRNRTVMAMARSLLKGMRVPGRFWGEAVRHAVHLLNRLPTKAMGDRTPFEAWTGRKPQLGHLKVFGCTAHAKNTQPHLKKLDDRSAPYVYLGVEEGSKAHRLFDPRRGRIHVSRDVVFEENVPWEWTSVAGQEPTDFTMEEEPGEQLPSPATAAGVVPSYQAPSPGRRAGKEAVVAAEEVPSPASPVAASPTLPGTPTPGSPSTNSAGVVPSPGTDDNIDTDDGPRRYRSLADVLREAPRVDLVEDECDGEALLAESEEPSSYREAAGQPAWEEAMQREMEAIEKNKTWELAMLPAGHRAIGLKWVYKLKKNTTGEIIKHKARLVAKGYVQKQGVDFEEVFAPVARLDTVRVVLAVAADRRWQVHHLDVKSAFLNGELEEEVYVAQPEGFARSGKEHLVLKLHKALYGLRQALRAWNIRLDRSLRELGFDRCTQEQAVYTRGRGSDGIIVGVYVDDLIVTGENPSELKVFKEQMMGEFEMSDLGLLTYYLGIEVDQDESATTLKQTAYAKKLLSQFGMMECNSVSIPIDPRSQLSKDPEGHPVDATEYRRIIGSLRYLLHTRPDLSYVVGVASRFMERPTVMHFKAVKQILRYIKGTMDYGLVYAAGTRALKITGYTDSDLAGDLDDRRSTGGMAFYINQSLVAWSSQKQKTVALSSCEAEFMAATTAACQALWLRVLLAEVAGVEEKAVKLFVDNRSAIALMKNPVFHGRSKHIDTRYHFIRECVDGGQIVVEFVRTEEQRADALTKGLPAAKLATARHLLGVRSLGPRQN

SEQ ID NO: 18960 - protein, 1394 aa, Oryza sativa
  Clone ID: TF_OSC400510j.C1.p22.fg
MALVLATSDPARGSSGSAFLYPQLTATNYTSWVIRVQAMMEDQGVWEAIEPAAGAAVDPRKDKKAKSHLLQSLPEDLLMQVAKKRSAKETLKGKFGAMVMEPGETLDQYAGRITAMSVRHSVLGSTLTDAAMVKKLFDTVPEKFVSLVAGIEQFYNVDDMPFEEAVGRLKAYEERVRKKKAAAGGVTADGQVLLTQAEWEARFKKDGGESSSPQKGKASGEGAKGGQSGRERGRGRGAGGRGGAARGNSASGSGGGGRDKSHIKCFNCEEYGHYSNQCPHPKKKKGEAHLAQTEDAGAVLLLAVTENAPARATQEMVVHEDRVWPKLLLADSGAMAGNVWYLDNGASNHMTGDRKKFRELDESITGSVRFGDASSVQIKGKGSILFSCKNGDQWLLQDVYYIPSLCCNMVSLGQLTETGHRVVMDEDVLEVFDKCPWRLVMKLCQACLVAKQIRASFLVVVNYRAEEPLELIHIDLCGPISPATMAGNKYFVLIVDDFTRWMWVFVIKSKDQAVEAFTKFKPLAENVAGRRIKTLRSDRGGKFLSGEFAQVCESAGIQRHLTAPYSPQQNGVVERRNRSVMVMARSLLKGMSVPGRLWGEAVRHAVYILNRLPTKAMGNRTPYEAWTGKKPHLAHLRVFGCTAHAKITTPHLKKLDDRSAPYVYLGVEEGSKAHRLFDPRRGRIHVSRDVIFEENAVWQWLGDAGEQVSVEFDVEEIVESPAGSATSLPGAVPRYQAPSPGRRLGKEPVVVEEEASSPAGTAEASPSLPTTPATPIGEQSTPHSAGEIDTDGAPVRYRHIADILRDAPRVDLVDDEQDGEALLAETEEPSAYREAAGHSAWEDAMAMEMDAIERNGTWELTTLPAGHRAIGLKWVYKLKKNTAGEVIKHKARLVAKGYVQRQGVDFDEVFAPVARLDTVHHLDVKSAFLNGELEEEEQAVYTWGIGSGGVIVGVYVDDLIVTGENPVELKMFKEQMMGEFEMSDLGLLSFYLGIEVDQGENGTTLKQTAYARKVLSQFGMLECNSTSIPIDPRMQLNKDADGHPVGYYWVYRQRPAGDVDDRRSTGGMAFYINGSLVAWSSQKQKTVALSSCEAEFMAATTAACHALWLRALLVEIVGGPAKVVKLFVDNKLAIALMKNPVFHGRSKHIDTRYHFIRECVDGGKVVIEFVRTEEQQADALTKVATVEGISLRLLADANDAVIESEEDRVGSVRYARKVFDRGSSTNTYGVRVVALHADTAAARTIDLPPGCVDRMLGCSNAKSMSELMLVMSRGGAVLSLVMAEREVISVWTLEEEAAAVERWSRQVVIARVAIDRSVEARRLYQTVFFEGFGERSGTVLMRIVNVGLVQLAVATKKAIVVRDSGAGKWWGRSMSRACLHEMNLYSLLQSMKPF

SEQ ID NO: 18961 - protein, 1433 aa, Oryza sativa
  Clone ID: TF_OSC400864j.C1.p6.fg
MALVPAGAGADPARGSSGSAFSYPQLTATNYTSWCIRVQAMMEDQGVWDAIEPVAGVAVDPRRDKKARSHLLQSLPEDLLMQVAKKRSAKEVWDCLKTRFVGADRVREARLQTLKGEFGAMVMEPGETLDQYAGRITAMSVRHSALGSTLGDSAMVKKLFDTVPEKFVSLVAGIEQFYDIDTMPFEEAVGRLKAYEERMRKKKAAAGGVTTDGQVLLTQAEWEAHFKKNGGESSPPQKNKPSGEGAGRGQGGRGRGRGRGAGGRGGTPRGDSGAGSGGGGRDKSHIKCFNCEEYGHYSNQCPHPKKKKGEAHLAQTEDAGPALLLAVTEDVPERASCGLVVREQRVWPKLLLADAGGHAGDVWFLDNGASNHMTGDRSKFRELDESITGRVKFGDASTVQIKGKGSILFSCKNGDQWLLQDVYYIPSLQCNMVSLGQLTETGHRVVMDEDVLEVFDKSPWRLVMKVRRTVNRLYRIELKLAHPVSLLSSLDDPAWLWHARLGHVNFQAMKLLVDKEMAGGVLAIVHPNQLCQSCLVTKQARAPFPAAAHFRAEEPLELLHIDLCGPITPSTMSGNRYFFLIVDDYSRWMWVFVLKTKDQSLDAFVKFKPLAENTAGRRVKTLRSDRGGEFLSGEFAQVCEEAGIQCHLTAPYSPQQNGVVERRNRTVMAMARSLLKGMRVPGRFWGEAVRHAVHLLNRLPTKAMGDRTPFEAWTGRKPQLGHLKVFGCTAHAKNTQPHLKKLDDKSAPYVYLGVEEGSKAHRLFDPRRGRIHVSRDVVFEENVPWEWTSAAGQEPTDFAMEEEPGEQLPSPATAAGVVPSYQAPSPGRRTGKEAVVAAEEVPSPASPVAASPTLPGTPTPGSPSTNSAGVVPSPGTDDNIDTDDGPRRYRSLADVLREAPRVDLVEDECDGEALLAESEEPSSYREAAGQPAWEEAMQREMEAIEKNKTWELAMLPAGHRAIGLKWVYKLKKNTAGEIIKHKAWLVAKGYVQKQGVDFEEVFAPVARLDTVRVVLAVAADRRWQVHHLDVKSAFLNGELEEEVYVAQPEGFARSGKEHLVLKLHKALYGLWQAPRAWNIRLDRSLRELGFDRCTQEQAVYTRGRGSDGIIVGVYVDDLIVTGENPSELKVFKEQMMGEFEMSDLGLLTYYLGIEVDQDESATTLKQTAYAKKLLSQFGMMECNSVSIPIDPRSQLSKDPEGHPVDATEYRRIIGSLRYLLHTRPDLSYAVGVASRFMERPTVMHFKAVKQILRYIKGTMDYGLVYAAGTGALKITGYTDSDLAGDLDDRRNTGGMAFYINQSLVAWSSQKQKTVALSSCEAEFMAATTAACQALWLRVLLAEVAGVEEKAVKLFVDNRLAIALMKNPVFHGRSKHIDTRYHFIRECVDGGQIVVEFVRTEEQRADALTKGLPAAKLATARHLLGVRSLGPRQN

SEQ ID NO: 18962 - protein, 1409 aa, Oryza sativa
  Clone ID: TF_OSC900029j.C1.p29.fg
MALVPAGAGADPARGSSGSAFSYPQLTATNYTSWCIRVQAMMEDQGVWDAIEPAAGVAVDPRRDKKARSHLLQSQPEDLLMQVAKKRSAKEVWDCLKTRFVGADRVREARLQTLKGEFGAMVMEPGETLDQYAGRITAMSVRHSALGSTLGDSAMVKKLFDTVPEKFVSLVAGIEQFYDIDTMPFEEAVGRLKAYEERMRKKKAAAGGVTTDGQVLLTQAEWEAHFKKNGGESSPPQKNKPSGEGAGRGQGGRGRGRGRGAGGRGGTPRGDSGAGSGGGGRDKSHIKCFNCEEYGHYSNQCPHPKKKKGEAHLAQTEDAGPALLLAVTEDVPERASCGLVVREQRVWPKLLLADAGGHAGDVWFLDNGASNHMTGDRSKFRELDESITGRVKFGDASTVQIKGKGSILFSCKNDDQWLLQDVYYIPSLQCNMVSLGQLTETGHRVVMDEDVLEVFDKSPWRLVMKPRRPGLAVACAAGTRKFSSNETAGGQGDGGGVPAIVHPNQLCQSCLVAKQARAPFPAAAHFRAEEPLELLHIDLCGPITPNTMSGNRYFFLIVDDYSRWIWVFVLKTKDQSLDAFVKFKPLAENTAGRRVKTLRSDRGGEFLSGEFAQVCEEAGIQRHLTAPYSPQQNGVVERRNRTVMAMARSLLKGMRVPGRFWGEAVRHAVHLLNRLPTKAMGDRTPFEAWTGRKPQLGHLKVFGCTAHAKNTQPHLKKLDDRSAPYVYLGVEEGSKAHRLFDPRRGRIHVSRDVVFEENVPWEWTSAAGQEPTDFAMEEEPGEQLPSPATAAGVVPPYQAPSPGRRAGKEAVVAAEEVPSPASPVAASPTLPGTPTPGSPSTNSAGVVPSPGTDDNIDTDDGPRRYRSLADVLREAPRVDLVEDECDGEALLAESEEPSSYREAAGQPAWEEAMQREMEAIEKNKTWELAMLPAGHRAIGLKWVYKLKKNTAGEIIKHKARLVAKGYVQKQGVDFEEVFAPVARLDTVRVVLAVAADRRWQVHHLDVKSAFLNGELEEEVYVAQPEGFARSGKEHLVLKLHKALYGLRQAPRAWNIRLDRSLRELGFDRCTQEQAVYTRGRGSDGIIVGVYVDDLIVTGENPSELKVFKEQMMGEFEMSDLGLLTYYLGIEVDQDESATTLKQTAYAKKLLSQFGMMECNSVSIPIDPRSQLSKDPEGHPVDATEYRRIIGSLRYLLHTRPDLSYAVGVASRFMERPTVMHFKAVKQILRYIKGTMDYGLVYAAGTGALKITGYTDSDLAGDLDDRRSTGGMAFYINQSLVAWSSQKQKTVALSSCEAEFMAATTAACQALWLRLLLAEVAGVEEKAVKLFVDNRSAIALMKNPVFHGRSKHIDTRYHFIRECVDGGQIVVEFVRTEEQRADALTKGLPAAKLVTARHLLGVRSLGSRQN

SEQ ID NO: 18963 - protein, 1360 aa, Oryza sativa
  Clone ID: TF_OSC900327j.C1.p10.fg
MALVPATSDPARGSSGSAFLYPQLTATNYTSWVIRVQAMMEDQGVWEVIEPAAGAAVDPQKDKKAKSHLLQSLPEDLLMQVAKKRLAKETLKGEFGAMVMEPGETLDQYAGRITTMSVRHSALGSTLSDAAMVKKLFDTVPEKFVNLVTGIEQFYNVDDMPFEEAVGRLKAYEERVRKKKAAAGGVTTDGQVLLTQAEWEARFKKDGGESSSPQKGKASGEGAKGGQSGRGRGRGRGAGGRGGAARGNSASGSGGGGRDKSHIKCFNCEEYGHYSNQCPHPKKKKGEAHLAQTEDAGAALLLAVTENAPVQATQEMFVHEDRVWPNLLLADGGAVAGNVWYLDNGASNHMTGDRKKFRELDESITGSIRFGDASSVQIKGKGSVLFSCKNGDQWLLQDMYYIPSLCCNMVSLGQLTKTGHRVVMDEDVLEVFDKCPWRLVMKVRHTTNRLYRIELNLAYPVSLLSSLDDPAWLWHARLGHVNFQAMKLLVDKGMEVDVPAIVHPNQLCQVCLVAKQIRASFPVVVNYRAEEPLELIHIDLCGPISPATMAGNKIKQWRPSPSFKPLAENVAGRRIKTLRSDRGGEFLSGEFAQVCESAGIQRHLTAPYSPQQNGVVERRNRSVMAMARSLLKGMSVAGRLWGEAVRYAVYILNRLPTKAMGNRTPYEAWMGKKPHLAHLRVFGCTTHAKITTPHLKKLDDRSAPYVYLGVEEGSKVQRLFDPRRGRIHWLGDAGEQVSVEFDVEEIVEPPAGSATSLPGAIPRYQAPSPGNRPGKEPVVVEEEASSPAGTMEASPSLPTTPATPIGEQSTPHSAGEIDTDGAPVRYRHIADIMRDAPRVDLVDDEQDGEALLAEMEELSAYHEAAGHPAWEDAMAMEMDAIECNGTWELTTLPAGHRAIGLKWVYKLKKNTAGEVHHLDVKSAFLNGELEEEVYVAQPEGFVKQGREHLVLRLNKALYELRQAPRAWNIRLDRCPKQLGFERCTQEQAVYTRGTGSGGVIVGVYVDDLIVTGENPVELKMFKEQMMGEFEMSDLGLLSFYLGIEVDQGENGTTLKQTAYARKVLSQFGMLECNSTSIPIDPRMQLNKVADGHPVDATEYRRVISCLRYLLHTRPDLSFAVGVASRFMERPTLMHFKAVKQILIYLKAGNGDMQITGYTDSDLAGDVDDRRSTGGMAFYINGSLVAWSSQKQKTVALSSCEAEFMAATAAACHALWLRALLVEIVGGPTKVVKLFVDNKSSIALMKNPVFHGRSKHIDTRYHFIRECFDGGQVVIEFVRTEEQRADALTKVATVEGISLRLLADANDAVIESEEDRVGSIRVREFSAVNENHRKLAPQISYLLLFSETSQFPVFLFCSVFL

SEQ ID NO: 18964 - protein, 1000 aa, Oryza sativa
  Clone ID: TF_OSC401564j.C1.p4.fg
MAGFADTLRPDKFTGVHFKRWQLRVTLWLTAMKCFWVSTGKPEEILTADQQKQFEEATTLFVGCILSVLGDRLVEVYMHMTDAKELWDALNNKFGAIDASNDLYIMEQFHDYKMADNHSVVEQAHEIQTMTKKLELLKCVLLDKFVASANVVHKAQNKSKGKYKAQQTTNFKKQKKNNNNPNQDERTCFVSGQPGHLARKCPQRKGMKAPAGQTSKSANVTIGNTGDGSGLVARGFTVLMGNGSHAYVMVLARFCYVYLLKTKDEALDYFKIYKAEIENQLDRKIKRLRSDRDGEFFSNEFDLFYEEHGIIHERTPPYSPESNGIAEKKNRTLTDLVNAMLDTAGLPKAWWGEALLTSNHVLNRAPNRNKDKTPYKIWIGRKPSLSYLRTWGCLAKVNVPITKKRKLGSKTVDCVFLGYAHHNIAYRFLIVKSKVPNMHVGTIMESRDATFFESFFPMKDTHSSSSQPSEVIPSSITPPEQTEHTHEHVTEEDESEAPRSSKRQRTAKSFGDDFTVYLVDDTPKSISEAYASSDVDYWKEAVRSEMDSIIANGTWEVTERPYGCKPVGCKWVFKKKLRPNGTIEKYKARLVAKGYTQKEGENFFHTYSPVARLTTIRVLLSLATSHGLLVHQMDVKIAFLNGELDEEIYMDQPDGFVVKGFAVNEADKCVYYRHGGGEGVILGLYVDDILIFGTSLEVINEVKSFLSQNFDMKDLGVADVILNIKLIRGENGITLLQSHYLEKILNRFGYIDSKPSPTPYDPSLLLRKNKRIARNQLEYSQIIGSLMYLASATRPDISFAVSKLSRFTSNSGDDHWHALERVMHYLKGTMELELHYSGYPAVLEGYSDSNWISDVDEIKATSGYVFTLGGGAVSWRSCKQTILTRSTMEAELTALDTATVEAEWLRDLLMDLPIVEKPVPAILMNCGNQTVIVKVNSSKDNMKSSRHVKRRLKSVRKLRNSGVITLDYIQTARNLADPFTKGLSQNVIDNASKEMGLRPM

SEQ ID NO: 18965 - protein, 1305 aa, Oryza sativa
  Clone ID: TF_OSC900422j.C1.p26.fg
MIRERKDFKRLTPNDILGRIVSHEMQEEEARKVRQMVKNAAMIKNQEVALKVKQEEESSCEESEDEEMAFIVKRFKHFLRKSGYGKGRKYDDKGKRQSKRACFNCDEYGHFVADCPRSNEAKAKGGKKKPERAHVAEAHMAEVWYSADEEDLEVKPKPKPKDKVEGEGGVATVTFKSSSSSKERLFNNLSNDDEDSYHYSCFMAQGCKVMTQKPSHTSLDVDSSDEESDNELDDVLKSFSKPAMQHLAKLMRALDSKKQSLERQEELLILEKKRNLALEESLAKECAKNEQLANELNLANGSLASLRDVNETLQEKFASLDKSHKDLEVQFDTLWNSTSQPNVVSNSSNPSTSNGCARCYNIDLNSHATNVDAMQALKKENERLGTLVRYGCMKTYHSKDALYKTITAHPNKDRHGLGFSGGSPVSKRVMVNGKECLMFVREGKAPQASEAYSSGGSSWVVDSGCTNHMTGEGSMFTSLDEKGGSRENIVIGDDGKGNVMGLGKIAIFKNQSLSNVLLVNSLSYNLLSVSQLCKLGFNCLFTDVDVTIFRRDDSCIAFKGVLKGDLCLVDFDVNRVNPEACLIAKSSMGWLWHRRLVHVGMRNLASLLKGEHILGLSNVSFEKDRVFSACQAGKQVGSPHPIKNIMTTTRPLELLHMDLFGPVAYISIGEGAKRQWRRIKNTQVEEFLDEEGIKHEFSAPYDPPQNGIVERKNRTLIEAARAILDEYKTLDVFWAEAVSTACHAINRLYPHKILKKTSYELLSGKKPNVSYFRVFGSKCFILSKRPRSSKFSPKVDEGFLLCYKSNAHAYRVFNKTSGIVEVTRDVTFDESNDSQGEQVVVHVVGDVDPNQAIGTKAIGDIRPVETQDDQEDRDQPPSSTSNSPTSAVSAEPEVLGPIDRNLRTSPGPEVPGSTVRNLRINGSEDVPTAQVDGIDAEGTLEHSDQAQVPPVHHPQGYITLSKEIIPVEDALGDPDWVMAMQEELNNFTRNQVWTLVERPKQNVIGTKWIFRNKQDEHGVVVRNKARLFQMDVKSDFLNGPISELVYVEQPPGFEDPKLPNHVYKLHKALYGLKQAPRAWYECLRDFLLKNGFEIGKADTTLFTKKFKSDLFICQIYVDDIIFGSTNASFCEEFSRIMTKSVCMCAHFQAEPKECHLIAVKRILRYLVHTPNLGLWYPKGCGFELLGYSDSDYAGCKVDRKSTTRTCQFLGRSLVSWSSKKQNSIALSTTEAEYVAAGSCCAQLLWMRQTLKDFGYNFTKIPLLCDNESAIKIAKNPVQHSRTKHIDIRHHFLRDHETKGTYALPM

SEQ ID NO: 18966 - protein, 1792 aa, Oryza sativa
  Clone ID: TF_OSC421503j.C1.p7.fg
MRGEHEGERFRPSTSTAAGVHSGIRQPPSKPQVGSWRDIIVGVGTQGAVGEKEREAAWIEVRRRKGSHSRGAHLSPPTRPAALKTTREVPRWLQGRCFKCLGLGHQKAHCTGQIRCFRCWYTGHLASSCAEKGERGEREEGEVRGAPKESVQGRAQVEGRRLPARRQEPRRAVPQARRQEETSTAEPGASRRPKSDQASASVKEMAGFQICTARPHEYMEEFWTGEPELRPAIGHCVLSWTAGMERNEAWLNQHTLMASVLKTRPSVSSGELLVAIVQQAGVREENLRVDVTHTEDFLLSFRTLRDRNSVFRRSHEIYVQEVPVSFKLWSRRSWADSSDLKFFTKISLDGLPAHLWERETVRNKGSWWRLSRLQMLDVWVFSLGSRTQTSFRSCFRSKCQRRLGQEVLGGKVLRAQLLLALLGHGQRFSMTLSFMSKRSSIPLPCTLRLRTQPVRLLVREGTVEAANSAAVELHHLAPEARGTSVKQPVAPDPLEAEVCSYGGKGSMLALSPVIEAVTGSAEPGRMVAGAMMAAGTEGMAPRPNVWFSPQQSQGSPALVDASTPVFQDVPLPLENLAHSPGSTVLPSPRIFRSISPLRLSEEDQVDGLMAQAMLPPPAQAFVLASPGTMDSLLVSPRLRSTADAVRGCAFRGSGHDPSPASTPGHVSSVQTLPPLARHLSFEDMGGDPPLMARAAVLEEIFEALSPGGNPVGARLPSPPADGQSHAGPSTADGPPSSADRLSPPWSPVRSALLVGPALGVAHFDRVYVCRKESVPAPQVVELAPSPQPARRSPLGAVILGQASPLRPVMSQSQASRVPDGSAVDAFIVTISTPPPCSLLGTPPASVPVTRSRRRVELPRDFTPWRSPRLALQGDGARRHTISKVQRVTMKKLGIIEEEDEATQETAEQYMCLFDNPLPPHHVEAMAELLQLDLAEPMDPLPAEPTMALFSVLVWNVRGLNNTAKRALVQESVVSSNASVVCFQESKLEVVNAVLIFELCGPGFNCFEVLPAEQTRGGVIIAWKGDLLQGTLVHTGRWSLIVNLSWGDRSWSLSSVYGPQADDEKLLFLDEMSAIRDLCLVEWIITGDFNLITAAADKNNLRINRRLMNAFRSKVNELELKEVYLFGRRYTWSSEQAVPTLVKLDRLFASTQWEDMFPEAHLQALSSSGSDHCPQLLTCGDRVPRQRRFRFESYWTRLEGFEEVVKETWQMARLSKFLSKWGQRHISSFRLQLQIANELILRSSNSIRFQDIHMPRLNLADLDAAFNEEAVWEAIKIMPNEKSPTPDGFTGLFYQKCWEIIKQDVMAALHKFCSGNNQNLELLNTAIITLLPKKEASSLLKDYRPISLIHSFAKLAAKVMALRLTPRMADLVACTQSAFIRGRSIHENFIFVKGLTKLFHCRKKAMILLKLDILKAFDSVSWPFLLDLLQFRGFGPNWRRINPTSVVPNMSFYADDAVIFFKPVHHEAATIKAVLNLFGDATGLLSNFAKSAITPIRCTEEQRLLVQEVLGCRMEDLPITYLGLPLSIRNPTKAELQPIMDRMAKKVAGWKPKLLSPDGRLCLIKSVLMAIPVHLLSVVQLPRWVIKDIERRCRGFLWKGQEEISGGHCLVAWREICMPIGNGGLGIKDIDSFGKALRLKWEFKRQEQRDRPWTMANWESEKDVGDLFNSLAIHILGDGSHTDFCRGNWLPRGGSIANNCPTLFSFVSRTKLMVAQGLISHRWVRDLQGSLSSRALAEYLSLWDELQSVAVQEGPMISSFLPQLSALLGKQFGRPKRQRESDFFFGWQQRVDV

SEQ ID NO: 18967 - protein, 236 aa, Oryza sativa
  Clone ID: TF_OSC13260j.C1.p1.np
INLQNKPNIHHNSKRLRSVKVLSLVSNLSLPFVFPLSLSKPLQQMADNEKGNKVRSQDIGTSSSRVNEAQDTSCAAVVQHLINQNKLLIEILQQHRMPILNPSQMQPQVQLEAVQALTPQVSAPPTSQKAPHAMPHVDPKEASIICFMCDEQGHYARNCPQQKRKAPMRTEGEVRKMIITSTEWPSPGMTRRQRRNTFRGAPQLTEHLLANGGRVSDSEDSDQVSKDEDEKSPQGF

SEQ ID NO: 18968 - protein, 292 aa, Oryza sativa
  unsure (1)..(292): unsure at all Xaa locations
  Clone ID: TF_OSC18671j.C1.p2.np
RWSRLYPRSACEDGRRPLVRCLLDGQVSEEEDIVSCLPKLRKTAGSASEMEEVVKPAVHNSKRLRSVKVLSLVSNLSLPFVFPLSLSKPLQQMADNEKGNKVRSQDIGTSSSRVNEAPDTSCVTLVQHLVNQNRLLIEILQQHQTPILNLSQIQPQVQLEAVQALTPQVSAPPTSQKAPHAMPHVDPKEASIICFMCDEQGHYARNCPQQKRKAPMRTEDEVRKMIITSTEWPPPGMTRRQRRNTFRGATQLTEHLLANGGRVSGSEDSDQVSSDDEDEKSPQGFNQXXATV

SEQ ID NO: 18969 - protein, 328 aa, Oryza sativa
  Clone ID: TF_OSC20369j.C1.p1.fg
MADNEKGNKVRSQDIGTSSSRVNEAPDTSCVAVVQHLINQNQLLIEILQQHRMPILNPSQMQPQVQLEAVQALTPQVSAPPTSQKAPHAMPHVDPKEASIICFMCDEQGHYARNCPQQKRKAPMRTEDEVRKMIITSTEWPPPGMTEHQRRNSFRGAQQLTEHLLANGGRVSDSEDSDQVSSDDEGMGHFADKCPKPRNVAASTSVHANPRNQKLAPQRIVIHASRSSPITRVATAPIPMSALPQGVNAQFQPQPPADKTEASICVVPLEVPIQQLRNQVQDEEPELKKGITPKTVPNQGKIDLHITANLHEADIPIVLWSLEQTPYP

SEQ ID NO: 18970 - protein, 199 aa, Oryza sativa
  Clone ID: TF_OSC25205j.C1.p1.fg
MADNEKGNKVRSQDIGTSSSRVNEAQDTSCAAVVQHLINQNKLLIEILQQHRMPILNPSQMQPQVQLEAVQALTPQVSAPPTSQKAPHAMPHVDPKEASIICFMCDEQGHYARNCPQQKRKAPMRTEGEVRKMIITSTEWPPPGMTRRQRRNTFRGAPQLTEHLLANGGRVSDSEDSDQVSSEDEDEKSPQGFNQDKME

SEQ ID NO: 18971 - protein, 1553 aa, Oryza sativa
  unsure (1)..(1553): unsure at all Xaa locations
  Clone ID: TF_OSC25668j.C1.p2.np
MASRPRRATRAPNRFGFEEGRVEPEADHESADEQSHHTNRSHHTASRDAEVEQSHGSHRSHHTVNRDPVGGMPSPPHVENNMQHLMAXPQPQILQGLATAIAGFQHNAHGNGHPHMGNNRSKLTDFLRSRPLEFSQTVVPVEADDWLKDVERKLNLVQCTPFEKTLYASHQLRGPAADWWENYCNAHPDPTNIAWDEFATAFRATHVPESTIDMKKEEFNRLKQGNNSVNXYLSQFNKLARYAPEEVDTDKKKIRKFLKGIAVGMRLQLLAHNFPTFHDMINKSLLFEDARKEATEEYKKRKSNHQGNSSRGAPRPRFGQPMQYHQSVTHANRQPSYAPRPQTNRLAPQPQQRAPSSNTAPNSVSSFKAPSGMASVQCFXCNQMRHYARQCPQDPANSNSGRSNGSTARTPTPAPAPSRPSSQASGQGSHVSNNFGRGRVNHIQAETAQDAPDVVMGMFSINSVPAIVLFDSGASHTFISQAFVKRNGWKTQKLQVPMIVHSPGRDIGATKICPEVNIRIEGIDFLAKPIILDSQSLDIILGMDWLAKHKGQIDCAERSITLQGPGGKQVRFTPNTLTASRSILTSLQAIPLEXVPIVCGYPDVFPEELTGMPPDREIEFAIELALGTAPIAKRPYRMAVNELAEVKKQIEELESKGYVRPSSSPWGAPVLLVKKKDGSERMVIDYRALNEVTIKNKYSLPRIDDLFDEIEGAKVFXKIDLRSGYHQLKIRSENIPKTAFSMRYGLYEFTVMSFGLTNAPAFFMNLINKIFMEYLDKFVVVFIDDILIYSRNAEEHAEHLRLIMEKLREHQLLANFSKCKFWLDRVAFLHVISSNGVEVDPRKVEAVLAWNSPKNVSEIRSFLGLAGYYRRFIEGFSKLARPMTELLKKEKKFEWSAACEDSFQEMKKRLTTAPVLTLPDIRKDFEIFCDASRQGLGILMQDRKVVAYASRQLRPHEVNYPTHDLELAAVIHALKIWRHYLIGYKCEVYTDHKSLKYIFTQTELNMRQRRWLELIKDYDLGIHYHPGKANVVADALSRKTYCNAVKVWPDQDRLCRELEKLRLIVVQSAIPASLTVQPTLESQIREAQKDDKGIKELIERIHEKKYTGFSIDDQGTVWCGSRICVPAKKELKDIILKEAHESAYSIHLGSTKMYQDIKGYFWWAGMKRDVAEYVALYDICQRVKAEHQRPAGLLQPLPISECKWEEIGMDFITGLPRTPSGYDSIXVIVDQFTKSAHFVPVKTTFDGKKLAELYMTHVVCRFGCPKKIVSDRGTQFTSRFWKQLHEALGTNLNFSTAYHPQTDGXTERVNQILEDMLRACALDFEGTWDRCLPYAEFSYNNSYQASIQMSPNEAMFGRKCRTPLCWNEVGEALVFGPILKAAEEQVKLIRERLKTAQNRQKNYADNRRRDLEFEKGDHVYLRVSPLHGMKRFGMSGKLAPRYIGPYHITARRGEVAYQLELPEGLADVHNVFHVSQLKKCLRVPEEQVPLGNIELENNLTYKERPIKVLQEAKRQTRRKTIKFYKVQWSNHSKDKATWEREDHLRAEFPELLP

SEQ ID NO: 18972 - protein, 468 aa, Oryza sativa
  Clone ID: TF_OSC33041j.C1.p1.np
MSWHRVGVLLLGSVLPACPGGSGRRGIGSVLLSMARMGWKLCHVFRPYTVVMFNREKGKNVSGYTSSNSSFQLNPPLAPRELTRAHPWSIPSMLFSSQLPLVGSQDQNQYVFDRAFATQVNELPMPEEQVPFCHDCREQGHYALNCPWVYVKEAPSGLAGQTSLNQPPHTKSSLQPSVQSRELNGENPLNPGKCFPPSLSYHVGSHTKQAKGKKSKNQKRKAPMRTEEEVRKMTITSTEWPPAGITIPRRQRGNTFRGARQLTQHLLSHGGRVSDSEGSDQVSSDDEDESPRHLGEEEMESKACTRCGEIEHVASVCLTLCTHCEEDHPPGECPTRKVTCFLCEGTNHVPKDCQLSVLLTKTAEIQRTTLRLSHQLVSSNSNIDDIIHSTNAPLAAPDSAVSHSDNTFSTNHSLHRPPQQRIVIDGRSCVSPRPTPGRAKDNQPPEGDTKQKTVIRLNQQSEGNFSCE

SEQ ID NO: 18973 - protein, 363 aa, Oryza sativa
  Clone ID: TF_OSC417491j.C1.p2.np
NRFSVFFPPKAGETRHVASSCATICVHCEEDHPPDRCPTSRITCFFCEGTDHVPKDCQFSFLLTKKMANQPASSNGEKHQGNTNPRQDYSFSLTPVPGQRNQNEKRKCRVREDICCFNCQGMGHFADKCPKPRNITASTSVHATPCNLKLAPQRIVIHASRSSPIARVATAPTPASALPQGVNAHFQPQQRIVVDGRSCVSPRPTPGQAKGNRPPEGDTKQKTVIRFNQQSEGSFSLAICSPITSSQNQSRMQSLEQCQLQGVKSSTRYQMLHGVKSASPGYQVDSEDMNHEKFWNGSIIELPQPSLSQPKGAPWSKSGEEKIPSATGGQAKQFRVVKFCWKFVKTQRKKSDKKRRPPNLSSC

SEQ ID NO: 18974 - protein, 488 aa, Oryza sativa
  Clone ID: TF_OSC21297j.C1.p9.fg
MDISRTNEGYTSCGPVVEMSWHRAGVLLLGAHSCLPVPEVPAVGGVGSVLLFMARMGWELCHVFRPYTVVMFNREKGKNVSGYASSNSSFQLNPPLASRELTRVHPWSIPSMLLGSQLPLVGSQDQNQYVFDRALATQVNELPMPEEDVPFCHDCREQGHYALNYPWVYVKEAPSFGLAGQTSLNQPPHTKSSLQPSVQSREPNGENPLNPGKCFPPSLSYHVGSRTKQAKGKKSKNQKKKAPMRTEEEVRKMTITSTEWPPAGITIPRRQRGNTFRGARQLTQHLLSHGGRVFDSEGSDQVSSDYEDESLRHLGEEEMESKACPRCGEIGHVASMCLTLCPHCEEDHPPGGCPTRKVTCFLCEGTNHVPKDCQLSVLLTKTAEIQRTTLRLSRQLVSSNSNIDDIIHSTNAPLAAPDSAINHSNNTFSTNHSLHRRPQQRIVVDGRSCVSPRPTPGRAKGNQPQEDDTKQKTVIRFNQQSEGSFSCE

SEQ ID NO: 18975 - protein, 1577 aa, Oryza sativa
  Clone ID: TF_OSC422890j.C1.p1.fg
MGVPRSEGYVIELHRLMRRLRYPRFPIYRVRWCGPVWEARVEVHTRVPLESDYSFPTRHRHDLPETAMQDAAREAFLRLSSIQRAELASTEFAHHPFQEESNSVCTVQDTPCCYNPIVTRLSRWAEAVDDFYEEALLEIDDQQRRVGELETEVTNLTVQQLQLEEEHQAWGSEIDSLKAQLQTEGTDTEPEIEPDITDPSEDETPVHRITFVGGPHTLSTARKSTRPPGKKPKPDPEMASRHRASTSNEETQVPDLTTLAGVMATQTQLLQAIANNQGNRGGSSFGEFMRTKPPTFATADEPMGAEDWLRNIKKKLTLVRMREADKVIFAVNQLEGPAGDWWDTYKEAREEDAGEPTWEEFTAAFRENFVPAAVMRMKKNEFRRLRQGNTTVQEYLNRFTQLARYAIGDLADEEEKIDKLENDQRTVEHNRKRRLAMNRPPQGVPQRLKGATSSGRKPTIVATNRPAAPSNFNRPVAVQNRTPTPTLAAPGVKKNVDCFNCGEYGHYANTCPHPRKTPVRTGANAMTVRGTATPAVGRGLFKTPQTNRTATGFGRGQVNHVRAEEAQEDKGVLMGMFSINSSPVKVLFDSGASHSFISLEASQKHNLTLVGLRKPMIVHSPGGEITVSHACINIPIRLRDVVFPSNLIVVIPQTLDVILGMDWLTKNRGVIDCRRREVTLTTPWGSDIRATMDQDPRLAERAGGIFTMLPMKGMPIVQRLPDVFPEDLPGMPPDRDIEFIIDLIPGTAPISKRPYRMPVNELEELKKQIRELQEKGFVCPSSSPWGAPVLFVKKKDGSMRMCVNYRSLNEVTIKNKYPLPRIDDLFDQLKGAKVFSKIDLRSGYHQLKIRTGDIPKTAFSTRYGLYEFTEEHAEHLRLVLEKLRKHKLYAKFSKCEFWLKEVAFLGHVISAGGVAVDPAKVEAVTEWKAPKSVTEIRSFLGLAGYYRRFIEGFSKIARPMTQLLKKEKEFVWSEQCKESFEQLKEKLTSAPILVLPDNRKDFVIYCDASRQGLGGVLMQDGKVVAYASRQLRPHEENYPTHDLELAAVVHALKIWRHYLIGNHCDIYTDHKSLKYIFTQSDLNLRQRRWLELIKDYDLEVHYHPGKANVVADALSRKSHCNHLRMEEMAPELKEEIAQLNLHIVLRGRINTLDIRPLLRTQIEEAQRENREIQEVKERLAAGFAKEFSTDEKDVLWYKKRIFVLEQGGLRGLILKEAHESAYSLHPGSTEMYQDLKEGYWWPNMKRDVAEYVALYDVCQKVKAEHQRPAGLLQPLRIPEWKWDEIGMDFIVGLPKTATGYDSIWVIVDRLTKTARFIPVKTNYSGAKLAELYMTRIVCLHGVPKRIISDRGTQFTSHFWEKVHEALRSYLAFSTAYHPQTDGQTKRTNQTVERAVFGPDIIKEAEEKVSLIRDHLKVAQSRQKSHADTRRRNLEFKEGDYVCLKVSPMRGTKRFKVKEKLAPRYVGPFQVMARRGEVAYQLQLPENIADVHPVFRVSQLKKCLRVPEEQAPLEEIHISNDLTYPEHPVRILDEAEKRTRSKVWRMYKVQWSNHTEDEATWESEEFLRTEYLHLFENW

SEQ ID NO: 18976 - protein, 1019 aa, Oryza sativa
  unsure (1)..(1019): unsure at all Xaa locations
  Clone ID: TF_OSC8199j.C1.p1.np
ALRSRPRAVIPTFPESPFSQEKNLKSSXASKATPGLEWYIPDLEIDLYSRDGCSEWLGLYNRMPRYKPEYLFGVEGFVQELRTMSFVIGFGTAPFYAQIPHDRHEEKCRVKVTLNSNSEDIPSVMFEAGGRNYIHACQEVARIAIGELRDRYSDRLADTEYRYHPRQPQGSDRGSYLKTEGIENDATTRHLVEMLWAMDESRAETVLAAQDREDRNRGKICKLEDKVDRLEKELAALKGEAPLQKARVRLTARKRALFVPRYQLAPKMVLTRSNRNGPNNNNNNNNGENPTLAQVLAQQAQLMNMMMQQLQNQQNQLNQGNNHAPPQNKLAEFLRVRPPIFSSTTNPVEAGDWLHAIEKKLDLLQCTDQEKVSFASHQLHGPASEWWDHFRLNRTTAEPITWLEFTAAFRKTHIPSGVVSLKKKEFRSLTQGSRSVTEYLHEFNRLARYAPEDVRTDEERQEKFLEGLNDELSYPLMTGDYPDFQKLVDKAIRQEDKYNRMEQKKRRIAQFKTQQENNQKPRLTLGPQSMPQGGSSSVVRPQRQFFNNNAGNNIHNQAPRPVAASTQQQPVKREQGSKPVVCFNCGDPGHYADKCLKPRRVKVVPAQSNSTAPASKARVNHVAAAEAQDAPNVILGTFFVNSVPATVLFDSGATHSFLSMSFAGNHGMEVEDLRRPLMVSTPSNQALSLQRSPSVRIEIQGVPFLANLILLESKDLDVILGMDWLARHKGVIDCANRKVTLTSNDGRVVTVHALSSESLRSRLNQITLKEIPIVREYPDVFPDDLPGMPPKRDIEFRIDLVPGTTPIHKRPCRMAANELAEVKRQVDDLLQKGYIRPSSSPWGARVIFVEKKDHTQRMCVDYRALNDVTIKNKYPLPRIDDLFDQLKGATVFSKIDLRSGYHQLRIKEEDIPKTAFTTRYGLFECTVMSFGLTNAPAFFMNLMNKAFMEYLDKFVVVFIDDILIYSRTKEEHEEHLCLALEKLREHQLYAKFSKCEFWLSEVKFLGHVISAGGVAVDPS

SEQ ID NO: 18977 - protein, 1381 aa, Oryza sativa
  unsure (1)..(1381): unsure at all Xaa locations
  Clone ID: TF_OSC900190j.C1.p15.np
DHPNLAQMLANQNQLIAALLHQMQNPXAPAAQAPINALPQSKLSEFFRVXPPTFSSTTNPVEANYWLHVVNKKLDLIQCNDEEKVAFAAHQLHGPASEWWDHFQATQPAGQIITWAFSTAFRRAHVPAGVVALKKKEFRELKQDGRTVTEFLHEFNRLARYAPKDVRTDEEKQEKFLEGLNDELSVQLISGEYEDFQKLVDKAIRLEDKHRKMESKKRKLANARMFQGPSQKPRYVFPPQVGSSSAAQRASCPQMNNKLQNSGWNNGQRSTPAQGGSTRKDSSGKILVCYNCYEPGHFADKCPKPKRPQAPAPARNANQSNNGNRNNNNLVRGRVNHVSAEEAQAAPEVILGATHSFISRDFVAKATHSFISRDFVAKHQIRIEDLSNPMIISTPGSQLPTKLFSPSVTIEIQGVTFLANLILLSSKNPDVILGMNWLTKHSGIIDCAIRSISLIGGTGQRVTFHAKLALPCKQVLNQVSMEEIPIVKEYPDVFPEELPGMPPKRDIEFRIDLVPGTAPISKRPYRMAANELAEVKKQLEELKGKGHIRPSTSPXGDPVIFVEKKDKTKRMCVDYRALNKVTIKNKYPLPRIDDLFDQLKGATVFSKIDLRSGYHQLRIREEDIPKTAFTTRYGLYECTVMSFGLTNAPAFFMNLMNKVFMEYLDKFVVVFIDDILIYSKIAEEHEQHLHLALEKLREHQLYAKFSKCEFWLLEVKFLGHVISAQGVAVDPTNVESVTNWNQPKSVTQVRSFLGLAGYYRRFIENFSRIARPMTQLLKKEEKFIWTSQCEDAFQFLKKKLDFQVYCDASKQGLGCVLDFQVYCDASKQGLGCVLMQEGQVVAYASRQLRPLESNYPTHDLELAAVVHALKIWRHYLIGNRCEIYTDQKSLKYIFTQPDLNLRQRRWLELIKDYDVGIRYHPGKANVVADALSRKSYCNAIIHEQCPPGLCRELEALNLGIVNYGYVATLEAKPLLLDHIREAQKGDSDIQEIKKNMRRGKAIGFSEHEHGTIWYGERVCVPNDPEIKKLILQEAHXSQYSIHPGSTKMYQDLKMKYWWVSMKHEIAEFVALCDVCXRVKAEHQRPVGLLQPLKILEWKWEEIGMDFITGLPRTNLDMTLFGLLSTAXPKLHISSXSKPLIPAEEMGTRLNFSTAYHPQTDGQIERVNQILEDMLRACAEFSYNNSYQASLQMAPFEALYGRKCRTPLLWDQTGERQVFGTDIIKEVEEKVKVIQANLKVAQSRQKSYADTRRRELAFEEGDFVYLRVTPLRGVRRFHTKGKLAPRFVGPYKVLGRRGEVAYQLELPASLGGVHDVFHVSQLKKCLRVPTEQADTEQIEIQEDLTYVEKPIRILETSERHTRSRVIRFCKVQWSNHSEEEAT

SEQ ID NO: 18978 - protein, 1621 aa, Oryza sativa
  unsure (1)..(1621): unsure at all Xaa locations
  Clone ID: TF_OSC400772j.C1.p71.np
MSNEVNHVGKAPMFNGTNYSTWKIKMSTHLKAMSFHIWSIVDVGFAITDTPLTEIDHRNLQLNAQAMNALFNSLSQEEFNRVSNLETAYEIWNKLAEIHEGTSEYKDTKLHFLKIQYETFSMLPHESVNDMYGRLNVIVNDLKGLGANYTDLEVAQKMLRALPEKYETLVTMLINCDMSRMTPASLLGKINTNDMYKLKKKEMEEASPSKKCIALQAEVEDKSKSKVNEVNEDLEEEMVLLARKFNDLLGRRMERGRDSNSNRRRNRRPNKTLSNLRCFECGEKGHFASKCPSKDDDGDKSSKKKSGGYKLMKKLKKEGKKIEAFIGEWDSNEESSTSSGSEEEGGDDASSKKKKMAVVAIKEAPSLFAPLCLMAKSSSKVTSLSDSESDDDCDDVSYDELVSIFEELHAYSEKEIVKFKALKKDHASLEVLYEELKTSHERLTISHEKLSSSSSCISICDASLVVENNELKEQVAKLNKSLERCFKGKNTLDKILSEQRCILNKEGLGFIPNKGKKPSHRATRFVKSNGKYCSKCREVGHLVNYRTDGSHWVLDSGCTQHMTGDRAMFTTFEVGGKEQEKVTFGDNSKGKVIGLVAKTSLGWLWHRRLAHVGMNQLSKLSKRDLVVVLKDVKFEKDKLCSACQAGKQVACSHPTKSIISTSRPLELLHMILFGPPTYKSIGGNSHWLVIVDDYSRYTWEFFLHDKSIVAELFKKFAKRAQNEFSCTLVKIRSDNGSEFKNTNIEDYCDDLGIKHELSATYSPQQNGVVERKNRTLIEMARTMLNEYGYASNSKAYRVYNKNKGIVXETADVQFDETNGSXEGHENLDDVGDEGLMRAMKNMSIGDVKPIEVEDKPSTSTQDEPSTSATPSQAQVEVEEEKAQDPPMPPRIHTALSKDHPIDQVLGDISKGVQTRSRVASICEHYLFVSCLEPKHVDEALCDPDWMNAMHEELNNFARNKVWTLVDRPRDHNVIGTKWVFRIKQDENGLVVRNKARLVAQGFTQEGLDFGETFAPVARLEAIRILLTFASCFDIKLFQMDVKSAFLNGEIAELVFVXQPPGFEDPKNPNHVYKLSKVLYGLKQAPRAWYERLRDFLLSKDFKIGKVDTTLFTKIIGDDFFLCQIYVDDIIFGSTNEVFCKEFGDMMFREFEMSMIGELSFFLGLQIKQLKNGTFVSQTKYIKDLLKRFGLEDAKPIKTPMATNGHLDLDEGGKPVDLKLYRSMIGSLLYLTASRPDIMFSVCMCAWFQAAPKECHLVAVKRILRYLKHSSTIGLWYPKGEARGVLRFAPIEGSFLXCLPALAMIVVHPLRIRVSLRNRAEMSTLKGDSEEESGDDVSGDSEEESGDDVSRSGEDEDEGSDDMHIDPSIQFVVNMRNPSQYTILRHHDQFLRPRDTPDPRFHTAFQKSVYEQVYAGKAFAEHKGISWRDICPEFEGLQDLFKTVSIDRIVTLKQDYNEDLIRQFYATFYEDGVRYTHGKVAGLRTIPSVVNRIVRATILPRLGNNDDIMGADWHVIDAIIQGRQFDIVSLMMQEIAISKGTFTXGIYYAPYIMRLIQDKLGAAGQNLKKHKQYKPRLXLGAPRAPRAAPSSHPGASSSSAPPPPPGYYPNAFILPLHLFTGS

SEQ ID NO: 18979 - protein, 417 aa, Oryza sativa
  Clone ID: TF_OSC414535j.C1.p20.fg
MATVSAANSASNISASINSIPVLTGANFKEWKENVLIVLGVMDLDLALRKEQPILSDKSTKDENMEHERWDRSNRMSLMIMKRSIPEAFRDSTSEEVTTAKVFLETLQKRFARNEKAETSTLLAKLISMRYKGKGNMREYIMEMSHLASKLKALKLDLSEDLLMHLILISLPTQFNQFKVSYNCQKDKWTVNKLISHCVQEEERLKQDRIESAHLSMTSNNKKRKSKEAVDVQPPLKKRENNCGEEPCYFCKKEGHMKKNCTKYHAWRAKKGETDEYKEIKCPKSYRCLRTDSYRYLWAIPYGFLEWSTIFYHVHRRFLKIWQLTTMATVSGDGWWKKQLEAGLGMGARRLTMEMFGGSTRPRLFSGWEWRRRLVAEAGLGMRAAAGARLAAGAVAGGGGQGGEAVIRTFSILIIRE

SEQ ID NO: 18980 - protein, 552 aa, Oryza sativa
  Clone ID: TF_OSC10744j.C1.p11.fg
MAPAQPAPPAQAKETGAKPGPCYNCGEHGHFADKCPKPCRAGPRFVLARVNHASAEEAQTAPEVVLDLDVIRGMDWLTMFKGVIDCVNRTVTLVNEKGETVVYKSPASPKQGASLNLVEAKSSVTAEEKSSTKLEDIPIVYQYPEVFPEDLTTMPPKREIEFRIDFALGTAPIYKRPYRMAANELAEVKNQVDEQQQKRYIRPSTSPWGAPIIFVEKKDMTKRMFVDYRALNEVTIKNKYPLPRIDDLFDQLKGAKVFSKIDLRSGYHQLRIREEDIPKSGEEHEQHLRLVLEKLQEYQLYAKFSKCDFWLSEVKFLGHVITAQGVAVDPSNVEPVTKWTPPKTVTQIRSFHGLMGYYRRFIENFSRIARPMTQLLKKDEKFKWTAECDKSFEELKRKLVSAQEELLQRLGFEDMSVKLQQELEHLNLGIVEHRYVAALKARPTLVDQVRAPQVNDPEIAELKKNMRFGKARDFHEDEHGTIWLGERFCVPEDKELKDLILTEAHQTQYSIHPGSTKMYQDLKEKFWWASMRREMAEFVAVCDVCQRVKAEH

SEQ ID NO: 18981 - protein, 1093 aa, Oryza sativa
  Clone ID: TF_OSC31822j.C1.p2.fg
MWDALEAKFGVLDAGSELYVMEQFCDYKMMLAKELENNNCELPDKFVAGGIIAKLPPSWLDFATSLKHKRQEFSVSDLIGSLGVEEKARIKDNRSKKVEGGSSANMVQKKNPHASHNNKKVKPDVKPKATTNFKKKGKGKAKGDYFVCGKSGHWAKDCPERKDRKSTNMVISEEGGGTSGYGKLLPTVLSVFHSPDWWVDTGANIHVGRGSFLLMGNGSLAAVHGVGTVDLKFTSGKAVQLKNVQHVPSIKKNLVSGSLLCREGFRLVFESNKCVVSKYGTFIRKGYDNGGLFCFSLDDMCNNNNVVNHISENDESNVWHSRLCHVNFGCMMRLANMSLIQKFTLVKGSKCHTCVQSKQPHKPHKASEARDLAPLELVHSDLCEMNGMLTKGGKKYFMTLIDDCTRFCYVYLLKTKDEALHYFKTYKAEVENQLERKIKRLRSNRGGEYFSNEFTSFCEEFGIIHERTPPYSPQSNGVAKRNNCTLTEMVNAMLDTAGHFKEWWGEAVLIACHVLNKIPMKHKEVNVPIAKKHKLGPNTVDCVFLGYAIHSVGYRFLIVNSGVPDMRVGTIIESRDATFFENEFPMKNTPSTSSQETVIPHEHFAPIEHNDQTLEGNPEEDKIVDTRKSKRQRVAKSFGDDYIVYLVDDTPRTIEEAYSSPDADYWKEAVRSEMDSIMSNGTWEVFERPYGCKPVGCKWVFKKKLRPDGTIEKYKARLVAKGYTQKEGEDFFDTYSLVARLTTIRVLLALAASHGLLVHQMDVKIAFLNGELEEEIYMDQPDGYVLEGQEGMVCKLLKSLYGLKQAPKQRHEKFDTTLTFAGFVVNEADKCVYYRYGGGEGVILCLYVDDILIFGTSLNVIEEVKDFLSKSFEMKDLGEADVILNIKLLRGDEGGITLVQSHYVDKALKRVMRYLKGTELWALSYGIHYTGYPKVLEGYSDSNWISDANEIKATSGYVFTLGGGAVSWKSCKKTILTRSTMEAELTALDTATVEAEWLRELLMDLPVVEKPVPAILINCDNQTVIIKVNSSKDNMKSSRHIKRRLKSVRKQKNSGVIALDYVQTAKNLADQFTKGLPRNVIDSASREMGLIPT

SEQ ID NO: 18982 - protein, 1649 aa, Oryza sativa
  Clone ID: TF_OSC400722j.C1.p47.fg
MKALVSSSCLPSSACGSRPSLPLFLVCLCVCWAFAAHMAGSVSRRGLDMTGFVLELRGMCVVLGYPPGVDYQARPLPEQEGDDAEPHAAWEVTAVILTGSPERTSLAVTAGGDSFPAACQNAALLAIGTLHQRYPDELQHSPYRYHPRCGGARDFATFRDASSEDDATIVHLARMVEAYDAARIDFQQMVRRGMVENNMKILELRQENLQLKKDLHALEAQLCQLKVAQGEMVMTRRSANTGDGNQPEGSNHNNHGSPPPPPPPPPPPPPDTNAILTQILAQQANMMTAFLHHLQNPPQHNAPPPPPQHSKLAEFLRIRPPTFSSSNNPVDALDWLHAVGKKLDTVQCSDEEKVVFAAHQLQGPASLWWDHLQATQPERQPITWARFTADFRRTHVPAGVVALKKREFRELKQGNRSDVREDEEKQEKFLAGMDPELSVRLVSGDYPDFQRLVDKSIRLEAKHKELESHKRRLANFRNQQGANQRVRYTNPYPGGSSSQQQQQQQQPRSAPRPQFVVRVPQPQQQQNQQGTRAPRPPTPTVQPGQGRRDAQGPQRLCFNCYEPGHFADKCPKPRRQQGKAPPRSNNGGNDVIRGRVNHVTAENVLTTPDVIVGTFLIHSIPATILFDSGASHSFISVPFVGRNQLGVERLRNPLLITTPGVVMTAKYYSPAVPIEIQGIPFPSDLILLDTKNLDVILGMNWLAQFQGVVDCARRTVTLYRGPEQPVVFFAPPTSVSSSELHQIGLSEIPIVREFGDVFPEELLGMPPKREIEFRIDLAPGTTPLYKRPYRMAANELAEVKKQLEELKGKGYIRPSTSPRGAPVIFVEKKDKTKRMCVDYRTLNEVTIKNKYPLPRIDDLFDQLKGATVFSKIDLRSGYHQLRIREEDIPKTAFTTRYGLNCEFWLSEVKFLGHMISAKGAAVDPETVTAVTDWKQPKTVTQIRSFLGLAGYYRRFIENFSQIARPMTQLLKKEEKFVWSPQCEKAFQTLKEMLVSSPVLVLPDTRKDFMVYCDASRQGLRCVLMQEGHVVAYASRQLRPHEGNYPTHDLELAAVVHALKIWRHYLIGNRCEIYTDHKSLKYIFTQSDLNLRQRRWLELIKDYDVGIHYHPGRANVVANALSRKSHCNTLNIRGIPPELNQQMAALKLSIVSRGFLAALEAKPTLLDQIREAQKNDPDMHGLLKNMKQGKAAGFTEDEHGTLWNGNRVCVPDNRELKQLILQEAHESPYSIHPGSTKMYLDLKEKYWWVSMKREIAEFVALCDVCQRVKAEHQRPAGLLQPLQVPEWKWDEIGMDFITGLPKTQGGYDSIWVVVDRLTKVARFIPVKTTYGGNKLAELYFARIVSLHGVPKKIVSDWGSQFTSHFWKKLQEELGTRLNFSTAYHPQTDGQTECLNQILEDMLRACVLDFGKTWDKSLPYAEFSYNNSYQASIQMAPYEALYGRKCRTPLLWDQVGESQVFGTDILREAEAKVRTIRDNLKVAQSRQKSYAYNRRRDLEFAMDDFVYLRVTPLRGVHRFQTKGKLAPRFVGPFRIIARRGEVAYQLELPASLGNVHDVFHVSQLKKCLRVPSEQADSEQIEVREDLTYVERPVKILDTMERRTRNRVIRFCKVQWSNHAEEEATWEREDELKAAHPDLFASSSESRGRDSV

SEQ ID NO: 18983 - protein, 2280 aa, Oryza sativa
  Clone ID: TF_OSC401013j.C1.p3.fg
MVNTEGTEEQRKAEEDAALQAGKKESVAGESSFFTKGMMGLRSGIGPSEIKLEVMPNEVRLEGTKNYLSWSRRARLMLRAKGVEHYLEETCVEPIDKSSVEWKMWNATNSTVVAWLMTSVSPSIARMIEAIQNATIIWKTLSNMYSGEGNVMMMVEAQDKVDNLKQEGRTVQEYASELQHLWADLDHYNPLQLKHDDDIVIGNKWLQRRRVIHFLKGLNKEFEDRRAAMFHQATLPNMEEAISAMVQEEMRQKVMKGSNPVRSAYITINDRECYNCGLKGHVSYNCPSPRNNNGRGVARGGARGGYGGFNGSRGGYGGYVGDRGGRGGERGGRGGSRGRGLGGPRANVVMGESSSITLTGEQAAQWEEWQKNKGPVDSNQQNSAKATTSHFGNFANYAHTGEGTQAHALASTYRHHVDWIIDSGASKHVTGLPNNFSSYSPIAPSETIQIADGSSQLIHGIGSVECTPSISLSSVLHVPSFLVNLLSVSSIIDQFKCIVIFDENSCLFQEKGTGRRIGTGVRRNGLWYINQEEMGLAVVVGDTEKEIILLHCQLGHPSFESLSKLYPDLFTKVDKSRLVCDACEFGKHTRSTYAGIGLRSCEPFILIHSDVWGPCPVTSVSGFKWFVTFIDCYTRMTWIYMLRHKNEVLRCFQDFHKLVTNQFDARVRIIRIDNGTEYINSEFVSYVSDHGIIHQTTCPGAPPQNGVAERKNRHLLEVARSLMFQMNVPKYLWSEAVMTAAYLINRMPSRILGMKSPAELLLGKREFKVPPKVFGCVCFVRDHRPFVGKLDPHAVKCVFVGYASNQKGYKCWDPIGKRLFVSMDVTFREFEPYYRSRGDLDQFLEEFSTVIEIDSRVGEIVEVDAHKQGDEDVVIGSIPSFVGDTIEKVVDIGEKVVDISCDKDEGVVVGTIPCPLERVEVQQTEMRVYQRRNKNQVDKVTGKEQVHQRSQIQNQGERSGEPMQEQDKESQQLQQFEYPVPDSSSSLSPTSSSLLETSVPIPKDWRCAKQDPRWKDAMKEELRALEKNKTWELVKLPMGKRAVGCKWVFTVKQTPEGKVDRYKARLVAKGYSQTYGIDYDETFAPVAKMSTMSRMLFYMVIYKRRFRRVLCNMGYSQCNGDHTVFYRHRGTHITILAVYVDDIVITGDDVEEIKCLKQRLGEAFEVKDLGPLRYFLGIEVARSSKGIVLSQRKYVLDLLTETGMLGCRTSATPIDRNHQLSAQSGDPVDRETYQRLVGRLIYLCHTRPDISYAVSVVSRYMHDPRTTHLEVVHRILRYLKGTPGKGLWFRKNQHLDVEGYCDADWASSVDDRRSTSGYCVFVGGNVVCWRSKKQAVVARSTAEAEYRAMALSLSEMLWVKNLLLELRLFRNNTVVLHCDNKSAINIANNPVQHDRTKHIEIDRFFIKEKIDSGALRLQYIKSSEQLADCLTKGLGPSERDECMITDYAITKISNMYSSLTEDKLISSFFTCDDSPSESSIGSPLKLCQICEATKANRRTQKKGDFFNPRCNSYLKPTVERTYIDLARITYYKLESLHTNARVVFQNVVNFASESACFTTLSTCILFQAQCFLSEDEGGSGPFRKPLCIALQAPGLSQYGPTGEEAAHETDSNKAQKSTCRSDLLTGEMPRVQTSRLGKNPIEVDSDGGEDFHVDYEVGNDVDEGPEHGEIDGLLSVVLRKMIVQEVKKNLVDTSSVNFHNPIDKKSKVHSKTEPSYSRFSTKYFSTVLSSLSPDQKRIIGDYGFNSLLMFDNAYVPNKFASWIANHVDVKSSQIVLKDKVIAINKECVHHILGLPIGGMEFPTDCDAGKSFILSKFGKSALPSVRFFGDMFIRKETLSDDEVITSFLIVAMACFLCPNSSLVPSTKYLTVFENVDELRSYDWSKFVYEWMMTSIKKIQKFNTLGGCWFLWAVLYLDYVEFGDKNVPIGFPRISHWKNNMITLYSDLDKVDEENFGLRPIKDFNDTTYFKVVPPENRINTFRDKLESAIGTMLPAFIKEKIYSMVVSHCSANHIVDSESCEDIAISIMLLLCEHAGSRDGGDPDENLIFDDINPGFQPNYAIDVENEIPCDAHNNGSTNKSVASKANETSFRHTPSHDKELGVNDDSVIVSKSAVRFSLSPNFKKDQGLLTPEVGYANNSNSRFEHSRSASGPTVSAVAAVRNVANKIKSRLSQLNNDDKRGPLFPDLIDSCEDEAVGYAKSLSCQKEYLNPRYVTSSSSQPGISFHCLDNSPVQVIGINNNEGTSRTHCIQNVKKRRFDDVTNSPDVEYLGHSTFPDCCK

SEQ ID NO: 18984 - protein, 1650 aa, Oryza sativa
  Clone ID: TF_OSC401018j.C1.p18.gm
MVMPMVTTRRNAATDDGNQPEGSNHNNHGSPPPPPPPPPPPPPDTNAILTQILAQQANMMTAFLHHLQNPPQHNAPPPPPQHSKLAEFLRIRPPTFSNSNNPVDALDWLHAVGKKQDTVQCSDEEKVIFAAHQLQGPASLWWDHFQATQPEGQPITWARFTAAFRRTHVPAGVVALKKREFRELKQGNHSVMEYLHEFNNLARYAPEDVREDEEKQEKFLAGMDPELSVRLVSGDYPDFQRLVDKSIRLEAKHKELESHKRRLANFRNQQGANQRVHYTNPYPGGSSSQQQQQQQQPRSAPRPQFVVRVPQPQQQQNQQGTRAPRPPTLAVQPGQGRRDAQGQQRLCFNCYEPGHFADKCPKPRRQQGQAPPRSNNGGKDVIRGRVNHVTAEDVLTTPDVIVGTFLIHSIPATILFDSGASHSFISVPFVGRNQLRVERLRNPLLITTPGGVMTAKYYSPAVPIEIQGIPFPSDLILLDTKNLDVILGMNWLAQFQGVVIGLSEIPIVREFGDVFPEELLGMLPKREIEFRIDLAPGTTPLYKRPYRMAANELAEVKKQLEELKEKGYIRPSTSPWGAPVIFVEKKDKTKRMCIDYRALNEVTIKNKYPLPRIDDLFDQLKGATVFSKIDLRSGYHQLRIREEDIPKTAFTTRYGLYEFTVMSFGLTNAPAFFMNLMNKVFMEYLDKFVVVFIDDILIYSQSEEDHQHHLRLVLGKLREHQLYAKLSKCEFWLSEVTFLGHVISAKGVAVDPETVTAVTDWKQPKTVTQVRSFLGLAGYYRRFIENFSKIARPMTQLLKKEEKFVWSPQCEKAFKTLEEKLVASPVLILPDTRKDFMVYCDASRQGLGCVLMQDGHVVAYASRQLRPHEGNYPTHDLELAAVVHALKIWRHYLIGNRCEIYTDHKSLKYIFTQSDLNLRQRRLLELIKDYDVGIHYHLGKANVVADALSRKSHCNTLNVCGIPPEPNQQMEALNLSIVSRGFLATLEAKPTLLDQIREAQKNDPDMHGLLKNMKQGKAASFTEDEHGTLWNGNREKYWWVSMKREIAEFVALCDVCQCVKAEHQRPAGLLQPLQVPEWKWDEIGMDFITGLPKTQGGHDSIWVVVDRLTKVARFIPVKTTYGGNKLAELYFARIVSLHGVPKKIVSDRGSQFTSHFWKKLQEELGTRLNFSTAYHPQTDGQTERLNQILEDMLCACVLDFGKTWDKSLPYAEFSYNNSYQASIQMAPYEALYGRKCRTPLLWDQVGESQVFGTDILREAEAKVRTIWDNLKVAQSRQKSYENNRRRDLEFAVGDFVYLRVTPLRGVHRFQTKEKLAPRYVGPFRIIARRGEVAYQLELPASLGNVHDVFHVSQLKKCLRVPSEQADSDQIEVCEDLTYVERPVKILDTMERRTRNRVIRFCKVQWSNHAEEEATWEREDELKAAHPDLFARPPPATIGARARRLPSAVSARPPSGAPRGCQVGPGRQPPAPSAPRPFKDRSSGLCCKALPYFHMSSGANEGYTSCGPVVEMSWHRAGVLLLGAQSCLPVPGVPAVGGIGWTIVAATNLVESGSHESCQSAIRERSRISKLRRILADLVHPSVSVADRRSTVDPVHPSRAAAFLRSGRRFRRRHRPGGRGRAASRRCAGVVAFGRTERVPRGGPLSAGPRP

SEQ ID NO: 18985 - protein, 663 aa, Oryza sativa
  Clone ID: TF_OSC401145j.C1.p2.fg
MTGFVLELRGMCVVLGYPHGVDYQARPLPEQEGEDAEPHAGWEVTAVILSGSPERTSLAVTAGGDSFPAACQNAALLAIGTLHQRYPDELQHSPYRYHPRRGGARDYATFRDASSEDDATVVHLARMVEAYDAARIDFHQMVRRGMVENNMKILELRQENLQLKKDLDALEAQLHQLKIAQGEDSRPKRRRVCRSQKITARKSTSRPELVRQSLAWTCFVETPRAEPAPVVPQEGEASGVGSSEAPSLFAGSGWGFQMVTTRRNVNTGEGNQPEGSNPNHQGNPPPPPPPDTNAILTQILAQQANLMNAFLHHLQNPPQQNAPPPPPQHSKLAEFLRIRPPTFSSSNNPVDALDWLHAVGKKLDTVQCSDEEKVTFAAHQLQGPASLWWDHFQATQPEGQPITWTRFTAAFRRTHVPAGVVALKKREFRELKQGNRSVMEYLHEFNNLARYAPEDVREDEEKQEKFLAGMDPELSVRLVSGDYPDFQRLVDKSIRLEAKHKELESHKRRLANFRNQQGANQRVRYTNPYPGGSSSQQQQQQQPRPAPRPQFVVRVPQQQQQQNQQGTRAPRPPTPTVQPVQGRRDASGPQRLCFNCFEPGHFADKCPEPRRQQGQAPPRSNNGGKDVIRGRVNHVTAEDVLTTPDVIVGRSCGSLCLTPATTS

SEQ ID NO: 18986 - protein, 772 aa, Oryza sativa
  Clone ID: TF_OSC401769j.C1.p8.gm
MARLELEPPEVVRQELEPRRAILPGAGAAGGGAPGAGAGAVNNNINGGNSASQSSGGPFSGVLADNIVDVYMHMPSGKDMWDALEAKFGVSDAGSELYVMEQFYDYKIVDDRSVVEQAHEIQMLANELENNNCELPDKFVASGIIAKLPPSWSDFATSVKHKRQEFSVSDLIGSMGVEEKAMAKDVRGKKVEGGSSANMVQKKNPHASHNNKKVKPNVKPKAATNFKKKGKGKAKGDYFVCGKSGHWAKDCPERKDRKSANMVISEGGGTSGDATFFENEFPMKHTPSTSSQETVMPHEHFAPIEHNDQMPEENPEEDNIVDTRKSKRQRVAKSFGDDYIVYLVDDTPRTIEEAYSSPDADYWKEAVRSEMDSIMSNGTWEVVERPYGCKPVGCKWVFKKKLRPNGTIEKYKARLVAKGYTQKEGEDFFDTYSPVARLTTIRVLLALAASHGLLVHQMDVKTAFLNGELEEEIYMDQPDGYVLEGFVVNEADKCVYYRYGGGEGVILCLYVDDILIFGTSLNVIEEVKDYLSKSFEMKDLGEADVILNIKLQREDEGGITLVQSHYVDKVLSRFGYSDCKLAPTPYDPSVLLRKNRRIARDQLRYSQIIGSLMYLASATRPDISFAVSKLSRFVSNPGDDHWQALERVMRYLKGTMSYGIHYTGYPKVLEGYSDSNWISDADEIKATSGYVFTLGGGAVFWKSCKQTILTRSTMEAELTALDTATVEAEWLRELLMDLPDGSCLNVIRVAFPSRDVDLQNISEGTHLYEFDC

SEQ ID NO: 18987 - protein, 2062 aa, Oryza sativa
  Clone ID: TF_OSC403382j.C1.p1.fg
MYSEEGNVMMMVEAQDKVENLKQEGRTVQEYASELQHLWADLDHYDPLQLKHDDDIVIGNKWLQRRRVIHFLKGLNKEFEDRRAAMFHQATLPNMEEAISAMVQEEMRQKVMKGSNPVRSAYITINDRECYNCGLKGHVSYNCPSPRNNNGRGVARGGARGGFGGFNGSRGGYGGYVGDRGGRGGERGGRGGSRGRGLGGPRANVVMGESSSITLTGEQAAQWEEWQKNKGPVDSNQQNSAKATTSHFGNFANYAHTGEGTQAHALASTYRHHVDWIIDSGASKHVTGLPNNFSSYSPIAPSETIQIADGSSQLIHGIGSVECTPSISLSSVLHVPSFPVNLLSVSSIIDQFKCIVIFDENSCLFQEKGTGRRIGTGVRRNGLWYINQEEMGLAVVVGDTEKEIILLHCQLGHPSFESLSKLYPDLFTKVDKSRLVCDACEFGKHTRSTYAGIGLRSCEPFILIHSDVWGPCPVTSVSGFEWFVTFIDCYTRMTWIYMLRHKNEVIRCFQDFHKLVTNQFDARVRIIRTDNGTEYINSEFVSYVSDHGIIHQTTCPGAPPQNGVAERKNRHLLEVARSLMFQMNVPKYLWSEAVMTAAYLINRMPSRILGMKSPAELLLGKREFKVPPKVFGCVCFVRDHRPFVGKLDPHAVKCVFVGYASNQKEEFSTVIEIDSREGEIVEVDAHKQGDEDVVIGSIPSFVGDTIEKVVDIGEKVVDISCDKDEGVVVGTIPCPLERVEVQQTKMRVYQRRNKNQVDKVTGKEQVHQRSQIQNQGERSGEPMQEQDKESQQLQQFEYPVPDSSSSLSPTSSSLLETSGNISPTFKQVELPLAQRRETRSNAGRPPIRLGFEHLSSRHDIANYISYSHISPAYKAFIASLQIVPIPKDWRCAKQDPRWKDAMKEELRALEKNKTWELVKLPMGKRAVGCKWVFTVKQTPEGKVDRYKARLVAKGYSQTYGIDYDETFAPVAKMSTVRILISCAVNFGWPLHQLDVKNAFLHGDLQEEVYMEIPPGFGNSQTVGKVCRLKKSLYGLKQSPRAWFDRFRRALCNMGYSQCNGDHTVFYRHRGAHITILAVYVDDIVITRDDVEEIKCLKQRLGEAFEVKDLGPLRYFLGIEVARSSKGIVLSQRKYVLDLLTETGMLGCRTSATPIDRNHQLSAQSGDPVDRETYQRLVGRLIYLCHTRPDISYAVSVVSRYMHDPRTTHLEVVHRILRYLKGTPGKGLWFRKNQHLDVEGYCDADWASSVDDRRSTSGYCVFVGGNVVCWRSKKQAVVARSTTEAEYRAMALSLSEMLWVKNLLLELRLFRNNTVVLHCDNKSAINIANNPVQHDRTKHIEIDRFFIKEKIDNGALRLQYIKSSEQLADCLTKGLGPSEKKIPKTELYYLRIVKGYFQELSLSNIISRFYHLRILDVRQCSGHFNLPSDMSNLIKLRHFLDPNDSFHSAIANVGKLKCLQELKRFEVKGQAEAFALRQIGQLEELKGSLCIYNLENAQTGEEANLLNKRHLHKLELLGIPQLAKWVGNDASHVFSLLEVFIIRDCPELMELPFSHSTCPRSGQEMNLTQFPTLRELEVVNCPKLSSFPHIPWTSSPCRVLIDEVGSDFQRLDYSKNNQSEFCLKVVGKDGHLDMSFWNVLAFSNLTELKVLYLKKCPPLPLKHLLVLSCLRSPTIHDSSNVLLNVEAENTVGYQFQIEGLSIDDCSCSGKELTLLLSLFPKLSMFSLQGCGKIRVLGVAKEQTMAMSALSSSPSGHKLEDAHIGQEQEQEQLRGEDEKAAADAGLLLLPHQLQDLYIENISKLILQFDSLVDGMAGGLRSIGGGLQGLHFLRTLTIRGCPNFLSSYYSSSSSSCFPFPSSLQYLHLDGVGGMETLAPLSNLSSLTRLTIRKCMDLRGEDLSSLLAHGQLTNLNIFETPKFFVGCGSDSLRLQCLQTDDITKVLAAPICSLLASSLTSLTISWNDEVERFTKEQSAALLLLSSLQDLEFWYCSELQSLPTGLHRLTSLKRLKIWSCPAIRSLPKGGLPSSLEVLDVRSSNNEELKRQCRDLRGTIPIIKDRRYY

SEQ ID NO: 18988 - protein, 1637 aa, Oryza sativa
  Clone ID: TF_OSC420787j.C1.p26.fg
MVHCFELCYAEGIVTISIRWYISGQSKTIQIAVPAVMAGLTMSFVISFTPLTIINDVVLGNNLFSSWFGTMPRFKPEYLFSTEGFVQELRTMSFAIGFGTAPLYAQIPHDRDEEKCRVKITLNSNREDIPSVARIAIGELRDRYNDQLADTEYRYHPRQPQGSDFGSYLEPAGIENDATTRHLVEMLWAMDESRAEVVIAAQDRENRNRGKICKLEDKVVRLEKELAALKGEAPPQKARVRLTARKRALFVPRYQLAPKVRVVEEEAVPVPANPPIVNMVLTRSNGNGPNNNNHNNNNGENPTLAQVLAQQAQLMNMMMQQLQNQQNQGNNHAPPQNKLAEFLRVRPPTFSSTTNPVEASDWLHAIEKKLDLLQCTDQEKVSFASHQLHGPTSEWWDHFRLNRTTAEPITWLEFTAAFRKSHIPSGVLSLKKKEFRKLTQGSRSITEYLHEFNRLACYAPEDVRTDEERQEKFLEGLNDELSYPLMTGDYHDFQKLVDKAIHQEDKYNRMEQKKRRIAHFKAQQGNSQRPRLAMGPQAVSQGGSSSVVRPQRQFFNNNAGNNNHNQAPRPVATPTQHQPAKREQGNKPGVCFNCGEPGHYSDKCLKPRRVKVVPAQNNSTTPASKSRVNHVAAAEAQGAPEVILGMFPVNSVPATVLFDSGTTHSILSMSFAGNHGMEIEDLRRPLMISTPSNQALSSQRSPSVRIEIQGVPFLANLILLESKYLEVILGMDWLARYKGVIDCANRKVTLTSNDGQVVTVHALPSEPLRSSLNQITLEEIPILRDYPDVFPDDLPGMPPKRDIEFRIDLVPGTTPIHKRPYRMAANELAEVKRQVDDLLQKGYIRPSSSPWGAPVIFVEKKDHTQRMCMDYRALNDVTIKNKYPLPRIDDLFDQLKGATVFSKIDLRSGYHQLRIKEEDIPKTAFTTRYGLFECTVMSFGLTNAPAFFMNLMNKVFMEYLDKFVVVFIDDILIYYRTKEEHEEHLRLALEKLREHQLYAKFSKCEFWLSEVKFLGHVISAGGVAVDPSNVESVTNWKQPKTVSKIRSFLGLAGYYRRFIENFSKIAKPMTRLLQKDVKYKWSEECEHCFQELKNRLLSAPILILPDPKKGLQVYCDASKLGLGCVLMQDGNVVAYASRQLRPHEKNYPTHDLELAAVVHALKIWCHYLFGTRTEVYTDHKSLKYIFTKPDLNMRQWRWLELIKDYDMRIHYHPGKVNVVADALSRKGYCNATEGRQLPWELCKEFERLNLGIVSRGFVAALEAKPTLIDQVREAQINDPDIQEIKKNMRRGKAIGYLEDEQGTVWLGERICVPENKELKDAILKEAHDTLYSIHPGSTKMYQDLKEKCWWAIKAEHQKPAGLLQPLKIPKWRWEEIGMDFITGLPTTSSGHDSIWVIVDRLTKVAHFISVRTTYSGSRLAELYMARIVCLHGVPKKIVSDRGSQFTSKFWKKLQEEMGSKLNFTTAYHPQTDRQTERVNQILEDMLRACALDFGGSWDKNLPYAEFSYNNSCQARLQMAPYEALYGRKCRTPLSWDQTGERQVFGTDILREAEEKLKKCLRVPTEEASLEQIEIQEDLTYVEKPIRILETDERRTRNRVMRFCKVQWSNHLEEEATWEREDELKSAHPHLFASSSQS

SEQ ID NO: 18989 - protein, 2013 aa, Oryza sativa
  unsure (1)..(2013): unsure at all Xaa locations
  Clone ID: TF_OSC874j.C1.p1.np
MEPESAAPVSFPSGRPLPLPTLYKPSPHLLRSFPPLAALPPRRNRACAVALSLRRRRRAPVRRRRRPGPPPTSAPPPSASPHPRRPRPPLRFARRPPERPRPRRPEPRRRLPPLRPPFSSPSTXGEPWTTASFPPFPPFSRPPLRRAYGRRRRPXGRARAASRRPRRRGRLRVHRAAAAWGPVVSRPRPRVRLTRGAHGAGRASPGAPGPPWTRLGHIRTGLRASVAKHYRFHMSSGTNEGYTSCGPVVEMSWHRAGVLLQGAQSCLPVPGVPAVGGIGSMYTSDQSIIYSNSRALGYGQAEQCTQMASSINRRGLDLTGFVLELRGMCVVLGYPHGVDYQGKQLPEQEGDDAEPHAAWEVTAVILTGSPERTSLAVTAGGDSFSAACQNAALLAIGTLHQRYPDELQHSPYRYHPRRGGARDYATFRDASSEDDATIMHLARMVEAYDVARIDFHQMVRRGLVENNMKILELRQENLQLKKDLDAVEAQLHQLKIAQGEVYRPKRRRVCRSLKITARKSTSRPELVRQSLAWTCFVETPRAEPAPVVPQEDGASGVGSTEDALLLTFHGETRRSAATGEGSHLEGSNHNNHGSPPPPPPPPPPPPPDTNAILTQILAQQANMMTGFLHHIQNPPQHNAPPPPPQHSKLAEFLRIRPPTFSSSNNPVDALDWLHAVGKKLDTVQCSDEEKVIFAAHQLQGPASIWRDHFQATQPEGQPITWARFTVAFRRTHVPAGVMALKKREFREMKQGNRSVMEYLHEFNNLARYAPEDVREDEEKQEKFLAGMDPELSVRLVSGDYPDFQRLVDKSIRLEAKHKELESHKRRLANFRNQQGANQRVRYTNPYPGGSSSQQQQQQQPRSAPRPQFVVRVPXPQQQQSQQGTRAPRPPMPAVQPGQGRRDVQGQQRLCFNCFKPGHFADKCPKPRRQQGQAHPRSNNGGKDVIRGRVNHVTAEDVLTTPDVIVGTFLIHSIPATILFDSGASHSFISVPFVGRNQLGVERLRNPLLITTPGGVMTAKYYSPAVPIEIQGIPFPSDLILLDTKNLDVILGMNWLAQFQCVVDCARCTVTLYRGTEQPVVFFAPPTSVGSSELHQIRLSEIPIVREFGDVFPEELPGMPPKREIEFRIDLALGTTPLYKRPYRMAANELAKVKKQLEELKEKGYIRPSTSPWGAPVIFVEKKDKTKRMCVDYRALNEVTIKNKYPLPRIDDLFDQLKGATVFSKIDLRSRYHQLRIREEDIPKTAFTTRYGLYDFTVMSFGLTNARAFFMNLMNKVFMEYLDKFVVVFIDDILVYSQSEDDHQHHLRLVLGKLREHQLYAKLSKCEFWLSEVKFLGHVISAKGVAVDPEIVTAVTDWKQPKTVTQIRSFLGLAGYYQRFIENFSKIARPMTQLLKKEEKFVWSPQCEKAFQTLKERLVSSPVLILPDTHKDFMVYCDASRQGLGCVLMQEGHVVAYASRQLRPHEGNYPTHDLELAAVVHALKIWRHYLIGNSCEIYTDHKSLKYIFTQSDLNLRQRRWLELIKDYDVGIHYHPGKANVVADALSRKSHCNTLGVRGIPPELNQQMEALNLSIVGRGFLATLEAKPTLLDQIREAQKNDPDIRGLLKNMKQGKAAGFTEDEHGTLWNGNRRVKAEHQRPAGLLQPLQVPEWKWDEIGMDFITGLPKTQGGYDSIWVVVDRLTKVARFIPVKTTCGGNKLADLYFARIVSLHGIPKKIVSDRGSQFTSHFWKKLQEELGTRLNFSTAYHPQTDGQTELNQILEDMLRACVLDFGKTWDKSLPYAEFSYNNSYQASIQMAPYEALYGRKCRTPLLWDQVGESQVFGTDILREAEAKVKTIRDNLKVAQSRQKSYADNRRRNLEFAVDDFVYLRVTPLRGVHRFQTKGKLAPRFVGPFRIIARRGEVAYQLELPASLGNVHDVFHVSQLKKCLRVPSEQADSEQIEVREDLTYEERPVKILDTMERRTRNRVIRFCKVQWSNHAEEEATWERQDELKAAYPDLFASSSESRGRDSV

SEQ ID NO: 18990 - protein, 761 aa, Oryza sativa
  Clone ID: TF_OSC874j.C1.p2.gm
MPMAAAGDRRGARAPPPAGRAAVAAFGRTERLPRGAWPSAARALGDVQGQQRLCFNCFKPGHFADKCPKPRRQQGQAHPRSNNGGKDVIRGRVNHVTAEDVLTTPDVIVGTFLIHSIPATILFDSGASHSFISVPFVGRNQLGVERLRNPLLITTPGGVMTAKYYSPAVPIEIQGIPFPSDLILLDTKNLDVILGMNWLAQFQCVVDCARCTVTLYRGTEQPVVFFAPPTSVGSSELHQIRLSEIPIVREFGDVFPEELPGMPPKREIEFRIDLALGTTPLYKRPYRMAANELAKVKKQLEELKEKGYIRPSTSPWGAPVIFVEKKDKTKRMCVDYRALNEVTIKNKYPLPRIDDLFDQLKGATVFSKIDLRSRYHQLRIREEDIPKTAFTTRYGLYDFTVMSFGLTNARAFFMNLMNKVFMEYLDKFVVVFIDDILVYSQSEDDHQHHLRLVLGKLREHQLYAKLSKCEFWLSEVKFLGHVISAKGVAVDPEIVTAVTDWKQPKTVTQIRSFLGLAGYYQRFIENFSKIARPMTQLLKKEEKFVWSPQCEKAFQTLKERLVSSPEGHVVAYASRQLRPHEGNYPTHDLELAAVRRWLELIKDYDVGIHYHPGKANVVADALSRKSHCNTLGVRGIPPELNQQMEALNLSIVGRGFLATLEAKPTLLDQIREAQKNDPDIRGLLKNMKQDDRELKQLILQEAHESPYSIHPGSTKIVSRQSTNDRPDFSNLSKYQNGNGMKLGWISSPDFQKPKADMILYG

SEQ ID NO: 18991 - protein, 1822 aa, Oryza sativa
  unsure (1)..(1822): unsure at all Xaa locations
  Clone ID: TF_OSC900012j.C1.p13.np
TAGPTWQPRGAPEGGLAGTADGRRRTRAPMVAAGDQRRDGAAPERGEGRGKKQRSSAHPGTTRTAETTTGAEEGGGAVRIDEDGGAPTVGGRNGGADEVDEDAAKPMEVTPRREEVRGDDGGELKLGGDGGERGRRREHESDGESPFFPPSLLGRLGPLPSLSLLSPAAQSASSPPRAADGRARPPPSLTGGAHPHARKERPLVILAGSPERTSLTVTAGGDSFPAACQSAALLAIGTLHQRYPDELQHSPYRYHPRRGGARDYATFRDASSEDDATIMHLARMVEAYDAARIDFHQMVRHGMVENNMKILELRQENLQLKKDLDAVEAQLHQLKIAQGEVCRPKRRRVCRSQKITARKSTSRPELVRQSLAWTCFVETPRAEPAPVVPQEGEASGVGSTEDALLLTFRPGPSQQRNAATGDGNQPEGSNHNHQGSPPPPPPPPPPPPPPDTNAILTQILAQQANMMTAFLHHLQNPPQHNAPPPPPQHSKLAEFLRIRPPTFSSSNNPVDALDWLHAVGKKLDTVQCSDEEKVIFAANQLQGPASLWXDHFQATQPEGQPITWARFTAAFRRTHVPAGVVALKKREFRELKQGNRSVTEYLHEFNNLARYAPEDVREDEEKQEKFLVGMDPELSVRLVSGDYPDFQRLVDKSIRLEAKHKELESHKRRLANFRNQQGANQRVRYTNPYPGGSSSQQQQQQQQPRSAPRPQFVVRVPQPQQQQNQQGTRAPHPPTPTVQPGQGSRHAQGPQRLCFNCFEPGHFADKCPNPRRQQGQAPPRSNNGGKDVIRGRVNHVTAEDMLTTPDVIVGTFLIHSIPATILFDSGASHSFISVPFVGRNQLGVERLRNPLLITTPGGVMTAKYYSPAVPIEIQGIPFPSDLILLDTKNLDVILGMNWLAQFQGVVDCARRTVTLYRGPEQPVVFFAPPTSVSSSELHQIGLSEIPIVREFGDVFPEELPGMPPKREIEFRIDLAPGTTPLYKRPYRMAANELAEVKKQLEELKEKGYIRPSTSPWGAPVIFVEKKDKTKRMCVDYRALNEVTIKNKYPLPRIDDLFDQLKGATLFSKIDLRSGYHQLRIREEDIPKTAFTTRYGLYEFTVMSFGLTNAPAFFMNLMNKVFMEYLDKFVVVFIDDILVYSQSEEDHQHHLRLVLGKLREHQLYAKLSKCEFWLSEVKFLGHVISAKGVAVDPETVTAVTDWKQPKTVTQVRSFLGLAGYYRRFIENFSKIARPMTQLLKKEEKFVWSPQCEKAFKTLKEKLVASPVLILPDTRKDFMVYCDASRQGLGCVLMQDGHVVAYDSRQLRPQEGNYPTHDLELAAVVHALKIWRHYLIGNRCEIYTDHKSLKYIFTQSDLNLRQRRWLELIKDYDVGIHYHPGKANVVADALSRKSHCNTLNVRGIPPELSQQMEAPDTSIVGRGFLAAWREFTETLCDVCQRVKAEHQRPAGLLQPLQVPEWKWDEIGMDFITGLPKTQGGYDSIWVVVDRLTKVARFIPVKTTYGGNKLAELYFARIVSLHGVPKKIVSDRGSQFTSHFWKKLQEELGTRLNFSTAYHPQTDEQTERLNQILEDMLRACVLDFGKTXDKSLPYAEFSYNNSYQASIQMAPYEALYGRKCRTPLLWDQVGESQVFGTDILREAEAKVRTIRDNLKVAQSRQKSYADNRRRNLEFAVDDFVYLRVTPLRGVHRFQTKGKLAPRYVGPFRIVARRGEVAYQLELPASLGNVHDVFHVSQLKKCLRVPSEQADSEQIEVREDLTYMERPVKILDTMERRTRNRVIRFCKVQWSNHAEEEAIWEREDELKAAHPDLFASSSESRGRDSV

SEQ ID NO: 18992 - protein, 593 aa, Oryza sativa
  Clone ID: TF_OSC900040j.C1.p2.gm
MALPLSGGITSVSTGSLRNQLLGLSSLLLSEDVRTDEERQEKFLEGLNDELSYPLMTGDYHDFQKLVDKAIRQEDKYNLSQGGSSSVVRPQRQFFNNNAGNNNRNQAPRPVATPTQHQLAKREQGNKPGVCFNCGEPGHYSDKCLKPRRVKVVPAQNNSTAPASKARVNHVAAAEAQCAPDVILANELAEVKRQVDDLLQKGYIRPSSSPWGAPVIFVEKKDHTKRMCVDYRALNDVTIKNKYPLPRIDDLFDQLKGATVFSKIDLRGSCVEVWRHYLFGTHTEVYTDHKSLKYIFTQPDLNMRQRRWLELIKDYDMGIHYHPGKANVVADALSRKGYCNAMEVRQLPWELCKEFERLNMGIVSRGFVAALEAKPTLIDQVREAQINDPDIQEIKKNMRRGKAIGYLEDEQGTIWLGERICVPESKELKDAILKEAHDTLYSIHPGSTKMYQDLKEKFWWASMKREIADRAPPPLWSSSSLGKAAVGIAKSSPSSSRPPFPSKITGAPSSPLQLVAVAVRCRSPSFKPSIPTFPESPNLQEKTLKSSKASKAKTPDVTGRLLAGGGARKEMGLGSPEDGFARGVYVLALFLTC

SEQ ID NO: 18993 - protein, 962 aa, Oryza sativa
  Clone ID: TF_OSC100369j.C1.p14.fg
MDAEDWLRAIEKKLTLVRTNEQEKITFATHQLEGPANEWWEAYQASIEDPTHIITWMEFTTAFRDAFIPTAVIRMKKNEFRRLRQGFMTGQEYLNKFTQLARYTASDIQDEKEKIERFIEGLHDELQGSMISQDHENFQSLVNKVVRLENDRRMVEGLRKRRMNLQRQSPTRSSLQVRRPYPFKPSLPNPKPGMPPILPRPGLKMEDSPCYVCGNIGHFARLCPNRQNMGGQTSYQKPSTTGFIKKNPPIIKSGPNIRRGQVHHIKAEEAQQDPNILMDIYMRIPKEEVPVVQEYLDIFPEELSSLPLDREIEFIIELLPGTTPISKRSYRMPINELEELKKQIAELQEKGFIRPSSSPWGAPVLFVKKKDGSLRMCVDYRVLNEVTIKNKYPLPRIDDLFDQLKGASIFSKIDLRSGYHQLKIRQEDIPKTAFVIRYGLYEFTVMAFGLTNAPAYFMNLMNKIFMEYLDQFVVVFIDDILIYSKNEEEHKQHLRLVLEKLRQHQLYAKLSKCEFWLDQVAFLGHIITKEGVAVDPQKIKAVMEWKTPTSVSEIRSFLGLAGYYRRFIKDFSAIAKPMTRLLKKDMKFERTPECQSSFQRLKHKLTTTPVLILPNIQKDFEIYCDASRQGLGCVLMQEDLNLRQRRWLELIKDYNLEILYHPGKANVVDDALSRKAYCNLQQEIISEQLQAEMLKLNLGIIKYGELSTLELKPTLMDQIKEYHKEDSEIQTFKEWKVHGKAADITEDLEGILWYGNRIIVPQSGNLRKIILKEAHDSPYSLHPGSTKMYHDLKDLYWWPNMKQHIAEYVALCHVCQQVKAEHQKPIGLLQPLQIPEWKWDEIGMDFITGLPKTSTGYDSIWVIIDRLTKTARFIPVKTTYTGAQLAELYMTRIVCLHGVPKTIISDRGTQFTSHFWQKQHYELGSYLDFSTTFHPQTGGQTKRLNQTLEDIIRACALDFAAS

SEQ ID NO: 18994 - protein, 785 aa, Oryza sativa
  Clone ID: TF_OSC32874j.C1.p1.fg
MAGSVTRRGLHMTGFVLELRGMCVVLGPLPEQEGEDAEPHAGWEVTAVILSGSPERTSLAVTAGGDSFPAACQNAALLAIGTLHPRYPDELQHSPYRYHPRRGGARDYATFRDASSEDDATVVHLARMVEAYDAARIDFHQMVRRGMVENNLKILELRQENLQLKKDLDALEAQLHQLKIAQGEDSRPKRRRVCRSQKITARKSTSRPELVRQSLAWTCFVETPRAEPAPVVPQEGEASGVGSSEVVWGMVTPMVTTRRNVNTGEGNQPEGSNHNHQGNPPPPPPPPPPPPPDTNAILTQILAQQANMMTAFLHHLQNPPQQNAPPPPPQHSKLAEFLRIRPPTFSSSNNPVDALDWLHAVGKKLDTVQCSDEEKVVFAAHQLQGPASLWWDHFQATQPEGQPITWARFTAAFRRTHVPAGVVALKKREFRELKQGNRSVMEYLHEFNNLARYAPEDVREDEEKQEKFLAGLDPELSVRLVSGDYPDFQRLVDKSIRLEAKHKELESHKRRLANFRNQQGANQRVRYTNPYPGGSSSQQQQQQQQQQPRSAPRPQFVVRIPQPQQQQGQQGTRAPRPPTPAVQPVQGRRDAQGQQRLCFNCFEPGHFADKCPQPRRQQGQAPPRSNNGGKDVIRGRVNHVTAEDVLTTPDVIVEKKDKTKRMCVDYRALNEVTIKNKYPLPRIDDLFDQLKGATVFSKIDLRSGYHQLRIREEDIPKTAFTTRYGLYEFTSLWLYVMCASVSRQNTNDRPDFSNLSKCQNGSGMKLGWISSPAFQKPKVDMILYG

SEQ ID NO: 18995 - protein, 1322 aa, Oryza sativa
  Clone ID: TF_OSC400697j.C1.p7.fg
MSNEVNHVGKAPMFNGTNYSTWKIKMSTHLKAMSFHIWSIVDVGFAITGTPLTEIDHRYLQLNAQAMNALFNSLSQEEFDRVSNLETAYEIWNKLAEIHEVTSEYKDAKLHFLKIQYETFSMLPHESVNDMYGRLNVIVNDLKGLGVNYTDLEVAQKILGALPEKYETLVTMLINSDISRMTPASLLGKINTNDMYKLKKKEMEEASSPSKKCIALQAEVEDKGKGKVNEANEDLEEEIALLARRFNDLLGRRKERGRGSNSNRRRNSRPNKTLSNFRCFECGEKGHFASKCPSKDDDGDKSSKKKSGGYKLLKKLKKEGKKIEAFIGEWDSNEESSASSGSEEEGGDDASSKKKKMTVVAIKEAPSLFAPLCLMAKGSSKVTSLSDSESNNDCDDVSYDELVSMFEELHAYSEKEIVKFKTLKKDHASLEVLYKELKTSHERLTISHEKLKEAHDNLLFTTQHGAHIDVGISCDLLDDSTTCHIAHVASSSISTSCDDLVDMPSSSSCVSICDTSLVVENNELKEQVAKLNKSLERCFKGRLMMVALLLDMWVPLYSVVNYRTGGSHWVLDSGCTQHMTGDRAMFTTFEVGGKEQEKVTFGDNSKGKVIELVAKTSLGWLWHRRLAHVGMNQLSKLSKRDLVVGLKDVKFEKDKLCSACQAEAINTACHATNRLYLHRLLKKTFYELIVGRKPNVAYFRIFGCKCYIYRKGVRLTKFESRCDEGFLLGNASNSKAYRVYNKNKGIVEETADVQFDETNGSQEGHENLDDVGDEGLMRAMKNMSIGDVKPIEVEDKPSTSTQDEPSTSATPSQAQVEVEEEKAQDPPMPPSIHTALSMDHPIDQVLGDISKGVQTRSRVASICEHYSFVSCLEPKHIDEALFDPDWMNAMHEELNSFARNKVWTLVERPRDHNVIGTKWVFRNKQDENGLVVRNKARLVAQLKDGTFVSQTKYIKDLLKRFGLEDAKPIKTPMATNGHLDLDEGVMPPRTRHSRRAPTPDPMSEPEESSGEDYAQSDEEVEANVEGASEEASRDDVSDSGEDEDEQSDEMKIDPSIQFVVNMRNPSQYTILRHHDQFLRPRVTPDPRFHTVFQKTVYEQVYVGKAFAEYKWISWRDINETPEFKSLQDLFKTVGIDRIVTLKQDYNEDLIRQFYATVWVAGDYSDMKWMSDTLQCSISRRQFRRLLNIRLDFGHDLHEAHTHNPLSIDYLSQFYEDGARYTHGKVAGLRTIPSVVNRIVRATILPRLGNNDDIWGVAWHVIDAIIQGRQFDIVSFMMQEIAISKGTFTQGIYYAPYIMRLIKDKLGAAGQNLKKHKQYKPRL

SEQ ID NO: 18996 - protein, 639 aa, Oryza sativa
  Clone ID: TF_OSC401826j.C1.p26.fg
MARALLRITRSYCPLSPSPRLPPPLHHRGAAPPLRFRFLSLSSSSAPSSSAAATANSSDGPGEKGGGGGGWDDYLGMSDDELMGQCEMGTFKASGPGGQHRNKRESAVRLRHRPTGIIAQAVEDRSQHMNRASALSRLRTLIALKGFAITGSPLTEADHHNLQLNAQAMNALFNSLSQEEFDRVNNLETAYEIWNKLSEIHEGTSEYKDAKLHFLKIQYEAFAMMLNAIVNDLKGLEAIYSDIKVAQKMLWALSDKYEHLVTFVINSDMSRMTPEEIALLARMFNDLLGRNERGKGSNSNRRRNRRPNKTFSNFRCFECGEKGHFASKCPSKDDDGDKSSKKKSGGYKLMNKLQKERKKIKAFIGQWDSNEESSASSGFEAEDSDDDASSKKKKMAVVAIKEAPSLFASLYLMAKGSFKLVSMIMRSEKEIVKFKALKKDHASFEVLYEELKTSHERLTISQEKIKEAHDTLLSITQHGAHIDVGISCDLLDDSTTCHITHVASSSISTSCDDLMDMPNSSSCDSICDASLVVENNELKDAEQYAQSEKEEEEEVKGAEEEENDDGNDDGEDDEGPLDPSIQFVLNLRNPTQYTILRHHDQFRVPRDSDDPRFHTVSEGRIIECYEVDVRAYAVFYHSA

SEQ ID NO: 18997 - protein, 463 aa, Oryza sativa
  Clone ID: TF_OSC27819j.C1.p1.fg
MASRRRASTSNEEASTPDLTTLARVMATETQLLQAIANNQGNRGGSSFGEFMRTKPPTFATVDEPMEAEDWLRIIENKLTLVRGPAGDWWDTYKEAREEDDGEPTWEEFTAAFRENFVPTAVMRMKRNEFRRLRQGNTTVQEYLNRFTQLARYAIGDLADEEEKIDKFIEGLNDELRGPMIGQDQESFQSLINKVVRLENDQRTVEHNRKRRLSMNRLPQGVPQRLKEATSSGWKTPIVATNRPAAPSKFNRSVAIQNRTPTPTLAAPGAKKNVDCLNCGEYGHYANNCPHPHKTPVRTGANAMIVRGTTTPTTGRGLFKTPQTNRTATGFGRGQVNHVRAEEAQEDQGVLMGMFSVNSTPVKVLFDSGASHSFISLKASQKHNLTLVGLRKPMIVHSPGGEITGCGVSLQPYGFDTPDPGCCHAQKFPNRIPSRMCIKIPVQDQPGYTNDNVDIQIHVLQTS

SEQ ID NO: 18998 - protein, 664 aa, Oryza sativa
  unsure (1)..(664): unsure at all Xaa locations
  Clone ID: TF_OSC420879j.C1.p2.np
MGVPRLEGYVIELHRLMRHLRYPRFPIYRVRQCGSVWEARVEVHTRVPSESDYRFPTRHRHDLPETAMQDAAREAFLRLSSIHRAELVSTEFAHHLFREESNSVCTVQDTPCCYNPIVTLLSRWAEAVDDFYEEALLEIDDQQRHMGELETEVTDLTVQQLQLEEEHQAWGSEIDSLKAQLQLGSSLETPIQVDSETEGTDTEPEIEPDITNPSEDETPVPRITFLGGPRTLSTARKSTRPPSKKPKPDPEATTSEPWGLRIIENKLTLVRVREADKVIFAVNXLEGPAGDWWDTYKEAREEDDGEPTWEEFTAAFRENFVPTAVMRMKRNEFRRLRQGNTTVQEYLNRFTQLARYAIGDLADEEEKIDKFIEGLNDELRGPMIGQDQESFQSLINKVVRLENDQRTVEHNRKRRLSMNRLPQGVPQRLKEATSSGWKTPIVATNRPAAPSKFNRSVAIQNRTPTPTLAAPGAKKNVDCLNCGEYGHYANNCPHPHKTPVRTGANAMIVRGTTTPTTGRGLFKTPQTNRTATGFGRGQVNHVRAEEAQEDQGVLMGMFSVNSTPVKVLFDSGASHSFISLKASQKHNLTLVGLRKPMIVHSPGGEITVSHACIDVPIRLRVVVFPSNLMVLIPQTLDVVIYLSKLTRRFSGIDSSRLESDLSSP

SEQ ID NO: 18999 - protein, 1052 aa, Oryza sativa
  Clone ID: TF_OSC25185j.C1.p23.fg
MSGQTGDGKDGDKGATFPYDYPSTSTSYVSTYSGKAPYFNGTDYAAWKHKMKMHLKSINPSIWRIVEKGYVLQKPEDPTKEDDENEHKNAQAANVILSALSGSEFNRVDDIESAKVIWDTLRNLHEGTDSVRESKVEILKGQFERFVMLDGESPSDMYDHLSKIVNEIKGLGSKDMTDEVVVKKMVRAITLRNSTLVTIIRERPDYKTLTPHDLLGRILAHDMLVQESKEVIQYINQSSTTSIKKEDLALKAKEEEEESRKSKSKEEIDDEEMTLFVKKFGKFMRRSGFFKGSSSKHHSNKLSGRHSARVCYVCKEPGHFIADCPYLKDGSHIKEDKMGEKKDEKKEKHKHSKRERYGQAHLGKIFGSDSESSSSDEEGIATFAVKPSSPPRLFNYSSDEDAPICLMAKEPKVPSSLKSFNVDLVSDEEDDVEDEVMDEELFKSITKESLPHLSELLGRIEDQYATLERQEALLIREKERSHELKGELAKEREKNEALVRLYKQTKESHANLEVTNAQLQERVDGLDKAYLSLEEKFETLKNSVSLPSEASCSKIVPSNEPCARCKDIDIDACATNSTSLSALQKQNEKLMGLLHNGLLKCHMGSKALKEYLGYQRDHFNHEGLGYVPPPKGKVDKSVLIKKPQGLSNFVKAKSILPNGHASHCFFDASYVLRKNASGRVVAKYVGPRGKNVSIKRVLWVPKALVTNMRGPKQEYHSGGRSWVIDSGCTNHMTGEESMFSSLDPNGSSQENIVFGDDGKGKVMGLGKITISNDLSISNVLLSLRVFSRTSFYLVDFSSTKAKHKTCLVAKSDMGWLWHRRLAYVGMRNLHKLLKHDHILGLTNVQFEKDRMCSACQAGKQIGAHHPVKNVMTTTRPLELLHMDLFGPIAYLSIGGNKYGLVIVDDFSRFTWVFFLHDKSETQAIFKKFERRAQNEFDLKIKNIRSDNGKEFKNTCIESFLDEEGIKHEFSAPYSPQQNGVAERKNWTLIEMARTMLDEYKTSDRFWAEAVNTACHAINCLYLHRLLKKTAYELLTGEEEDPSEAIKRLALGD

SEQ ID NO: 19000 - protein, 1473 aa, Oryza sativa
  Clone ID: TF_OSC29459j.C1.p2.fg
MTRRSANTGDGNQPEGSNHHHQGSPPPPPPPPPPPPPDTNAILTQILAQQANMMTAFLHHLQNPPQQNAPPPPPQHSKLAEFLRIRPPTFSSSNNPVDALDWLHAVGKKLDTVQCSDEEKVIFAAHQLQGPASLWWDHFQATQPEGQPITWARFTAAFRRTHVPAGVVALKKREFRELKQGNRSVMEYLHEFNNLARYAPEDVREDEEKQEKFLAGMDPELSVRLVSGDYPDFQRLVDKSIRLEAKHKELESHKRRLANFRNQQGANQRVRYTNPYPGGSSSQQQQQQQQPRSAPRPQFVVRVPQPPQQQSQQGTRAPRPPTPTVQPGQGRRDAQGPQRLCFNCFEPGHIADKCPKPRRQQGQAPPRPNNGGKDVIRGRVNHVTAEDMLTTPDVIVGTFLIHSIPATILFDSGASHSFISVPFVGRNQLGVERLRNPLLITTPGGVMTAKYYSPAVPIEIQGIPFPSDLILLDTKNLDVILGMNWLAQFQGVVDCARRTVTLYRGPEQPVVFFAPPTSVKSSELHQIGLSEIPIVREFGDVFPEELPGMPPKREIEFRIDLAPGTTPLYKRPYRMVANELAEVKKQLEELKEKGYIRPSTSPWGAPVIFVEKKDKTKRMCVDYRALNEVTIKNKYPLPRIDDLFDQLKGATVFSKIDLRSGYHQLRIREEDIPKTACTTRYGLYEFTVMSFGLTNAPAFFMNLMNKVFMEYLDKFVVVFIDDILIYSQSEEDHQHHLRLVLGKLREHQLYAKLSKCEFWLSEVKFLGHVISAKGVAVDPETVTAITDWKQPKTVTQVRSFLGLAGYYRRFIENFSKIARPMTQLLKKEEKFVWSPQCEKAFQTLKEKLVSSPVLILPDTHKDFMVYCDASRQGLGCVLMQDGHVVAYASRQLRPHEGNYPTHDLELAAVSDLNLRQRRWLELIKDYDVGIHYHPGKANVVADALSRKSHCNTLNIRGIPPELSQQMEALNLSIVSRGFLAALEAKPTLLDQIREAQKNDPDMHGLLKNMKQGKAVGFTEDEHGTLWNGNRVCVPDNGELKQLILQEAHESPYSIHPGSTKMYLDLKEKYWWVSMKREIAEFVALCDVCQRVKAEHQRPAGLLQPLQVPEWKWDEIGMDFITGLPKTQGGYDSIWVVVDRLTKVARFIPVKTTYGGNKLAELYFARIVSLHGVPKKIVSDRGSQFTSHFWKKLQEELGTRLNFSTAYHPQTDGQTERLNQILEDMLRACVLDFGKTWDKSLPYAEFSYNNSYQASIQMAPYEALYGRKCRTPLLWDQVGESQVFGTDILREAEAKVRTIRDNLKVAQSRQKSYADNRCRDLEFAVDDFVYLRVTPLRGVHRFQTKGKLAPRYVGPFRIVARRGEVAYQLELPASLGNVHDVFHVSQLKKCLRVPSEQADSEQIEVREDLTYVERPVKILDTMERRTRNRVIRFCKVQWNNHAEEEATWEREDELKAAHPDLFASSSESRGRDSV

SEQ ID NO: 19001 - protein, 1256 aa, Oryza sativa
  Clone ID: TF_OSC400261j.C1.p12.gm
MAGFSLISCAVGIIFFSVCYLPAAPAAALSFNYSTFSSDNQEDFTFEGNASIHDGCIDFVANGTWGRGYRPYSTGRVSYKLPVRLWDAATGEVASFTTTFSFNITPMNISDKGDGMAFFLVSYPSRMPLTADGDTLGLVSNKPENAPAGGDQFVAVEFDTYPNPGLDPNATGDHIGIDINSVRSLTTEPLTNSSLIGNMTAIVHYDSSSSILSVKLWINDTTKPPYNLSYEIVDLKKKLPENVTIGFSAATGASDELHQLTSWYFNSSSSFEHKHGRAGVVAGATVGATLFVVLLFTAAAILIRRRRIKNRKEAEDEQDISSDSEDNDGEPIVEIEMGTAPRRLPYYELVEATKNFAVEEKLGQGGFGSVYRGYLREQGLAVAIKRFAKDSSKQGRKEYKSEIKVISRLRHRNLVQLVGWCHGRNELLLVYELVPNRSLDVHLHGNGTFLTWPMRIKIVLGLGSALLYLHQEWEQCVVHRDIKPSNVMLDESFSAKLGDFGLARLIDHTIGIKTMTAMSGTPGYLDPECVITGRASAESYVYSFGIVLLEVACGRRPMSLLDSQNNGVFRLVEWAWDLYGKGDVLMAADKRLDGDYDSAEMERVIALGLWCVHPDPSVRPSIRDAMAILQSSGGQLPVLSAKMPVPMYAPPMASFDGLAVCVIYRDVVVLRCDAVVVHIDDERPCYSHLVFLDYSIPIVSVHRQSGEQVSGTSAFDVLHREKAAIRRCDFTMAGFADALRPDKFTGVHFKRWQIRVALWLTAMKCFWVSTGKPEGILAADQHKQFEKATTLFVGCILSVLGNRLVEVYMHMTNAKELWDALNTKFGATDASNDLYIMEQFHDYRMADNRSVVEQAHEEYSVEGLIVSLDVEEKAREKDAASKGDGGQSSANVVHKAQNKSKGKYKAQQTTNFKKQKKNNNNPNQDERTCFVCSQPSHLARKCPQRKGMKAPAGQTSKSANVTIGNTGDGSGYGRTGFHRPNGEWVTCFCSWCWHGRSEVYFGKDRAAEEHYWKEAVRSEMDSIIANGTWEVTERPYGCKPVGCKWVFKKKLRPDASHGLLVHQMDVKTTFLNGELDEEIYMDQPDRFVVEGQEDKASQSMRQINVYTIAMVGVKELFCASIAVAREDRRRGRQVVAVLVRPFAVAGDRRSFIAAVDPKVSSVSSSSPSPSVDLPPPFWSPVSSPCRPLRAGGLRLRPSAAVRRRACAARAVRSAEPPPLSVTSLPTSSGSSAVSRSWTVRSRPSVLDWIDLGRPSA

SEQ ID NO: 19002 - protein, 1907 aa, Oryza sativa
  Clone ID: TF_OSC400690j.C1.p5.fg
MSGQTGDGKDGDKGATFPYDYPSTSTSYVSTYSGKAPYFNGTDYAAWKHKMKMHLKSINPSIWRIVEKGYVLQKPEDPTKEDDENEHKNAQAANVILSALSGSEFNRVDDIESAKVIWDTLRNLHEGTDSVRESKVEILKGQFERFVMLDGESPSDMYDHLSKIVNEIKGLGSKDMTDEVVVKKMVRAITLRNSTLVTIIRERPDYKTLTPHDLLGRILAHDMLVQESKEVIQYINQSSTTSIKKEDLALKAKEEEEESRKSKSKEEIDDEEMTLFVKKFGKFMRRSGFFKGSSSKHHSNKLSGRHSARVCYVCKEPGHFIADCPYLKDGSHIKEDKMGEKKDEKKEKHKHSKRERYGQAHLGKIFGSDSESSSSDEEGIATFAVKPSSPPRLFNYSSDEDAPICLMAKEPKVPSSLKSFNVDLVSDEEDDVEDEVMDEELFKSITKESLPHLSELLGRIEDQYATLERQEALLIREKERSHELKGELAKEREKNEALVRLYKQTKESHANLEVTNAQLQERVDGLDKAYLSLEEKFETLKNSVSLPSEASCSKIVPSNEPCARCKDIDIDACATNSTSLSALQKQNEKLMGLLHNGLLKCHMGSKALKEYLGYQRDHFNHEGLGYVPPPKGKVDKSVLIKKPQGLSNFVKAKSILPNGHASHCFFDASYVLRKNASGRVVAKYVGPRGKNVSIKRVLWVPKALVTNMRGPKQEYHSGGRSWVIDSGCTNHMTGEESMFSSLDPNGSSQENIVFGDDGKGKVMGLGKITISNDLSISNVLLSLRVFSRTSFYLVDFSSTKAKHKTCLVAKSDMGWLWHRRLAYVGMRNLHKLLKHDHILGLTNVQFEKDRMCSACQAGKQIGAHHPVKNVMTTTRPLELLHMDLFGPIAYLSIGGNKYGLVIVDDFSRFTWVFFLHDKSETQAIFKKFERRAQNEFDLKIKNIRSDNGKEFKNTCIESFLDEEGIKHEFSAPYSPQQNGVAERKNWTLIEMARTMLDEYKTSDRFWAEAVNTACHAINCLYLHRLLKKTAYELLTGEEEDPSEAIKRLALGDVRPREPQQGASSSTQVEPRISTQADNPSTSSLDQGEEGEQVPPAPINLAHPRIHQSIQRDHPTNSILGDINKGVSTRSRIVNFCEHYSFVSSLEPLRVKEALNDPDWVMAMQEELNNFTWNEVWTLVERSRQNVIGTKWIFRNKQDEAGVVIRNKARMYFRVVLGRDKIGKADSTLFTKRHNNDIFVCQIYVDDIVFGSTNKSFSEEFSRMMTKRFEMSMMGELKFFLGLQIKQLKERTFICQTKYLKDMLKKFGMENAKPIHTPMPSNGHLDLNEQGKDVDQKGARFDLIGYADADYAGCKVDRKSTSGTCQFLGRSLVFWSSKKQNSVALSTAEAEYVSAGSCAQLLWMKQTLRDYGLNVSKIPLLCDNESAIKIANNLVQHSRTKHIDIRHHFLRDHSTSGDIDIQHCILMIKGQFKNQVYSRRGSMSSRGRSPSSKARHAIRRMSESRKDAIDAQAQASEQAAQVANVERGAPLTPRRSRVNGEGSSAPASKVRRGNPTGSSEQGQVYEELHDPIIDEVIEACAWQNLKELMGLQYPWCKEIIAQFYATVYFEPIKEKTIHWMTDGIIYSVTYAKFAAILGFPARSRTNHVKIHDEKPMDTNSLHFLYQDVDYELGTIKGLRPFYAYLNKLLHKTLYPKEGDASNVLAYTRNLLYKMKAHPQLFDAFDFIFEEIRLISMMPKRGLGYGPYIMKMIEIVSKRKFHKEVAHTGYQVRPIKAAAVPAGRTTRASSHAGPSTTVTTSDSNSSLRFFKSIFNLCKTISVWQAKERRARKKDTRRIKNLLHNANLPCSPDGSEVEDSGEDVIEDPFAAEASSSRADRGKAPLEEEEEEEGDYAEESSEEDEDSDEDE

SEQ ID NO: 19003 - protein, 1223 aa, Oryza sativa
  Clone ID: TF_OSC401006j.C1.p6.fg
MAFKAAHDRENWNGGRICKLESKVYHLQKELAELKGEAPPPAPKLRLTMVNTRTGSGSGSGSGHNEGDPTLAQVLAQQTQLINLLVHQAQNQQANNNNQPPPPQNKLADFQRVRPPTFSSTTNPPPQNKLADFQRVRPPTFSSTTNPVEAGDWLHAIEKKLDLIQCTEQEKVSFASHQLHGPAAEWWDHFRQNRAVGEPITWREFTAAFKKTHIPSGVVALKKREFRALNQGSCSVIEYLHDFNRLARYAPEDVRTDEERQEKFLEGLNDELSYALMAMEYRDFQQLVDKAIRQEDKYNRMEQKKRRAAHFKAQQAPTQNQPVRKEQGSKPGVCFNCGHPGHYADKCPKARRVKNAPVQNNSNATALKARVNHVAAAEAQNSPDVVLGTFPVSSVPATVLFDSVALQEIPIVQDYPDVFPEDLPGATVFSKINLCSGYHQLRIREEDIPKTAFTTRYGLFECIVMSFGLTNAPAFFMNLMNKVFMEYLEKFVVVFIDDILIYSKTKEEHEEHLRLALEKLREHQLYAKFSKCEFWLPEVKFLGHVISAGGVAVDPSNVESVLNWKQPKTVSEILLGLAGYYRRFIENFSKIARPVTRLLQKDVKYKWTEECEQSFQELKKRLVTALVLVLPDPRKGFQVYCDASRLGLGCVLMQDGKVVAYASRQLRSHENNYPTHDLELATVVHASKIWRHYLFGNRTEIYTDHKSLKYIFTQPDLNMRQHRWLELIKDYDMEIHYHPEAKPTLFDQVREAQVNDPDIQEIKKNMRRGKAIGYIEDEQGIVWLGERICLPDNKELNDTIMKEAHETLYSIHPGSTKMYQDLKQQFWWASMRREIAEYVALCDVCQRVKAEHRKPAGLLQPLKIPKWKWEEIGMDFITGLPRTSAGHDSIWVVVDRLTKVAHFIPVKTTYTGNKLAELYMARVVCLHGAPKKIVSDRGSQFTSKFWQKLQEEMGTRLNFSTAYHPQTDGQTERVNQILEDMLRACVLDFGGSWDKNLPYAEFSYNNSYQASLQMAPYEALYGRKCRTPLLWDQIGERQVFGTDILREAEEKVKIIQERLRIAQSRQKSYADNCRRDLTFEEGDYVYLWVTPLRGVHRFQTKGKLAPRFVGPFKRELKKCLRVPTEEADPKHIELQEDLTYVEKPIRILQFPMFRRRAFTFRKVQKRLKKVKVGCEHMVLMVVLMTIKDRFASYYCETFTMPTTSQCGQRLYLLYSMVHYGVPD

SEQ ID NO: 19004 - protein, 1535 aa, Oryza sativa
  Clone ID: TF_OSC900295j.C1.p18.fg
MAGFSLISCAVGIIFFSVCYLPAAPAAALSFNYSTFSSDNQEDFTFEGNASIHDGCIDFVANGTWGRGYRPYSTGRVSYKLPVRLWDAATGEVASFTTTFSFNITPMNISDKGDGMAFFLVSYPSRMPLTADGDTLGLVSNKPENAPAGGDQFVAVEFDTYPNPGLDPNATGDHIGIDINSVRSLTTEPLTNSSLIGNMTAIVHYDSSSSILSVKLWINDTTKPPYNLSYEIVDLKKKLPENVTIGFSAATGASDELHQLTSWYFNSSSSFEHKHGRAGVVAGATVGATLFVVLLFTAAAILIRRRRIKNRKEAEDEQDISSDSEDNDGEPIVEIEMGTAPRRLPYYELVEATKNFAVEEKLGQGGFGSVYRGYLREQGLAVAIKRFAKDSSKQGRKEYKSEIKVISRLRHRNLVQLVGWCHGRNELLLVYELVPNRSLDVHLHGNGTFLTWPMRIKIVLGLGSALLYLHQEWEQCVVHRDIKPSNVMLDESFSAKLGDFGLARLIDHTIGIKTMTAMSGTPGYLDPECVITGRASAESYVYSFGIVLLEVACGRRPMSLLDSQNNGVFRLVEWAWDLYGKGDVLMAADKRLDGDYDSAEMERVIALGLWCVHPDPSVRPSIRDAMAILQSSGGQLPVLSAKMPVPMYAPPMASFDGLAVCVIYRDVVVLRSNDVLLLVYICNVMIYLWNILNHYMPIFSTIQKPYYRRCDFTMAGFADALRPDKFTGVHFKRWQIRVALWLTAMKCFWVSTGKPEGILAADQHKQFEKATTLFVGCILSVLGNRLVEVYMHMTNAKELWDALNTKFGATDASNDLYIMEQFHDYRMADNRSVVEQAHEVQTMAKELELLKCVLPDKFVAGCIIAKLPLSWRSFGTALKYKRQEYSVEGLIVSLDVEEKAREKDAASKGDGGQSSANVVHKAQNKSKGKYKAQQTTNFKKQKKNNNNPNQDERTCFVCSQPSHLARKCPQRKGMKAPAGQTSKSANVTIGNTGDGSGFFYVYLLKTKDEALDYFKTYKAEVENQLDRKIKRLRSDRGGEFFSNEFDLFCEEHGIIHERTPPYSPESNGIAERNNRTLTDLVNAMLDTAGLPKAWWGEALLTSNHVLNRVPNRNKDKTPYEIWIGRKPSLSYLRTWGCLAKVNVLITKKRKLGPKTVDCVFLGYAHHNIAYRFLIVKSEVPDMHVGTIMESRDATFFESFFPMKDTHSSSSQPCEIIPSSITPPEQTEHTHEHVTEEDDSEAPRRSKRQRTAKSFGDDFTVYLVDDTPKSISEVYASPDADYWKEAVRSEMDSIIANGTWEVTERPYGCKPVGCKWVFKKKLRPDASHGLLVHQMDVKTTFLNGELDEEIYMDQPDRFVVEGQEDKVCKLLKSLYGLKQAPKQCHEKFDRTLTSVGFAVNEADKCVYYRHGGGEGVILCLYVDDILIFGTNFEVINEVKSFLSQKFDMKDLGVADVILNIKLIRGENGITLLQSHYVEKILNRFGYIDSKPSPISYDPSLLLRKNKRIARNQLEYSQIIGSLMYLASATSLISPLL

SEQ ID NO: 19005 - protein, 1786 aa, Oryza sativa
  Clone ID: TF_OSC400299j.C1.p17.fg
MARGVARAASFGGRAATARWCSYRRITVAVCLGNLVAALLVLRSLTSLAPTPPKREEVVEYTEEQIRKAEESIRIRREAEPVELVEAVKNLRKIFRREEKRRKELPLELKQKVSYEIVQLLLDLGDNSSFAQQRARLSSQPAAAPAAPPSPFPPPSPRSSPPEVRHFRRSVASSTRRQQDAELAAAEERRRATAQTAAAAARAARLAAAELAAARAEAEAEVAEDAARAAEVEVETLRSSINGSIAGDITADRELEELARGRARERAERWAAAHLHGGGGGQRDRAPADGNPDGRGRVGGSTEPARCPRRQRDSLSLDRRHGHHGVQTVVRDFGPGGGWPTLTKTNYIEWAAVMRVRLQVRHMWEAVWYGDVDYDEDRRALDALIATVPPEMQFSLSQKRTAKEAWDAIAAARICSDRARKSTLQALRKEWENMAFKPEKYRQIARSIESQLDLSTMSIEEALGRLKVVDGDEPQPLSGPITIGGKLHLTRDQWEASQGDGRKGESSSPTGGRKLRKVRGGVQLRWARRRAEGGARRGAQGGATGNHKPARDDAYRNCGKLGHWAKDCRQPRRGQAHVARVEEEEPALLLAHASIELPPTAPAAAVFLHLDEPKVLVSLCNGSSNDKADGWYLDTGATHHMTGRREFFTEFDSSVRGSVKFGDASGVEIKGVGSVTFTAKSGEHRLLTGVYYIPALRNSIISVGQLDENGSRVLVEDGLMRIWDRRRRLLAKVAQPVCLAARRDDEAWQWHERFGHLHFEALKRLNAKEMVRGMPCLDHVEQLCDVCVVTKQRRLPFPQQTSFRAKERLELVHGDLCGPVTPATPGGRRYFLLLVDDLSRYMWVMVLDSKGEAADAIRRAQAAAEAECGRKLRVLRTDNGGEFTAAEFASYCADEGIQRHYIAPYSPQQNDVVERRNQTVVGMARALLKQRGMPAIFWGEAVVTAVYILNRSPTKTLDGRTPYEAWHGRKPAVSHLRVFGYLAFAKELGHIGKLDDRSTPGVFIGYAEGSKAYRILDPETHRVRTARDVVFDEGRGWVWDKAVDDGSTPTYDDFTIEYVHFEGAGGVGSSSSPSVSTPVPEPPPTPTSTHPRATTSTTTSSSPTPPQPVTPRTPAPTATPPGTYTQTPARVERSPVEFATPLSHDGERIDAYHDGEQLRYRTMEDLLGDQPVPGLVPRDLEAQLHLACDDGEPRSFAEAEKHAAWRAAMQSEMDAVQENRTWELVDLPRGHRTITLKWVFKLKRDEAGAIVKHKARLVARGFVQQEGIDYDDAFAPVARMESVRLLALATQEGWGVHHMDVKSAFLNGDLKEEVYVHQPPGFVIPGKEGKDAEVAAFKEEMKATFQMSDLGPLSFYMGIETAYAKRIVELAGLTDCNPALTPMEERLKLSRDSTTEEVDATQYRHLVGSLRYLTHTRPDLAFSVGYVSRFMQRPTTEHQQAVKRIIRYVAGTLDHGLYYPRCPGKAHFIGCEAEYMAAFAASTQALWLARLLSDLLGRDTGAVELRVDSKSALALAKNPVFHEQSKHIRVRYHFIRSYLEEGSIKASYINTKDQLADLLTKPLGRIKLGGCSNRLAASYGYIYVSNLPREEAVESWRFEKLKDIKSASIQNSTKLDLSNEEARTLKRALQFNWHVLLEDIGLWIPSEVSHTEHDDKPENEPEEEEIIAGPPLPSQCNAELHTDYDGAAVRWGLTHPKESAADCCQACLDQAKNARPGELRCNIWVYCPSEFGCFSPDKYEHKHQECWLKQADHPKLNFKDKYSESYRDSHPTAPVVVPWMSGVISA

SEQ ID NO: 19006 - protein, 1515 aa, Oryza sativa
  Clone ID: TF_OSC400321j.C1.p53.fg
MSGQAGDGNDGDKGVKIPYDYPPTSTSYVSTYSGKAPYFNGTDYAAWKHKMKMHLKSINPSIWRIVEKVYVLQNPEDPTKEDDENEHKNAQAANAILSALSGSEFNRVDGIESAKMIWDTLRNLHEGTDSVRESKVEILKGQFERFVMLDGLGSKDMTDGVVVKKMVRAITPRNSTLVTIIRERPDYKTLTPHDLLGRILAHDMLMQESNDVIQYINQSSTTSIKKEDLALKAKEEEEENRKSKSKAEIDDEEMALLVKKFGKFMRRSGFFKGGSSKHYSNKSSGKHSARVCYVCKEPGHFIADCSHLKDGSHIKEDKKKGEKKEKHKHSKQEHYGQAHLGMIFGSESESSSSDEGVATFAVKPSSPPRLFDYSSDEDAPICLMAKKPKVPSPPKSFNVDLVSDEEDEVMDDELFKSITKESLPHLSELLGRIEDQYATLERQEVLLIREKERSHELKSELAKEREKNEALQNEKLMRLLHNGLLKCHMGSKALKKYLGYQRDNFNHEGLGKNDSGRVVAKYVGPRGENISIKRVLWVPKALVTNMRGPKQEYVSGGRSWVIDSGCTNHMTGEESMFSTLDPNGTSQDNIVFRDDGKGKVMGLVAKSNTRWLWHRRLAHVGMRNLHKLLKHDHILGLTNVQFEKDRVCSACQAGKQIGAHHPVKNVMTTSRPLELLHMDLFRPIAYLSIGGNKYGLVIVDDFSRFTWVFFLHDKSETQAIFKKFARRAQNEFDLKIKNIRSDNGKEFKNTCIESFLDEEGIKHEFSAPYSPQQNGVAERKNRTLIEMARTMLDEYKTSDRFWVEAVNTACHAINRLYLHRLLKKTLYELLTGNKPNVSYFRVFGSKCYILNKKARSSKFAPKVDEGFLLGYGSNECAYHVFNKTSGIVEIACDVTFDETNGSQVEQVDSHVLGEEDPSEAIKRLALGDVRPREPQQGASSSTQVEPPTSTQADDPSTSSLDQGEEGEQVPPSPINLACPRIHQSIQRDHPTDNILGDINKGVSTRSRIANFCEHYSFVSSLEPLRVEEALNDPDWVMAMQEELNNFTRNEWIFRNKQDEAEVVIRNKARLVAQGFTQIEGLDFGETFAPVARLESIRILLAFATNLNFKLYQMDVKSAFLNGPINELVYVEQPPGFKDPKYPNHVYKLHKALYGLKQAPRAWYECLRNFLVKNGFEIGKADSTLFTKRHDNDIFVCQIYVDDIIFGSTNKSFSEEFSRMMTKRFEMSMMGELKFFLGLQIKQLKEGTFICQTKYLKDMLKKFGMKNAKPIHTPMPSNGHLDLNEQGKDVDQKVYRSIIGSLLYLCASRPDIMLSVCMCARFQATPKECHLVAVKRILRYLVHTPNLGFWYPKGARFDLIGYADADYAGCKVDRKSTSGTCQFLGRSLVSWSSKKQNSVALSTAEAEYVSAGSCCAQLLWMKQTLRDYGLNVSKIPLLCDNESTIKIANNPVQHSQTKHIDIRHHFLRDHSTKGDIDIQHVRTDKQLADIFTKPLDETRFCELRSELNILDSRNVA

SEQ ID NO: 19007 - protein, 337 aa, Oryza sativa
  Clone ID: TF_OSC11150j.C1.p2.gm
MASVQQVRAAAVKNAPTVDIPIVPLATSKLPEFLRVRPPTFSSTTNPMEANDWLHAIEKKLNLLQCNDQEKVAFATHQLQGPASTWWDNHMATRPPGTEVTWAEFCRSFRKAQVPDGVVPQKKREFWALHQGNRTVTEYLHEFNRLARYAPEDVRIDAEKQEKFLAGLDDELTNQLISGDYADFEKLVDKAIRQEDQHNKMDRKRKAAQFRSNQGSHQRPRFAPGQQGGPTTMIVRQHRPFNTSSFHQGASGSQNHQGGQPNRSTAPRPPMAPAQSAPSAQAKKETGAKPGSCFNCGEHGHFADKCPKPSRAGARFAQARVNHASAEEAQAAPEVVL

SEQ ID NO: 19008 - protein, 1177 aa, Oryza sativa
  Clone ID: TF_OSC13105j.C1.p1.fg
MIVRQHRPFNSSSFHQGASGSQNHQGGQPNRSAAPRPPLAPAQSAPSAQAKKETGAKPGSCFNCGEHGHFADKCPKPRRAGPRFAQARVNHASAEEAQVAPEVVLGTFPVNSIPTTVLFDSGATHSFIGKKFVGIHGLIREELSTPMRVHTLGNSSTSVQFSPSITIEIQRSPFLANLILLESKDLDINLGMDWLTKFKGVIDCVNRTVTLTNEKGETVVYKSPVSPKQGVSLNQIEVEIPVVTEEKSSRKLEDIPIVCKYPEVFPEDLTTMPPKREIEFRIDLAPGTAPIYIRPYRMAANELAEVKKQVDEQLQKGYIRPSTSLWGAPVIFVEKKDKTKRMCVDYRTLNEVTFKNKYPLPRIDDLFNQLKGAKVFSIIDLRSGYNQLRIWEEDIPKSAFTTWYGLYECTVISFGLTNAPAFFMNLMNKVFMEFLDKFVVVFIDDILIYSKSEEEHEQHLLLVLEKLKEHQLYAKFSYYRRFIENFSRIARPMTQLLKKDEKFKWTAECDKSFEELKKRLVSAPVLILPDQTKDFQVYCDASRHGLGCVLMQDGRVVAYASRQLRPHEGNYPTHDLELAAVVHALKIWRQYLIGNHCEVYIDHKSLKYIFTQPDLNLRQRRWLELIKDYDMSIHYHPGKANVVADALSRKSYYNALCTEGMCKELQQELERLNMGIVEHGFVAALEARPTLVDQVRAAQVNDPEIAELKKNMWVGKARDFLEDEHGTICMGERLCVPDDKELKDLILTEAHQTQYSIHRGSTKMYQDLKENFWWASMRREIAEFVALCDVCQRVKAEHQRPAGLLQPLQIPEWKWEEIGIDFITGLPRTSSGHDSIWVVVDRLTKVAHFIPVHTTYTGKRLAELYLSRIMCLHGVPKKIVSDRGSQFTSKFWQKLQEELGTRLNFSTAYHPQTDGQTERVNQILEDMLRACALDFSGAWDKSLPYAEFSYNNSYQASLQMAPFEALYGRKCRTPLFWDQIGESQLFGTEVLTEAEEKVRTVRERLRIAQSRQKSYADNRRRELTFEAGDYVYFRVTPLRGVHRFQTKGKLAPRFVGPYKILERRGEVAYQLELPPKMISIHDVFHVSQLKKCLRVPEEQADSEEHIDIQEDLTYVEKPVCILETSERRTRNKVTRFCRVQWSHHSEEEATWEREDELKAAHPHLFTGSSESRGRDSV

SEQ ID NO: 19009 - protein, 913 aa, Oryza sativa
  Clone ID: TF_OSC13112j.C1.p1.fg
MIVRQHRPFNSSSFHQGASGSQNHQGGQPNRSAAPRPPLAPAQSAPSAQAKKETGAKPGSCFNCGEHGHFADKCPKPRRAGPRFAQARVNHASAEEAQVAPEVVLGTFPVNSIPTTVLFDSGATHSFIGKKFVGIHGLIREELSTPMRVHTLGNSSTSVQFSPSITIEIQRSPFLANLILLESKDLDINLGMDWLTKFKGVIDCVNRTVTLTNEKGETVVYKSPVSPKQGVSLNQIEVEIPVVTEEKSSRKLEDIPIVCKYPEVFPEDLTTMPPKREIEFRIDLAPGTAPIYIRPYRMAANELAEVKKQVDEQLQKGYIRPSTSLWGAPVIFVEKKDKTKRMCVDYRTLNEVTFKNKYPLPRIDDLFNQLKGAKVFSIIDLRSGYNQLRIWEEDIPKSAFTTWYGLYECTVISFGLTNAPAFFMNLMNKVFMEFLDKFVVVFIDDILIYSKSEEEHEQHLLLVLEKLKEHQLYAKFSYYRRFIENFSRIARPMTQLLKKDEKFKWTAECDKSFEELKKRLVSAPVLILPDQTKDFQVYCDASRHGLGCVLMQNGKVVAYASRQLRPHEGNYPTHDLELAAVVHALKIWRQYLIGNHCEVYIDHKSLKYIFTQPDLNLRQRRWLELIKDYDMSIHYHPGKANVVADALSRKSYYNALCTEGMCKELQQELERLNMGIVEHGFVAALEARPTLVDQVRAAQVNDPEIAELKKNMWVGKARDFLEDEHGTICMGERLCVPDDKELKDLILTEAHQTQYSIHRGSTKMYQDLKENFWWASMRREIAEFVALCDVCQRVKAEHQRPAGLLQPLQIPEWKWEEIGIDFITGKRLAELYLSRIMCLHGVPKKIVSDRGSQFTSKFWQKLQEELGTRLNFSTAYHPQTDGQTERVNQILEDMLRACALDFSGAWDKSLSIL

SEQ ID NO: 19010 - protein, 493 aa, Oryza sativa
  Clone ID: TF_OSC14148j.C1.p1.fg
MPRYKPEYLFGVEGFVQELRTMSFVIGFGTAPFYAQIPHDRHEEKCRVKVTLNSNSEEEVARIAIGELRDRYSDQLADTEYRYHPRQPQGSDRGSYLETEGIENDATTRHLVEMLWAMDESRAETVLAAQDREDRNRGKICKLEDKVDRLEKELAALKGEAPPQKARIRLTARKRALFVPRYQLAPKMVNTRSNGNGPNNPNNNNGENPTLAQVLAQQTQLMNMMMQQLQNQQNQGNNHVPPQNKLAEFLREKVSFASHQLHGPASEWWDHFRLNRTTAEPITWLEFTAAFRKTHIPSGVVSLKKKEFRSLTQGSRSVTEYLHEFNRLARYAPEDVRNDEERQEKFLEGLNDELSYPLMTGDYHDFQKLVDKAIRQEDKYNRMEQKKRRIAQFKTQQGNNQKPRLTLRPQSMPHGGSSFVVRPQRQFFNNNAGNNIRNQAPRPVAAPTQQQPAKREQGSKPVVCFNCGDPRHYADKCPKPRRVKAVPTQSNCT

SEQ ID NO: 19011 - protein, 1462 aa, Oryza sativa
  unsure (1)..(1462): unsure at all Xaa locations
  Clone ID: TF_OSC26121j.C1.p1.np
AMMQQMLQQHQQMHQRMXQQVEQXQQQFGPPPPQSKLPKFLRVSPPTFSSTTNPMEANDWHAIEKKLNLLQCNDQKKVTYATHQLQGPSSAWWDNHMATRPPGTEVTWAEFCRSFRKAQVPDGVVAQKKREFXALHQGNRAVTEYLHEFNRQARYAPEDVRTDAEKQEKFLAGLDDELTNQLISRDYADFEKLVDKAIRQEDQRNKMDRKRKAAQFRSNQGSHQRPRFTPGQQGGPTTMIVHQYRPFNSSSFHQVASGSQNHPGGQPNRSAAPRPPMATAQAAPSVQAKKETGVKPGSCFNCGEHGHFADKCPKLRRAGPRFAQARVNHASAEEAQAALEVVLGTFPVNSIYATVLFDSGATHSFISKKFIGEHGLIREELSTPIRVHTPGNSSTSVXFSPSVTIEIQISPFLANLVLLESKDLDVILGMDWLTKFKGIIDCANRTVTLTNERGETVVYKSPVALKQGISLNQIEVENSVVTAEKSSRKLEDIPIVCEYSEVFPEDLTTMPPKREIEFRIDLAPGTAPIYKRPYRMAANELAEVKKQVDEQLQKGYIRPSTSPWGAPVIFVEKKDKTKRMCVDYRALNEVTIKNKYPLPRIDDLFDQLKGAKVFSKIDLRSGYHQLRIREEDIPKTAFTTRYGLYECTVMSFGLTNAPAFFMNLMSKVFMEFLDKFVMVFIDDILIYSKSEEEHEQHLRLVLEKLKEHQLYAKFSKCDFWLSEVKFLGHVITAQGVAVDPSNVESVTKWTPPKTVSQIRSFLGRAGYYRRFIENFSRIARPMTQLLKKDEKFKWTAECDKGFEELKKKLVSALVLNLPDQTKDFQVYCDASRHGLGCILMGRVVAYASRQLRLHEGNYPTHDLELAAVVHALKIWRHYLIGDRCEVYTEHKSLKYIFTQPDLNLRQRRWLELIKDYDMSIHYHPGKANVVADALSRKSYCNALCTEGMCKELQQELKHLNLGIVEHGFVAALEARPTLVDQVRAAHVNPEIAELKKNMRVGKARDFHEDEHGTIWLGERLCVPDDKELKDLILTEAHQTQYSIHPGSTKMYQDLKEKFWWASMRREIAEFVALCDVCQRVKAEHKRPAGLLQPLQIPEWKWEEIGMDFITGLPRTSSSHDSIWVVMDRLTKVAHFIPVHATYTGKRLVELYLSRIMCLDGVPKKIVSDRGRXFTSKFWQKLQEELGTRLNFSTAYHPLTDGQTESVNQILEDMLRACALDFGGAWDKSLPYAEFSYNNNYQASLQMAPFEALYGRKCRTPLFWDQTGKRQLFGTEVLTEAEEKVRTIRERLRIAQSRQKSYADNRRRELTFEAGDYVYLRVTPLRGVHRFXMKGKLAPRFVGPYKIFERRGEVAYQLELPSNMVGIHDVFHVSQLKKCLTVPEEQADSEHIDIQEDLTYVEKPVHILETSERRTRNKVTRFCRVQWSHHSEEEATWEKEDELKAAHPHLFTSSSESRGRDSV

SEQ ID NO: 19012 - protein, 395 aa, Oryza sativa
  Clone ID: TF_OSC31965j.C1.p1.fg
MAPTAQQGVSKALKGVKPAKIEDDDWEEMQLQAAATIRLCLSDRVMYHVMEETSPKIIWKKLEAQFMSKTLTNKLYLKQKLYGLKMQEGADLTAHVNVFNQLVTDLVKMDVEVDDEDKAIVLLCSLPKSYEHVVTTLTYGKETIKTKDITSALLARDQMRKNKEGETSQAEGLLVKEDHAGHKVKKNKKKKMVQCFRCDEWGHISRECPTLKGKAKANTVTSSNDSDSDGCDFLTMSSAQSKDAEAWILDSASLFHMTPRKEWFSSYKSGEFGFVYLGDDTSYPAMGVGEVKIKLEDGGEHVLQGVRHVPGLKRNLISLGTLHEEGLIFRGNRNRKTIEIMNGKMAVMTGEKVESHLYKLRGCTVAGGVQEEAVAGIAIAFGGGGSGADSSGGLQ

SEQ ID NO: 19013 - protein, 1212 aa, Oryza sativa
  unsure (1)..(1212): unsure at all Xaa locations
  Clone ID: TF_OSC400481j.C1.p8.np
MINTRNGSRAAGEGSNGEERTDGGHPNSASSNGPPPLLENPILAQVMAHQTQMMEAMMQQMQHQHQXMHQRMQQQAEQQQQQFGPPPPLSKLPEFLRVRPPTFSSTTNPMEANDXLHAIEKKLNLLQCNDQEKVAFATHQLQGPASAWWDNHMATRPPGTEVTWAEFCCSFRKAQVPDGVMAQKKREFRALHQGNRTVTEYLHEFNRLARYAPEDVRTDALKQEKLLAGLDDERTNQLISRDYADFEKLVEKAIRQEDRRNKMDRKRKTAQFRSNPRSHQRPRFTSGQQGGPTIMIVHQHRPFNSSGFHQGASGSQNHQGGQPNCNAAPHPPMAPAQSAPSAQAKKETGAKPGSCFNCGEHGHFADKCPKPTRAGPRFAQARVNHASAEEAQAAPEVILGTFPVNTIPATVLFDSGATHSFISKKFAGVHGLRKEELSTPMRVHTPGNSSTSVSYSPSVLIEIQRSPFLANLILLESKDLDVILGMDWLTKFKGVIDCVNRTITLTNEKGEAVVYKSPVSLKQGISLNLIEVKNPVATEEKSSRKLEDIPIVCEYPEVFPEDLTTMPPKREIEFRIDLAPGTAPIYKRPYRMAANELVEVKKQVDEQLQKGYIRPSTSPWGAPVIFVEKDNTKRMCVDYLALNEVTIKNKYPLPRIDVLFDQLKGTKVFSKIELRSGYHQLRIREEDIPKTAFTTRYGLYECTVMSFGLTNAPAFFINLMNKVFTEFRDKFVVVFIDDILIYSKSEEEHEQHLRLVLEKLQEHQLYAKFSKCDFWLSEVKFLGHVITAQGVAVDLSNVESVTKXTPPKTVSQIRSFLGLASYYRRFIENFSRIARPRTQLLKKDEKFKWTAECDKSFEELKKKLVSAPVLILPDQTKDFQIYCDASRHGLGCVLMQEGRVVAYASRQLRPHEGNYPTHDLELAAVVHALKIWRLIGNRCEVYTDHKSLKYIFTQPDLNLRQRRWLELIKDYDMSIHYHPGKANVVADALSRKSYCNALCTEDMCKELQQELEHLNLGLVEHGYVAALEARPTLVDQVRAAQVNDPEIAELKKNMRVEKARDFHEDEHSTIWLGERLCIPDDKELKDLILTEAHQTHYSIHPGGTKMYQDLKEKFWWVSMRREIAEFVALCDVCQRVKAEHQRPAGLLQPLRIPEWKWEEIEMDFITGLPRTSSGHDSIXVVVDRLTKVAHFIPVHTTYTGKKLAELYLARIT

SEQ ID NO: 19014 - protein, 772 aa, Oryza sativa
  Clone ID: TF_OSC400588j.C1.p3.fg
MAAAGVPRAGTGGRRPEGPGEDKGKVRNGIGAPSGGNRQPEGRGGRTEPGRGGVGAATAGGVGGIVGCGWRFWKGEVGDEEDVGRRGPTAGGLVRGVEKEGGNGSVVGRLRRPWRREGYIRCILPARSISCLVGDIQDSHSSDEPNNWTVFWEGFISAHIPPGLMEIKKKEFLNLKQGNMTFMEFMERFNYLGRYVAADMNTEAKKVELCRDRLAPELNHAITAHEITSMKSLVEKALRVESSEKEVVEDRKRKWAAKKFASGSSSTRPRLAPSPVVRPMAPQPPRQMYVPPRPQTQIVRQVPRTVQAAGDASRNDNVACYNCGKKGHYSPNCPYPKTGKSGPHTQGAPQRRNVADEFAEHLPTWKWWQYVDYPRHGLQSELQSEYLSSCTQDLDSNWQLLDLYELENSERTHPSLACGVGNTQSLEMRPHALLRVHPNHKLESKGVIHGSKILVYTAQPYKLGEMNSVQEKRNDTPEKCEGFLIKLGSYWSKRVKSSPPHLDTLKKAAGKGKAIGKVQGTLLAPKKLDLGKTPSAHPKPPTEFTLDMPLVRDDVLVKMGPACKELHGYCMERSNARRKNRETSMTGYYDRQPFLGPEAFIAIDFKDLWDLYRVRLTWKHVCRHAPHVALLDLAVINETIINSDRANMVEYIKDCLWYHQDKEFIMCAYNQQRHWILLVIVRKWNLVYYLNSNIKKDICDWSAIEAALNNAWDQYVAKGGWHKEGHPTLGHKKDFPMHQQVGDQCGFHVWHNMRSFAKKVTLLDLEAWLAKA

SEQ ID NO: 19015 - protein, 255 aa, Oryza sativa
  Clone ID: TF_OSC400774j.C1.p33.fg
MTPTDLVKMDVEVDDEDKAIVLLCSLPESNEHVVTTLTYGKDTIKTKYITSVLLARDQLRKNKEGETSQAEGLLVKEDHVGRKVKKNKKKKMVQCFRCDEWGHISRECPTLKEKAKANAVTSSNDSDSDGCDLLTMSRDDISYPAVRVGEVKIKLEDGGEHILQGVRHVAGLKRNLISLGTLHKDGLIFHGNRNRKTMEIMMGKTTVMTGEKVESQLYKLRGCIVAGGVYEEAVAGIAIAFGGGGSGADSSGGLR

SEQ ID NO: 19016 - protein, 538 aa, Oryza sativa
  Clone ID: TF_OSC401054j.C1.p79.fg
MVCMRDNFIGSGSRQFHGSTQLNSISFPRQPLKDQPQPQVMANQTQTVEELLQQMRHRYQIYLMQQMQRQCQEPRQVHQPQMQVQVPARNLNQSQSQEFPTSAPKTPVKMRSRYPKITIAKSTSDQRKVSASCYDCGEQDHYVRNCPWKVFARSPEKYKKQCPGSNQAPSQSTDQKDEFTPEDAARIPKRQRGRNTFRGARQLTRHLIKYGPPRPEDDISGERFSTDDDDDDDDDDDDDDDEDEATLNSFMERGLEFKACTRCGIVEHTASLCLPTCRCGEYTHYSDECPLRKVTCFLCEGTDHVPKDCQRNSVLALTKKEQGTTVQPIRQPMAVDDISHNPSALPPIPAPVEANHGRSNVARDVHKSLLVPVSAVNVHNQKLAPQDQASRFCLNCLTSTAHDTNRHLNVQPPPQRIIVKGTVRGRIVPPAIVSSLQHQRQQGKQCQENNSSLQLQRGSTLLRQHPQQVLSAPGQPTAVNSSNAPCIAPIRRPICKSPLGNPMSKKIPSAIAVKRIAIPSLKINAQSNVSDATSGSRN

SEQ ID NO: 19017 - protein, 1044 aa, Oryza sativa
  Clone ID: TF_OSC401847j.C1.p5.fg
MAHCGELCCVRGIVTVPFQEIPGVTRSSSSTSRSSRSARSSSSGSGSRSSVSSGVRSLLLSSVSRQGSSQWQRRWSTSGMAAAQPVRAAMAKSTPTVDIPTAPLAMGNRAVTEYLHEFNRQARYAPEDVRTDAEKQEKFLAGLDDELTNQLISRDYADFEKLVDKAIRQEDQRNKMDRKRKAAQFRSNQGSHQRPRFTPGQQGGPTTMIVHQYRPFNSSSFHQVASGSQNHPGGQPNRSAAPRPPMATAQAAPSVQAKKETGVKPGSCFNCGEHGHFADKCPKLRRAGPRFAQARVNHASAEEAQAALEVVLEIQISPFLANLVLLESKDLDVILGMDWLTKFKGIIDCANRTVTLTNERGETVVYKSPVALKQGISLNQIEVENSVVTAEKSSRKLEDIPIVCEYSEVFPEDLTTMPPKREIEFRIDLAPGTAPIYKRPYRMAANELAEVKKQVDEQLQKGYIRPSTSPWGAPVIFVEKKDKTKRMCVDYRALNEVTIKNKYPLPRIDDLFDQLKGAKVFSKIDLRSGYHQLRIREEDIPKTAFTTRYGLYECTVMSFGLTNAPAFFMNLMSKVFMEFLDKFVMVFIDDILIYSKSEEEHEQHLRLVLEKLKEHQLYAKFSKCDFWLSEVKFLGHVITAQGVAVDPSNVESVTKWTPPKTVSQIRSFLGRAGYYRRFIENFSRIARPMTQLLKKDEKFKWTAECDKGFEELKKKLVSALVLNLPDQTKDFQVYCDASRHGLGCILMRAEWSLMPHGSCVCMKETIQHMTWNWQRGTAYARGSSQSSSCKYPEIAELKKNMRVGKARDFHEDEHGTIWLGERLCVPDDKELKDLILTEAHQTQYSIHPGSTKMYQDLKEKFWWASMRREIAEFVALCDVCQRVKAEHKRPAGLLQPLQIPEWKWEEIGMDFITDGQTESVNQILEDMLRACALDFGGAWDKSLPYAEFSYNNNYQASLQMAPFEALYGRKCRTPLFWDQTGKRQLFGTEVLTEAEEKVRTIRERLRIAQSRQKSYADNRRRELTFEAGDYVYLRVTPLRGVHRF

SEQ ID NO: 19018 - protein, 1558 aa, Oryza sativa
  Clone ID: TF_OSC418835j.C1.p1.fg
MADHPPNHREEGMDDFVAELARMTMVVGYHNAPEYSTVPPLSGELPYRVRLEVHGYVGTCLANMVVEASGGTADHACQEAAYLMMARLRERHNYIFCNTAYRFHPRRASGGGVSTFRPTAGENDTTFGHMCAVMRGMDRMHSDMHKASKALNDGKLVRIIALKDEIARLKKENAQLKGLPIPGGVRIRTTPRKSMTAPVRIQLAPRNPPPPAAPAAPLVPPAVPAAPAAPAPVPAPVPVSAPCVRSLLRSSISRQGSSQWQWRLVACYSQWQPRPQQQQFSGSESGSGETFVRLWMVNTRNGSRAVGEGSNGEERTNGGHPNSASGNGPPPLPENPTLAQVRRSLRQSSIVALGRRRCPTGSWHKRREFRALHQGNRTVTEYLHEFNRLARYAPEDARTDAEKQEKFLAGLDDELTNQLISGDYADFEKLVDKAIRKEDQRNKMDGKRKAAQFRSNQGTPSAQAKETGAKPGSCFNCGEHGHFADKCPKPRRARPRFSQARVNHASAEEAQAAPEVILGTFPVNLVPATVLFDSGATHCFISKKFVGMHGLRKEELSTPMRVHTPGNSSTSVSYSPSVLIEIHRSQFLANLILLESKDLDVILGMDWLTKFKGVIDCANRTVTLTNEKGETVVYKSLVSPKQRISLNQIEVEIPVTTEEKSSRKLEDIPIVCEYPEVFPEDLTSMPPKREIEFRIDLAPGTAPIYKRPYRMAANELAEVKKQVDEQLQKGYIRPSTSPWGAPVIFVEKKDKTKRICVDYRALNEVTIKNKYSLPRIDDLFHQLKGAKVFSKIDLQSGYHQLRIREENIPKTAFTTRYGLYECTVMSFGLTNAPAFFMNLMNKVFMEFLDKFVVVFIDDILIYSKSEEEHERHLCLVLEKLKEHQLYAKFSKCDFWLSEVKFLGHVITAQGVAVDPSNVESVTKWTPPKTVSQIRSFLGLCDKSFEELKKKLVSAPVLILPDQTKDFQVYCDASRHGLGCVLMQEGRVVAYASRQLRPHEGNYPTHDLELAAVVHALKIWRHYLIGNRCKVYTDYKSLKYIFTQPDLNLRQRRWLELIKDYDMSIHYHPGKANVVADALSRKSYCNALCTEGMCKELQQELEHLNLGLVEYGYVAALEARLTLVDQVGVAQVNDPEIAKLKKNMRVGKARDFHEDEHGTIWLGERWCVPDDKELKDLILIEAHQTQYSIHPGSTKMYQDLKEKFCWVSMRREIAEFVALCDVCQRVKAEHQRPAVHTTYTGKKLAELYLARIMCLHGVPKKIVSDRGSQFTSKFWQKLQEELGTRLNFSTAYHPQTDDQTERVNQILEDMLRACALDFGGAWDKSLPYAEFSYNNSYQASLQMAPFEALFGRKCRTPLFWDQTGERQLFGTEVLMEAEEKVRTVRERLRVAQSQQKSYADNRRRELTFEAGDYVYLRVTPLRGVHSFQTKGKLALRFVGPYKILERRGEVAYQLELPSNMIGNHDVFHVPQLKKCLRVPEEQADSEHIDIQEDLTYVEKPVRILETNERRTRNKVTRFCRVQWSHHSKEEATWEREGELKAAHPHLFTSSSESRGRDSV

SEQ ID NO: 19019 - protein, 402 aa, Oryza sativa
  Clone ID: TF_OSC900205j.C1.p17.fg
MALTDHGQRFVSSTRSFKGFEGVKQAKMEDDDWEEMQLQAAATIRLCLSDQVMYHVMEKTSPKIIWEKLEAQFMSKTLTNKLYLKQKLYGLKMQEGADLTAHVNVFNQLVTNLVKMDVEVDDEDKAIVLLCSLPESYQHGVTTLTYDKETIKTKDITSALLARDQMRKNREGETSQAEGLLVKEDHAGHKIKKNKKKKMVQCFRCDEWGHISRECPTLKGKAKANTVNSSNDSDSDGCDLLTMSSAQYKDAEACILDSASSFHVTPRKEWFSSYKSDEFGFVYLGDDTSYPAVGVGEVKIKLEDGGEHVLQGVRHVPGLKRNLISLGTLHEEGLIFRGNRNKNTMEIMKGKTTMMTGEKVESQLYKLRGCTIAGGVQEEAVAGIAIVFEDGRSGADSSSGLW

SEQ ID NO: 19020 - protein, 841 aa, Oryza sativa
  unsure (1)..(841): unsure at all Xaa locations
  Clone ID: TF_OSC900213j.C1.p8.np
TASENDTTFSHMCAVMRGMDRMHSDLHKASKALNDGKLVRIIALKDEIARLKKENAXLKGLPAPGGVQIRTTPRKSTNAPVRIQLAPRNPPPPAAPPAPPAVPAAPAAPAPAPASALSFAPASAAPASALSFAPASAARGPASGNRGCSLQMVNTRNGSRVAGEGSNGKECTDGGYPNSASGNGPPPLPENLTLAQVMAHQTQMMAAMMQQMQQQHQQMHQRMXQQAEQQQQQFGPPPPQSKLPEFLRVRPPTFSSTTNPMEANDWLHDIEKKLNLLQCNDQEKVAFATHQLQGPASAWWDNHMATRPPGTEVTWAEFCRSFRKAQVPDGVVAQKKREFRALHQGNRTVTEYLHEFNRLAXYAPEDVRTDAEKQEKFLAGLDDELTNQLISGDYADFEKLHRPFNSSSFHQGASGSQNHPGGQPNRSASPRPPMATAQAAPSVQAKKETGAKPGSCFNCGEHGHFADKCPKPRRAEPRFAQARINHASVEEAQAAPEVVLGTFPVNSISAKVLLDSGATHSFISKKFVGVHGLIREELSTPMQVHTPGNSSTSVQFSPSVTIEIQRSPFLANLILLESKDLDVILGMDWLTKFKGVIDCANRTVTLTNEKGETVVYKSPVALKQGISLNQIEVENPVVTEEKSSRKLEDIPIVCEYLEVFLKDLTTMPPKREIEFRIDLAPGTAPIYKRPYRMAANELAEVKKQVDEQLQKGYIXPSTSPWGAPVIFVEKKDKTKRMCVDYRALNEVTIKNKYPLPQIDDLFDQLKGARVFSKIDLXSGYHQLMIREEDILKTAFTTRYGLYECTVMSFGLTNTPAFFMNLMNKVFMEFXDEXKIIFIVDR

SEQ ID NO: 19021 - protein, 1112 aa, Oryza sativa
  Clone ID: TF_OSC900247j.C1.p12.fg
MIVRQHRPFNSSSFHQGASGSQNHQGGQPNCSAAPRPPTAPAQSAPSAEAKKETGTKPGSCFNCGEHGHFADKCPKPRRAGPRFVQAHVNHASAEEAQPAPEVVLGTFPINSVPATVLFDSGATHSFISKKFVGIHGLRKEELSTPMRVHTPGNSSTLVSYSPSVLIEIHRSRFLANLILLESKDLDVILGMDWMTKFKGVIDCANRTVTLTNEKGETVVYKSPVSRKQGISLNQIEVENPVAIEEKSSRKLEDISIVCEYPEVFPEDLTTMPPKREIEFRIDLAPGTAPIYKRPYRMVANELAEVKKQVDEQLQKGYIRPSTSPWGAPVIFVQKKDKTKRMCVDYRALNEVTIKNKYPLPRIDDLFEQLKGAKVFSKIDLRSGYHQLRIREEDISKTAFTTRFGLYECTVMSFGLTNAPAFFMNLMNKVFMEFLDKFVVVFIDDILIYSKSEEEHEQHLRLVLEELKEQQLYAKFSKCDFWLSEDKFLGHVITAQGIAVDPANVESVTKWTPPKTVSQIRSFLGLAGYYRRFIEIFSRIARPMTQLLKKDEKFKWTAECDKSFEELKKKLVSAPVLILPDQTKDFQVYCDASRHGLGCVLMQEGRVVAFASRNRCEVYTDHKSLKYIFTQPDLNLRQRRWLELIKDYDMSIHYHPGKANVVADALSRKSYCNALCTEGMCKELQQELERLNMGIVEHGFVAALEARPTLVDQVRAAQVNDPEIAELKKNMRVRKARDILEDEHGMIWMGERLCVPDDKELNDLILTEAHQTQYSIHPGSTKMYQDLKEKFWWASMKREIAEFVALCDVCQRVKAEHQRPAGLLQPLQIPEWKWEEIGMDFITGLPRTSSGHDSIWVVVDRLTKVAHFIPVHTTYTGKSSLTTTAIRPVYIWRRSKRCTVGSVNRSIVRPLFWDQTGERQLFGTEVLTEAEEKVRTVRERLRIAQSRQKSYADNLRRELTFEAGDYVYLRVTPLRGVHRFQTKGKLAPRFVGPYRILERRGEVAYQLELPSNMIGIHDVFHVSQLKKCLRVPEEQADSEHINIQEDLTYVEKPVRILETSERRTRNKVTRFCRVQWSHHSDEEATLEREDELKAAHPHLFTSSSESRGRDSV

SEQ ID NO: 19022 - protein, 868 aa, Oryza sativa
  unsure (1)..(868): unsure at all Xaa locations
  Clone ID: TF_OSC900257j.C1.p11.np
TLSSXHVLILVRIFHACIIFXKLQKPYAAQILTPHLASPPPPAGSGQSPLVARXIRKRQRPSQGPLLHHAHPCLDASTREKLHFKAGSYPFPLVASVVCLLVHPANRSLIAMGATSKTMHPQPAIQSYFSWIIMTMKHGQMSRAVAHHNTNMSNTAIIPSTELVVISIAKHIVLARSSKXHKREAGADTRAPHVSGTKGRRTVDQVRTWPRVRVHHVDGPNRPEPIERPRGAAARGTGAAQSRPGRAKARRRRPATAWRAAATARLEVARSGGRRRLEHADEWWGEGAPWGGGFGDTMGKRRGCRGMARRGEAADGGRAERRRQEQRCGWRIARGAAVAAWFSCTGGLGREGKMEGGAGNVFIGEGRSDRARERRSRRQPPAAWAASWGVGGGFGRRWGMRRTWGGGVPAGGLVRGVEKEGGNGSVVGRLRRPWRRLEPEKGPAPPSAKGERKGRKKDFLRGRIGGRPREGKGRPAXPGKTPSKLADVQRTHPPHFSSAADPLAADDWLRDIKIKLNLCQCDPVEKATFAAYYLQGASAAWWETYKTLIPPDEPNNWTVFWEGFISAHIPPGLMEIKKKEFLNLKQGNMTFMEFMERFNYLGRYVAADMNTEAKKVELCRDRLAPELNHAITAHEITSMKSLVEKALRVESKKEVVEDRKRKWAAKKFASGSSSTRPRLAPSPVVRPMAPQPPRLPRTVQAAGDASRNDNVACYNCGPRLPRTVQAAGDASRNDNVACYNCGKKGHYSPNCPYPKTGKSGPHTQGADAALAGCRPTHRSSSPGAQPASGQTFTISATNKSIKVTNNASSIYFSINFTGYRQNQLDDADSAAMSSTILNRAVSSDKSPTSHVEAQTTTFLSLALLLRRL

SEQ ID NO: 19023 - protein, 469 aa, Oryza sativa
  Clone ID: TF_OSC900321j.C1.p7.fg
MAENDRKTGPGVAEGDWRDLRGSAMDGAPDARAEERAEPKQQSGSDFWAARQDIGQTWYKGLNRLAVQRLVTKCARMGRPSQADEIMRSRGTSRVEDWSHRIIANTTRVKDLLAQQGGSKALKGVKPAKMEDDDWEEMQLQAAATIRLCLSDQKLYGLKMQEGADLTVHVNVFNQLVTDLVKMDVEVDDEDKAIVFLCSLPESYEHVVTTLTYGKETIKTKDITSALLARDQMRKNKEGETSQAEGLLVKEDHAGHKVKKNKKKKMVQCFRCDEWGHISRECPTLKGKAKANTVTSSNDSDSDGCDLLTMSSAQSKDAEAWILDSASSFHVTPRKEWFSSYKSGEFGFVYLGDDTSYPAVGVGEVKIKLEDGGEHVLQGVRHVPGQKRNLISLETLHEEGLIFRGNRNRKTMEIMKGKMTVMTGEKVESHLYKLRGCTVVGGVQEEAVAGIAIVFGGGGSGADSSCGLR

SEQ ID NO: 19024 - protein, 1791 aa, Oryza sativa
  unsure (1)..(1791): unsure at all Xaa locations
  Clone ID: TF_OSC900337j.C1.p10.np
MADHPPNHRGEGMDDFVAELARMTLVVGYPNAPEYSTVPPLNGELPHRVRLEVHGYVGTCLANMVVEASGGTADHACXEAAYLMMARLRERHNYIFCNTAYHFHPRRASGDDVNTFRPTAGENDTTFGHMCAVMRGMDRMHSDLHKASKALNDRKLVRIIALKDEIARLKKENAXLKGLSALGGVRIRTTPRKSTTAPVRIQLAPRNPPPPAAPPAAPPAVPVAPVSAPASALSFAPASAARGLASGSHDRVAPVSAPASALSFAPASAARGLASGSHDRSSSMVNTRNGSRAAGEDSNSEERTDGGHPNSASGNGPPLLPENPTLAQVMTHQTQMMAAMMQQQHQQMHQRMQQQTEQQQQXQFGPPLPQFKLPEFLRVRLPTFSSTTNPMEANDXLHAIEKKLNLLQCNDQEKVAFATHQLQGPTSAWWDNHMATRSLGTEVTWAEFCRSFRKAQVPDGVVVQKKREFRALHQGNRTVTEYLYEFNRLARYAPEDVRTDAEKQEKFLAGLDDELTNQLISGDYADFEKLVDKAIHQEDQRNKMDRKRKAAQFRSNQGSHQRPRFFPGQQGGPTTMIVRQHRPFNSSSFHQGANGSQNHQGGQPNRSAAPRPPMAPAXSAPSAQAKKETGTKPGSCFNCGEHGHFADKCPKPRRAGPRFVQARVNNATVFDSAPEVVLGTFPVNSIPATVLFDSGATHSFISKKFVGIHGLIREELSTPMRVHTPGNSSTSVQFSPSIRIEIQRSPFLANLILLESKDLDVILGMDWLTKFKGVIDCANRTVTLTSEKGETLVYKSPVSPKQGASLNQIEVEIPAVTEEKSSRKLEDIPIVCEYPEVFPEDLTTMPPKREIEFRIDLTPRTAPIXKRPYRMAANELAEVKKQVDEQLQKGYIRPSTSPWGAPVIFVEEKDKTKRMCVDYRALNEVTIKNKYLLPRIDDLFDQLKGAKVFSKIDLRSGYHQLRIQEENIPKTAFTTRYGLYECTVMSFGLTNAPAFFMNLMNKVFMEFLDKFVVVFIDDILIYSKSEEEHEKLKEHQLYAKFSKCDFXLSEVKFLGHVITAQGVAVNPLNVESVTKWTPPKTVSQIRSFLGLAGYYCRFIENFSRIARPMTQLLKKDEKFKWTAECDKSFEELKERLVSAPVLILPDQTKDFQVYCNTSRHGPGCVLMQEGRVVVYASWQLCPHEGNYPTHDLELAAVVHDLKIWRRYLIGNRCEVYTDHKSLKYIFTQPDLNLRQRRWLELIKDYDMSIHYHPGKANVVADALSRTSYCNALCTEGMCKELQQELEHFNLELVEHGYVAALEARPTLVDQVRAAQVNDPEIAELKKNTRVGKARDFLEDEHGTIWMGERLCVPDDKELKDLILTEAHQTQYSIHPGSTKMYQDLKEKFXXASMRREIAEFVALCDVCQLVKAEHQRLVGLLQPLQIPEWKWEEIGMDFITGLPRTSSGHNSIWVVVDRLTKVAHFIPVHTTYTGKRLAELYLSRIMCLHGVPKKISDRGSQFTSNFWQKLQEELGTRLNFSTTYHPQTDGQTERVNQILEDMLKACALDFGGAWDKNLPYVEFSYNNSYQASLQMAPFEALYGRKCRTPLFWDQTGERQLFGTEVLTEAEEKVRTVRERLRIAQSRXKSYTENRRRELTFEAGDYVYLRVTPLRGVHRFQSKGKLAPRFVGPYKILERRGEVAYQLELPSNMIGIHDVFHVSQLKKCLRVPEEQADSEHIDIQEDLTYVEKPVRILETSERRTRNKVTRFCRVQWSHHSEEETTWEREDELKAAHPHLFASSSESRGRDSV

SEQ ID NO: 19025 - protein, 854 aa, Oryza sativa
  Clone ID: TF_OSC900388j.C1.p21.gm
MATRPPGTEVTWAEFCRSFRKAQVPDGVVAQKKREFRALHQGNRTVTEYLHEFNRLVRYAPEDVRTNAEKQEKFLVGLDNELTNQLISRDYADFEKLGGPTTMIVRQHRPFNSSSFHQGASGSQNHPGGQPNRSAAPRPPMAPTQSAPSAQAKETRAKPGSCFNCGEHGHFADKCPKPRRAGPRFAQARVNHASAEEAQAAPEVVLVTLTNEKVEAVVYKSPVSLKQGISLNQIEVENPVATEEKSSRKLEDIPIVCKYPEVFPKDLTTMPTKREIEFRIDLAPGTAPIYKRPYRMAANELAEVKKKVDEQLQKGYIRPSTSPWGAPVIFVEKKDKTKRMCVDYRALNEVTIKNKYPLPRIDDLFDQLKGAKVFSKIDLRSGYHQLRIREEDIPKIAFTTRYGLYECTVMSFGLTNAPTFFMNLMNKVFMEFLDKFVVVFIDDILIYSKSEEEHEQHLRLVLEKLQEHQLYAKFSKGDFWLSEVKFLGHVITAQGVAVDPSNVESVTKWTPPKTVSQIRSFLGLAELKKNMRVGKARDFHEDEHGTIWLGERLCVPDDKELKDLILTEAHQTQYSIHPGSTKMYQDLKEKFWRASMRREIAEFVALCDVCQRVKKSYADNRRREFTFEAGDYVYLRVTPLRGVHRFQTKGKLAPRFLGPYKILERRGEVAYQLELPSNMIGIHDVFHVSQLMKCLRSSLAAARRRSPPLSAVGRSPPCVTVASRCAAARHCRRVGLGPARARPAASRLRRPIYRAVDRGRSTPPPTWLPRGRHVCAASAPRVHHVVRRSSPHDPAETKGYKVGFLDLNHDPAETKGYKVGFLDLNNCLHWCCRLVRHLLLLAHQPLPLRVRHHQ

SEQ ID NO: 19026 - protein, 256 aa, Oryza sativa
  Clone ID: TF_OSC100133j.C1.p1.gm
AMQPEGQPVTWARFTAAFRRTHVPAGVVALKKREFRELKQGNRSVMEYLHEFNNLARYTPEDVRKDEEKQEKFLAGMDPELSVRLVSGDYPDFQRLVDKSIRLEAKHKELESHKRRLANFRNQQGANQRVRYTNPYPGGSSSQQQQQQQQPRSAPRPQFVVRVPQPQQQQNQQGTRAPRPPTPTVQPGQGRRDASGPQRLCFNCFEPGHFADKCPKPRRQQGQAPPRPNNGGKDVSRGRVNHVTAEDVLTTPDVIV

SEQ ID NO: 19027 - protein, 1737 aa, Oryza sativa
  Clone ID: TF_OSC100292j.C1.p6.fg
MSWHRAGVLLLGAQSCLPVPGVPAVGGIGSVLLSMARMGWKLCHVFRLYTVVMAGSVTRRGLDMTGFVLELRGMCVVLGYPHGVDYQGRPLPEQEGDDAEPHAAWEVTAVILAGSPERTSLAVTAGGDSFPATCQSAALLAIGTLHQRYPDELQHSPFRYHPRRGGARDYATFRDASSEDDATIMHLARMVEAYDAARIDFHQMVRRGMVENNMKILELRQENLQLKKDLDAVEAQLHQLKIAQGEVCRPKRRRVCRSQKITARKSTSRPELVRQSLAWTCFVETPRAEPAPVVPQEGEASGVGSTEDALLLTFRPGPSQRRSAATGDGNQPEGSNHHHQGSPPPPPPPPPPPPPDTNAILSQILAQQANMMTAFLHHLQNPPQHNAPPPPPQHSKLAEFLRIRPPTFSSSNNPVDALDWLHAVGKKLDTVQCSDEEKVIFAAHQLQGPASLWWDHFQATQPEGQPITWARFTAAFRRTHVPAGVMALKKREFRELKQGNRSVMEYLHEFNNLARYAPEDVREDEEKQEKFLAGMDPELSVRLVSGDYPDFQRLVDKSIRLEAKHKELESHKCRLANFRNQQGANQRVRYTNPYPGGSSSQQQQQQQQPRSAPRPQFVVRVPQPQQQQNQQGTRAPRPPTPTVQPGQGRRDAQGPQRLCFNCFEPGHFADKCPKPRRQQGQAPPRSNNGGKDVIRGRVNHVTAEDVLTTPDVIVGTFLIHSIPATILFDSGASHSFISVPFVGRNQLGVERLRNPVLITTPGGVMTAKYYSPAVPIEIQGIPFPSDLILLDTKNLDVILGMNWLAQFQGVVDCARRTVTLYRGPEQPVVFFAPPTSVSSSELHQIGLSEIPIVREFGDVFPEELPGMPPKREIKFRIDLAPGTTPLYKRPYRMAANELAEVNKQLEELALNEVTIKNKYPLPRIDDLFDQLKGATVFSKIDLRSGYHQLRIRDEDIPKTAFTTRYGLYEFTVMSFEEDHQHHLRLVLGKLREHQLYAKLSKCEFWLSEVKFLGHVISAKGVAVDPETVTAVTDWKQPKTVTQVRSFLGLAGYYRRFIENFSKIARPMTQLLKKEEKFVWSPQCEKAFKTLKERLVSSPVLILPDTRKDFMVYCDASRQGLGCVLMQDGHVVAYASRQLRPHEGNYPTHDLELAAVVHALKIWWHYLIGNRCEIYTDHKSLKYIFTQSDLNLRQRRWLELIKDYDVGIHYHPGKANVVADALSRKSHCNTLNVRGIPPELNQQMEALNLSIVGRGFLAALEAKLTLLDRIREAQKNDPDMHGLLKNMKQGKAVGFTEDEHGTLWNGNRVCVPDNRELKQLIFQEAHESPYSIHPGSTKMYLDLKEKYWWVSMKREIAEFVALCDVCQRVKAEHQRPAGLLQPLQVPEWKWDEIGMDFITGLPKTQGGYDSIWVVVDRLTKVARFIPVKTTYGGNKLAELYFARIVSLHGVPKKIVSDRGSQFTSHFWKKLQEELGTRLNFSTAYHPQTDGQTERLNQIQEDMLRACVLDFGKTWDKSLPYAEFSYNNSYQASIQMAPYEALYGRKCRTPLLWDQVGESQVFGTDILREAEAKVRTIRDNLKVAQSRQKVMQITDAVTWNSQWTILCTFGSRHCGVYTGFRQKGSSHLEVAYQLELPASLGNMHDVFHVSQLKKCLRVPSEQADSEQIEVREDLTYVERPVKILDTMERRTRNRVIRFCKVQWSNHAEEEATWEREDELKAAHPDLFASSSESWGRDSV

SEQ ID NO: 19028 - protein, 1532 aa, Oryza sativa
  Clone ID: TF_OSC100644j.C1.p4.fg
MSWHRAGVLLLGAQSCLPILEVPAVGRVGSVLLSMARMGWKLCHVFRPYTVVMAGSLNRRGLDLTGFVLELRGMCVVLGYPHGVDYQGKQLPEQEGDDAEPHAAWEVTAVILTGSPERTSLAVTAGGDSFSAACQNAALLAIGTLHQRYPDELQHSPYRYHPCRGGARDYATFRDASSEDDATIMHLARMVEAYNAARIDFHRMLKKDLDAVEAQLCQLKIAQGEMVTTRRSAVTGEGNHPEGSNHSNHGSPPPPPPPPPPPPPDTNPILTQILAQQANMMAAFLHHIQNPPQHNAPPPPPPPQHSKLAEFLRIRPPTFSSSNNPVDALDWLHAAGKKLDTVQCNDEEKVIFATHQLQGPASLWTHVPAGVMALKKREFRELKQGNHSVMEYLHEFNSLARYAPEDVWEDEEKQEKFLAGMDPELSVRLVSGDYPDFQRLVDNSIRLEAKHKELESHKRRLANFRNQQGANQMIRYTNPYPGGSSSQQQQQPRSAPRPQFVVRVPQSQQQQSQQGTRAPRPPAPAVQLGQGRRDAQGQQRLCFNCFEPGHFADKCPKPRRQQGQAPPRPNNGGKDVTRGRVNHVTAEDVLTTPDVIVDTKNLDVILGMNWLAQFQGVVDRARRTVTLYRGPDQPVVFFAPPTSAGSSVLNQLGLPEIPIVSEFGDVFPEELPSMPPQREIEFQIDLAPGTTPLYKRPYRMAAHELAEVKKQLEELKEKGYIRPSTSPWGSPVIFVEKKDKTKRICVDYRALNEVTIKNKYALPRIDDLFDQLKGATVFSKIDLRSGYHQLRIREEDIPKTAFTTHYGLYEFTVMSFGLTNAPAFFMNLMNKVFMEYLDKFVVVFIDDILVYLQSEEDHQQHLRLALGKLREHPLYAKLSKCEFWLSEVKFLGHVISAKGVAVDPETVTAVTDWKQPKTVTQVRSFLGLAGYYRRFIENFSKIARPMTQLLKKEEKFVWSPQCEKAFQTLKEKLVSSPVLILLDTRKDFLVYCDASRQGLGCVLMQEGHVVAYASRQPRPHEGNYPTHDLELAAVRRWLELIKDYDVGIHYHPGKANVVADALSRKSSCNTLGVRGIPPELNQQLEALNLSIVSHGFLATLEAKPTLLDQIREAQKNDLDMHGILKNMKQGKAAGFTEDEHGTLWNGNRCVKAEHQRPARLLQPLQVPEWKWDEIGMDFITGLPKTQGRYDSIWVVVDRLTKVARFIPVKTTYGGNKLAELYFARIVSLHGVPKKIVSDQGSQFTSDIWKKLQEELGTRLNFSTAYHPQTDGQTERLNQILEDMLHACVLDFGKTWDKSLPYAEFSYNNSYQASIQMAPYEALYGRKCQTPLLWDQVGESQVFGTDILREAEAKVRTIRDNLKVAQSRQKSYADTRRRNLEFAVDDFVYLRVTPLRGVHRFQMKGKLAPRFVGPFRIIARRGEVAYQLELPTSLGNVHDVFHVSQLKKCLRVPSEQADSEQIEVHEDLTYVERPVKILDTMEHRTRNRVIRFCKVQWSNHAEEEATSEREDELKAAHLDLFASSSESRGRDSV

SEQ ID NO: 19029 - protein, 2333 aa, Oryza sativa
  Clone ID: TF_OSC101104j.C1.p16.fg
MAGSVTRRGLDMTGFVLELRGMCVVLEYPHGVDYQARPLPEQEGEDAEPHAGWEVTAVILSGSPERTSLAVTAGGDSFPAACQNAALLAIGTLHQRYPDELQHSSYRYHPRRGGARDFATFRDASSEDDATVVHLARMVEAYDAARIDFHQMVRRGMVENNMKILELRQENLQLKKDLDALEAQLHQLKIAQGEISRPKRRRVCRSQKITARKSTSRPELVRQSLAWTCFVETPRAEPAPVVPQEGEASGVGSSEGALLLTFRPGPSQRRNVNTGEGNQPEGSNPNPQGNPPPPPPPDTNAILTQILAQQANMMNAFLHHLQNPPQQNAPPPPPQHSKLAEFLRIRPPTFSSSNNPVDALDWLHAVGKKLDTVQCSDEEKVIFAAHQLQGPASIWWDHFQATQPAGQPITWARFTSAFRRTHYLHEFNNLARYAPEDVREDEEKQEKFLAGMDPELSVRLVSGDYPDFQRLVDKSIRLEAKHKELESHKRRLANFRNQQGANQRVRYTNPYPGGSSSQQQQQQQQPRSAPRPQFVVRVPQPQQQQNQQGTRAPRPPTPAVQPVQGRRDAQGQQRLCFNCFEPGHFADKCPKPRRQQGQAPPRSNNGGKDVIRGRVNHVTAEDVLTTPDVIVGTFLVQSIPATILFDSGASHSFISVPFVGRNQLGVERLRNPLLITTPGGVMTAKYYSPAVPIEIQGIPFPSDLILLDTKNLDVILGMNWLAQFQGVVDCARRTVTLYRGPEQPVVFFAPPTSVRSSELHQIELSEIPIVREFGDVFPEELPGMPPKREIEFRIDLAPGTTPLYKRPYRMAANELAEVKKQLEELKEKGYIRPSTSPWGAPVIFVEKKDKTKRMCVDYRALNEVTIKNKYPLPRIDDLFDQLKGATVFSKIDLRSGYHQLRIREEDIPKTAFTTRYGLYEFTVMSFGLTNAPAFFMNLMNKVFMEYLDKFVVVFIDDILIYSQSEEDHQHHLRLVLGKLREHQLYAKLSKCEFWLSEVKFLGHVISAKGVAVDPETVTAVTDWKQPKTVTQIRSFLGLAGYYRRFIENFSKIARPMTQLLKKEEKFVWSPQCEKAFQTLKEKLVSSPVLILPDTRKDFMVYCDASRQGLGCVLMQDGHVVAYASRQLRPHEGNYPTHDLELAAVVHALKIWRHYLIGNRCEIYTDHKSLKYIFTQSDLNLRQRRWLELIKDYDVGIHYHPGKANVVADALSRKSHCNTLNVRGIPPELSQQMEALNLSIVGRGFLAALEAKPTLLDQIREAQKNDPDMHGLLKNMKQGKAAGFTEDEHGTLWNGKRVCVPDSRELKQLILQEAHESPYSIHPGSTKMYLDLKEKYWWVSMKREIAEFVALCDVCQRVKAEHQRPAGLLQPLQVPEWKWDEIGMDFITGLPKTQGGYDSIWVIVDRLTKVARFIPVKTTYGGNKLAELYFARIVSLHGVPKKIVSDRGSQFTSHFWKKLQEELGTRLNFSTAYHPQTDGQTERLNQILEDMLRACVLDFGKTWDKSLPYAEFSYNNSYQASIQMAPYEALYGRKCRTPLLWDQVGESQVFGTDILREAEAKVRIIRDNLKVAQSRQKSYADNRRRDLEFAVDDFVYLRVTPLRGVHRFQTKGKLAPRYVGPFRIIARRGEVAYQLELPASLGNVHDVFHVSQLKKCLRVPSEQADSEQIEVREDLTYVEKPVKILDTMERRTRNRVIRFCKVQWSNHAEEEATWEREDELKAAHPDLVEVEAVDWENEQGKTHHLDHIESQTSWDPGSGCQFGLNHHRPWVKAAARAEEAAKEEAARARQAEATAAAGASTGPTPSGNPQATASGEARDVAAGTSPGPTSPGDAQDQTGPGDIPEPSTSSGGPSRIAFSPRRLFSSSSVAPLSAEPILQALAAANTAVLDGFSAQVEALRAERAELEAAWARVEEGRRSVDAMVEVGRKAHRRHISELEARKAALAEIAREVEEEREAALIATTAMIEAQDTLRLQHASWEAELKKKLDAAQGVLDSAAARERRVTETEAASRRREEALEARAMALEEHAGAVERGLTDREAAAVLREATLAAHEAACAEEECALRLREDALAERERALEEAEATTKRLADSLSLREAAQEEQARRNLECVRAERAALEQRAADLEAREKELDARARVGGAAAGESDLAARLAAAEHTVADMQRALDSSIGEAEALRLAGEMGPDMLWDSVSRMDRAGRQAGLWKGQTRMRPANLEGLAPHLNRMAWVLEQLPEELEKTIKSSSRDLARGAVELVLASYQARDPNFSPWMALEEFPPGTEDDARARVRDAADHIVNGFEGSAPRLAFAPSSDEEGDASGEDDGGDEAGDPGASE

SEQ ID NO: 19030 - protein, 2014 aa, Oryza sativa
  unsure (1)..(2014): unsure at all Xaa locations
  Clone ID: TF_OSC101199j.C1.p15.np
MAAGSSRPVSFLPGRALPLPLLYIRCPSSALPFPPLAARSRRRNRASAVLLSLRRRRRPSVRRRRRSGLPPGSAPPPSASPHRRRPRPRLRFARRPPEHRRPRHPEPRRRLPPLRPPFPPPSPSRGEPWTVPFVSPFPPLSRVPLRRAVGRRRRPSGRGCAPSRRPRRRGRPRARPRGCQVGPAVSRPRPRVRLTRGTHGADRRQPRAPGPPWTHPGHIRTKARASVAKHYRFHMSNGANEGYTANEGYTSCGPVVEMSKHRVGALLRGAQFRLPVPGVPAVGGIGSMYTSDQSKYSNSRALGYGQAEQCTQMAGSVTRRGLDMTGFVLELRGMCVVLEYPHGVDYQARPLPEQEGEDAEPHAGWEVTAVILSGSPERTSLAVTAGGDSFPAACQNAALLAIGTLHQRYPDELQHSSYRYHPRRGGARDFATFRDASSEDDATVVHLARMVEAYDAARIDFHQMVRRGMVENNMKILELRQENLQLKKDLDALEAQLHQLKIAQGEISRPKRRRVCRSQKITARKSTSRPELVRQSLAWTCFVETPRAEPAPVVPQEGEASGVGSSEGALLLTFHGETRRNVNTGEGNQPEGSNPNPQGNPPPPPPPDTNAILTQILAQQANMMNAFLHHLQNPPQQNAPPPPPQHSKLAEFLRIRPPTFSSSNNPVDALDWLHAVGKKLDTVQCSDEEKVIFAAHQLQGPASIWWDHFQATQPAGQPITWARFTSAFRRTHVPAGVVALKKREFRXLKQGNRSVMEYLHEFNNLARYAPEDVREDEEKQEKFLAGMDPELSVRLVSGDYPDFQRLVDKSIRLEAKHKELESHKRRLANFRNQQGANQRVRYTNPYPGGSSSQQQQQQQQPRSAPRPQFVVRVPQPQQQQNQQGTRAPRPPTPAVQPVQGRRDAQGQQRLCFNCFEPGHFADKCPKPRRQQGQAPPRSNNGGKDVIRGRVNHVTAEDVLTTPDVIVGTFLVQSIPATILFDSGASHSFISVPFVGRNQLGVERLRNPLLITTPGGVMTAKYYSPAVPIEIQGIPFPSDLILLDTKNLDVILGMNWLAQFQGVVDCARRTVTLYRGPEQPVVFFAPPTSVRSSELHQIELSEIPIVREFGDVFPEELPGMPPKREIEFRIDLAPGTTPLYKRPYRMAANELAEVKKQLEELKEKGYIRPSTSPWGAPVIFVEKKDKTKRMCVDYRALNEVTIKNKYPLPRIDDLFDQLKGATVFSKIDLRSGYHQLRIREEDIPKTAFTTRYGLYEFTVMSFGLTNAPAFFMNLMNKVFMEYLDKFVVVFIDDILIYSQSEEDHQHHLRLVLGKLREHQLYAKLSKCEFWLSEVKFLGHVISAKGVAVDPETVTAVTDWKQPKTVTQIRSFLGLAGYYRRFIENFSKIARPMTQLLKKEEKFVWSPQCEKAFQTLKEKLVSSPVLILPDTRKDFMVYCDASRQGLGCVLMQDGHVVAYASRQLRPHEGNYPTHDLELAAVVHALKIWRHYLIGNRCEIYTDHKSLKYIFTQSDLNLRQRRWLELIKDYDVGIHYHPGKANVVADALSRKSHCNTLNVRGIPPELSQQMEALNLSIVGRGFLAALEAKPTLLDQIREAQKNDPDMHGLLKNMKQGKAAGFTEDEHGTLWNGKRRVKAEHQRPAGLLQPLQVPEWKWDEIGMDFITGLPKTQGGYDSIWVIVDRLTKVARFIPVKTTYGGNKLAELYFARIVSLHGVPKKIVSDRGSQFTSHFWKKLQEELGTRLNFSTAYHPQTDGQTERLNQILEDMLRACVLDFGKTWDKSLPYAEFSYNNSYQASIQMAPYEALYGRKCRTPLLWDQVGESQVFGTDILREAEAKVRIIRDNLKVAQSRQKSYADNRRRDLEFAVDDFVYLRVTPLRGVHRFQTKGKLAPRYVGPFRIIARRGEVAYQLELPASLGNVHDVFHVSQLKKCLRVPSEQADSEQIEVREDLTYVEKPVKILDTMERRTRNRVIRFCKVQWSNHAEEEATWEREDELKAAHPDLVKSKPSIGKTSK

SEQ ID NO: 19031 - protein, 1777 aa, Oryza sativa
  Clone ID: TF_OSC101199j.C1.p8.fg
MDEVGGRWTFSRANEGYTSCGPMAGSVTRRGLDMTGFVLELRGMCVVLEYPHGVDYQARPLPEQEGEDAEPHAGWEVTAVILSGSPERTSLAVTAGGDSFPAACQNAALLAIGTLHQRYPDELQHSSYRYHPRRGGARDFATFRDASSEDDATVVHLARMVEAYDAARIDFHQMVRRGMVENNMKILELRQENLQLKKDLDALEAQLHQLKIAQGEISRPKRRRVCRSQKITARKSTSRPELVRQSLAWTCFVETPRAEPAPVVPQEGEASGVGSSEGALLLTFRPGPSQRRNVNTGEGNQPEGSNPNPQGNPPPPPPPDTNAILTQILAQQANMMNAFLHHLQNPPQQNAPPPPPQHSKLAEFLRIRPPTFSSSNNPVDALDWLHAVGKKLDTVQCSDEEKVIFAAHQLQGPASIWWDHFQATQPAGQPITWARFTSAFRRTHYLHEFNNLARYAPEDVREDEEKQEKFLAGMDPELSVRLVSGDYPDFQRLVDKSIRLEAKHKELESHKRRLANFRNQQGANQRVRYTNPYPGGSSSQQQQQQQQPRSAPRPQFVVRVPQPQQQQNQQGTRAPRPPTPAVQPVQGRRDAQGQQRLCFNCFEPGHFADKCPKPRRQQGQAPPRSNNGGKDVIRGRVNHVTAEDVLTTPDVIVGTFLVQSIPATILFDSGASHSFISVPFVGRNQLGVERLRNPLLITTPGGVMTAKYYSPAVPIEIQGIPFPSDLILLDTKNLDVILGMNWLAQFQGVVDCARRTVTLYRGPEQPVVFFAPPTSVRSSELHQIELSEIPIVREFGDVFPEELPGMPPKREIEFRIDLAPGTTPLYKRPYRMAANELAEVKKQLEELKEKGYIRPSTSPWGAPVIFVEKKDKTKRMCVDYRALNEVTIKNKYPLPRIDDLFDQLKGATVFSKIDLRSGYHQLRIREEDIPKTAFTTRYGLYEFTVMSFGLTNAPAFFMNLMNKVFMEYLDKFVVVFIDDILIYSQSEEDHQHHLRLVLGKLREHQLYAKLSKCEFWLSEVKFLGHVISAKGVAVDPETVTAVTDWKQPKTVTQIRSFLGLAGYYRRFIENFSKIARPMTQLLKKEEKFVWSPQCEKAFQTLKEKLVSSPVLILPDTRKDFMVYCDASRQGLGCVLMQDGHVVAYASRQLRPHEGNYPTHDLELAAVVHALKIWRHYLIGNRCEIYTDHKSLKYIFTQSDLNLRQRRWLELIKDYDVGIHYHPGKANVVADALSRKSHCNTLNVRGIPPELSQQMEALNLSIVGRGFLAALEAKPTLLDQIREAQKNDPDMHGLLKNMKQGKAAGFTEDEHGTLWNGKRVCVPDSRELKQLILQEAHESPYSIHPGSTKMYLDLKEKYWWVSMKREIAEFVALCDVCQRVKAEHQRPAGLLQPLQVPEWKWDEIGMDFITGLPKTQGGYDSIWVIVDRLTKVARFIPVKTTYGGNKLAELYFARIVSLHGVPKKIVSDRGSQFTSHFWKKLQEELGTRLNFSTAYHPQTDGQTERLNQILEDMLRACVLDFGKTWDKSLPYAEFSYNNSYQASIQMAPYEALYGRKCRTPLLWDQVGESQVFGTDILREAEAKVRIIRDNLKVAQSRQKSYADNRRRDLEFAVDDFVYLRVTPLRGVHRFQTKGKLAPRYVGPFRIIARRGEVAYQLELPASLGNVHDVFHVSQLKKCLRVPSEQADSEQIEVREDLTYVEKPVKILDTMERRTRNRVIRFCKVQWSNHAEEEATWEREDELKAAHPDLVEVEAVDWENEQGKTHHLDHIESQFIKLC

SEQ ID NO: 19032 - protein, 2014 aa, Oryza sativa
  unsure (1)..(2014): unsure at all Xaa locations
  Clone ID: TF_OSC101263j.C1.p2.np
MEPEIAAPISFPSGRPLSLPTLFKRSPCLPPPFPPSAARSPRRIRARAVVLSLRRRRRAPVRRRRRPGPPPASASPPSASPRSRRPRPLLRFARRPPEHHRPRRPEPRRRLSPLRSPFPSSPSTRGEPRTHFVSPFPPLSRPPLRRAYGRIYLNSRVITVLFSHAYLPLLRPYYCYCYYYLVHPRTNKTPTSEHSTHGTGFRRARGAWFXXXHLGHIRTGLRASVAKHYRFHMSSGANEGYTSCGPVVEMSWHRAGVLLLGAQSCLPVPGVPAVGGIGSMYTSDQSIIYSNSRALGYGQAEQCTQMAGSVTRRGLDMTGFVLELRGMCVVLGYPHGVDYQARPLPEQEGDDAEPHAAWEVTAVILAGSPERTSLTVTAGGDSFPAACQSAALLAIGTLHQRYPDELQHSPYRYHPRRGGARDHATFRDASSEDDATIVHLARMVEAYDAARIDFHQMVRRGMVENNLKILELRQENLQLKKDLDAVEAQLHQLKIAQGEICRPKRRRVCRSQKITARKSTSRPELVRXSLAWTCFVETPRAEPAPVVPQEGEASGVGSTEDALLLTFHGETRRNANTGDGNQPEGSNHNHQGNPPPPPPPPPPPPPDTNAILTQILAQQANMMTAFLHHLQNPPQLNPPPPPPQHSKLAEFLRIRPPTFSSSNNPVDALDWLHAVGKKLDTVQCSDEEKVIFAAHQLHGPASLWWDHFQAMQPEGQPVTWARFTAAFRRTHVPAGVVALKKREFRELKQGNRSVMEYLHEFNNLARYTPEDVRKDEEKQEKFLAGMDPELSVRLVSGDYPDFQRLVDKSIRLEAKHKELESHKRRLANFRNQQGANQRVRYTNPYPGGSSSQQQQQQQQPRSAPRPQFVVRVPQPQQQQNQQGTRAPRPPTPTVQPGQGRRDASGPQRLCFNCFEPGHFADKCPKPRRQQGQAPPRPNNGGKDVSRGRVNHVTAEDVLTTPDVIVGTFLIHSIPATILFVSGASHSFISVPFVGRNQLGVQCLRNPLLITTRGGVMPAKYYSPAVPIEIQGIPFPSDLILLDTKILDVILGMNWLAQFQGVVDCARRTVTLYRGPEQPVVFFAPPTSVRSSELHQIGLSEIPIVREFGDVFPEELPGMPPKREIEFRIDLAPGTTPLYKRPYRMAANELAGVKKQLEELKEKGYIRPSTSPWGAPVIFVEKKDKTKRMCVDYRALNEVTIKNKYPLPRIDDLFDQLKGATVFSKIDLRSGYHQLRIREEDIPKTAFTTRYGLFEFTVMSFGLTNAPAFFMNLMNKVFMEYLDKFVVVFIDDILIYSQSEEDHQHHLRLVLGKLREHQLYAKLSKCEFWLSEVKFLGHVISAKGVAVDPETVTAVTDWKQPKTVTQVRSFLGLAGYYRRFIENFSKIARPMTQLLKKEEKFVWSPQCEKAFQTLKEKLVSSPVLILPDTRKDFMVYCDASRQGLGCVLMQDGHVVAYASRQLRPHEGNYPTHDLELAAVVHALKIWRHYLIGNRCEIYTDHKSLKYIFTQSDLNLRQRRWLELIKDYDVGIHYHPGKANVVADALSRKSHCNTLNVRGIPLELNQQMEALNLSIVGRGFLTTLEAKPTLLDQIREAQKNDPDMHGLLKNMKQGKAAGFTEDEHGTLWNGNRRVKAEHQRPAGLLQPLQVPEWKWDEIGMDFITGLPKTQGGYDSIWVVVDRLTKVARFIPVKTTYGGNKLAELYFARIVSLHGVPKKIVSDRGSQFTSHFWKKLQEELGTRLNFSTAYHPQTDGQTERLNQILEDMLRACVLDFGKTWDKSLPYAEFSYNNSYQASIQMAPYEALYGRKCRTPLLWDQVGESQVFGTDILREAEAKVRTIRDNLKVAQSQQKSYADNRRRDLEFAVDDFVYLRVTPLRGVHRFQTKGKLAPRYVGPFRIVARRGEVAYQLELPASLGNVHDVFHVSQLKKCLLVPSEQADSEQIEVREDLTYVERPVKILDTMERRTRNRVIRFCKVQWSNHAEEEATWEREDELKAAHPDLFDSSSESRGRDSV

SEQ ID NO: 19033 - protein, 808 aa, Oryza sativa
  Clone ID: TF_OSC101694j.C1.p1.fg
MAGSVTRRGLHMTGFVLELRGMCVVLGYPHGVDYQARPLPDQEGEDAEPHAGWEVTAVILSGSPERTSLAVTAGGDSFPAACQNAALLAIGTLHQRYPDELQHSPYRYHPRRGGARDYATFRDASSEDDATVVHLARMVEAYDAARIDFHQMVRRGMVENNMKILELRQENLQLKKDLDALEAQLHQLKIAQGEICRPKRRRVCRSQKITARKSTSRPELVRQSLAWTCFVETPRAEPAPVVPQEGEASGVGSSEGALLLTFRPGPSQRRNVNTGEGNQPEGSNPNPQGNPPPPPPPDTNAILTQILAQQANMMNAFLHHLQNPPQQNAPPPPPQHSKLAEFLRIRPPTFSSSNNPVDALDWLHAVGKKLDTVQCSDEEKVIFAAHQLQGPASLWWDHFQATQPEGQPITWARFTAAFRRTHVPAGVVALKKREFRELKQGNRSVMEYLHEFNNLARYAPEDVREDEEKQEKFLAGMDPELSVRLVSGDYPDFQRLVDKSIRLEAKHKELESHKRRLANFRNQQGANQRVRYTNPYPGGSSSQQQQQQQNQQGTRAPRPPTPTVQPVQGRRDASGPQRLCFNCFEPGHFADKCPKPRRQQGQAPPRSNNGGKDVIRGRVNHVTAEDVLTTPDVIVAPPFRFRRSPLALAVGIVLAPCSSLSAVAAELRSVAAVLRLAAAAAPLFLPTRRHLPRHRRIAVDPVRASTSPADRRSTVVIVFPNRAAAFFRFGRHSRRRRCPGVSRRPPFAFPLSSSFSGATPPRRWSPAATIGARVRAVPVGRAGEAALGRALAATKWARQSAARARGFG

SEQ ID NO: 19034 - protein, 1434 aa, Oryza sativa
  Clone ID: TF_OSC101694j.C1.p2.gm
MVTTRRNVNTGEGNQPEGSNPNPQGNPPPPPPPDTNAILTQILAQQANMMNAFLHHLQNPPQQNAPPPPPQHSKLAEFLRIRPPTFSSSNNPVDALDWLHAVGKKLDTVQCSDEEKVIFAAHQLQGPASLWWDHFQATQPEGQPITWARFTAAFRRTHVPAGVVALKKREFRELKQGNRSVMEYLHEFNNLARYAPEDVREDEEKQEKFLAGMDPELSVRLVSGDYPDFQRLVDKSIRLEAKHKELESHKRRLANFRNQQGANQRVRYTNPYPGGSSSQQQQQQQNQQGTRAPRPPTPTVQPVQGRRDASGPQRLCFNCFEPGHFADKCPKPRRQQGQAPPRSNNGGKDVIRGRVNHVTAEDVLTTPDVIVEIPIVREFGDVFPEELPGMPPKREIEFRIDLAPGTTPLYKRPYRMAANELAEVKKQLEELKEKGYIRPSTSPWGAPVIFVEKKDKTKRMCVDYRALNEVTIKNKYPLPRIDDLFDQLKGATVFSKIDLRSGYHQLRIREEDIPKTAFTTRYGLYEFTVMSFGLTNAPAFFMNLMNKVFMEYLDKFVVVFIDDILIYSQSEEDHQHHLRLVLGKLREHQLYAKLSKCEFWLSEVKFLGHVISAKGVAVDPETVTAVTDWKQPKTVTQIRSFLGLAGYYRRFIENFSKIARPMTQLLKKEEKFVWSPQCEKAFQTLKQKLDGHVVAYASRQLRPHEGNYPTHDLELAAVVHALKIWRHYLIGNRCEIYTDHKSLKYIFTQSDLNLRQRRWLELIKDYDVGIHYHPGKANVVADALSRKSHCNTLNVRGIPPELSQQMEALNLNIVGRGFLAALEAKPTLLDQIREAQKNDPDMHGLLKNMKQGKAAGFTEGEHGTLWNGKRVCVPDSRELKQLILQEAHESPYSIHPGSTKMYLDLKEKYWWVSMKREIAEFVALCDVCQRVKAEHQRPAGLLQPLQVPEWKWDEIGMDFITGLPKTQGGYDSIWVIVDRLTKVARFIPVKTTYGGNKLAELYFARIVSLHGVPKKIVSDRGSQFTSHFWKKLQEELGTRLNFSTAYHPQTDGQTERLNQILEDMLRACVLDFGKTWDKSLPYAEFSYNNSYQASIQMAPYEALYGRKCRTPLLWDQVGESQVFGTDILREAEAKVRIIRDNLKVAQSRQKSYADNRRRDLEFAVDDFVYLRVTPLRGVHRFQTKGKLAPRYVGPFRIIARRGEVAYQLELPASLGNVHDVFHVSQLKKCLRVPSEQANSEQIEVREDLTYVERPVKILDTMERRTRNRVIRFCKVQWSNHAEEEATWEREDELKAAHPDLFATAAAAPLFLPTRRHLPRHRRIAVDPVRASTSPADRRSTVVIVFPNRAAAFFRFGRHSRRRRCPGVSRRPPFAFPLSSSFSGATPPRRWSPAATIGARVRAVPVGRAGEAALGRALAATKWARQSAARARGFG

SEQ ID NO: 19035 - protein, 1864 aa, Oryza sativa
  Clone ID: TF_OSC101804j.C1.p1.np
MDEVGGRWTFSRANEGYTSCGPVVEMSKHRVGALLLGAQFRLPVPGVPAVGGIGSMYTSDQSIIYSNSRALGYGQAEQCTQMAGSVTRRGLDMTGFVLELRGMCVVLGYPHGVDYQARPLPDQEGDDAEPHAGWEVTAVILSGSPERTSLAVTAGGDSFPAACQNAALLAIGTLHQRYPDELQHSPYRYHPRRGGARDYATFRDASSEDDATIVHLARMVEAYDAARIDFHQMVRRGMIENNMKILELRQENLQLKKDLDAVEAQLHQLKIAQGEDCRPKRRRVCRSQKITARKSTSRPELVRQSLAWTCFVETPRAEPAPVVPQEGEASGVGHGGCAVAHLPSWPVAAVDEQLVGLRMVTTRRNAVTGEGNQPEGSNHNHQGNPPPPPPPPPPPPPDTNAILTQILAQQANMMTAFLHHLQNPPQHNAPPPPPQHSKLAEFLRIRPPTFSSSNNPVDALDWLHAVGKKLDTVQCSDEEKVIFAAHQLQGPASLWWDHFQATQPEGQPITWARFTAAFRRTHVPAGVVALKKREFRELKQGNRSVMEYLHEFNNLARYAPEDVREDEEKQEKFLAGMDPELSVRLVSGDYPDFQRLVDKSIRLEAKHKELESHKRRLANFRNQQGANQRVRYTNPYPRGSSSQQQQQQQQPRSAPRPQFVVRVPQPQQQQNQQGTRAPRPPTPAVQPVQGRRDASGPQRLCFNCFEPGHFADKCPKPRRQQGQAPPRSNNGGKDVIRGRVNHVTAEDVLTTPDVIVGTFLVHSIPATILFDSGASHSFISVPFVGRNQLGVERLRNPLLITTPGGVMTAKYYSPAVPIEIQGIPFPSDLILLDTQNLDVILGMNWLAQFQGVVDCARRTVTLYRGPEQPVVSFASPTSVRSSELHQIGLSEIPIVKEFGDVFPEELPGMPPKREIEFRIDLAPGTTPLHKRPYRMAANELAEVKKQLEGLKEKGYIRPSTSPWGAPVIFVEKKDKTKRMCVDYRALNEVTIKNKYPLPRIDDLFDQLKGATVFSKIDLRSGYHQLRIREEDIPKTAFTTRYGLYEFTVMSFGLTNAPAFFMNLMNKVFMEYLDKFVVAFIDDILIYSQSEEDHQHHLRLVLGKLREHQLYAKLSKCEFWMSEVKFLGHVISAKGVAVDPETVTAVTDWKQPKTVTQIRSFLGLAGYYRRFIENFSKIAQPMTQLLKKEEKFLWSPQCEKAFQTLKEKLVSSPVLILPDTRKDFMVYCDASRQGLGCVLMQDGHVVAYASRQLRPHEGNYPTHDLELAAVVHALKIWRHYLIGNRCEIYTDHKSLKYIFTQSDLNLRQRRWLELIKDYDVGIHYHPGKANVVADALSRKSHCNTLNVRGIPPELNQQMEALNLSIVGRGFLAALEAKPTLLDQIREAQKNDPDMHGLLKNMKQGKAAGFTEDEHGTLWNGKRVCVPDNRELKQLILQEAHESPYSIHPGSTKMYLDLKEKYWWVSMKREIAEFVALCDVCQRVKAEHQRPAGLLQPLQVPEWKWDEIGMDFITGLPKTQGGYDSIWVVVDRLTKVARFIPVKTTYGGNKLAELYFARIVSLHGIPKKIVSDRGSQFTSHFWKKLQEELGTRLNFSTAYHPQTDGQTERLNQILEDMLRACVLDFGKTWDKSLPYAEFSYNNSYQASIQMAPYEALYGRKCRTPLLWDQVGESQVFGTDILREAEAKVRTIRDNLKVAQSRQKSYADNRRRDLEFAVDDFVYLRVTPLQGVHRFQTKGKLAPRYVGPFRIIARRGEVAYQLELPASLGNVHDVFHVLQLKKCLRVPSEQADSEQIEVREDLTYVERPVKILHTMERRTRNRVIRFCKVQWSNHAEEEATWEREDELKAAHPDLFASSSESRGRDSV

SEQ ID NO: 19036 - protein, 1417 aa, Oryza sativa
  Clone ID: TF_OSC10946j.C1.p2.fg
MTGCILESFWDATKHKELESHKRRLANFRNQQGANQRVRYTNPYPGGSSSQQQQQQQQPRSAPRPQFVVRVPQPQQQQNQQGTRAPRPPTPTVQSGQGRRDAQGQQRLCFNCFEPGHFADKCPKPRRQQGQAPPHSNNGGKDVIRGRVNHVTAEDVLTTPDVIVGTFLVHSIPATILFDSGASHWFISVPFVGRNQLGVERLRNPLLITTPGGVMTAKYYSPAVPIEIQGIPFPSDLILLDTKNLDVILGMNWLAQFQGVVDCARRTVTLYRGPEQPVVFFAPPTSVSSSELHQIGLSEIPIVREFGDVFPEELPGMPPKREIEFRIDLAPGTTPLHKRPYRMAANELAEVKKQLEELKEKGYIRPSTSPWGAPVIFVEKKDKTKRMCVDYRALNEVTIKNKYPLPRIDDLFDQLKGATVFSKIDLRSGYHQLRIREEDIPKTAFTTRYGLYEFTVMSFGLTNAPAFFMNLMNKVFMEYLDKFVVVFIDDILVYSQSEEDHQHHLRLVLGKLREHQLYAKLSKCEFWLSEVKFLGHVISAKGVSVDPETVTTVTDWKQPKTVTQVRSFLGLAGYYRRFIENFSKIARPMTQLLKKEEKFVWSPQCEKAFQTLKEKLVSSPVLILPDTRKDFLVYCDASRQGLGCVLMQDGHVVAYASRQLRPHEGNYPTHDLELAAVVHALKIWRHYLIGNRCEIYTDHKSLKYIFTQSDLNLRQRRWLELIKDYDVGIHYHPGKANVVADALSRKGHCNTLNVRGIPPELNQQMEALNLSIVGRGFLAALEAKPTLLDQIRKAQKNDPDMHGLLKNMKQGKAAGFTEDEHGTLWNGKRVCVPDNRELKQLILQEAHESPYSIHPGSTKMYLDLKEKYWWVSMKREIAEFVALCDVCQRVKAEHQRPAGLLQPLQVPEWKWDEIGMDFITGLPKTQGGYDSIWVVVDRLTKVARFIPVKTTYGGNKLAELYFARIVSLHGVPKKIVSDRGSQFTSHFWKKLQEELGTRLNFSTAYHPQTDGQTEHLNQILEDMLRACVLDFGKTWDKSLPYAEFSYNNSYQASIQMAPYEALYGRKCRTPLLWDQVGESQVFGTDILREAEAKVRIIRDNLKVAQSRQKSYADNRRRDLEFAVGDFVYLRVTPLRGVHRFQTKGKLAPRVHTHMPRYKPEYLFGVEGFVQELRTMSFVIGFGTAPFYAQIPHDRHEEKCRVKVTLNSNSEEVPSVMFEAGGRNYIHACQEVARIAIGELRDRYSDQLADTEYRYHPRQPQGSDRGSYLETEGIENDATTRHLVEMLWAMDESRAETVLAAQDREDRNRGKICKLEDKVDRLEKELAALKGEAPPQKARIRLTARKRALFVPRYQLAPKVRVVEKEVAPADPPVIIISSDEDEESKRTHSKIEWVATQDDEDEPNEPSIDLRCSEELE

SEQ ID NO: 19037 - protein, 642 aa, Oryza sativa
  Clone ID: TF_OSC11167j.C1.p1.fg
MSWHRAGVLLLGAQSCLPVPGVPAVGGLVTAGGDSFPAACQSAALLAIGTLHQRYPDELQHSPYRYHPRRGGARDYATFRDASSEDDATIVHLAHMVEAYDAARIDFHQMVRRGMVENNMKILELRQENLQLKKDLDAVEAQLHQLKIAQGEICRPKRRRVCRSQKITARKSTSRPELVRQSLAWTCFVETPRAEPAPVVPQEGEASCVGSTEDALLLTFRPGPSQRRNAATGDGNQPEGSNHNHQGNPPQPPPPPPPPPPDTNAILTQILAQQANMMTAFLHHLQNPPQLNAPLPPPQHSKLAEFLRIRPPTFSSSNNPVDALDWLHAVGKKLDTVQCSDEEKVIFAAHQLQGPASLWWDHFQATQPEGQPITWARFTAAFRRTHVPAGVVALKKREFRELKQGNRSVMEYLHEFNNLAGYAPEDVREDEEKQEKFLVGMDPELSVRLVSGDYPDFQRLVDKSIRLEAKHKELESHKRRLANFRNQQGANQRVRYTNPYPGGSSSQQQQQQQPRSAPRPQFVVRVPQPQQQQGQQGTRAPRPPTPTVQPGQGHRDAQGQQRLCFNCFEPGHFADKCPKPRRQQGQAPPRPNNGGKDVIRGRVNHVTAEDVLTTPDVIVGSSETCFRKNYPVCRPSERLSSG

SEQ ID NO: 19038 - protein, 179 aa, Oryza sativa
  Clone ID: TF_OSC11420j.C1.p1.fg
MDPELSVRLVSGDYPDFQRLVDKSIRLEAKHKELESHKRRLANFRNQQGANQRVRYTNPYPGGSSSQQQQQQQQPRPAPRPQFVVRVPQPQQQNQQGTRASRPPTPAVQPVQGRRDASGPQRLCFNCFEPGHFADKCPKPRRQQGQAPPRSNNGGKDVIRGRVNHVTAEDVLTTPDVTV

SEQ ID NO: 19039 - protein, 716 aa, Oryza sativa
  Clone ID: TF_OSC11437j.C1.p2.fg
MTGFVLELRGMCVVLGYPHGVDYQARPLPDQEGDDAEPHAAWEVTAVILSGSPERTSLAVTAGGDSFPAACQNAALLAIGTLHQRYPDELQHSPYRYHPRRGGARDHATFRDASSEDDATVVHLARMVEAYDAARIDFHQMVRRGMVENNLKILELRQENLQLKKDLDALEAQLHQLKIAQGEDSRPKRRRVCRSQKITARKSTSRPELVRQSLAWTCFVETPRAEPAPVVPQEGEASGVGSSEAPSLFAGSVWGFQMVTTRRNVNTGEGNQPEGSNPNPQGNPPPPPPPDTNAILTQILAQQANMMTAFLHHLQNPPQQNAPPPPPQHSKLAEFLRIRPPTFSSSNNPVDALDWLHAVGKKLDTVQCSDEEKVIFAAHQLQGPASLWWDHFQATQPEGQPITWARFTAAFRRTHVPAGVVALKKREFRELKQGNRSVMEYLHEFNNLARYAPEDVREDEEKQEKFLAGMDPELSVRLVSGDYPDFQRLVDKSIRLEAKHKELESHKRRLANFRNQQGANQRVRYTNPYPGGSSSQQQQQQPRSAPRPQFVVRVPQPQQQQNQQGTRAPRPPTPAVQPVQGRRDASGPQRLCFNCFEPGHFADKCPKPRRQQGQAPPRSNNGGKDVIRGRVNHVTAEDVLTTPDVIVEKKDKTKRMCVDYRALNEVTIKNNVSRQNTNDRPDFSNLFKYQNGSGMKLGWISSPDFQKPKADMILYG

SEQ ID NO: 19040 - protein, 2006 aa, Oryza sativa
  Clone ID: TF_OSC11437j.C1.p2.np
MESESSARDSSLSGRSFLPPALFKPSPSSALSFPPLAAHSRRRNRARAVLSPRRRRRASVSRRRRSALPPDSATPPSASPHRRRPRPPLRFARRPPEHRRHRHPEPRRRLLPLRPPFSSSPLSRGEPKTVPFVSPFPPLSRVPLRRAVGRRRRPSGRGCALSRRPRRRGRPRARPRGCQVGPAVSRPRPRVRLTRGTHGADRRQPRAPGPPWTHLGRIRTGLRASVAKHYRFHMSSGTNEGYTSCGPVVEMSWRRVGAMLGAQFCLPVPGIPAVGRIGSMYTSDQSIIYSNSRALGYGQAEQCTQMAGSITRRGLDMTGFVLELRGMCVVLGYPHGVDYQARPLPDQEGDDAEPHAAWEVTAVILSGSPERTSLAVTAGGDSFPAACQNAALLAIGTLHQRYPDELQHSPYRYHPRRGGARDHATFRDASSEDDATVVHLARMVEAYDAARIDFHQMVRRGMVENNLKILELRQENLQLKKDLDALEAQLHQLKIAQGEDSRPKRRRVCRSQKITARKSTSRPELVRQSLAWTCFVETPRAEPAPVVPQEGEASGVGSSEGALLLTFHGETRRNVNTGEGNQPEGSNPNPQGNPPPPPPPDTNAILTQILAQQANMMTAFLHHLQNPPQQNAPPPPPQHSKLAEFLRIRPPTFSSSNNPVDALDWLHAVGKKLDTVQCSDEEKVIFAAHQLQGPASLWWDHFQATQPEGQPITWARFTAAFRRTHVPAGVVALKKREFRELKQGNRSVMEYLHEFNNLARYAPEDVREDEEKQEKFLAGMDPELSVRLVSGDYPDFQRLVDKSIRLEAKHKELESHKRRLANFRNQQGANQRVRYTNPYPGGSSSQQQQQQPRSAPRPQFVVRVPQPQQQQNQQGTRAPRPPTPAVQPVQGRRDASGPQRLCFNCFEPGHFADKCPKPRRQQGQAPPRSNNGGKDVIRGRVNHVTAEDVLTTPDVIVGTFLVHSIPATILFDSGASHSFISVPFVGKNQLGVERLRNPLLITTPGGVMTAKYYSPAVPIEIQGIPFPSDLILLDTKNLDVILGMNWLAQFQGVVDCARRTVTLYRGPEQPVVFFAPPTSVRSSELHQIGLSEIPIVREFGDVFPEELPGMPPKREIEFRIDLAPGTTPLYKRPYRMAANELAEVKKQLEELKEKGYIRPSTSPWGAPVIFVEKKDKTKRMCVDYRALNEVTIKNKYPLPRIDDLFDQLKGATVFSKIDLRSGYHQLRIREEDIPKTAFTTRYGLYEFTVMSFGLTNAPAFFMNLMNKAFMEYLDKFVVVFIDDILIYSQSEEDHQHHLRLVLGKLREHQLYAKLSKCEFWLSEVKFLGHVISAKGVAVDPETVTAVTDWKQPKTVTQIRSFLGLAGYYRRFIENFSKIARPMTQLLKKEEKFVWSPQCEKAFQTLKEKLVSSPVLILPDTRKDFMVYCDASRQGLGCVLMQDGHVVAYASRQLRPHEGNYPTHDLELAAVVHALKIWRHYLIGNRCEIYTDHKSLKYIFTQSDLNLRQRRWLELIKDYDVGIHYHPGKANVVADALSRKSHCNTFNVRSIPPELSQQMEALNLNIVGRGFLAALEAKPTLLDQIREAQKNDPDMHGLLKNMKQGKAAGFTEDEHGTLWNGKRRVKAEHQRPAGLLQPLQVPEWKWDEIGMDFITGLPKTQGGYDSIWVIVDRLTKVARFIPVKTTYGGNKLAELYFARIVSLHGIPKKIVSDRGSQFTSHFWKKLQEELGTRLNFSTAYHPQTDGQTERLNQILEDMLRACVLDFGKTWDKSLPYAEFSYNNSYQASIQMAPYEALYGRKCRTPLLWDQVGESQVFGTDILREAEAKVRIIRDNLKVAQSRQKSYADNRRRDLEFAVDDFVYLRVTPLRGVHRFQTKGKLAPRYVGPFRIIARRGEVAYQLELPASLGNVHDVFHVSQLKKCLRVPSEQANSEQIEVREDLTYVERPVKILDTMERRTRNRVIRFCKVQWSNHAEEEATWERENELKAAHPDLFANSSESRGRDSV

SEQ ID NO: 19041 - protein, 344 aa, Oryza sativa
  Clone ID: TF_OSC11441j.C1.p1.fg
MMNAFLHHLQNPPQQNAPPPPPQHSKLAEFLRIRPPTFSSSNNPVDALDWLHAVGKKLDTVQCSDEEKVIFAAHQLQGPASLWWDHFQATQPEGQPITWTRFTAAFRKTHVPAGVVALKKREFRELKQGNRSVMEYLHEFNNLARYAPEDVREDEEKQEKFLAGMDPELSVRLVSGDYPDFQRLVDKSIRLEAKHKELESHKRRLANFRNQQGANQRVRYTNPYPGGSSSQQQQQQQQPRPAPRPQFVVRVPQPQQQQNQQGTRAPRPPTPAVQPVQGRRDAQGQQRLCFNCFEPGHFADKCPKPRRQQGQAPPRSNNGGKDVIRGRVNHVTAEDVLTTPDVIV

SEQ ID NO: 19042 - protein, 1396 aa, Oryza sativa
  unsure (1)..(1396): unsure at all Xaa locations
  Clone ID: TF_OSC11805j.C1.p2.np
LLHLSSKSNLXNVAFLFCFCLXMAGSINRRGLDLRGMCVVLGYPHGVDYQGKQLPEQEGDDAEPHAAWEVTVVILTGSPERTSLAVTAGGDSFSAACQNAAPLAIGTLHQRYPDELQHSPYRYHPRRGGAHDYATFRDASSEDDATIMHLARMVDTYDAARIDFHQMVRRGLVENNMKILELRQENLQLKKDLDVVEAQLCQLKIAQGEVCRPKRRRVYRSLKITARKSTSRPELVRQSLAWTCFVETPRAEPAPVVPQEEGASGVGSMEDALLLTFRPGPSQNLFSLLAGSVWDFQMVTTRRSAATGDDNQPEGSNPNIQGSPPPPPPPPPPPPPDTNSILTQILAQQANMMAAFLHHIQNPPQHNAPPPPPPPQHSKLAEFLRICPPTFSSSNNPVDALDWLHAVGKKLDTVQCNDEEKVIFAAHQLQPASLGWHFQATQPEGQPITWARFTAAFRRTHVPAGVMALKKREFRELKQGNRSVMEYLHEFNNLARYAPEDVREDEEKQEKFLAGMDPDLSVRLDSGDYPDFQHLVDKSICLEAKHKELESHKHRLANFHNQQVANQRVRYTNPYPGGSSSQQQQQQPRSAPRPQFVVRVPQPQQQQSQQGTHAPRPPAPVVQPGQGRRDIQGQQRLCFNCFEPGHFADKCPKPRRSXGQAPPRPNNGGKDVIRDRVNHVTAEDVLTTPDVIVGTFLIHSIPATILFDSGASHSFMSVPFVGRNQLGVERLRNPLLITTPRGVMTAKYYSPTIPIEIQGIPFPSDLILLDTKNLDVIIGMNWLAQFQGVVDCARRTVTLYRGPDQLVVFFAPPTSVGSSELHQIGLSEIPIVSEFGDVFPEELPGMPPKREIEFWIDLAPGTTPLYKRPNRMAANELAEVKKQLEELKEKGYIRPSTSPXGAPVIFVEKKDKTKRMCVDYRALNEVTIKNKYPLPQIDDLFDQLKGATVFSKIDLRSRYHQLCIREEDIPKTAFTTRYGLYEFTVMSFGLTNAPAFFMNLMNKVFMEYLDKFVVVFIDDILVYSQSEEDHQQHLRLVLGKLREHQLYAKLSKCEFWLSEVKFLGHVISAKGVAMDPETVTAVTDGKQPKTVTQVRSFLGLAGYYRRFIENFSKIARPMTQLLKKEEKFVWSPQCEKAFQTLKEKLVSSPVLILPDTRKDFMVYCDASRQGLGCVLMQEGHVVAYASRQLRPHEGNYPTHDLELAAVVHALKIWRHYLIGNRYEIYTDHKSLKYIFTQSDLNLRQRRWLELIKDYDVGIHYHPGKANVVADALSRKSRCNTLGVRGIPPELHQQMEALNLSIVGHGFLATLEAKPTLLDQIREVQKNDPDMHGILKNMKQGKAAGFTEDEHGTLWNGNRVCVPDDKELKQLILQEAHESPYSIHPGSFHPLRPLSPP

SEQ ID NO: 19043 - protein, 1594 aa, Oryza sativa
  unsure (1)..(1594): unsure at all Xaa locations
  Clone ID: TF_OSC12550j.C1.p1.np
MAAGSSAADSPSSGRSLPLPTLFKRSPCLPPPFPPLAALSPRRNRARAVALFLRRRRRAPVRRRRRPGPPPASASPPSASRRSPERRRPRRPEPRRRLPPLRSPFPSSPSTRGEPWTRFTSPFPPLSRAPLRRAGGRRRRPSGRGRVASRRLCRRGRLRARPAAAMWGPAVSRPRPRVRLTRGTHGAGRRKPRAPGPSWTHLGHIRTGLRASVAKHYRFHMSSGANEGYTSCGPVVEMSWHRAGVLLLGAQSYLPVPGVPAVGGIVSMYTSDQSTTYSNSRALGYGQAEQCTQKAGSVTRRGLDMTGFVLELRGMCVVLGYPHGVDYQARPLPEQEGDDAEPHAGWEVTAVILSGSPERTSLAVTAGGDSFPAACQSAALLAIGTLHQRYPDELYNWHYRYHPCCGXARYYSTFRDASSKDDATIMHLARMVEAYDAARIDFHQMVRRGMVENNMKIQELRQENLQLKKDLDAVEAQLHQLKIAQGEVCRPKRRRVCRSQKITARKSTSRPELVRQSLAWTCFVETPRAEPAPVVPQEGEASGVGSTEDALLLTFHGETRRNAATSDGNQPEGSNHNNHGSPPPPPPPPPPPPPPPDTNAILTQILAQQANMMTAFLHHLQNPPQHNAPPPPPQHSKLAEFLRIRPPTFSSSNNPVDALDWLHAVGKKLDTVQCSDEEKVIFAAHQLQGPASLWWDHFQATQPEGQPITWARFTAAFRRTHVPAGVVALKKREFRELKQGNRSVMEYLHEFNNLARYAPEDVREDEEKQEKFLAGMDPELSVRLVSVDYPDFQCLVDKSIRLEAKHKELESHKRRLANFRNQQGANQRVRYTNPYPGGSSSQQQQQQQQPRSAPRPQFMVRVPQPQQQQSQQGTRAPRPPTPTVQPGQGRRDVQGPQRLCFNCFEPGHFADKCPKPRRQQGQVPPRSNNGGKDVIRGRVNHVTAEDVLTTPDVIVGTFLIHSIPATILFDSGASHSFISVPFVGRNQLGVERLRNPLLITTPGGVMTAKYYSPAVPIEIQGIPFPSDLILLDTKNLDVILGMNWLAQFQGVVDCARRTVTLYRGPEQPVVFFAPPTSVRSSELHQIGLSEIPIVREFGDVFPEELPGMPPKREIEFRIDLAPGTIPLYKRPYRMAANELAEVKKQLEELTEKGYIRPSTSPWGAPVIFVEKKDKTKRMCVDYRALNEVTIKNKYPLPRIDDLFDQLKGATVFSKIDLRSGYHQLRIREEDIPKTAFTTRYGLYEFTVMSFGLTNAPAFFMNLMNKVFMEYLDKFVVVFIDDILIYSQSEEDHQHHLRLVLGKLREHQLYAKLSKCEFWLSEVKFLGHVISAKGVAVDPETVTAVTDWKQSKTVTQVRSFLGLAGYYRRFIENFSKIARPMTQLLKKEEKFVWSPQCEKAFKTLKEKLVASPVLILPDTRKDFMVYCDASRQGLGCVLMQDGHVVAYASRQLRPHEGNYPTHDLELAAVVHALKIWRHYLIGNRCEIYTDHKSLKYIFTQSDLNLRQRRWLELIKDYDVGIHYHPGKANVVADALSRKSHCNTLNICGIPPELNQQMAARNLSIVSRGFLAALEAKPTLLDQIREAQKNDPDMHG

SEQ ID NO: 19044 - protein, 1735 aa, Oryza sativa
  Clone ID: TF_OSC12557j.C1.p1.fg
MTGFVLELRGMCVVLGYPHGVDYQARPLPEQEGEDAEPHAGWEVTAVILSGSPERTSLAVTAGGDSFPAACQNAALLAIGTLHQRYPDELQHSPYRYHPRRGGASDHATFRDASSEDDATVVHLARMVEAYDAARIDFHQMVRRGMVENNMKILELRQENLQLKKDLDALEAQPHQLKVAQGEISRPKRRRVCRSQKITARKSTSRPELVRQSLAWTCFVETPRAEPAPVVPQEGEASGVGSSEGALLLTFRPGPSQRRNVNTGEGNQPEGSNPNPQGNPPPPPPPDTNAILTQILAQQANMMNAFLHHLQNPPQQNAPPPPPQHSKLAEFLRIRPPTFSSSNNPVDALDWLHAVGKKLDTVQCSDEEKVIFAAHQLQGPASLWWDHFQAAQPEGQPITWTRFTAAFRRTHVPAGVVALKKKEFRELKQGNRSVMEYLHEFNNLARYAPEDVREDEEKQEKFLAGMDPELSVRLVSGDYPDFQRLVDKSIRLEAKHKELESHKRRLANIRNQQGANQRVRYTNPYPGGSSSQQQQQQQQQPRSAPRPQFVVRVPQQQPQQNQQGTRAPRPPTPAGQPVQGRRDASGPQRLCFNCFEPGHFADKCPKPRRQQGQAPPRPNNGGKDVIRGRVNHVTAEDVLTTPDVIVGTFLVHSIPATILFDSGASHSFISVPFVGKNQLGVERLRNPLLITTPGGVMTAKYYSPAVPIEIQGIPFPSDLILLDTKNLDVILGMNWLAQFQGVVDCARRTVTLYRGPEQPVCQKSPSSESSEIFPEELPGMPPKREIEFRIDLAPGTTPLYKRPYRMAANELAEVKKQLEELKEKGYIRPSTSPWGAPVIFVEKKDKTKRMCVDYRALNEVTIKNKYPLPRIDDLFDQLKGATVFSKIDLRSGYHQLRIREEDIPKTAFTTRYGLYEFTVMSFGLTNAPAFFMNLMNKVFMEYLDKFVVVFIDDILIYSQTEEDHQHHLRLVLGKLREHQLYAKLSKCEFWLSEVKFLGHVISAKGVAVDPETVTAVTEWKQPKTVTQIRSFLGLAGYYRRFIENFSKIARPMTQLLKKEEKFVWSPQCEKAFQTLKEKLVSSPVLILPDTRKDFMVYCDASRQGLGCVLMQDGHVVAYASRQLRPHEGNYPTHDLELAAVVHALKIWRHYLIGNRCEIYTDHKSLKYIFTQSDLNLRQRRWLELIKDYDVGIHYHPGKANVVADALSRKSHCNTLNVRGIPPELNQQMEALNLSIVGRGFLAALEAKPTLLDQIREAQKNDPDMHGLLKNMKQGKAAGFTEDEHGTLWNGKRVCVPDNRELKQLILQEAHESPYSIHPGSTKMYLDLKEKYWWVSMKREIAEFVALCDVCQRVKAEHQRPAGLLQPLQVPEWKWDEIGMDFITGLPKTQGGYDSIWVVVDRLTKVARFIPVKTTYGGNKLAELYFARIVSLHGIPKKIVSDRGSQFTSHFWKKLQEELGTRLNFSTAYHPQTDGQTERLNQILEDMLRACVLDFGKTWDKSLPYAEFSYNNSYQASIQMAPYEALYGRKCRTPLLWDQVGESQVFGTDILREAEAKVRIIRDNLKVAQSRQKSYADNRRRDLEFAVDDFVYLRVTPLRGVHRFQTKGKLAPRYVGPFRIIARRGEVAYQLELPASLGNVHDVFHVSQLKKCLRVPSEQANSEQIEVREDLTYVERPVKILDTMERRTRNRVIRFCKVQWSNHAEEEATWEREDELKAAHPDLFASSSESRGRDSV

SEQ ID NO: 19045 - protein, 670 aa, Oryza sativa
  Clone ID: TF_OSC12919j.C1.p6.fg
MTGFVLELRGMCVVLGYPHGVDYQVRPLPEQEGEDAEPHAAWEVTAVILSGSPERTSLTVTAGGDSFPAACQNAALLAIGTLHQRYPDELQHSPYRYHPRRGGARDYATFRDASSEDDATVVHLARMVEAYDAARIDFHQMVRRGMVENNMKILELRQENLQLKKDLDALEAQLHQLKIAQGEISRPKRRRVCRSQKITARKSTSRPELVRQSLAWTCFVETPCAEPAPVVPQEGEASGVGSSEGALLLTFRPGPSQRSSSLFAGSVWGFQMVTTRRNVNTGGGNQPEGSNPNPQGNPPPPPPPDTNAILTQILAQQANMMNAFLHHLQNSPQQNAPPPPPQHSKLAEFLRIRPPTFSSSNNPVDALDWLHAVGKKLDTVQCSDEEKVIFAAHQLQGPASLWWDHFQATQPEGQPITWTRFTAAFRRTHVPAGVVALKKREFRELKQGNRSVMEYLHEFNNLARYAPEDVREDEEKQEKFLAGMDPELSVRLVSGDYPDFQRLVDKSIRLEAKHKELESHKRRLANFRNQQGANQRVRYTNPYPGGSSSQQQQQQQQPRSAPRPQFVVRVPQQQQQQNQQGTRAPRPPTPTVQPVQGRRDASGPQRLCFNCFEPGHFADKCPKPRRQQGQAPPRSNNGGKDVIRGRVNHVTAEDVLTTPDVIVEVQNCIR

SEQ ID NO: 19046 - protein, 1405 aa, Oryza sativa
  Clone ID: TF_OSC13213j.C1.p4.gm
MVMPLSLFAGSVWGFQMVTTRRNAATSDGNQLEGSNHNNHGSPPPPPPPPPPPPPDTNAILTQILTQQANMMAAFLHHIQNPPQHNAPPPPPQHSKLAEFLRIRPPTFSSSNNPVDVLDWLHAVGKKLDTVQCSDEEKVVFAAHQLQGPASLWWDHFQATQPEGQPITWARFTAAFRRTHVPAGVMALKKREFRELKQGNRSVMEYLHEFNNLARYAPEDVREDEEKQEKFLAGMDPELSVRLVSGDYPDFQRLVDKSIRLEAKHKELESHKRRLANFRNQQGANQRIRYTNPYPGGSSSQQQQPRSAPRPQFVVRVPQPQQQQSQQGTHAPRPPTPAAQSGQGRRDVQGPQRLCFNCFEPGHFADKCPKSRRQQGQAPPCSNNGGKDVIRGRVNHVTAEDVLTTPDVIVGTFLIHSIPATILFDSGASHSFISVPFVGRNQLGVERLRNPLLITTPGGVMTAKYYSPAVPIEIQGIPFPSDLILLDTKNLDVILGMNWLAQFQGVVDCARRTVTLYRGPEQPVVFFAPPTSVSSSELHQIGLSEIPIVREFGDVFPEELPGMPPKREIEFRIDLAPGTTPLYKRPYRMAANELAEVKKQLEELKEKGALNEVTIKNKYPLPRIDDLFDQLKGATVFSKIDLRSGYHQLRIREEDIPKTAFTTRYGLYEFTVMSFGLTNAPAFFMNLMNKVFMEYLDKFVVVFIDDILVYSQSEEDHQHHLRLVLGKLRKHQLYAKLSKYEFWLSEVKFLGHVISAKGVAVDPETVTAVTDWKQPKTVTQIRSFLGLAGYYRRFIENFSKIARPMTQLLKKEEKFVWSPQCEKAFKTLKEKLVSSLVLILPDTRKDFMRRWLELIKDYDVGIHYHPGKANVVADAQSRKSHCNTLNVRGIPPELNQQMEALNLSIVGRGFLAALEAKPTLLDQIREAQKNDPDMHGLLKNMKQGKAAGFTEDEHGTLWNGNRSSWPFVMCASVSRQSTNDRPDFSNLSKYQNGNGMKLGWISSPDFQKPKVDMILYGTAYHPQTDGQTERLNQILEDMLRACVLDFGNTWDKSLPYAEFSYNNSYQASIQMAPYEALYGRKCRTPLLWDQVGESQVFGTDILREAEAKVRTIRDNLKVAQSRQKSYADNRRRDLEFAVDDFVYLRVTPLRGVHRFQTKGKLAPRFVGPFRIIARRGEVAYQLELPASLGNVHDVFHVSQLKKCLRVPSEQADSEQIEVREDLTYVERPVKILDTMERRTRNRSAAVVAPDLLPLRRRLLRFRRNLADLVHPSVSLADRRNAAVPVYPSRAAAFLRSGRRSRCRRRPGVSCGPPIRFPLPFPLSGAAPPRRWSPAATIVARVRRLPSAVPAWPPSGAPRGCHVGPGRQPPAPSDAAASEDPLFVKVEATFGKVSKASHIILEHIES

SEQ ID NO: 19047 - protein, 590 aa, Oryza sativa
  Clone ID: TF_OSC13237j.C1.p1.fg
MSWHRAGVLLLGAQSCLPVPGVPAMAGSVSRRGLDMTGFVLELRGMCVVLGYPHGLDYQGRPLPEQEGDDAEPHASWEVTAVILTGSPERTSLAVTAGGDSFSAACQSAALLAIGTLHQRYPDELQHSPYRYHPRRGGARDYATFRDASSEDDATIMHLARMVEAYDAARIDFHQMVRRGMVENNLKILELRQENLQLKKDLDAVEAQLHQLKIAQGEMVTTRRNAATSDGNQLEGSNHNNHGSPPPPPPPPPPPPPDTNAILTQILTQQANMMAAFLHHIQNPPQHNAPPPPPQHSKLAEFLRIRPPTFSSSNNPVDVLDWLHAVGKKLDTVQCSDEEKVVFAAHQLQGPASLWWDHFQATQPEGQPITWARFTAAFRRTHVPAGVMALKKREFRELKQGNRSVMEYLHEFNNLARYAPEDVREDEEKQEKFLAGMDPELSVRLVSGDYPDFQRLVDKSIRLEAKHKELESHKRRLANFRNQQGANQRIRYTNPYPGGSSSQQQQPRSAPRPQFVVRVPQPQQQQSQQGTHAPRPPTPAAQSGQGRRDVQGPQRLCFNCFEPGHFADKCPKSRRQQGQAPPDVIVVAHP

SEQ ID NO: 19048 - protein, 523 aa, Oryza sativa
  Clone ID: TF_OSC13264j.C1.p2.gm
MVTPMVTTRRNVNTGEGNQPEGSNPNPQGNPPPPPPPDTNAILTQILAQQANMMNAFLHHLQNPPQQNAPPPPPQHSKLAEFLRIRPPTFSSSNNPVDALDWLHAVGKKLDTVQCSDEEKVVFAAHQLQGPASLWWDHFQATQPEGQPITWTRFTAAFRKTHVPAGVVALKKREFRELKQGSRSVMEYLHEFNNLARYAPEDVREDEEKQEKFLAGMDPELSVRLVSGDYPDFQRLVDKSIRLEAKHKELESHKRRLANFRNQQGANQRVRYTNPYPGGSSSQQQQQQQQQPRSAPRPQFVVRIPQPQQQQNQQGTRAPRPPTPTVQPVQGRRDAQGPQRLCFNCFEPGHFADKCPKPRRQQGQVPPRSNNGGKDVIRGRVNHVTAEDVLTTPDVIVELHQIGLSEIPIVREFGDVFPEELPGMPPKREIEFRIYLAPGTTPLYKRPYRMAANELAEVKKQLEELKEKGYIRPSTSPWGAPVIFVEKKDKTKRMCVDYRALNEVTIKNKYPLPRIDDLFDQLK

SEQ ID NO: 19049 - protein, 447 aa, Oryza sativa
  Clone ID: TF_OSC13325j.C1.p1.fg
MMTAFLHHLQNPPQQNAPPPPPQHSKLAEFLRIRPPTFSSSNNPVDALDWLHAVGKKLDTVQCSDEEKVIFAAHQLQGPASLWWDHFQATQPEGQPITWARFTAAFRRTHVPAGVVALKKREFRELKQGNRSVMEYLHEFNNLARYAPEDVREDEEKQEKFLAGMDPELSVRLVSGDYPDFQRLVDKSIRLEAKHKELESHKRRLANFRNQQGANQRVRYTNPYPGGSSSQQQQQQQQPRSAPRPQFVVRVPQPQQQQNQQGTRAPRPPTPAVQPVQGRRDAQGQQRLCFNCFEPGHFADKCPKPRRQQGQAPPRSNNGGKDVIRGRVNHVTAEDVLTTPDVIVEKKDKTKRMCVDYRALNEVTIKNKYPLPRIDDLFDQLKGATVFSKIDLRSGYHQLRIREEDIPKTAFTTRYGLYEFTRKTINTISVWCWESCGNINCMPSLAS

SEQ ID NO: 19050 - protein, 646 aa, Oryza sativa
  Clone ID: TF_OSC13698j.C1.p1.fg
MGTLHQRYPYELQHSPYRYHPRRGGARDYATFRDASSEDDATIVHLARMVEAYNAARIDFHQMVRRGMVENNMKILELRQENLQLKKDLDAVEAQLHQLKIAQGKVCRPKRRRVCRSQKITARKSTSRPELVRQSLAWTCFIETPRAEPAPVVPQEGEASGVALSLFAGSVWGFQMVTTRRNAVTGDGNQPEGSNHNHQGNPPSPSPPPPPPPPDTNAILTQILAQQANMMTAFLHHLQNPPQQNAPPPPPQHSKLAEFLRIRPPTFSSSNNPVDALDWLHAVGKKLDTVQCSDEEKVIFAAHQLQGPASLWWDHFQATQPEGQPITWARFTAAFRRTHVPAGVVALKKREFRELKQGNRSVMEYLHEFNNLARYAPEDVREDEEKQEKFLAGMDPELSVRLVSGDYPDFQRLVDKSIRLEAKHKELESHKRRLANFRNQQGANQRVRYTNPYPGGSSSQQQQQQQQPRSAPRPQFVVRVPQPQQQQNQQGTRAPRPPTQTVQPGQGRRDAQGQQRLCFNCFEPGHFADKCPKPRRQQGQAPPRPNNGGKDVIRGRVNHVMAEDVLTTPDVIVVTAVPDWKQPKTVTQVRSFLGLAGYYRSVSRQSTNDRPDFSNLSKYQNGNGMKLGWISSPDFQKPKVDMILYG

SEQ ID NO: 19051 - protein, 1744 aa, Oryza sativa
  Clone ID: TF_OSC13791j.C1.p1.fg
MSWHRAGVLLLGAQSCLPVPGVPAVGGVGSVLLSMARMGWKLCHVFRPYTVVMAGSINRRGLDLTGFVLELRGMCVVLGYPHGVDYQGKQLPEQEGDDAEPHAAWEVTAVILTGSPERTSLAVTAGGDSFSAACQNAALLAIGTLHQRYPDELQHSPYRYHPRRGGARDYATFRDASSEDDATIMHLARMVEVYDAARIDFHQMVRRGLVENNMKILELRQENLQLEKDLDAVEAQLRQLKIAQGEVCRLKRRRVYRSLKITARKSTSRPELVRQSLAWTCFVETPRAEPAPVVPQEDGASGVGSTKDALLLTFRPGPSEQVVWGMVMPMVTTRRRANTGDGNQPEGSNHNNHGSPPPPPPPPPPPPPDTNAILTQILAQQANMMPAFLHHIQNPPQHNAPPPPPQHSKLVEFLRIRPPTFSSSNNPVDALDWLHAVGKKLDTVQCSDEEKVIFAAHQLQGPASLWWDHFQATQPEGQPFTWARFTAAFRRTHVPAEVMALKKREFRELKQGNRSVMEYLHEFNNLARYAPEDVREDKEKQEKFLAGMDPELSMRLVSGDYPDFQRLVDKSIRLEAKHKKLESHKRCLANFRNQQGANQRVRYTNPYLGGSSSQQQQQQQPRSAPRPHFVVRVPQPQQQQSQQGTRAPRPPTPAVQPGQGRRDVQGQQRLCFNCFEPGHFADKCPKPRRQQGQPPPRPNNDGKDVIWGRVNHVTAEDVLTTPNVIVGTFLIHSIPTTILFDSGASHSFISVPFVGRNQLGVERLRNSLLITTPRGVMTAKYYSPAVPIEIQGIPFPSDLILLDTKNLDVILGMNWLAQFQGVVDCARRTVTLYRGPEQPVVFFAPPTSVGSSELHQIGLSEIPIVREFGDVFPEELPGMPPKREIEFRIDLAPGTTPLYKRPYRMASNELAELKGATVFSKIDLRSGYHQLRIREEDIPKTAFTTRYGLYEFTVMSFGLTNAPTFFMNLMNKVFMEYLDKFVVVFIDDILVYSQSEEDHQHHLRLVLGKLREHQLYAKLSKCEFWLSEVKFLGHVISAKGVAVDPETVTAVTGWKQSKTVTQIRSFLGLAGYYRRFIENFSKIARPMTQLLKKEEKFVWSPQCEKAFQTLKEKLVSSPVLILPDTRKDFMVYCDALRQGLGCVLMQEGHVVAYASRQLRPHEGNYPTHDLELAAVVHALKIWRHYLIGNRCEIYTDHKSLKYIFTQSDLNLRQRRWLELIKDYDVGIHYHPGKANVVANALSRKSHCNTLDVRGIPPELNQQMEALNLSIVGRGFLATLEAKPTLLDQIREAQKNDPDMRGLLKNMKQGKAAGFTEDEHGTLWNGNRVCVPDDRELKQLKLQEAHESPYSIHPGSTKMYLDLKEKYWWVSMQREIAEFVALCDVCQRVKAEHQRPAGLLQPLQVPEWKWDEIGMDFITGLPKTQGGYNSIWVVVDRLTKVARFIPVKTTYGGNKLAELYFARIVSLHGVPKKIVSDRGSQFTSHFWKKLQEELRTRLNFSTAYHPQTDGQTERLNQILEDMLRACVLDFGKTWDKSLPYAEFSYNNSYQASIQMAPYEALYGRKCRTPLLWDQVGESQVFGTDILREAEAKVRTIRDNLKVAQSRQKSYADNRRCNLEFAVDDFVYLRVTPLRGVHRFQTKGKLAPRFVGPFRIIARRGEVAYQLELPASLGNVHDVFHVSQLKKCLRVPSEQADSEQIEVREDLTYVERPVKILDTMERRTRNRVIRFCKVQWSNHAEEEATW

SEQ ID NO: 19052 - protein, 996 aa, Oryza sativa
  Clone ID: TF_OSC13812j.C1.p4.gm
ANMMTAFLHHLQNPPQQNAPPPPPQHSKLAEFLRIRPPTFSSSNNPVDALDWLHAVGKKLDTVQCSDEEKVIFAAHQLQGPASLWWDHFQATQPEGQPITWARFTAAFRRTHVPAGVVALKKREFRELKQGNRSVMEYLHEFNNLARYAPEDVREDEEKQEKFLAGMDPELSVRLVSGDYPDFQRLVDKSIRLEAKHKELESHKRRLANFRNQQGANQRVRYTNPYPGGSSSQQQQQQQQPRSAPRPQFVVRVPQPQQQQNQQGTRAPRPPTQTVQPGQGRRDAQGQQRLCFNCFEPGHFADKCPKPRRQQGQAPPRPNNGGKDVIRGRVNHVMAEDVLTTPDVIVEKKDKTKRICVDYRALNEVTIKNKYPLPRIDDLFDQLKGATVFSKIDLRSGYHQLRIREEDIPKTAFTTRYGLYEFTVMSFGLTNAPAFFMNLMNKVFMEYLDKFVVVFIDDILIYSQSEEDHQHHLRLVLGKLREHQLYAKLSKCEFWLSEVKFLGHVISAKGVAVDPKTVTAVTDWKQPKTVTQVRSFLGLAGYYRRFIENFSKIARPMTQLLKKEEKFVWSPQCEKAFQTLKEKLVSSPVLILPDTRKDFMVYCDASRQGLGCVLMQDGHVVAYASRQLRPHEGSYPTHDLELAAVVHALKIWRHYLIGNRCEIYTDHKSLKYIFTQSDLNLRQRRWLELIKDYDVGIHYHPGKANVVADALSRKSHCNTLNVRGIPLELNQQMEALNLSIVSRGFLTALEAKPTLLDQIRKAQKNDPDMHGLLKNMKQGKAAGFTEDEHGTLWNGNRVCVPDNRELKQLILQEAHESPYSIHPGSTKMYLDLKEKYWWVSMKREIAEFVALCDVCQRVKAEHQRPAGLLQPLQVPEWKWDEIGMDFITGLPKTQGGYDSIWVVVDRLTKVARFIPVKTTYGGNKLAELYFARIVSLHGVPKKIISDRGSQFTSHFWKKLQEELGTRLNFSTAYHPQTDGQTERLNQILEDMLRALY

SEQ ID NO: 19053 - protein, 401 aa, Oryza sativa
  Clone ID: TF_OSC13849j.C1.p2.fg
MVTTRRSAATGEGSHPEGSNHNNHGSPPPPPPPPPPPPPPDTNSILTQILAQQANMMAAFLHHIQNPPQHNVPPPSPPPQHSKLAEFLRIRPPTFSSSNNPVDALDWLHAVGKKLDTVQCNDEEKVIFAAHQLQGPASLWWDNFQAMQPEGQPITWARFTAAFRRTHVPAGVMALKKREFRELKQGNRSVMEYLHEFNDLARYAPEDVREDEEKQEKFLAGMDPELSVRLVSGDYPDFQRLVDKSIRLEAKHKELESHKRRLANFRNQQGANQRIRYTNPYPGGSSSQQQQQQQPRSAPRPQFVVRVPQPQQQQSQQGTRAPRPHVPAVQPGQGRRDAQGQQRLCFNCFEPGHFADKCPKPRRQQGQAPPRPNNGGKDVIRGRVNHVTAEDVLTTPDVIVA

SEQ ID NO: 19054 - protein, 670 aa, Oryza sativa
  Clone ID: TF_OSC14703j.C1.p1.fg
MTGFVLELRGMCVVLGYPHGVDYQARPLPEQEGEDAEPHAGWEVTAVILSGSPERTSLAVTAGGDSFPAACQNAALLAIGTLHQRYPDELQHSPYRYHPRRGEARDFATFRDASSEDDATVVHLARMVEAYDAARIDFHQMVRRGMVENNMKILELRQENLQLKKDLDALEAQLHQLKIAQGEDSRPKRRRVCRSQKITARKSTSRPELVRQSLAWTCFVETPRAEPAPVVPQEGEASGVGSTEDALLLAFRPGPSQRRNVSTGEGNQPEGSNPNPQGNPPPPPPPDTNAILTQILAQQANMMTAFLHHLQNPPQQNAPPPPPQHSKLAEFLRIRPPTFSSSNNPVDALDWLHAVGKKLDTVQCSDEEKVIFAAHQLQGPASLWWDHFQATQPEGQPITWARFTAAFRRTHVPAGVVALKKREFRELKQGNRSVMEYLHEFNNLARYAPEDVREDEEKQEKFLAGMDPELSVRLVSGDYPDFQRLVDKSIRLEAKHKELESHKRRLANFRNQQGANQRVRYTNPYPGGSSSQQQQQQQQSRSAPRPQFVVRVPQPQQQQNQQGTRAPRPPTPTVQPVQSRRDAQGQQRLCFNCFEPGHFADKCPKPRRQQGQAPPRSNNGGKDVIRGRVNHVTAEDVLTTPDVIVVRRRPSAPSPSGVGKVAGTSIVCQA

SEQ ID NO: 19055 - protein, 400 aa, Oryza sativa
  Clone ID: TF_OSC14706j.C1.p1.fg
MVTTRRNVNTGEGNQPEGSNPNPQGNPPPPPPPDTNAILTQILAQQANMMNAFLHHLQNPPQQNAPPPPPQHSKLAEFLRIRPPTFSSSNNPVDALDWLHAVGKKLDTVQCSDEEKVVFAAHQLQGPASLWWDHFQAAQPEGQPITWARFTAAFRRTHVPAGVVALKKREFRELKQGNRSVMEYLHEFNNLARYAPEDVREDEEKQEKFLAGMDPELSVRLVSGDYPDFQRLVDKSIRLEAKHKELESHKRRLANFRNQQGANQRVRYTNPYPGGSSSQQQQQQQQPRPAPRPQFVVRVPQPQQQQNQQGTRAPRPPTPAVPPVQGRRDAQGQQRLCFNCFEPGHFADKCPKPRRQQGQAPPRSNNGGKDVIRGRVNHVTAEDVLTTPDVIVVVGLNFKE

SEQ ID NO: 19056 - protein, 1319 aa, Oryza sativa
  Clone ID: TF_OSC15024j.C1.p1.fg
MSWHRAGVLLLGGSILAGCPGGSGRLKRLCNNATQPEGQPITWARFTAAFRRTHVPAGVMALKKREFRELKQGNRSVMEYLHEFNNLARYAPEDVREDEEKQEKFLAGMDPELSVRLVSGDYPDFQRLVDKSIRLEAKHKELESHKRRLANFRNQQGANQRIRYTNPYPGGSSSQQQQPRSAPRPQFVVRVPQPQQQQSQQGTRAPRPPTPAAQSGQGRRDVQGPQRLCFNCFEPGHFADKCPKPRRQQGQAPPRSNNGGKDVIWGRVNHVTAEDVLTTPDVIVGTFLIHSIPATILFDSGASHSFISVPFMGRNQLGVERLRNPLLITTPGGVMTAKYYSPAVPIEIQGIPFPSDLILLDTKNLDVILGMNWLAQFQGVVDCARRTVTLYRGPEQPVVFFAPPTSVSSSELHQIGLSEIPIVREFGDVFPEELPGMPPKREIEFRIDLAPGTTPLYKRPYRMAANELAEVKKQLEELKEKGYIRPSTSPWGAPVIFVEKKDKTKRMCVDYRALNEVTIKNKYPLPRIDDLFDQLKGATVFSKIDLRSGYHQLRIREEDIPKTAFTTRYGLYEFTVMSFGLTNAPAFFMNLMNKVFMEYLDKFVVVFIDDILVYSQSEEDHQHHLRLVLGKLREHQLYAKLSKCEFWLSEVKFLGHVISAKGVAVDPETVTAVTDWKQPKTVTQIRSFLGLAGYYRRFIENFSKIARPMTQLLKKEEKFVWSPQCEKAFQTLKEKLVSSPVLIMPDTRKDFTVYCDASRQGLGCVLMQDGHVVAYASRQLRPHEGNYPTHDLELAAVVHALKIWRHYLIGNRCEIYTDHKSLKYIFTQSDLNLRQRRWLELIKDYDVGIHYHPGKANVVADALSRKSHCNTLNVRGIPPELNQQMEALNLSIVGRGFLAALEAKPTLLDQIREAQKNDPDMRGLLKNMKQGKAAGFTEDEHGTLWNGNRVCVPDNREHKELILQEAHESPYSIHPGSTKMYLDLKEKYWWVSMKREIAEFVALCDVCQRVKAEHQRPAGLLQPLQVPEWKWDEIGMDFITGLSKTQGGYDSIWVVVDRLTKVARFIPVKTTYGGNKLAELYFARIVSLHGVPKKIVSDRGSQFTSHFWKKLQEELGTRLNFSTTYHPQTDGQTERLNQILEDMLRACVLDFGKTWDKSLPYAEFSYNNSYQASILMAPYEALYGRKCRTPLLWDQVGESQVFGTDILREAEAKVRTIRDNLKVAQSRQKSYADNRRRDLEFAVDDFVYLRVTSLRGVHRFQTKGKLAPRFVGPFRIIARRGEVAYQLELPASLGNVHDVFHVSQLKKCLRVPSEKADSE

SEQ ID NO: 19057 - protein, 1436 aa, Oryza sativa
  unsure (1)..(1436): unsure at all Xaa locations
  Clone ID: TF_OSC15024j.C1.p3.np
HRRRPSGRGPPPVGCAGVAAFGRPRLPCGGRPVREKAIFSVATKKLDTVQCSDEEKVVFAAHQLQGPASLWWDHFQATQPEGQPITWARFTAAFRRTHVPAGVMALKKREFRELKQGNRSVMEYLHEFNNLARYAPEDVREDEEKQEKFLAGMDPELSVRLVSGDYPDFQRLVDKSIRLEAKHKELESHKRRLANFRNQQGANQRIRYTNPYPGGSSSQQQQPRSAPRPQFVVRVPQPQQQQSQQGTRAPRPPTPAAQSGQGRRDVQGPQRLCFNCFEPGHFADKCPKPRRQQGQAPPRSNNGGKDVIWGRVNHVTAEDVLTTPDVIVGTFLIHSIPATILFDSGASHSFISVPFMGRNQLGVERLRNPLLITTPGGVMTAKYYSPAVPIEIQGIPFPSDLILLDTKNLDVILGMNWLAQFQGVVDCARRTVTLYRGPEQPVVFFAPPTSVSSSELHQIGLSEIPIVREFGDVFPEELPGMPPKREIEFRIDLAPGTTPLYKRPYRMAANELAEVKKQLEELKEKGYIRPSTSPWGAPVIFVEKKDKTKRMCVDYRALNEVTIKNKYPLPRIDDLFDQLKGATVFSKIDLRSGYHQLRIREEDIPKTAFTTRYGLYEFTVMSFGLTNAPAFFMNLMNKVFMEYLDKFVVVFIDDILVYSQSEEDHQHHLRLVLGKLREHQLYAKLSKCEFWLSEVKFLGHVISAKGVAVDPETVTAVTDWKQPKTVTQIRSFLGLAGYYRRFIENFSKIARPMTQLLKKEEKFVWSPQCEKAFQTLKEKLVSSPVLIMPDTRKDFTVYCDASRQGLGCVLMQDGHVVAYASRQLRPHEGNYPTHDLELAAVVHALKIWRHYLIGNRCEIYTDHKSLKYIFTQSDLNLRQRRWLELIKDYDVGIHYHPGKANVVADALSRKSHCNTLNVRGIPPELNQQMEALNLSIVGRGFLAALEAKPTLLDQIREAQKNDPDMRGLLKNMKQGKAAGFTEDEHGTLWNGNRVCVPDNREHKELILQEAHESPYSIHPGSTKMYLDLKEKYWWVSMKREIAEFVALCDVCQRVKAEHQRPAGLLQPLQVPEWKWDEIGMDFITGLSKTQGGYDSIWVVVDRLTKVARFIPVKTTYGGNKLAELYFARIVSLHGVPKKIVSDRGSQFTSHFWKKLQEELGTRLNFSTTYHPQTDGQTERLNQILEDMLRACVLDFGKTWDKSLPYAEFSYNNSYQASILMAPYEALYGRKCRTPLLWDQVGESQVFGTDILREAEAKVRTIRDNLKVAQSRQKSYADNRRRDLEFAVDDFVYLRVTSLRGVHRFQTKGKLAPRFVGPFRIIARRGEVAYQLELPASLGNVHDVFHVSQLKKCLRVPSEKADSEXIEVREDLTYVERPVKILDTMERRTRNRVIRFCKVQWSNHAEEEATWEREDELKAAHPDLFVSSSESRGRDSV

SEQ ID NO: 19058 - protein, 398 aa, Oryza sativa
  Clone ID: TF_OSC15153j.C1.p1.fg
MVTTRRNAATGDGNQPEGSNHNHQGNPPPPPPPPPPPPPDTNAILTQILAQQANMMTVFLHHLQNPPQQNAPPPPPQHSKLAEFLRIRPPTFSSSNNPVDALDWLHAVGKKLDTAQCSDEEKVIFAAHQLQGPASLWWDHFQATQPEGQPITWARFTAAFRRTHVPAGVVALKKREFRELKQGNRSVMEYLHEFNNLARYAPEDVREDEEKQEKFLAGMDLELSVRLVSGDYPDFQRLVDKSIRLEAKHKELESHKRRLANFRNQQCANQRVRYTNPYPGGSSSQQQQQQQQPRSAPRPQFVVRVPQPQQQQNQQGTRAPRPPTPTVQPGQGRRDAQGQQRLCFNCFEPGHFADKCPKPRRQQGQAPPRSNNGGKDVIRGRVNHVTAEDVLTTPDVIV

SEQ ID NO: 19059 - protein, 1925 aa, Oryza sativa
  unsure (1)..(1925): unsure at all Xaa locations
  Clone ID: TF_OSC15185j.C1.p1.np
MAAGSSTTDSPSSGRSLLLPTLHKHSPCLPPSFPPLAALSPRRNRARNVVLSLRRRRRAPVRRRRRTGPPPVSASPSSGSPRPRQSRPPLRFARRPPERRRPRRPEPRRPLSPLRSPFPSSPSTRGEPWTAHFASPFPPLSRAPLRRAGGRRRRPSGRGRAASRRLCRRGRLRARPAAAMWGPVVSRPRPRVRLTRGTHGAGRRKPRAPGPPWTHLGHIRTGVRASVAKHYRFHMSSGANEGYTSCGPVVEMSWHRAGVLLLGAQSCLPVPGVPAVGGIGSMYTSDQSKIYSNSRALGYGQAEQCTQMAGSVSRRGLDMTGFVLELRGMCVVLGHPHGVDYQARPLPEQEGDDAEPHAAWEVTAVILAGSPERTSLTVTAGGDSFPAACQSAALLAIGTLHQRYPDELQHSPYRYHPRRGGARDYATFRDASSEDDATIVHLARMVEAYDAARIDFHQMVRRGMVENNMKILELRQENLQLKKDLDAVEAQLHQLKIAQGEICRPKHRRVYRSQKITARKSTSRPELVRQSLAWTCFVETPRAEPAPVVPQEGEASGVGSTEDALLLTFHGETRRNAATSDGNQPEDSNHNNHGSPPPPPPPPPPPPPDTNAILTQILAQQANMMTAFLHHLQNPPQHNAPPPPPQHSKLAEFLRICPPTFSSSNNPVDALDWLHAVGKKLDTVQCSDEEKVIFAAHQLQGPASLWWDHFQATQPEGQPITWARFTAAFRRTHVPAGVVALKKREFRELKQGNRSVMEYLHEFNNLARYAPEDVREDEEKQEKFLAGMDPELSVCLVSGDYPDFQRLVDKSIRLEAKHKELESHKRRLANFHNQQGANQRVRYTNPYPGGSSSQQQQQQQQPRSAPRPQFVVRVPQPQQEQNQQGTRAPRPPPPTVQPGQGRRDAQGPQRLCFNCFEPGHFADKCPKPRRQQGQAPPRPNNGGKDVIRGRVNHVTAEDVLTTPDVIVGTFLIHSIPATILFDSGASHSFISVPFVGRNQLGVERLRNPLLITTPGGVMTAKYYSPAVPIEIQGIPFPSDLILLGTKNLDVILGMNWLAQFQGVVDCARRTVTLYRGPEQPVVFFAPPTSVRSSELHQIELSEIPIVREFGDVFPEELPGMPPKREIEFRIDLAPGTAPLYKRPYRMAANELAEVKKQLEELKEKGYIRPSTSPWGAPVIFVEKKDKTKRMCVDYRALNEVTIKNKYPLPRIDDLFNQLKGATVFSKIDLRSGYHQLRIREEDIPKTAFTTRYGLYEFTVMSFGLTNAPAFFMNLMNKVFMEYLDKFVVVFIDDILIYSQSEEDHQHHLRLVLGKLREHQLYAKLSKCEFWLSEVKFLGHVISAKGVAVDPETVIAVTDWKQPKTVTQVRSFLGLAGYYRRFIENFSKIARPMTQLLKKEEKFVWSPQCEKAFQTLKEKLVSSPVLILPDTHKDFMVYCDASRQGXGCVLMQDGYVVAYASRQLRPHEGNYPTHDLELAAVVHALKIWWHYLIGNRCEIYTDHKSLKYIFTQSDLNLRQRRWLELIKDYDVGIHYHPGKANVVADALSRKSHCNTLNVRGIPPELNQQMEALNLSIVSRGFLATLEAKPTLLDQICKAQKNDPDMHGLLKNMKQGKAAGFTEDEHGTLWNGNRRVKAEHQRPAGLLQPLQVPEWKWDEIGMDFITGLPKTQGGYDSIWVVVDRLTKVARFIPVKTTYGGNKLAELYFARIVSLHGVPKKIVSDRGSQFTSHFWKKLQEELGTRLNFSTAYHPQTDGQTERLNQILEDMLRACVLDFGKTWDKSLPYAEFSYNNSYQASIQMAPYEALYGRKCRTPLLWDQVGESQVFGTDILREAEAKVRTIRDNLKMAQSRQKSYADNRRRDLEFAADDFVYVRVTPLRGVHRFRTKGKLAPRYVGPFRITARRGEVVTTGNNPTGIPYVGALIL

SEQ ID NO: 19060 - protein, 685 aa, Oryza sativa
  Clone ID: TF_OSC15186j.C1.p2.gm
MMTAFLHHLQNPPQHNAPPPPPQHSKLAEFLRIRPPTFSSSNNPVDALDWLHAVGKKLDTVECSDEEKVIFAAHQLQGPASLWWDHFQATQPEGQPITWARFTAAFRRTHVPAGVVALKKREFRELKQGNRSVMEYLHEFNNLARYAPEDVREDEEKQEKFLAGMDPELSVRLVSGDYLDFQRLVDKSIRLEAKHKELESHKRRLANFRNQQGANQRVRYTNPYPGGSSSQQQQQQQQPRSAPRPQFVVRVPQPQQQQSQQGTRAPRPPTPTVQPGQGRRDASGPQRLCFNCFEPGHFADKCPKPRHQQGQAPPCSNNGGKDVIRGRVNHVTAEDVLTTPDVIVGTFLIHSIPATILFDSGASHSFISVPFMGRNQLGIERLRNPLLITTPGGVMTAKYYSPAVPIEIQGIPFPSDLILLDTKNLDVILGMNWLAQFQGVVDCARRTVTLYRGPGQPVVFFAPPTSVSSSELHQIGLSEIPIVREFGDVFPEELPGMPPKREIEFQIDLAPGTTPLCKRPYRMAANELAEVKKQLEELKEKGYIRPSTSPWGAPVIFVEKKDKTKRMCVDYRALNEVTIKNKYPLPRIDDLFDQLKGATVFSKIDLRSGYHQLRIRDEDIPKTAFTTRYGLYEFTVMSFGLTNAPAFFMNLMNKVFMEYLDKFVVVFIDDILIYSQSEEDHQHHL

SEQ ID NO: 19061 - protein, 1670 aa, Oryza sativa
  unsure (1)..(1670): unsure at all Xaa locations
  Clone ID: TF_OSC15467j.C1.p1.np
LLHLSSKSDLLKCCFSFVCLXMAGSVTRRGLDMTGFVLELRGMCVVLGYPHGVDYQARPLPEQEGEDAEPHAGWEVTAVILSGSPERTSLAVTAGGDSFPAACQNAALLAIGTLHQRYPDELQHSPYRYHPRRGGASDHATFRDASSEDDATVVHLARMVEAYDAARIDFHQMVRRGMVENNLKILELRQENLQLKKDLDALEAQLHQLKVAQGEISRPKRRRVCRSQKITARKSTSRPELVRQSLAWTCFVETPRAEPAPVVPQEGEASGVGSSEGALLLTFRPGPSQRSSSLFAGSMWGFQMVTTRRNVNTGEGNQPEGSNPNHQGNPPPPPPPPPPPPPDTNAILTQILAQQANMMNAFLHHLQNPPQQNAPPPPPQHSKLAEFLRIRPPTFSSSNNPVDALDWLHAVGKKLDTVQCSDEEKVVFAAHQLQGPASLWWDHFQATQPEGQPITWARFTAAFRRTHVPAGVVALKKREFRELKQGNRSVMEYLHEFNNLARYAPEDVREDEEKQEKFLAGMDPELSVRLVSGDYPDFQRLVDKSIRLEAKHKELESHKRRLANFRNQQGANQRVRYTNPYPGGSSSQQQQQQSRSAPRPQFVVRVPQPQQQQNQQGTRAPRPPTPTVQPVQGRRDAQGQQRLCFNCFEPGHFADKCPKPRRQQGQAPPRSNNGGKDVIRGRVNHVTAEDVLTTPDVIVGTFLVHSIPATILFDSGASHSFISVPFVEKNQLGVERLRNPLLITTPGGVMTAKYYSPAVPIEIQGILFPSDLILLDTKNLDVILGMNWLAQFQGVVDCARRTVTLYRGPEQPVVFFAPPTSVRSSELHQIGLSEIPIVREFGDVFPEELPGMPPKREIEFRIDLAPGTTPLYKRPYRMAANELAEVKKQLEELKEKGYIRPSTSPWGAPVIFVEKKDKTKRMCVDYRALNEVTIKNKYPLPRIDDLFDQLKGATVFSKIDLRSGYHQLRIREEDIPKTAFTTRYGLYEFTVMSFGLTNAPAFFMNLMDKVFMEYLDKFVVVFIDDILIYSQSEEDHQHHLRLVLGKLREHQLYAKLSKCEFWLSEVKFLGHVISAKGVAVDPETVTAVTDWKQPKTVTQIRSFLGLAGYYRRFIENFSKIARPMTQLLKKEEKFVWSPQCEKAFQTLKEKLVSSPVLILPDTRKDFMMYCDASRQGLGCVLMQDGHVVAYASRQLRPHEGNYPTHDLELAAVVHALKIWRHYLIGNRCEIYTDHKSLKYIFTQSDLNLRQRRWLELIKDYDVGIHYHPGKANVVADALSRKGHCNTLNVRGIPPELNQQMEALNLSIVGRGFLAALEAKPTLLDQIREAQKNDPDMHGLLKNMKQGKAAGFTEDEHGTLWNGKRVCVPDNRELKQLILQEAHESPYSIHPGSTKMYLDLKEKYWWVSMKREIAEFVALCDVCQRVKAEHQRPAGLLQPLQVPEWKWDEIGMDFITGLPKTQGGYDSIWVIVDRLTKVARFIHVKTTYGGNKLAELYFARIVSLHGVPKKIVSDRGSQFTSHFWKKLQEELGTRLNFSTAYHPQTDGQTERLNQILEDMLRACVLDFGKTWDKSLPYAEFSYNNSYQASIQMAPYEALYGRKCRTPLLWDQVGESQVFGTDILREAEAKVRIIRDNLKVAQSRQKSYADNRRRDLEFAVDDFVYLRVTPLR

SEQ ID NO: 19062 - protein, 1756 aa, Oryza sativa
  Clone ID: TF_OSC15719j.C1.p1.fg
MSWHRAGVLLLGAQSCLPVPGVPAVGGIGSVLLSMARMGWKLCHVFRLYTVVMAGSVTRRGLDMTGFVLELRGMCVVLGYPHGVDYQGRPLPEQEGDDGEPHAAWEVTAVILAGSPERTSLAVTAGGDSFPAASQSAALLAIGTLHQRYPDELQHSPYRYHPRRGGARDYATFRDASSEDDATIVHLARMVEAYDAARIDFHQMVRRGMVENNLKILELRQENLQLKKDLDAVEAQLHQLKIAQGEVCRPKRRRVCRSQKITARKSTSRPELVRQSLAWTCFVETPRAEPAPVVPQEGEASGVGSTEDALLLTFRPGPSQRRSANTGDGNQPEGSNHHHQGSPPPPPPPPPPPPPDTNAILTQILAQQANMMTAFLHHLQNPPQHNAPPPPPQHSKLAEFLRIRPPTFSSSNNPVDALDWLHAVGKKLDTVQCSDEEKVIFAAHQLQGPASLWWDHFQATQPEGQPITWARFTAAFRRTHVPAGVVALKKREFRELKQGNRSVMEYLHEFNNLARYAPEDVREDEEKQEKFLAGMDPELSVRLVSGDYPDFQRLVDKSIRLEAKHKELESHKRRLANFRNQQGANQRIRYTNPYPGGSSSQQQQQQQQPRFAPRPQFVVRVPQPQQQQNQQGTRAPRPPTPTVQPGQGRRDAQGPQRLCFNCFEPGHFADKCPKLRRQQGQAPSRSNNGEKDVIWGRVNHVTAEDVLTTPDVIVGTFLIHSIPATILFDSGASHSFISVPFVGRNQLGVERLRNPLLITTPGGVMTAKYYSPAVPIEIQGIPFPSDLILLDTKNLDVILGMNWLAQFQGVVDCARRTVTLYRGPEQPVVFFAPPTSVSSSELHQIELLEIPIVREFGDVFPEELPGMPPKREIEFRIDLAPGTTPLYKRPYRTAANELAEVKKQLEELKEKGYIRPSTSPWGAPVIFVEKKDKTKRMCVDYRALNELKGATVFSKIDLRSGYHQLRIREEDIPKTAFTTRYGLYEFTVMSFGLTNAPAFFMNLMNKVFMEYLDKFVVVFIDDILVYSQSEEDHQHHLRLVLGKLREHQLYAKLSKCEFWLSEVKFLGHVISAKGVAVDPETVTAVTDWKQPKTVTQVRSFLGLAGYYRRFIENFSKIARPMTQLLKKEEKFVWSPQCEKAFKTLKEKLVSSPVLILPDTRKDFMDGHVVAYASRQLRPHEGNYPTHDLELAAVVHALKIWRHYLIGNRCEIYTDHKSLKYIFTQSDLNLRQRRWLELIKDYDVGIHYHPGKANVVADALSRESHCNTLNVRGIPPELSQQMEALNLSIVGRGFLAALEAKPTLLDQIREAQKNDPDMHGLLKNMKQGKAAGFTEDEHGTLWNGNRVCVPDNRELKQLILQEAHESPYSIHPGSTKMYLDLKEKYWWVSMKREIAEFVALCDVCQRVKAEHQRPAGLLQPLQVPEWKWDEIGMDFITGLPKTQGGYDSIWVVVDRLTKVARFIPVKTTYGGNKLAELYFARIVSLHGVPKKIVSDRGSQFTSHFWKKLQEELGTRLNFSTAYHPQTDGQTERLNQILEDMLRACVLDFGKTWDKSLPYAEFSYNNSYQASIQMAPYEALYGRKCRTPLLWDQVGESQVFGTDILREAEAKVRTIRDNLKVAQSRFRTKGKLAPRYVGPFRIVARRGEVAYQLELPASLGNVHDVFHVSQLKKCLRVPSEQTDPEQIEVREDLTYVERPVKILDTMERRTRNRVIRFCKVQWSNHAEEEATWEREDELKAAHPDLFASSSESRGRDSV

SEQ ID NO: 19063 - protein, 1689 aa, Oryza sativa
  Clone ID: TF_OSC15723j.C1.p1.fg
MPSLGQIRLTHLRPGIQVVMHKGGCLVLGAQSCLPVRGVPAVGGIESVLLSMARMGWKLCHVFRLYTVVMAGSVSRRGLDMTGFVLELRGMCVVLGYPHGVDYQGRPLPEQEGDDAEPHAAWEVTAVILTGSPERTSLAVTAGGDSFPAACQNAALLAIGTLHQRYPDELQHSPYRYHPRRGGARDYAIFRDASSEDDATIMHLARMVEAYDAARIDFHQMVRRGMVGNNMKILELRQENLQLKKDLDAVEAQLHQLKIAQGEMVKTRRNAATGDGNQPEGSNHNHQGSPPPPPSPPPPPPPDTNAILTQILAQQANMMTAFLHHLQNPPQQNAPPPPPQHSKLAEFLRIRPPTFSSSNNPVDALDWLHAVGKKLDTVQCSDEEKVIFAAHQLQGPASLWTHVPAGVVALKKREFRELKQGNRSVMEYLHELNNLARYAPEDVREDEEKQEKFLAGMDPELSVRLVSGDYPDFQRLMDKSIRLEAKHKELESHKRRLANFRNQQGANQRVRYTNPYPGGSSSQQQQQQQQPRSAPRPQFVPGQGRRDAQGPQRLCFNCFEPGHFADKCPKPRRQQGQAPPRSNNGGKDVIRGRVNHVTAEDVLTTPDVIVGTFLIHSIPATILFDSGASHSFIFVPFVGRKQLGVERLRNPLLITTPGGVMTAKYYSHAVPIEIQGIPFPSDLILLDTKNLDVILRMNWLAQFQGVVDCARRTVTLYRGPEQPVVFFAPPTSVSSSELHQIGLSEIPIVREFGDVFPEELPGMPPKREIEFRIDLAPGTTPLYKRPYRMAANELAEKKDKMKRMCVDYRALNEVTIKNKYPLPRIDDMFDQLKGATVFSKIDLRSGYHQLRIREEDIPKTAFTTRYGLYEFTVMSFGLTNAPAFFMNLMNKVFMEYLDKFVVVFIDDILIYSQSEEDHQHHLRLVLGKLREHQLYAKLSKCEFWLSEVKFLGHVISAKGVAVDPETVTAVTDWKQPKTVTQVRSFLGLAGYYRRFIENFSKIARPMTQLLKKEEKFVWSPQCEKAFQTLKEKLVSSPVLILPDTRKDFMVYCDASRQGLGCVLMQDGHVVAYASRQLRPHEGNYPTHDLELAAVVHALKIWRHYLIGNRCEIYTDHKSLKYIFTQSDLNLRQRRWLELIKDYDVGIHYHPGKANVVADALSRKSHCNTLDVRGIPPELNQQMEALNLSIVGRGFLATLEAKPTLLDQIREAQKNDPDMRGLLKNMKQGKAAGFTEDEHGTLWNGNRVCVPDDRELKQLILQEAHESPYSIHPGSTKMYLDLKEKYWWVSMKREIAEFVALCDVCQRVKAEHQRPAGLLQPLQVPEWKWDEIGMDFITGLPKTQGGYDSIWVVVDRLTKVARFIPVKTTYGGNKLAELYFARIVSLHGVPKKIVSDRGSQFTSHFWKKLQEELGTRLNFSTAYHPQTDGQTERLNQILEDMLRACVLDFGKTWDKSLPYAEFSYNNSYQPSIQMAPYEALYGRKCRTPLLWDRVGESQVFGTDILREAEAKVRTIRDNLKVAQSRQKSYADNRRRNLEFAVDDFVYLRVTPLRGVHRFQTKGKLAPRYVGPFRIIARCGEVAYQLELPASLGNVHDVFHVSQLKKCLRVPSEQADSEQIEVREDLTYVERPVKILDTMERRTRNRVIHFCKVQWSNHAEEEATWEREDELKAAHPDLFASSSESRGRDSV

SEQ ID NO: 19064 - protein, 894 aa, Oryza sativa
  Clone ID: TF_OSC15765j.C1.p1.fg
MAGSVSRRGLDMTGFVLELRGMCVVLGYPHGVDYQARPLPDQEGDDAEPHAAWEHSPYRYHPRRGGARDYATFRDASSEDDATIVHLARMVEAYDAARIDFHQMVRRGMVENNLKILELHQENLQLKKDLDAVEAQLHQLKIAQGEVCRPKRHRVYRSQKITARKSTSRPELVRQSLAWTCFVETPRAEPAPVVPQEGEASGVGSTEDALLLTFRPGPSQRRSANTGDGNQPEGSNHNHQGSPPPPPPPPPPPPPDTNAILTQILAQQANMMTAFLHHLQNPPQQNAPPPPPQHSKLAEFLRIRPPTFSSSNNPVDALDWLHAVGKKLDTVQCSDEEKVIFAAHQLQGPASLWWDHFQATQPEGQPITWARFTAAFRRTHVPAGVMALKKREFRELKQGNRSVMEYLHEFNNLARYAPEDVREDEEKQEKFLAGMDPELSVRLVSGDYPDFQRLVDKSIRLEAKHKELESHKRRLANFRNQQDANQRVRYTNPYPGGSSSQQQQQQQQPRSAPRPQFVVRVPQPQQQQNQQGTRAPRPPTPTVQPGQGRRDAQGPQRLCFNCFEPGHFADKCPKPRRQQGQAPPRSNNGGKDVIRGRVNHVTAEDVLTTPDVIVGHVISAKEVAVDPETVTAVTDWKQPKTVTQIRSFLGLAGYYRSVSRQSTNDRPDFSNLSKYQNGNGMKLGWISSPDFQKPKVARFIPVKTTYGGNKLAELYFARILRSAAVVTPDRLPPRGRLLRLRRILADLVHLSVSVADRRSAAAPVYPSRAATFLRSGRRSRRRRRPGVSRGPPFHFPLPSPLSGAAPPRRWSPAATIRARVRRLPSAVPAWPPSGAPRGCHVGPGRQPPAPSGAADAWDPRRRPAQAACTRSTVDREAAAWAPLPWTRSARPSLG

SEQ ID NO: 19065 - protein, 1632 aa, Oryza sativa
  unsure (1)..(1632): unsure at all Xaa locations
  Clone ID: TF_OSC15868j.C1.p2.np
MAAGSSAPVSPSSGRPLPLPTLYKPSPCLPPPFPPLAALSPRRNRARAIALSLRRRRRAPVRRRRRPGPSPASASPSSGSPQPRRPRPPLRFGRRPPERRRPRRPEPRRRLYPLRSPFPSSPSTRGEPWIAFVSPFPPLSRAPLRRAGGRRRRPSGHECAASRRLCRRGRLRARPAAAAWGPAVSRPRPRVRLTRGTHGAGRASPGAPGPPWTHLGHIRTGLRASVAKHYRFHMSSGTNEGYTSYGPVVEMSWHRAGVLLLGAQSCLPVPEVPAVGGIGSMYTSDQSIIYSNSRALGYGQAEQCTQMAGSISRRGLDLTGFVLELRGMCVVLGYPHGVDYQGRPLPEQEGDDAEPHAAWEVTAVILTGSPERTSLAVTAGGDSFPAACQNAALLAIGTLHQRYPDELQHSPYRYHPRRGGARDFATFRDASSEDDATIMHLARMVEAYDAARIDFHQMVRRGMVENNMKILELRQENLQLKKELDAVEAQLHQLKIAQGEVCRPKRRRVCRSQKITARKSTSRPELVRQSLAWTCFVETPRAEPAPVVPQEGEASGVGSTEDALLLTFHGETRRSANTGDGNQPEGSNHNNHGSPPPPPPPPPPPPPDTNAILTQILAQQANMMTAFLHHLQNPPQQNAPPPPPQHCKLAEFLRIRPPTFSSSNNPVDALDWLHAVGKKLDTVQCSDEEKVIFAAHQLQGPASLWWDHFQATQPEGQPITWARFTAAFRRTHVPAGVVALKKREFRELKQGNRSVMEYLHEFNNLARYALEDVREDEEKQEKFLAGMDPELSVRLVSGDYPDFQRLVDKSIRLEAKHKELESHKRRLANVRNQQGANQRVRYTNPYPGGSSSQQQQQQQPRSAPRPQFVVRVPQPQQQQSQQGTRVPRPPTPAAQSGQGRRDASGPQRLCFNCFEPGHFADKCPKPRRQQGQAPPRSNNGGKDVIRGRVNHVTAEDVLTTPDVIVGTFLIHSIPATILFDSGASHSFISVPFVGRNQLGVERLRNPLLITTPGGVMTAKYYSPAVPIEIQGIPFPSDLILLDTKNLDVILGMNWMAQFQGVVDCARRTVTLYRGPEQSVVFFAPPTSVSSSELHQIGLSEIPIVREFGDVFPEELPGMPPKREIEFRIDLAPGTTPLYKRPYRMAANELAEVKKQLEELKEKGYIRPSTSPXGAPVIFVEKKDKTKRMCVDYRALNEVTIKNKYPLPRIDDLFDQLKGATVFSKIDLRSGYHQLRIREEDIPKTAFTTRYGLYEFTVMSFGLTNAPAFFMNLMNKVFMEYLDKFVVVFIDDILVYSQSEEDHQHHLRLVLGKLREHQLYAKLSKCEFWLSEVKFLGHVISAKGVAVDPETVTAVTDWKQPKTVTQVRSFLGFAGYYRRFIENFSKIARPMTQLLKKEEKFVWSPQCEKAFQTLKEKLVSSPVLTLPDTRKDFMVYCDASRQGLGCVLMQDGHVVAYASRQLRPHEGNYPTHDLELAAVVHALKIWRHYLIGNRSEIYTDHKSLKYIFTQSDLNLRQRRWLELIKDYDVGIHYHPGKANVVADALSRKSHCNTLNVRGIPPELNQQMEALNLSIVGRGFLVALEAKPTLLDQIREAQCRDRNCLFPNASNGSTEGRTPRRPGTTRGRRRRRRP

SEQ ID NO: 19066 - protein, 702 aa, Oryza sativa
  Clone ID: TF_OSC16514j.C1.p1.fg
DPRWLSRADFAGSHRGWRFFPRRLQNAAFLAIGTLHQRYPDELQHSPYRYHPRRGGARDYATFRDASSEDDATIMHLARMVEAYDAARIDFHQMVRRGMVENNMKILELRQENLQLKKDLDAVEAQLHQLKIAQGEVCRPKRRRVCRSQKITARKSTSRPELVRQSLAWTCFVETPRAEPAPVVPQEGEASGVGSTEDALLLTFRPGPSQRRSAATGDGNQPEGSNHHQGSPPPPPPPPPPPPPDTNAILTQILAQQANMMTAFLHHLQNPPQHNAPPPPPQHSKLAEFLRIRPPTFSSSNNPVDALDWLHAVGKKLDTVQCSDEEKVIFAAHQLQGPASLWWDHFQATQPEGQPITWARFTAAFRRTHVPAGVVALKKREFRELKQGNRSVMEYLHEFNNLARYAPEDVREDEEKQEKFLAGMDPELSVRLVSGDYLDFQRLVDKSIRLEAKHKELESHKRRLANFRNQQGANQRVRYTNPYPGGSSSQQQQQQQQPRSAPRPQFVVRVPQPQQQQNQQGTRAPRPPTPTVQPGQGRRDAQGPQRLCFNCFEPGHFADKCPKPRRQQGQAPPRSNNGGKDVIRGRVNHVTAEDVLTTPDVIVGTFLIHSIPATILFDSGASHSFMSVPFVGRNQLGVERLRNPLLITTPGGVMTANVSRQSTNDRPDFSNLSKYQNGNGMKLGWISSPDFQKPKVDMILYG

SEQ ID NO: 19067 - protein, 391 aa, Oryza sativa
  Clone ID: TF_OSC16518j.C1.p1.fg
MVTTRRNVNTGEGNQPEGSNPNPQGNPPPPPPPDTNAILTQILAQQANMMNTFLHHLQNPPQQNAPPPPPQHSKLAEFLRIRPPTFSSSNNPVDALDWLHAVGKKLDTVQCSDEEKVIFAAHQLQGPASLWWDHFQATQPEGQPITWARFTAAFRRTHVPAGVVALKKREFRELKQGNRSVMEYLHEFNNLARYAPEDVREDEEKQEKFLAGMDPELSVRLVSGDYPDFQRLVDKSIRLEAKHKELESHKRRLANFRNQQGANQRVRYTNPYPGGSSSQQQQQQQPRPAPRPQFVVRVPQPQQQQNQQGTRAPRPPTPTVQPVQGRRDASGPQRLCFNCFEPGHFADKCPKPRRQQGQAPPRSNNGGKDVIRGRVNHVTAEDVLTTPDVIV

SEQ ID NO: 19068 - protein, 757 aa, Oryza sativa
  Clone ID: TF_OSC1667j.C1.p1.fg
MSWHRAGVLLLGAQSCLPVPGVPAMAGSVSRRGLDMTGFVLELRGMCVVLGYPHGVDYQGRPLPEQEGDDAEPHAAWEVTAVILTGSPERTSLAVTAGGDSFPAACQSAALLAIGTLHQGYPDELQHSPYRYHPRRGGARDFATFRDASSEDDATIMHLARMVEAYDAARIDFHQMVRRGMVENNMKILELRQENLQLKKDLDAVEAQLHQLKITQGEVCRPKCRRVCRSQKITARKSTSRPELVRQSLAWTCFVETPRAEPAPVVPQEGEASGVGSMEDALLLTFRPGPSQRRSAATGEGNQSEGSNHNHQGSPPPPPPPPPPPPPDTNAILTQILAQQANMMTAFLHHLQNPPQQNAPPPPPQHSKLAEFLRIRPPTFSSSNNPVDALDWLHAVGKKLDTVQCSDEEKVIFAAHQLQGPASLWWDHFQATQPEGQPITWARFTAAFRRTHVPAGVVALKKREFRELKQGNRSVMEYLHEFNNLARYAPEDVREDEEKQEKFLAGMDPELSVRLVSGDYPDFQRLVDKSIRLEDKHKELESHKRRLANFRNQQGANQRVRYTNPYPGGSSSQQEQQQQQPRSAPRPQFVVRVPQPQQQQSQQGTRAPRPPMPTVQPGQSRRDAQGPQRLCFNCFEPGHFADKCPKLRRQQGQAPPRSNNGGKDVIRGRVNHVTAEDVLTTPDVIVVGPESSAKEMVRTHQGLRCGNSLSSCVSRQSTNDRPDFSNLSKYQNGNGMKLGWISSPDFQKPKVDMILYG

SEQ ID NO: 19069 - protein, 1768 aa, Oryza sativa
  Clone ID: TF_OSC16834j.C1.p1.np
VDEVGGRWTFSRANEGYTSCGPVVEMSWHRAGVLLLGAQSCLPVPGVPAVDGIGSMYTSDQSKIYSNSRALGYGQAEQCTQMAGSVSRRGLDMTGFVLELRGMCVVLGYPHGVDYQARPFPEQEGDDAEPHAAWEVTAVILAGSPERTSLTVTAGGDSFPAACQSAALLAIGTLHQRYPDELQHSPYRYHPRRGGARDYATFRDASSEDDATIVHLARMVEAYDAARIDFHQMVRRGMVENNMKILELRQENLQLKKDLDAVEAQLHQLKIAQGEVCRPKRRRVCRSQKITARKSTSRPELVRQSLAWTCFVETPRAEPAPVVPQEGEASGVGHGGCAVAHLPSWPVAAVDEQLVGLRVCSTRRNAGTSDGNQPEGSNHNNHGSPPSPPSPPPPDTNAILTQILAQQANMMTAFLHHLQNPPQHNAPPPPPQHSKLAEFLRICPPTFSSSNNPVDALDWLHAVGKKLDTVQCSDEEKVIFAAHQLQGPASLWWDHFQATQPEGQPITWARFTPAFRRTHVPAGVVALKKREFRELKQGNRSVMEYLHEFNNLARYAPEDVREDEEKQEKFLAGMDPELSVCLVSGDYPDFQRLVDKSIRLEAKHKELESHKRRLANFHNQQGANQRVRYTNPYPGGSSSQQQQQQQQPRSAPRPQFVVRVPQPQQEQNQQGTRAPRPPPPTVQPGQGRRDAQGPQRLCFNCFEPGHFADKCPKPRRQQGQAPPRPNNGGKDVIRGRVNHVTAEDVLTTPDVIVGTFLIHSIPATILFDSGASHSFISVPFVGRNQLGVERLRNPLLITTPGGVMTAKYYSPAVPIEIQGIPFPSDLILLGTKNLDVILGMNWLAQFQGVVDCARRTVTLYRGPGQPVVFFAPPTSVSSSELHQIGLSEIPIVREFGDVFPEELPGMPPKREIEFQIDLAPGTTPLCKRPYRMAANELAEVKKQLEELKEKGYIRPSTSPWGAPVIFVEKKDKTKRMCVDYRALNEVTIKNKYPLPRIDDLFDQLKGATVFSKIDLRSGYHQLRIRDEDIPKTAFTTRYGLYEFTVMSFGLTNAPAFFMNLMNKVFMEYLDKFVVVFIDDILIYSQSEEDHQHHLRLVLGKLREHQLYAKLSKCEFWLSEVKFLGHVISAKGVAVDPETVIAVTDWKQPKTVTQVRSFLGLAGYYRRFIENFSKIARPMTQLLKKEEKFVWSPQCEKAFRTLKEKLVASPVLILPDTRKDFIVYCDASRQGLGCVLMQDGHVVAYASRQLRPHEGNYPTHDLELAAVVHALKIWRHYLIGNRCEIYTDHKSLKYIFTQSDLNLRQRRWLELIKDYDVGIHYHPGKANVVADALSRKSHCNTLNVRGIPPELNQQMEALNLSIVSRGFLAALEAKPTLLDQIREAQKNDPDMHGLLKNMKQGKAAGFTEDEHGTLWNGNRVCVPDIRELKQLILQEAHESPYSIHPGSTKMYLDLKEKYWWVSMKREIAEFVALCDVCQRVKAEHQRPAGLLQPLQVPEWKWDEIGMDFITGLPKTQGGYDSIWVVVDRLTKVARFIPVKTTYGGNKLAELYFARIVSLHGVPKKIVSDRGSQFTSHFWKKLQEELGTRLNFSTAYHPQTDGQTERLNQILEDMLRACVLDFGKTWDKSLPYAEFSYNNSYQASIQMAPYEALYGRKCRTPLLWDQVGESQVFGTDILRQAEAKVRTIRDNLKMAQSRQKSYADNRRRDLEFAADDFVYVRVTPLRGVHRFRTKGKLAPRYVGPFRITARRGEVVTTGNNPTGIPYVRAL

SEQ ID NO: 19070 - protein, 1663 aa, Oryza sativa
  Clone ID: TF_OSC16878j.C1.p1.fg
MAGSVTRRGLSMTGFVLELRGMCVVLGYPHGVDYQARPLPEQEGEDAEPHAGWEVTAVILSGSPERTSLAVTAGGDSFPAACQNAALLAIGTLHQRYPDELQHSPYRYHPRRGGASDHATFRDASSEDDATVVHLARMVEAYDAARIDFHQMVRRGMVENNMKILELRQENLQLKKDLDALEAQPHQLKVAQGEISRPKRRRVCRSQKITARKSTSRPELVRQSLAWTCFVETPRAEPAPVVPQEGEASGVGSSEGALLLTFRPGPSQRQPPEGSNPNPQGNPPPPPPPDTNAILTQILAQQANMMNAFLHHLQNPPQQNAPPPPPQHSKLAEFLRIRPPTFSSSNNPVDALDWLHAVGKKLDTVQCSDEEKVIFAAHQLQGPASLWWDHFQAAQPEGQPITWTRFTAAFRRTHVPAGVVALKKKEFRELKQGNRSVMEYLHEFNNLARYAPEDVREDEEKQEKFLAGMDPELSVRLVSGDYPDFQRLVDKSIRLEAKHKELESHKRRLANIRNQQGANQRVRYTNPYPGGSSSQQQQQQQQQPRSAPRPQFVVRVPQQQPQQNQQGTRAPRPPTPAGQPVQGRRDASGPQRLCFNCFEPGHFADKCPKPRRQQGQAPPRPNNGGKDVIRGRVNHVTAEDVLTTPDVIVGVVDCARRTVTLYRGPEQPVVFFAPPTSVRSSELHQIGLSEIPIVREFGDVFPEELPGMPPKREIEFRIDLAPGTTPLYKRPYRMAANELAEVKKQLEELKEKGYIRPSTSPWGAPVIFVEKKDKTKRMCVDYRALNEVTIKNKYPLPRIDDLFDQLKGATVFSKIDLRSGYHQLRIREEDIPKTAFTTRYGLYEFTVMSFGLTNAPAFFMNLMNKVFMEYLDKFVVVFIDDILIYSQTEEDHQHHLRLVLGKLREHQLYAKLSKCEFWLSEVKFLGHVISAKGVAVDPETVTAVTEWKQPKTVTQIRSFLGLAGYYRRFIENFSKIARPMTQLLKKEEKFVWSPQCEKAFQTLKEKLVSSPVLILPDTRKDFMVYCDASRQGLGCVLMQDGHVVAYASRQLRPHEGNYPTHDLELAAVVHALKIWRHYLIGNRCEIYTDHKSLKYIFTQSDLNLRQRRWLELIKDYDVGIHYHPGKANVVADALSRKSHCNTLNVRGIPPELNQQMEALNLSIVGRGFLAALEAKPTLLDQIREAQKNDPDMHGLLKNMKQGKAAGFTEDEHGTLWNGKRVCVPDNRELKQLILQEAHESPYSIHPGSTKMYLDLKEKYWWVSMKREIAEFVALCDVCQRVKAEHQRPAGLLQPLQVPEWKWDEIGMDFITGLPKTQGGYDSIWVVVDRLTKVARFIPVKTTYGGNKLAELYFARIVSLHGIPKKIVSDRGSQFTSHFWKKLQEELGTRLNFSTAYHPQTDGQTERLNQILEDMLRACVLDFGKTWDKSLPYAEFSYNNSYQASIQMAPYEALYGRKCRTPLLWDQVGESQVFGTDILREAEAKVRIIRDNLKVAQSRQKSYADNRRRDLEFAVDDFVYLRVTPLRGVHRFQTKGKLAPRYVGPFRIIARRGEVAYQLELPASLGNVHDVFHVSQLKKCLRVPSEQANSEQIEVREDLTYVERPVKILDTMERRTRNRVIRFCKVQWSNHAEEEATWEREDELKAAHPDLFASSSESRGRDSV

SEQ ID NO: 19071 - protein, 1287 aa, Oryza sativa
  Clone ID: TF_OSC16878j.C1.p2.gm
MMNAFLHHLQNPPQQNAPPPPPQHSKLAEFLRIRPPTFSSSNNPVDALDWLHAVGKKLDTVQCSDEEKVIFAAHQLQGPASLWWDHFQAAQPEGQPITWTRFTAAFRRTHVPAGVVALKKKEFRELKQGNRSVMEYLHEFNNLARYAPEDVREDEEKQEKFLAGMDPELSVRLVSGDYPDFQRLVDKSIRLEAKHKELESHKRRLANIRNQQGANQRVRYTNPYPGGSSSQQQQQQQQQPRSAPRPQFVVRVPQQQPQQNQQGTRAPRPPTPAGQPVQGRRDASGPQRLCFNCFEPGHFADKCPKPRRQQGQAPPRPNNGGKDVIRGRVNHVTAEDVLTTPDVIVEIPIVREFGDVFPEELPGMPPKREIEFRIDLAPGTTPLYKRPYRMAANELAEVKKQLEELKEKGYIRPSTSPWGAPVIFVEKKDKTKRMCVDYRALNEVTIKNKYPLPRIDDLFDQLKGATVFSKIDLRSGYHQLRIREEDIPKTAFTTRYGLYEFTVMSFGLTNAPAFFMNLMNKVFMEYLDKFVVVFIDDILIYSQTEEDHQHHLRLVLGKLREHQLYAKLSKCEFWLSEVKFLGHVISAKGVAVDPETVTAVTEWKQPKTVTQIRSFLGLAGYYRRFIENFSKIARPMTQLLKKEEKFVWSPQCEKAFQTLKEKLDGHVVAYASRQLRPHEGNYPTHDLELAAVVHALKIWRHYLIGNRCEIYTDHKSLKYIFTQSDLNLRQRRWLELIKDYDVGIHYHPGKANVVADALSRKSHCNTLNVRGIPPELNQQMEALNLSIVGRGFLAALEAKPTLLDQIREAQKNDPDMHGLLKNMKQGKAAGFTEDEHGTLWNGKRVCVPDNRELKQLILQEAHESPYSIHPGSTKMYLDLKEKYWWVSMKREIAEFVALCDVCQRVKAEHQRPAGLLQPLQVPEWKWDEIGMDFITGLPKTQGGYDSIWVVVDRLTKVARFIPVKTTYGGNKLAELYFARIVSLHGIPKKIVSDRGSQFTSHFWKKLQEELGTRLNFSTAYHPQTDGQTERLNQILEDMLRACVLDFGKTWDKSLPYAEFSYNNSYQASIQMAPYEALYGRKCRTPLLWDQVGESQVFGTDILREAEAKVRIIRDNLKVAQSRQKSYADNRRRDLEFAVDDFVYLRVTPLRGVHRFQTKGKLAPRYVGPFRIIARRGEVAYQLELPASLGNVHDVFHVSQLKKCLRVPSEQANSEQIEVREDLTYVERPVKILDTMERRTRNRVIRFCKVQWSNHAEEEATWEREDELKAAHPDLFASSSESRGRDSV

SEQ ID NO: 19072 - protein, 180 aa, Oryza sativa
  Clone ID: TF_OSC16881j.C1.p1.fg
MDPELSVRLVSVDYPDFQCLVDKSIRLEAKHKELESHKRRLANFRNQQGANQRVRYTNPYPGGSSSQQQQQQQQPRSAPRPQFMVRVPQPQQQQSQQGTRAPRPPTPTVQPGQGRRDVQGPQRLCFNCFEPGHFADKCPKPRRQQGQVPPRSNNGGKDVIRGRVNHVTAEDVLTTPDVIV

SEQ ID NO: 19073 - protein, 1299 aa, Oryza sativa
  unsure (1)..(1299): unsure at all Xaa locations
  Clone ID: TF_OSC16923j.C1.p1.np
MEPESAAPVSFSSGRPLSLPTLYKPSPCLPPPFPPLAALSPRRNRARAVALSLRRRRRAPVCRRRRPGPSPVSASPSSGSPQHRRPRPPLRFARRPPERRRPRRPEPRRRLFPLRSPFPSSPSTRGEPWTAHFVSPFPPLSRPPLRRAYGRRRRPXGRGRAASRRLCRRGRLRARPAAAMWGPAVSRPPRVRLTRGTHGAGRRKPRAPVPPWTHLGHIRTGLRASVAKHYRFHMSSGANEGYTSCGPVVEMSWHRAGVLLLGAQSCLPVPGVPAVGGIGSMYTSDQSIIYSNSRALGYGQAEQCTQMAGSVTRRGLDMTGFVLELRGMCVVLGYPHGVDYQARPLPKQEGDDAEPHAAWEVTAVILAGSPERTSLAVTAGGDSFPAACQNAALLAIGTLHQRYPDELQHSPYRYHPHRGGARDYATFRDASSEDDATIVHLARMVEAYDAARIDFHQMVRRGMVENNLKILELRQENLQLKKDLDAVEAQLHQLKIAQGEVCRPKRRRVCRSQKITARKSTSRPELVRQSLAWTCFVETPRAEPAPVVPQEGEASGVGSTEDALLLTFHGETRRSANAGDGNQPEGSNRNHHGSPPPPPPPPPPPPPDTNAILTQILAQQANMMTAFLHHLQNPPQQNAPPPPPQHSKLAEFLRIRPPTFSSSNNPVDALDWLHAVGKKLDTVQCSDEEKVIFAAHQLQGPASLWWDHFQATQPEGQPITWARFTAAFRRTHVPAGVVALKKREFXELKQGNRSVMEYLHEFNNLARYAPEDVREDEEKQEKFLAGMDPELSVRLVSGDYPDFQRLVDKSIRLEAKHKELESHKRRLANFRNQQGANQRVRYTNPYPGGSSSQQQQQQQQPRSVPRPQYVVRVPQPQQQQSQQGTRAPRPPTPAVQSGQGCRDAQGQQRLCFNCFEPGHFADKCPKPRRQQGQAPPRSNNGGKDVIQGRVNHVTAEDVLTTPDVIVGTFLIHSIPATILFDSGASHSFISVPFVGRNQLGVERLRNPLLITTPGGVMTAKYYSPAVPIEIQGIPFPSDLILLDTKNLDVILGMNWLAQFQGVVDCARRTVTLYRGPEQPVVFFAPPTSVSSSELHQIGLSEIPIVREFGDVFPEELPGMPPKREIEFRIDLAPGTTPLYKRPYRMAANELAEVKKQLEELKEKGYIRPSTSPWGAPVIFVEKKDKTKRRCVDYRALNEVTIKNKYPLPRIDDLFDQLKGATVFSKIDLRSGYHQLRIREEDIPKTAFTTRYGLYEFTVMSFGLTNAPAFFMNLMNKVFMEYLDKFVVVFIDDILIYSQS

SEQ ID NO: 19074 - protein, 612 aa, Oryza sativa
  Clone ID: TF_OSC17346j.C1.p1.gm
SFWDATKHKELESHKRRLANFRNQQGANQRVRYTNPYPGGSSSQQQQQQQQPRSAPRPQFVVRVPQPQQQQNQQGTRAPRPPTPTVQSGQGRRDAQGQQRLCFNCFEPGHFADKCPKPRRQQGQAPPHSNNGGKDVIRGRVNHVTAEDVLTTPDVIVGTFLVHSIPATILFDSGASHWFISVPFVGRNQLGVERLRNPLLITTPGGVMTAKYYSPAVPIEIQGIPFPSDLILLDTKNLDVILGMNWLAQFQGVVDCARRTVTLYRGPEQPVVFFAPPTSVSSSELHQIGLSEIPIVREFGDVFPEELPGMPPKREIEFRIDLAPGTTPLHKRPYRMAANELAEVKKQLEELKEKGYIRPSTSPWGAPVIFVEKKDKTKRMCVDYRALNEVTIKNKYPLPRIDDLFDQLKGATVFSKIDLRSGYHQLRIREEDIPKTAFTTRYGLYEFTVMSFGLTNAPAFFMNLMNKVFMEYLDKFVVVFIDDILVYSQSEEDHQHHLRLVLGKLREHQLYAKLSKCEFWLSEVKFLGHVISAKGVSVDPETVTTVTDWKQPKTVTQVRSFLGLAGYYRRFIENFSKIARPMTQLLKKEEKFVWSPQCEKAFQTLKKSWFPR

SEQ ID NO: 19075 - protein, 1734 aa, Oryza sativa
  Clone ID: TF_OSC17984j.C1.p1.fg
MAGSVTRRGLDMTGFVLELRGMCVVLGYPHGVDYQGRPLPEQEGDDAEPHAAWEVTAVILAGSPERTSLTVTAGGDSFPAACQSAALLAIGTLHQRYPDELQHSPYRYHPRRGGARDYATFRDASSEDDATIMHLARMVEAYDAARIDFHQMVRRGMVENNMKILELRQENLQLKKDLDAVEAQLHQLKIAQGEVCRPKRRRVCRSQKITARKSTSRPELVRQSLAWTCFVETPRAEPAPVVPQEGEASGVGSTEDALLLTFRPGPSQRRSAATGDSNQPEGSNHHHQGSPPPPPPPPPPPPDTNAILTQILAQQADMMAAFLHHIQNPPQHNAPPPPSQHSKLAEFLRIRPLTFSSSNNPVDALDWLHAVGKKLDTVQCSDEEKVIFAAHQLQGPASLWWDHFQATQPEGQPITWARFTAAFRRTHVPAGVVALKKREFRELKQGNRSVTEYLHEFNNLARYAPEDVREDEEKQEKFLAGMDPELSVRLVSGNYPDFQRLVDKSIRLEAKHKELESHKRRLANFRNQQGANQRVRYTNPYPGGSSSQQQQQQQQPRSAPRPQFVVRVPQPQQQQNQQGTRAPRPPTPTVQPGQGRRDAQGPQRLCFNCFEPGHFADKCPKPRRQQGQAPPRSNNGGKDVIRGRVNHVTAEDVLTTPDVIVGTFLIHSIPATILFDSGASHSFISVPFVGRNQLGVERLRNPLLITTPGGVMTAKYYSPAVPIEIQGIPFPSDLILLDTKNMDVILGMNCSSELHQIGLSEIPIVREFGDVFPDELPGMPPKREIEFRIDLAPGTTPLYKRPYRMAANELAEVKKQLEELKEKGYIRPSTSPWGAPVIFVEKKDKTKRMCVDYRALNEVTIKNKYPLPRIDDLFDQLKGATVFSKIDLRSGYHQLRIRDEDIPKTAFTTRYGLYEFTVMSFGLTNAPAFFMNLMNKVFMEYLDKFVVVFIDDILVYSQSEEDHQHHLCLVLGKLREHQLYAKLSKCEFWLSEVKFLGHVISAKGVAVDPETVTAVTDWKQPKTVTQVRSFLGLAGYYRRFIENFSKIAQPMTQLLKKEEKFVWSPQCEKAFKTLKEKLVASPVLILPDTRKDFMVYCDASRQGLGCVLMQDGHVVAYASRQLRPHEGNYPTHDLELAAVVHALKIWRHYLIGNRCEIYTDHKSLKYIFTQSDLNLRQRRWLELIKDYDVGIHYHPGKANVVADALSRKSHCNTLNVRGIPPKLSQQMEALNLSIVGRGFLAALEAKPTLLDQIREAQKNDPDMHGLLKNMKQGKAAGFTEDEHGTLWNGNRVCVPDNRELKQLILQEAHESPYSIHPGSTKMYLDLKEKYWWVSMKREIAEFVALCDVCQRVKAEHQRPAGLLQPLQVPEWKWDEIGMDFITGLPKTQGGYDSIWVVVDRLTKVARFIPVKTTYGGNKLAELYFARIVSLHGVPKKIVSDRGSQFTSHFWKKLQEELGTRLNFSTAYHPQTDGQTERLNQILEDMLRACVLDFGKTWDKSLPYAEFSYNNSYQASIQMAPYEALYGRKCRTPLLWDQVGESQVFGTDILREAEAKVRTIRDNLKVAQSRQKSYADNRRRNLEFAVDDFVYLRVTPLRGVHRFQTKGKLAPRYVGPFRIVARHGEVAYQLELPASLGNVHDVFHVSQLKKCLRVPSEQADSEQIEVREDLTYVERPVKILDTMERRTRNRVIRFCKVQWSNHAEEEATWEHEDELKAAHPDLFASSSESRGRDSV

SEQ ID NO: 19076 - protein, 456 aa, Oryza sativa
  Clone ID: TF_OSC17991j.C1.p1.fg
MAINLKAATTTTRATHLHLLLPPPPPPPDTNAILTQILAQQANMMTTFLHHLQNPPQQNAPPPPPQHSKLAEFLRIRPPTFSSSNNPVDALDWLHAVGKKLDTVQCSDEEKVIFAAHQLQGPASLWWDHFQATQPEGQPITWARFTAAFRRTHVLAGVVALKKREFRELKQGNRSVMEYLHEFNNLARYAPEDVREDEEKQEKFLAGMDPELSVRLVSGDYPDFQRLVDKSIRLEAKHKELESHKRRLANFRNQQGANQRVRYTNPYPGGSSSQQQQQQQQPRSAPRPQFVVRVPQPQQQQNQQGTRAPRPPTPAVQPGQGHRDAQGQQRLCFNCFEPGHFADKCPKPRRQQGQAPPRSNNGGKDVIRGRVNHVTAEDVLTTPDVIVEKKDKTKRMCVDYRALNEVTIKNNVSRQSTNDRPDSSNHSKYPNGNGMKLGWISSPDFQRPKVDMILYG

SEQ ID NO: 19077 - protein, 1511 aa, Oryza sativa
  Clone ID: TF_OSC18069j.C1.p1.fg
MVEAYDAARIDFHHMVRRGMVVNNMKILELRQENLQLKKDLDALEAQLCQLKMVTTRRTAAIGDGNQPEGSNPNIQGGPPPPPPPPPPPPPDTNPILTQILAQQANMMAAFLHHIQNPPQHNAPPPPPPPQHSKLAEFLRIRPPTFSSSNNPVDALDWLHAVGKKLDTVQCNDEEEVIFATHQLQGPASLWWDHFQATQPEGQPITWARFTAAFRRTHVPAGVMALKKREFRELKQGNRSVMEYLHEFNNLARYAPEDVREDEEKQEKFLAGMDPELSVRLVSGDYPDFQRLVDKSIRLEAKHKELESHKRRLANFRNQQGANQRVRYTNPYLGGSSSQQQQQQPRSAPRPQFVVRVPQPQQQQGRRDAQGQQRLCFNCFEPGHFADKCPKPRRQQGQAPPRPNNGGKDVAQGRVNHVTVEDVLTTPDVIVGTFLIHSIPATILFDSGASHSFISVPFVGRNQLGVERLRNPLLITTPGGDMTAKYYSPAVPIEIQGIPFPSDLILLDTKNLDVILGMNWLAQFQGVVDCVRRTVTLYRGPEQPVVFFAPPTSVGSSELHQIGLSEIPIASEFGDVFPEELPGMPPKREIEFRIDLAPGTTPLYKRPYRMAANELAEVKKQLEELKEKGYIRPSTSPWGAPVIFVEKKDKTKRMCVDYRALNEVTIKNKYPLPRIDDLFDQLKGATVFSKIDLRSGYHQLRIREEDIPKTAFTTRYGLYEFTVMSFGLTNAPAFFMNLMNKVFMEYLDKFVVVFIDDILVYSQSEEDHQQHLRLVLGKLREHQLYAKLSKCEFWLSEVKFLGHVRSAKGVAVDPETVTAVTDWKQPKTVTQVRSFLGLAGYYRSVRKHSKLKEKLVSSPVLILPDTRKDFLVYYDASRQGLGCVLMQEGHVVAYASRQLRPHEGNYPTHDLELAAVVHALKIWRHYLIGNRCEIYTDHKSLKYIFTQSDLNLRQRRWLELIKDYDVGIHYHPGKANVVADALSRKSHCNTLGVRGIPPELNQQLEALNLSIVGRGFLAMLEAKPTLLDQIREAQKNDPDMHGLLKNMKQGKAAGFTEDEHGTLWNGNRVCVPDVRELKQLILQEAHESPYSIHPGSTKMYLDLKEKYWWVSMKREIAEFVALCDVCQRVKAEHQRPAGLLQPLQVLEWKWDEIGMDFITGLPKTQGGYDSIWVVVDRLTKVARFIPVKTTYGGNKLAELYFARIVSLHGVPKKIVSDRGSQFTSHFWKKLQEELGTRLNFSTAYHPQTDGQTERLNQILEDMLRACVLDFGKTWDKSLPYAEFSYNNSYQASIQMAPYEALYGRKCRTPLLWDQVGESQVFGTDILREAEAKVRTIRENLKVAQSRQKSYADNRRRDLEFAVDDFVYLRVTPLRGVHRFQAKGKLAPRFVGPFRIIARRGEVAYQLELPASLGNVHDVFHVSQLKKCLRVPSEQADSEQIEVREDLTYVERPVKILDTMERRTRNRVIRFCKVQWSNHAEEEATWEREDELKAAHPDLFASSSESRGRDSV

SEQ ID NO: 19078 - protein, 656 aa, Oryza sativa
  Clone ID: TF_OSC18168j.C1.p1.fg
MTGFVLELRGMCVVLGYPHGVDYQARPLPEQEGEDAEPHAGWEVTAVILSGSPERTSLAVTAGGDSFPAACQNAALLAIGTLHQRYPDELQHSPYRYHPRRGGARDYATFRDASSEDDATVVHLARMVEAYDAARIDFHQMVSRGMVENNLKILELRQENLQLKKDLDALEAQLHQLKIAQGEICRPKRRRVCRSQKITARKSTSRPELVRQSLAWTCFVETPRAEPAPVVPQEGEASGVGSSEAPSLFAGSGWGFQMVTTRRNVNTGEGNQPEGSNPNHQGNPPPPPPPDTNAILTQILAQQANMMNAFLHHLQNPPQQNAPPPPPQHSKLAEFLRIRPPTFSSSNNPVDALDWLHAVGKKLDTVQCSDEEKVIFAAHQLQGPASLWWDHFQATQPEGQPITWARFTAAFRKTHVPAGVVALKKREFRELKQGNRSVMEYLHEFNNLARYAPEDVREDEEKQEKFLAGMDPELSVRLVSGDYPDFQRLVDKSIRLEAKHKELESHKRRLANFRNQQGANQRVRYTNPYPGGSSSQQQQQQQQPRPAPRPQFVVRVPQQQQQQNQQGTRAPRPPTPAGQPVQGRRDASGPQRLCFNCFEPGHFADKCPKPRRQQGQAPPRPNNGGQDVIRGRVNHVTAEDVLTTPDVIVEVQNCSR

SEQ ID NO: 19079 - protein, 648 aa, Oryza sativa
  Clone ID: TF_OSC1822j.C1.p3.fg
MTGFVLELRGMCVVLGYPHGVDYQARPLPEQEGEDAEPHAGWEVTAVILSGSPERTSLAVTAGGDSFPAACQNAALLAIGTLHQRYPDELQHSPYRYHPRRGGARDYATFRDASSEDDATVVHLARMVEAYDAARIDFHQMVRRGMVENNMKILELRQENLQLKKDLDALEAQLHQLKIAQGEDSRPKRRRVCRSQKITARKSTSRPELVRQSLAWTCFVETPRAEPAPVVPQEGEASGVGSSEVVWGMVMPMVTTRRNVNTGEGNQPEGSNPNHQGNPPPPPPPDTNAILTQILAQQANMMNAFLHHLQNPPQQNAPPPPPQHSKLAEFLRIRPPTFSSSNNPVDALDWLHAVGKKLDTVQCSDEEKVTFAAHQLQGPASLWWDHFQATQPEGQPITWTRFTAAFRRTHVPAGVVALKKREFRELKQGNRSVMEYLHEFNNLARYAPEDVREDEEKQEKFLAGMDPELSVRLVSGDYPDFQRLVDKSIRLEAKHKELESHKRRLANFRNQQGANQRVRYTNPYPGGSSSQQQQQQQQPRSAPRPQFVVRVPQQQQQQNQQGTRAPRPPTPTVQPVQGRRDASGPQRLCFNCFEPGHFADKCPKPRRQQGQAPPRSNNGGKDVIRGRVNHVTAEDVLTTPDVIVENDF

SEQ ID NO: 19080 - protein, 1982 aa, Oryza sativa
  unsure (1)..(1982): unsure at all Xaa locations
  Clone ID: TF_OSC20764j.C1.p3.np
MAAGSSAVSPSSGRSVPLPTLYKPSPCLPPPFSPLAALSPRRNRARAVALSLRRRRRAPVRRRCRPGPPLPSAPPPSASPHPRRPCPPLRFARRPPEHRRPHPPEPRHRLPPHRSPFPSLPSTRGESWTRFFSPFPPLSRPPLRRAYGRRRRPXGRGRAASRLRRRGRLRAHRAATAWGPAISRPRPRVRLTRGTHGAGRCEPGAPGPPWTHLGHIRTGLRASVAKHYRFHMSSGTNEGYTSCGPVVEMSWHRAGVLLLGAQSCLPVPEVPAVGGIGSMYTSDQSIIYSNSRALGYGQAKQCTQMAGSVSRRGLDMTGFVLELRGMCVVLGYPHGLDYQGRPLPEQEGDDAEHAAWEVTAVILTGSPERTSLAVTAGGDSFSAACQSAALLAISTLHQRYPDELQHSPYRYHPRRGGARDYATFRDASSEDDATIMHLARMVEAYDAARIDFHQMVRRGMVENNLKILELRQENLQLKKDLDAVEAQLHQLKIAQGEVCHPKRRRVCRSQKITARKSTSRPELVRQSLAWTCFVETPRAEPAPVVPQEGEASGVGSTEDALLLTFHGETRRNAATSDGNQPEGSNHNNHGSLPPPPPPPPPPPPDTNAILTQILAXQANMMAAFLHHIQNPPQHNAPPPPPQHSKLAEFLRIRPPTFSSSNNPVDVLDWLHAVGKKLDTVQCSDEEKVVFAAHQLQGPASLWWDHFQATQPEGQPITWARFTAAFRRTHVPAGVMALKKREFRELKQGNRSVMEYLHEFNNLARYAPEDVREDEEKQEKFLAGMDPELSVRLVSGDYPDFQRLVDKSIRLEAKHKELESHKRRLANFRNQQGANQRIRYTNPYPGGSSSQQQQPRSAPRPQFVVRVPQPQQQQSQQGTHAPRPPTPAAQSGQGRRDVQGPQRLCFNCFEPGHFADKCPKSRRQQGQAPPDVIVGTFLIHSIPATILFDSGASHSFISVPFVGRNQLGVERLRNPLLITTPGGVMTAKYYSPAVPIEIQGIPFPSDLILLDTKNLDVILGMNWLAQFQGVVDCARRTVTLYRGPKQPVVFFAPPTSVSSSELHQIGLSEIPIVREFGDVFPEELPGMPPKREIEFRIDLAPGTTPLYKRPYRMAANELAEVKKQLEELKEKGYIRPSTSPWGAPVIFVEKKDKTKRMCVDYRALNEVTIKNKYPLPRIDDLFDQLKGATVFSKIDLRSGYHQLRIREEDIPKTAFTTRYGLYEFTVMSFGLTNAPAFFMNLMNKVFMKYLDKFVVVFIDDILVYSQSEEDHQHHLRLVLGKLRKHQLYAKLSKYEFWLSEVKFLGHVISAKGVAVDPETVTAVTDWKQPKTVTQIRSFLGLAGYYRRFIENFSKIARPMTQLLKKEEKFVWSPQCEKAFKTLKEKLVSSPVLILPDTRKDFMVYCDASRQGLGCVLMQDGHVVAYASRQLQPHEGNYPTHDLELAAVVHALKIWRHYLIGNRCEIYTDHKSLKYIFTQSDLNLRQRRWLELIKDYDVGIHYHPGKANVVADAQSRKSHCNTLNVRGIPPELNQQMEALNLSIVGRGFLAALEAKPTLLDQIREAQKNDPDMHGLLKNMKQGKAAGFTEDEHGTLWNGNRRVKAEHQRPAGLLQPLQVPEWKWDEIGMDFITGLPKTQGGYDSIWVVVDRLTKVARFIPVKTTYGGNKLAELYFARIVSLHGVPKKIVSDRGSXFTSHFWKKLQEELGTRLNFSTAYHPQTDGQTERLNQILEDMLRACVLDFGKTWDKSLPYAEFSYNNSYQASIQMAPYEALYGRKCRTPLLWDQVGESQVFGTDILREAEAKVRTIRDNLKVAQSRQKSYADNRRRDLEFAVDDFVYLRVTPLRGVHRFQTKGKLAPRFVGPFRMIARRGEVAYQLELPASLGNVHDVFHVSQLKKCLRVPSQQADSEQIEVREDLTYVERPVKILDTMERRTRNRVIRFCKVQWSNHAEEEATWEREDELKAAHPDLFISSSESRGRDSV

SEQ ID NO: 19081 - protein, 182 aa, Oryza sativa
  Clone ID: TF_OSC2192j.C1.p1.fg
MALKKREFRELKQGNRSVMEYLHGFNNLARYAPEDVREDEEKQEKFLARMDPELSVRLVSGDYPDFQRLVDKSIRLEAKHKELESQKRRLANLRNQQGANQRVRYTNPYPGGSSSQPQQQQSQQGTRVPRPPAPVVQPGQGRREVQGQQRLCFNCFEPGHFADKCPKPRRQQGQAPPRPNNG

SEQ ID NO: 19082 - protein, 1979 aa, Oryza sativa
  unsure (1)..(1979): unsure at all Xaa locations
  Clone ID: TF_OSC22607j.C1.p1.np
YKPSPCLLLRFPPLAALSPGRNRACVALSFRRRRRDPVCRRRRPGPSPVSASSSGSPQHRRPRPPLRFARRPPERRRPRRPEPRRRLFPLRSPFPSSPSTRGEPWTAHFVSPFPPLSRPPLRRAYGRRRRPKGRGRAASRRLCRRGRLRARPAAAMWGPAVSRPPRVRLTRGTHGAGRRKPRAPVPPWTHLGHIRTGLRASVAKHYRFHMSSGANEGYTSCGANEGYTSCGPVVEMSWHRAGVLLLGAQSCLPVPGVPAVGGIGSLYTSDQSIIYSNSRALGYGRAEQCTQMAGSVTRRGLDMTGFVLELRGMCVVLGYPHGVDYQARPLPKQEGDDAEPHAAWEVTAVILAGSPERTSLAVTAGGDSFPAACQNAALLAIGTLHQRYPDELQHSPYRYHPHRGGARDYATFRDASSEDDATIVHLARMVEAYDAARIDFHQMVRRGMVENNLKILELRQENLQLKKDLDAVEAQLHQLKIAQGEVCRPKRRRVCRSQKITARKSTSRPELVRQSLAWTCFVETPRAEPAPVVPQEGEASGVGSTEDALLLTFHGETRRSANAGDGNQPEGSNRNHHGSPPPPPPPPPPPPPDTNAILTQILAQQANMMTAFLHHLQNPPQQNAPPPPPQHSKLAEFLRIRPPTFSSSNNPVDALDWLHAVGKKLDTVQCSDEEKVIFAAHQLQGPASLWWDHFQATQPEGQPITWARFTAAFRRTHVPAGVVALKKREFXELKQGNRSVMEYLHEFNNLARYAPEDVREDEEKQEKFLAGMDPELSVRLVSGDYPDFQRLVDKSIRLEAKHKELESHKRRLANFRNQQGANQRVRYTNPYPGGSSSQQQQQQQQPRSVPRPQYVVRVPQPQQQQSQQGTRAPRPPTPAVQSGQGCRDAQGQQRLCFNCFEPGHFADKCPKPRRQQGQAPPRSNNGGKDVIQGRVNHVTAEDVLTTPDVIVGTFLIHSIPATILFDSGASHSFISVPFVGRNQLGVERLRNPLLITTPGGVMTAKYYSPAVPIEIQGIPFPSDLILLDTKNLDVILGMNWLAQFQGVVDCARRTVTLYRGPEQPVVFFAPPTSVSSSELHQIGLSEIPIVREFGDVFPEELPGMPPKREIEFRIDLAPGTTPLYKRPYRMAANELAEVKKQLEELKEKGYIRPSTSPWGAPVIFVEKKDKTKRRCVDYRALNEVTIKNKYPLPRIDDLFDQLKGATVFSKIDLRSGYHQLRIREEDIPKTAFTTRYGLYEFTVMSFGLTNAPAFFMNLMNKVFMEYLDKFVVVFIDDILIYSQSEEDHQHHLRLVLGKLREHQLYAKLSKCEFWLSEVKFLGHVISAKGVAVDPETVTAVTDWKQPKTVTQVRSFLGLAGYYRRFIENFSKIARPMTQLLKKEEKFVWSPQCEKAFQTLKEKLVSSPVLVLPDTRKDFMVYCDASRQGLGCVLMQDGHVVAYASRQLRPHEGNYPTHDLELAAVVHALKIWRHYLIGNRCEIYTDHKSLKYIFTQSDLNLRQRRWLELIKDYDVGIHYHPGKANVVADALSRKSHCNTLNVRGIPPELNQQMEALNLGIVSRGFLAALEAKPTLLDQIREAQKNDPDMHGLLKNMKQGKAAGFTEDEHGTLWNGNRRVKAEHQRPAGLLQPLQVPEWKWDEIGMDFITGLPKTQGGYDSIWVVVDRLTKVARFIPVKTTYGGNKLAELYFARIVSLHGVPKKIVSDRGSQFTSHFWKKLQEELNQILEDMLRACVLDFGKTWDKSLPYAEFSYNNSYQASIQMAPYEALYGRKCRTPLLWDQVGESQVFGTDILREAEAKVRTIRDNLKVAQSRQKSYADNRRRDLEFAVGDFVYLRVTPLRGVHRFQTKGKLAPRYVGPFRIIARRGEVAYQLELPASLGNVHDVFHVSQLKKCLRVPSEQADSAQIEVREDLTYVERPVKILDTMERRTRNRVIRFCKVQWSNHAEEEATWEREDELKAAHPDLFASSSESRGRDSV

SEQ ID NO: 19083 - protein, 1790 aa, Oryza sativa
  Clone ID: TF_OSC23004j.C1.p1.fg
MDEVGRRWTFSRANEGYTSCGPMAGSVTRRGLDMTGFVLELRGMCVVLGYPHGVDYQARPLPEQEGEDAEPRAGWEVTAVILAGSSERTSLTVTAGGDSFPAACQNAALLAIGTLHQRYPDELQHSPYRYHPRRGGARDYATFRDASSEDDATVVHLARMVEAYDAARIDFHQMVRRGMVENNMKILELRQENLQLKKDLDALEAQLHQLKIAQGEDSRPKRRRVCRSQKITARKSTSRPELVRQSLAWTCFVETPRAEPAPVVPQEGEASGVGSSEVVWGMVTPMVTTRRNVNTGEGNQPEGSNHNHQGNPPPPPPPPPPPPPDTNAILTQILAQQANLMNAFLHHLQNPPQQNAPPPPPQHSKLAEFLRIRPPTFSSSNNPVDALDWLHAVGKKLDTVQCSDKEKVVFAAHQLQGPASLWWDHFQATQPEGQPITWARFTAAFRKTHVPAGVVALKKREFRELKQGNRSVMEYLHEFNNLARYAPEDVREDEEKQEKFLAGMDPELSVRLVSGDYPDFQRLVDKSIRLEAKHKELESHKRRLANFRNQQGANQRVRYTNPYPGGSSSQQQQQQQPRPAPRPQFVVRVPQPQQQQNQQGTRAPRPPTPAVQPVQGRRDAQGQQRLCFNCFEPGHFADKCPKPRRQQGQAPPRSNNGGKDVIRGRVNHVTAEDVLTTPDVIVGTFLVHSIPATILFDSGASHSFISVPFVGRNQLGVERLRNPLLITTPGGVMTAKYYSPAVPIEIQGIPFPSDLILLDTKNLDVILGMNWLAQFQGVVDCARRTVTLYRGPEQPVVFFAPPTSARSSELHQIELSEIPIVREFGDVFPEELPGMPPKREIEFRIDLAPGTTPLYKRPYRMAANELAEVKKQLEELKEKGYIRPSTSPWGAPVIFVEKKDKTKRMCVDYRALNEVTIKNKYPLPRIDDLFDQLKGATVFSKIDLRSGYHQLRIREEDIPKTAFTTRYGLYEFTVMSFGLTNAPAFFMNLMNKVFMEYLDKFVVVFIDDILIYSQSEEDHQHHLRLVLGKLREHQLYAKLSKCEFWLSEVKFLGHVISAKGVAVDPETVIAVTDWKQPKTVTQIRSFLGLAGYYRRFIENFSKIARPMTQLLKKEEKFVWSPQCEKAFQTLKEKLVSSPVLILPDTRKDFMVYCDASRQGLGCVLMQDGHVVAYASRQLRPHEGNYPTHDLELAAVVHALKIWRHYLIGNRCEIYTDHKSLKYIFTQSDLNLRQRRWLELIKDYDVGIHYHPGKANVVADALSRKSHCNTLNVRGIPPELNQQMEALNLSMVGRGFLAALEAKPTLLDQIREAQKNDPDMHGLLKNMKQGKAAGFTEDEHGTLWNGKRVCVPDSRELKQLILQEAHESPYSIHPGSTKMYLDLKEKYWWVSMKREIAEFVALCDVCQRVKAEHQRPAGLLQPLQVPEWKWDEIGMDFITGLPKTQGGYDSIWVIVDRLTKVARFIPVKTTYGGNKLAELYFARIVSLHGIPKKIVSDRGSQFTSHFWKKLQEELGTRLNFSTAYHPQTDGQTERLNQILEDMLRACVLDFGKTWDKSLPYAEFSYNNSYQASIQMAPYEALYGRKCRTPLLWDQVGESQVFGTDILREAEAKVRIIRDNLKVAQSRQKSYADNRRRDLEFAVDDFVYLRVTPLRGVHRFQTKGKLAPRYVGPFRITARRGEVAYQLELPASLGNVHDVFHVSQLKKCLRVPSEQADSEQIEVREDLTYVERPVKILNTMERRTRNRVIRFCKVQWSNHAEGEATWEREDELKAAHPDLFASSSESRGRDSV

SEQ ID NO: 19084 - protein, 1202 aa, Oryza sativa
  Clone ID: TF_OSC23023j.C1.p2.fg
MVTAGDHRRGGAAPERAERRGKREGRSTAHPGTTRTAETTAGVEKGGGAVRDAEGDGAPAVGGRSGAADGVDGDAATRKEVTPSREEDRSDDGGETELGGDGGERGARREHESDGESERRAAETEERSTGDDFIAPRGREGGRGGRKPAAEFSGSIDDAGEDCGRDSNESEGEREGKEGETGEGITGDVTLRRGKPPALVARRMVTTRRNVNTGEGNQPEGSNPNHQGNPPPPPPPDTNAILTQILAQQANMMTAFLHHLQNPPQQNAPPPPPQHSKLAEFLRIRPPTFSSSNNPVDALDWLHAVGKKLDTVQCSDEEKVIFAAHQLQGPASLWWDHFQATQPEGQPITWARFTAAFRRTHVPAGVVALKKREFRELKQGNRSVMEYLHEFNNLARYAPEDVREDEEKQEKFLAGMDPELSVRLVSGDYPDFQRLVDKSIRLEAKHKELESHKRRLANFRNQQGANQRVRYTNPYPGGSSSQQQQQQQQPRSAPRPQFVVRVPQPQQQQNQQGTRAPRPPTPAVQPVQGRRDAQGQQRLCFNCFEPGHFADKCPKPRRQQGQAPPRSNNGGKDVIRGRVNHVTAEDVLTTPDVIVGTFLVHSIPATILFDSGASHSFISVPFVGRNQLGVERLRNPLLITTPGGVMTAKYYSPAVPIEIQGIPFPSDLILLDTKNLDVILGMNWLAQFQGVVDCARRTVTLYRGPEQPVVFFAPPTSVRSSELHQIGLSEIPIVREFGDVFPEELPGMPPKREIEFRIDLAPGTTPLHKRPYRMAANELAEVKKQLEELKGKGYIRPSTSPWGASVIFVEKKDKTKRMCVDYRALNEVTIKNKYPLPRIDDLFDQLKGATVFSKIDLRSGYHQLRIREEDIPKTAFTTRYGLYEFTVMSFGLTNAPAFFMNLMNKVFMEYLDKFVVVFIDDILIYSQSEEDHQHHLRLVLGKLREHQLYAKLSKCEFWLSEVKFLGHVISAKGVAVDPETVTAVTEWKQPKTVTQIRSFLGLAGYYRRFIENFSKIARPMTQLLKKEEKFVWSPQCEKAFQTLKEKLVSSPVLILPDTRKDFMVYCDASRQGLGCVLMQDGHVVAYASRQLRPHEGNYPTHDLELAAVVHALKIWRHYLIGNRCEIYTDHKSLKYIFTQSDLNLRQRRWLELIKDYDVGIHYHPGKANVVACHVLINSSRIKNHSLKGIIELIKIRKEIGKH

SEQ ID NO: 19085 - protein, 1677 aa, Oryza sativa
  Clone ID: TF_OSC23671j.C1.p1.fg
MEVDEVGGRWTFSRANEGYTSCGPVVEMSWHRAGVLLLGAQSCLPVPGVPAVGGIGSVLLSMARMGWKLCHVFRLYTVVMAGSVTRRGLDMTGFVLELRGMCVVLGYPHGVDYQARPLPEQEGEDAEPHAGWEVTAVILSGSPERTSLAVTAGGDSFPAACQNAALLAIGTLHQHYPDELQHSPYRYHPRRGGARDYATFRDASSEDDATIVHLARMVEAYDAARIDFHQMVRRGMVENNMKILELRQENLQLKKDLDAVEAQLHQLKIAQGEDCRPKRLPQPEDHRPQEHLQARACSSVPGVDLLRRDPSCRACARGSPGGGNLRRWRNVNTGDGNQPEGSNPNHQGNPPSPSASPPPPPPDTNAILTQILAQQANMMTAFLHHLQNPPQQNAPPPPPQHSKLAEFLRIRPPTFSSSNNPVDALDWLHAVGKKLDTVQCSDEEKVIFAAHQLQGPASLWWDHFQATQPEGQPITWARFTAAFRRTHVPAGVVALKKREFRELKQGNRSVMEYLHEFNNLARYAPEDVREDEEKQEKFLAGMDPELSVRLVSGDYPDFQRLVDKSIRLEAKHKELESHKRRLANFRNQQGANQRVRYTNPYPGGSSSQQQQQQPRSAPRPQFVVRVPQPQQQQNQQGTRVPRPPTPAVQPGQGRRDAQGQQRLCFNCFEPGHFADKCPKPRRQQGQAPPRSNNGGKDVTRGRVNHVTAEDVLTTPDVIVGTFLIHSVPATTLFDSGASHSFISVPFVGRNQLGVERLRNPLLITTPGGVMTAKYYSPAVPIEIQGIPFPSDLILLDTKNLDVILGMNWLAQFQGVVDCARRTVTLYRGPEQPVVFFAPPTSVRSSELHQIGLSEIPIVGEFGDVFPEELPGMPPKREIEFRIDLAPGTTPLYKRPYRMAANELAEKKDKTKRMCVDYRALNEVTIKNKYPLPRIDDLFDQLKGATVFSKIDLRSGYHQLRIREEDIPKTAFTTRYGLYEFTVMSFGLTNAPAFFMNLMNKVFMEYLDKFVVVFIDDILIYSQSEEDHQHHLRLVLGKLREHQLYAKLSKCEFWLSEVKFLGHVISAEGVAVDPETVTAVTDWKQPKTVTQIRSFLGLAGYYRRFIENFSKIARPMTQLLKKEEKFVWSPQCEKAFQTLKEKLVSSPVLILPDTRKDFMVYCDASRQGLGCVLMQDGHVVAYASRQLRPHEGNYPTHDLELAAVVHALKIWRHYLIGNRCEIYTDHKSLKYIFTQSDLNLRQRRWLELIKDYDVGIHYHPGKANVVADALSRKSHCNTLNARGIPPELNQQMEALNLSIVGRGFLAALEAKPTLLDQIREAQKNDPDMHGLLKNMKQGKAAGFTEDEHGTLWNGNRRVKAEHQRPAGLLQPLQVPEWKWDEIGMDFITGLPKTQGGYDSIWVVVDRLTKVARFIPVKTTYGGNKLAELYFARISQTAGMELGTRLNFSTAYHPQTDGQTERLNQILEDMLRACVLDFGKTWDKSLPYAEFSYNNSYQASIQMAPYEALYGRKCRTPLLWDQVGESQVFGTDILREAEAKVRIIRDNLKVAQSRQKSYADNRRRDLEFAVGDFVYLRVTPLRGVHRFQTKGKLAPRYVGPFRIIARRGEVAYQLELPASLGNVHDVFHVSQLKKCLRVPSEQADSEQIEVREDLTYVERPMKILDTMERRTRNRVIRFC

SEQ ID NO: 19086 - protein, 1701 aa, Oryza sativa
  Clone ID: TF_OSC25209j.C1.p1.fg
MDEVGGRWTFSRANEGYTSCGPMAGSVTRRGLDMTGFVLELRGMCVVLGYPHGVDYQARPLPEQEGEDAEPHAGWEAYDAARIDFHQMVRRGMVENNMKILELRQENLQLKKDLDALESQLHQLKLAQGEDSRPKRRRVCRSQKITARKSTSRPELVRQSLAWTCFVETPRAEPAPVVPQEGEASGVGSTEDALLLAFRPGPSQRRNVSTGEGNQPEGSNPNPQGNPPPPPPPDTNAILTQILAQQANMMTAFLHHLQNPPQQNAPPPPPQHSKLAEFLRIRPPTFSSSNNPVDALDWLHAVGKKLDTVQCSDEEKVIFAAHQLQGPASLWWDHFQATQPEGQPITWAHFTAAFRRTHVPAGVMALKKREFRELKQGNRSVMEYLHEFNNLARYAPEDVREDEKKQEKFLAGMDPELSVRLVSGDYPDFQRLVDKSIRLEAKHKELESHKRRLANFRNQQGANQRVRYTNPYPGGSSSQQQQQQQQSRSAPRPQFVVRVPQPQQQQNQQGTRAPRPPTPTVQPVQGRRDAQGQQRLCFNCFEPGHFADKCPKPRRQQGQAPPRPNNGGKDVIRGRVNHVTAEDVLTTPDVIVGTFLIHSIPATILFDSGASHSFISVPFVGKNQLGVERLRNPLLITTPGGVMTAKYYSPAVPIEIQGIPFSSDLILLDTKNLDVILGMNWLAQFQGVVDCARRTVTLYRGPEQPVVFFAPPTSVRSSELHQIGLSEIPIVREFGDVFPEELPGMPPKREIEFRIDLAPGTTPLHKRPYRMAANQNLAEFKKQLEELKEKGYIRPSTSPWGAPVIFVEKKDKTKRMCVDYRALNEVTIKNKYPLPRIDDLFDQLKGATVFSKIDLRSGYHQLRIREEDIPKTAFTTRYGLYEFTVMSFGLTNAPAFFMNLMNKVFMEYLDKFVVVFIDDILIYSQSEEDHQHHLRLVLGKLREHQLYAKLSKCEFWLSEVKFLGHVISAKGVAVDPETVTAVTDWKQPKTVTQVRSFLGLAGYYRRFIENFSKIARPMTQLLKKEEKFVWSPQCEKAFQTLKKKLVSSPVLILPDTRKDFMVYCDASRQGLGCVLMQDGHVVAYASRQLRPHEGNYPTHDLELAAVVHALKIWRHYLIGNRCEIYTDHKSLKYIFTQSDLNLRQRRWLELIKDYDVGIHYHPGKANVVADALSRKSHCNTLNVRGIPPELNQQMEALNLSIVGRGFLAALEAKPTLLDQIREAQKNDPDMHGLLKNMKQGKAAGFTEDEHGTLWNGKRVCVPDNRELKQLILQEAHESPYSIHPGSTKLYLDLKEKYWWVSMKREIAEFVALCDVCQRVKAEHQRPAGLLQPLQVPEWKWDEIGMDFITGLPKTQGGYDSIWVIVDRLTKVARFIPVKTTYGGNKLAELYFARIVSLHGIPKKIVSDRGSQFTSHFWKKLQEELGTRLNFSTAYHPQTDGQTERLNQILEDMLRACVLDFGKTWDKSLPYAEFSYNNSYQASIQMAPYEALYGRKCRTPLLWDQVGESQVFGTDILREAEAKVRIIRDNLKVAQSRQKSYADNRRRDLEFAVGDFVYLRVTPLRGVHRFQTKGKLAPRYVGPFRIIARRGEVAYQLELPASLGNVHDVFHVSQLKKCLRVPSEQADSEQIEVREDLTYVERPVKILDTMERRTRNRVIRFCKVQWSNHAEEEATWEREDELKAAHPDLFASSSESRGRDSV

SEQ ID NO: 19087 - protein, 642 aa, Oryza sativa
  Clone ID: TF_OSC25210j.C1.p1.fg
MSWQRVGALLLGAQSCLPVPGVPAMAGSVTRRGLDMTGFVLELRGMCVVLGYPHGVDYQARPLPEQEGEDAEPHAGWEVTTVILSGSPERTSLAVTAGGDSFPAACQNAALLAIGTLRQRYPDELQHSPYRYHPRRGGARDYATFRDASSENDATIVHLAGMVEAYDAARIDFHQMVHRGMVENNMKILELRQENLQLKKDLDAVEAQLQQLKIAQGEDCRPKRRRVCRSQKITARKSTSRPELMVTTRRTAVTGDGNQPEGSNHNHQGNPPPPPPPPPPPPPDTNAILTQILAQQANMMTAFLHHLQNPPQQNAPPPPPQHSKLAEFLRIRPPTFSSSNNPMDALDWLHAVGKKLDTVQCSDEEKVIFAAHQLQGPASLWWDHFQATQPEGQPITWARFTAAFRRTHVPAGVVALKKREFRELKQGNRSVMEYLHEFNNLARYAPEDVREDEEKQEKFLAGMDPELSVRLVSGDYPDFQRLVDKSIRLEAKHKELESHKRRLANFRNQQGANQRVRYTNPYPGGSSSQQQQQQQQSRSAPRPQFVVRVPQPQQQQNQPGTRAPRPPTPTVQPVQVRRDAQGQQRLCFNCFEPGHFADKCPKPRRQQGQAPPRPNNGGKDVIRGRVNHVTAEDVLTTPDVIV

SEQ ID NO: 19088 - protein, 495 aa, Oryza sativa
  Clone ID: TF_OSC25222j.C1.p1.fg
MKILELRQENLQLKKDLDALESQLHQLKLAQGEDSRPKRRRVCRSQKITARKSTSRPELVRQSLAWTCFVETPRAEPAPVVPQEGEASGVGSTEDALLLAFRPGPSQRRNVSTGEGNQPEGSNPNPQGNPPSPPPPDTNAILTQILAQQANMMTAFLHHLQNPPQQNAPPPPPQHSKLAEFLRIRPPTFSSSNNPVDALDWLHAVGKKLDTVQCSDEEKVIFAAHQLQGPASLWWDHFQATQPEGQPITWAHFTAAFRRTHVPAGVVALKKREFRELKQGNRSVMEYLHEFNNLARYAPEDVREDEEKQEKFLAGMDPELSVRLVSGDYPDFQRLVDKSIRLEAKHKELESHKRRLANFRNQQGANQRVRYTNPYPGGSSSQQQQQQQQSRSAPRPQFVVRVPQPQQQQNQQGTRAPRPPTPTVQPVQGRRDAQGQQRLCFNCFEPGHFADKCPKPRRQQGQAPPRSNNGGKDVIRGRVNHVTAEDVLTTPDVIV

SEQ ID NO: 19089 - protein, 652 aa, Oryza sativa
  Clone ID: TF_OSC25596j.C1.p1.fg
MTGFVLELRGMCVVLGYPHGVDYQARPLPEQEGEDAEPHAGWEVTAVILSGSPERTSLAVTAGGDSFPAACQNAALLAIGTLHQRYPDELQHSPYRYHPRRGGACDYATFRDASSEDDATVVHLARMVEAYDAARIDFHQMVRRGMVENNLKILELRQENLQLKKDLDALEAQLHQLKIAQGEISRPKRRRVCRSQKITARKSTSRPELVRQSLAWTCFVETPRAEPAPVVPQEGEASGVGSSEGALLLTFRPGPSQRRNVNTGEGNQPEGSNPNPQGNPPSPPPPDTNAILTQILAQQANMMNAFLHHLQNPPQQNAPPPPPQHSKLAEFLRIRPPTFSSSNNPVDALDWLHAVGKKLDTVQCSDEEKVIFAAHQLQGPASLWWDHFQATQPEGQPITWARFTAAFRRTHVPAGVVALKKREFRELKQGNRSVMEYLHEFNNLARYAPEDVREDEEKQEKFLAGMDPELSVRLVSGDYPDFQRLVDKSIRLEAKHKELESHKRRLANFRNQQGANQRVRYTNPYPGGSSSQQQQQQQQPRPAPRPQFVVRVPQPQQQQNQQGTRAPRPPTPAVPPVQGRRDAQGQQRLCFNCFEPGHFADKCPKPRRQQGQAPPRSNNGGKDVIRGRVNHVTAEDVLTTPDVIVEVQNCIR

SEQ ID NO: 19090 - protein, 1417 aa, Oryza sativa
  Clone ID: TF_OSC25709j.C1.p1.fg
MMTAFLHHLQNPPQQNAPPPPPQHFKLAEFLRIRPPTFSSSNNPVDALDWLHAVGKKLDTVQCSDEEKVVFAAHRLQGPASLWWDHFQATQPEGQPITWARFTAAFRRTHVPAEVMALKKREFRELKQGNRSVMEYLHEFNNLARYAPEDVREDEEKQEKFLAGMDPELSVRLVSGDYPDFQRLVDKSIRLEAKHKELESHKRRLANFRNQQGANQRVRYTNPYPGGSSSQQQQQQQPRSAPRPQFVVRVPQPQQQQSQQGTRATRPPMPAVQPGQGRRDVQGPQRLCFNCFEPGHFADKCPKPRRQQGQPPPRSNNGGKDVIRDRVNHVTAEDVLTTPDVIVGTFLIHSIPATILFDSGASHSFISVPFVGRNQLGVERLRNPLLITTPGGVMTAKYYSPAVPIEIQGIPFPSDLILLDTKNLDVILGMNWLAQFQGIVDCARRTVTLYRGPEQPVVFFAPPTSISSSELHQIGLSEIPIVREFGDVFPEELPGMPPKREIEFRIDLSPGTTPLYKRPYRMAANELAKVKKQLEELKEKGYIRPSTSPWGAPVIFVEKKDKTKRMCVDYRALNEVTIKNKYPLPRIDDLFDQLKGATVFSKIDLRSGYHQLRIREEDIPKTAFTTRYGLYEFTVMSFGLTNAPAFFMNLMKKVFMEYLDKFVVVFIDDILVYSQSEEDHKHHLRLVLGKLREHQLYAKLSKCEFWLSEVKFLGHVISAKGVAVDPETVTAVTDWKQPKTVTQIRSFLGLAGYYRRFIENFSKIARPMTQLLKKEEKFVWSPQCEKAFQTLKEKLVSSPVLILQDTRKDFMVYCDASRQGLGCVLMHDGHVVAYASRQLRPHEGNYPTHDLELAAVVHALKIWRHYLIGNHCEIYTDHKSLKYIFTQSDLNLRQRRWLELIKDYDVGIHYHPGKANVVADALSRKSHCNTLNVRGIPPELNQQMEALNLSINMKQGKAAGFTEDEHGTLWNGNRVCVPDNRELKQLILQEAHESPYSIHPGSTKMYLDLKEKYWWVSMKREIAEFVALCDVCQRVKAEHQRPAGLLQPLQVPEWKWDEIGMDFITGLPKTQGGYDSIWVVVDRLTKVARFIPVKTTYGGNKLAELYFARIVSLHGVPKKIVSDRGSQFTSHFWKKLQEELGTRLNFSTAYHPQTDGQTEHLNQILEDMLRACVLDFGKTWDKSLPYAEFSYNNSYQASIQMAPYEALYGRKCRTPLLWDQVGESQVFGTDILRKAEAKVRTIRDNLKVAQSRQKSYADNRRRDLEFAVDDFVYLRVTPLRGVHRFQTKGKLAPRFVGPFRIIARRGEVAYQLELPASLGNVHDVFHVSQLKKCLRVPSEQADSEQIEVREDLTYVERPVKILDTMERRTRNRVIRFCKVQWSNHAEEEATWEREDELKAAHPDLFASSSESRGRDSV

SEQ ID NO: 19091 - protein, 397 aa, Oryza sativa
  Clone ID: TF_OSC25970j.C1.p1.fg
MVTTRRSAATGEGSHPEGSNHNNHDSPPPPPPPPPPPPPDTNSILTQILAQQANMMAAFIHHIQIPPQHNAPPPPPPPQHSKLAEFLRIRPPTFSSSNNPVDALDWLHAVGKKLDTVQCNDEEKVIFAAHQLQGPASLWWDHFQATQLEGQPITWARFTAAFRRTHVPAGVMALKKRKFRELKQGNRSVMEYLHEFNNLARYAPEDVHEDEEKQEKFLAGMDPELSVRLVSGDYPDFQRLVDKSIRLEAKHKELESHKRRLANFRNQQGANQRVRYTNPYPGGSSSQQQQQQPRSAPRPQFVVRVSQPQQQQSQQGTRAPRPPAPAVQPGQGRRDAQGQQRLCFNCFEPGHFADKCPKPRRQQGQAPPRPNNGGKDVIPGRVNHVTAEDVLTTPDVI

SEQ ID NO: 19092 - protein, 1865 aa, Oryza sativa
  unsure (1)..(1865): unsure at all Xaa locations
  Clone ID: TF_OSC26157j.C1.p1.np
MDEVGGRWTFSRANEGYTSCGPVVEMSWQRVGALLLGAQSCLPVPGVPAVGGIGSMYTSDQSIIYSNSRALGYGQAEQCTQMAGSVTRRGLDMTGFVLELRGMCVVLGYPHGVDYQARTLPDQEGDDAEPHAGWEVTAVILSGSPERTSLAVTAGGDSFPAACQNAALLAIGTLHQRYPDELQHSPYRYHPRRGGACDHATFRDASSEDDATIVHLARMVEAYDAARIDFHQMVRRGMVENNMKILELRQENLQLKKDLDAVEAQLHQLKIAQGEICRPKRRRVCRSQKITARKSTSRPELVRQSLAWTCFVETPRAEPAPVVPQEGEAFRRWXHGGCAVAHLPSWPVAAVDEQLVGLRMVTTRRNAATGDGNQPEGSNHNHQGNPPPPPPPPPPPPPDTNAILTQILAQQANMMTAFLHHLQNPPQQNAPPPPPQHSKLAEFLRIRPPTFSSSNNPVDALDWLHAVGKKLDTVQCSDEEKVVFAAHQLRGPASLWWDHFQATQPGEQPITWARFTAAFRRTHVPAGVVALKKREFRELKQGNRSVMEYLHEFNNLARYAPEDVREDEEKQEKFLAGMDPELSVRLVSGDYPDFQRLVDKSIRLEAKHKELESHKRRLANFRNQQGANQRVRYTNPYPGGSSSQQQQQQQQPRSAPRPQFVVRVPQPQQQQNQQGTRAPRPLTPTVQPGQGRRDASGPQRLCFNCFEPGHFADKCPKPRRQQGQAPPRSNNGGKDVIRGRVNHVTAEDVLTTPDVIVGTFLVHSIPATILFDSGASHSFISVPFVGRNQLGVERLRNPLLITTPGGVMTAKYYSPAVPIEIQGIPFPSDLILLDTKNLDVILGMNWLAQFQGVVDCARRTVTLYRGPEQPVVFFAPPTSVRSSELHQIELSEIPIVREFGDVFPEELPGMPPKREIEFRIDLAPGTTPLHKRPYRMAANELAEVKKQLEELKEKGYIRPSTSPWGAPVIFVEKKDKTKRMCVDYRALNEVTIKNKYPLPRIDDLFDQLKGATVFSKIDLRSGYHQLRIREEDIPKTAFTTRYRLYEFTVMSFGLTNAPAFFMNLMNKVFMEYLDKFVVVFIDDILIYSQSEEDHQHHLRLVLGKLREHQLYAKLSKCEFWLSEVKFLGHVISAKGVAVDPETVTAVTDWKQPKTVTQVRSFLGLAGYYRRFIENFSKIARPMTQLLKKEEKFVWSPQCEKAFQTLKEKLVSSPVLILPDTRKDFMVYCDASRQGLGCVLMQDGYVVAYASRQLRPHEGNYPTHDLELAAVVHALKIWRHYLIGNRCEIYTDHKSLKYIFTQSDLNLRQRRWLELIKDYDVGIHYHPGKANVVADALSRKGHCNTLNVRGIPPELNQQMEALNLSIVGRGFLAALEAKPTLLDQIREAQKNDPDMHGLLKNMKQGKAAGFTEDEHGTLWNGKRVCVPDNRELKQLILQEAHESPYSIHPGSTKMYLDLREKYWWVSMKREIAEYVALCDVCQRVKAEHQRPAGLLQPLQVPEWKWDEIGMDFITGLPKTQGGYDSIWVVVDRLTKVARFIPVKTTYGGNKLAELYFARIVSLHGVPKKIVSDRGSQFTSHFWKKLQEELGTRLNFSTAYHPQTDGQTERLNQILEDMLRACVLDFGKTWDKSLPYAEFSYNNSYQASIQMAPYEALYGRKCRTPLLWDQVGESQVFGTDILREAEAKVRIIRDNLKVAQSRQKSYADNRRRDLEFAVDDFVYLRVTPLRGVHRFQTKGKLAPRYVGPFRIVARRGEVAYQLELPASLGNVHDVFHVSQLKKCLRVPSEQADSEQIEVREDLTYVERPVKILDIMERRTRNRVIRFCKVQWSNHAEEEATWEREDELKAAHPGLFASSSESRGRDSV

SEQ ID NO: 19093 - protein, 1349 aa, Oryza sativa
  Clone ID: TF_OSC26367j.C1.p1.np
HLGHIRTGLRASVAKHYRFHMSSGTNEGYTGCGSVVEMSWHRAGVLLLGAQSCLPVPGVPAVGGIGSMYTSDQSIIYSNSRALGYGQAEQCTQAGSVSRRGLDMTGFVLELRGMCVVLGYPHGVDYQARPLPEQDCDDAEPHAGWEVTAVILSGSPERTSLAVTTGGDSFPAACQSAALLAIGTLHQRYPDELQHSPYRYHPRRGGARDYATFRDASSEDDATLVHLACMVEAYDAARIDFHQMVRRGMVENNMKILELRQENLQLKKDLDAVEAQLHQLKIAQGEVCRPKRRRVCRSQKITARKSTSRPELVRQSLAWTCFVETPRAEPAPVVPQEGEASSVGSTEDALLLTFHGETRRSANTGDGNQPEGSNHHHQGSPPSPSSSPSPPPPDTNAILTQILTQQANMMTAFLHHIQNPPQHNAPPPPPQHSKLAEFLRIRPPTFSSSNNPVDALDWLHAVGKKLDTVQCSDEEKVIFAAHQLQGPASLWWDHFQATQPEGQPITWTRFTAAFRRTHVPAGVVALKKREFRELKQGNRSVMEYLHDFNNLARYAPEDVREDEEKQEKFLAGMDPELSVRLVSGDYPDFQRLVDKSIRLEAKHKELEWHKRRLANFRNQQGANQRVRYTNPYPGGSSSQQQQQQQQPRSAPRPQFVVRVPQPQQQQSQQGTRAPRPPTPTVQPGQGRRDASGPQRLCFNCFEPGHFADKCPKPRRQQGQAPPRSNNGGKDVIRGRVNHVTAEKVLTTPDVIVGTFFIHSIPATILFDSGASHSFISVPFVGRNQLGIERLRNPLLITTPGGVMTAKYYSPAVPIEIQGIPFPSDLILLDTKNLDVILGMNWLAQFQGVVDCARRTVTLYRGPEQPIVFFAPPTSVRSSELHQIGLSEIPIVREFGDVFPEELPGMPPKREIEFRIDLAPGTTPLYKRPYRMAANELAEVKKQLEELKEKGYIGPSTSPWGAPVIFVEKKDKTKRMCVDYRALNEVTIKNKYPLPRIDDLFDQLKGATVFSKIDLRSGYHQLHIREEDIPKTAFTTRYGLYEFTVMSFGLTNAPAFFMNLMNKVFMEYLDKFVVVFIDDILIYSQSEEDHQHHLRLVLGKLREHQLYAKLSKCEFWLSEVKFLGHVISAKGVAVDPETVTAVTDWKQPKTVTQVRSFLGLAGYYRRFIENFSKIARPMTQLLKKEEKFVWSPQCEKAFKTLKEKLVSSPVLILPDTRKDFMVYCDASRQGLGCVLMQDGHVVAYASRQLRPHEGNYPTHDLELAAVVHALKIWRHYLIGNRCEIYTDHKSLKYIFTQSDLNLRQRRWLELIKDYDVGICHRPGSRDVMAQGLLLLGAQSCLPVPGVPAVG

SEQ ID NO: 19094 - protein, 1009 aa, Oryza sativa
  Clone ID: TF_OSC27415j.C1.p3.gm
MEPRSPRRFPSPPAALSHSQHYLSTPCASLLRFRPLPLSFPVGIELAPSSSLSAVAAELRFAAVVAPDLLPLRHRLLWLRRVLVDLVHPFVSPADRRNAAVLVDPSRAAASLRFGRRSRRRSRPGVSRGPPFRFPLPSPLSGAAPSRRRSPPVTIGARARRLPSAVPARPPSGAPCGCHVGPGRQPPAPSGAADAWDPRRRPAQAACTRSTVDREAAAWAPLPWTRANEGYTSCGPVVEMSWHRAGVLLLGAQSCLPVLGVPAVGGIGSMAGSVTRRGLDMTGFVLELRGMCVALGYPHGVDYQARPLPEQEGDDAEPHAAWEVTAVILAGSPERTSLTVTAGGDSFPAACQSAALLAIGTLHQRYPDELQHSPYRYHPRRGGARDHTTFRDASSEDDATIVHLARMVEAYDAARIDFHQMVRRGMVEDNLKILELRQENLQLKKDLDAVEAQLHQLKIAQGEICRPKRRRVCRSLKITARKSTSRPELVRQSLAWTCFVETPRAEPAPVVPQEGEASGVDGDDQRSANTGDGNQPEGSNHNHQGNPPPPPPLPPPPPPDTNAILTQILAQQANMMTAFLHHLQNPPQLNAPPPPPQHSKLAEFLRIRPPTFSSSNNPVDALDWLHAVGKKLDTVQCSDEEKVIFAAHQLQGPASLWWDHFQATQPEGQPITWARFTAVFRRTHVPAGVVALKKREFREWKQGNRSVMEYLHEFNNLARYAPEDVREDEEKQEKFLAGMDPELSVRLVSGDYPDFQRLVDKSIRLEAKHKELESHKRRLANFRNQQGANQRVRYTNPYPGGSSSQQQQQQQQPRSAPRPQFVVRVPQPQQQQNQQGTRAPRPPPPTVQPGQGRRDAQGPQRLCFNCFEPGHFADKCPKPRRQQGQAPPRPNNGVKDVIRGRVNHVTAEDVLTTPDVIVEIPIVREFGDVFPEELPGMPPKREIEFRIDLAPGTAPLYERPYRMAANELAEVKKQLEELKEKGALNEVTIKNKYPLPRIDDLFDQLKACH

SEQ ID NO: 19095 - protein, 1190 aa, Oryza sativa
  Clone ID: TF_OSC28701j.C1.p1.gm
MEYLHEFNNLARYAPEDVWEDEEKQEKFLAGMDPELSVRLVSGDYPDFQRLVDKSIRLEAKHKELESHKRRLANFRNQQGANQRVRYTNPYPGGSSSQQQQQQQQPRSAPRPQFVVRVPQPQQQTNQQGTRAPRPPPPTVQPGQGRRDAQGPQRLCFNCFEPGHFADKCPKPRHQQGQAPPRPNNGGKDVIRGRVNHVTAEDVLTTPDVIVGTFLIHSIPATILFDSGASHSFISVPFVGRNQLGVERLRNPLLITTPGGVMTAKEFGDVFPEELPGMPPKREVEFRIDLAPGTAPLYKRPYRMAANELAEVKEQLEELKEKGYIRPSTSPWGAPVIFVEKKDKTKRMCVDYRALNEVTIKNKYPLPRIDDLFDQLKGATVFSKIDLRSGYHQLRIREEDIPKTAFTTRYRLYEFTVKSFGLTNAPAFFMNLMNKVFMEYLDKFVVVFIDDILIYSQSEEDHQHHLRLVLGKLREHQLYAKLSKCEFWLSEVKFLGHVISAKGVAVDPETVTAVTDWKQPKTVTQVRSFLGLAGYYRRFIENFSKIARPMTQLLKKEEKFVWSPQCEKTFKTLKEKLDGHVVAYASRQLRPHEGNYPTHDLELAAVVHALKIWRHYLIGNRCEIYTDHKSLKYIFTQSDLNLRQRRWLELIKDYDVGIHYHPGKANVVADALSRKSHCNTLNVRGVPPELNQQMEALNLSIVSRGFLAALEAKPTLLDQIREAQKNDPDMHGLLKNMKQGKAAGFTEDEHGTLWNGNRVCVPVNRELKQLILQEAHESPYSIHPGSTKMYLDLKEKYWWISMKREIAEFVALCDVCQCVKAEHQRPAGLLQPLQVPEWKWDEIGMDFITGLPKTQGGYDSIWVVVDRLTKVARFIPVKTTYGGNKLAELYFARIVSLHGVPKKIVSDRGSQFTSHFWKKLQEELGTRLNFSTAYHPQTDGQTERLNQILEDMLRACVLDFGKTWDKSLPYAEFSYNNSYQASIQMAPYEALYGRKCRTPLMWDQVGESQVFGTDILREAEAKVRTIRDNLKVAQSRQKSYADNRRRDLEFAVDDFVYLRVTPLRGVHRFRTKGKLAPRYVGPFRIVARRGEVAYQLELPASLGNVHDVFHVSQLKKCLRVPSEQADSEQIEVREDLTYVERPVKILDTMERRTRNRVIRFCKVQWSNHAEEEATWEREDELKAAHPDLFA

SEQ ID NO: 19096 - protein, 990 aa, Oryza sativa
  unsure (1)..(990): unsure at all Xaa locations
  Clone ID: TF_OSC28999j.C1.p1.np
MAAGPPAPVSSLPRPPSLDPALFKPSPLLLLQFPPLAALPPRRNQGRAVALSLRRRHRAPVRRRRRPGSPPTSAPPPSALPHPRRPRPPLRFGRRPPERRRPRRLEPRRRLPPLRPPFSSSPSTXGEPWTRFFSPFPPLSRPPLRRAYGRRRRPXGRAASRRPHRLGRPRAHRVAAAWGPAVSRPRPXVRLTRGTHGAGRCEPGAPGPPWTHLGHIRTGLRASVAKHYRFHMSSGTNEGYTSCGPVVEMSWHRAGVLLLGAQSCLPVPGVPAVGGIGSMYTSDQSIIYSNSRALGYGQAEQCTQMAGSINRRGLDLTGFVLELRGMCVVLGYPHGVDYQGKQLPEQEGDDAEPHAAWEVTAVILTGSPERTSLAVTAGGDSFSAACQNAALLAIGTLHQRYPDELQHSPYRYHPRRGGARDYATFRDASSEDDATIMHLARMVEAYDAARMDFHQMVRRGLVENNMKILELRQENLQLKKDLDVVEAQLCQLKIAQGEVCRPKRRRVCRSLKITARKSTSRPELVRQSLAWTCFVETPRAEPAPVVPQEDGVSGVGSTEDALLLTFHGETRRSAATGDGNQPVGSNHNNHGSPPPPPPPPPPPPLDTNTILTQIIAQRANMMAAFLHHIQNPPQHNAPPPPPQHSKLAEFLRIRPPTFSSSNNPVDALDWLHAVGKKLDTVQCNDEEKVIFAAHXLQGPASLWWDHFQATXPEGQPITWARFTASFQRTHVPVGVMALKKREFXELKQGNRSMMEYLHEFNNLARYAPEDVREDEEKQEKFLAGMDPELSVRLVSGDYPDFQRLVDKSIRLEAKHKELESHKRRLANFRNQQGANQRVRYTNPYPGGSSSQQQQQQQPRSTSRPQFVVHVPQPQQQQSQQGTRAPRPPTPAVQPVQGRRDAQGQQRLCFNCFEPGHFADKCPKPRCQQGQAPPRSNNGGKDVIRGRVNHVTAENVLTTPDVIVGTFLIHSIPATIFFKXIFANFFIXILI

SEQ ID NO: 19097 - protein, 1538 aa, Oryza sativa
  Clone ID: TF_OSC29926j.C1.p5.fg
MSWHRAGVLLLGVQSCLPVPGVPAVGGIGSVLLSMARMGWKLCHVFRLYTVVMLTTRRSAATGDGNQPEGSNHHHQGRPPSPPPTPPPPPPDTNAILTQILAQQANMMTAFLHHLQNSPQHNAPPPPPQHSKLAEFLRIRPPTFSSSNNPVDALDWLHAVGKKLDTVQCSDEEKATQPEGQPITWARFTAAFRRTHVPAGVMALKKREFRELKQGNRSVMEYLHEFNNLARYAPEDVREDEEKQEKFLAGMDPELSVRLVSGDYPDFQRLVDKSIRLEAKHKELESHKRRLANFRNQQGANQRVRYTNPYPGGSSSQQQQQQQQPRSAPRPQFVVRVPQPQQQQNQQGTRAPRPPTPTVQPGQGRRDAQGPQRLCFNCFEPGHFADKCPKPRRQQGQAPPRSNNGGKDVIRGRVNHVTAEDVLTTPDVIVGTFLIHSIPATILFDSGASHSFISVPFVGRNQLGVERLRNPLLITTPGGVMTAKYYSPAVPIEIQGIPFPSDLILLDTKNLDVILGMNWLAQFQGVVDCARRTVTLYRGPEQPVVFFAPPTSVSSSELHQIGLSEIPIVREFGDVFPEELPGMPPKRQIEFRIDLAPGTTPLYKRPYRMAANELAEVKKQLEELKEKGYIRPSTSPWGAPVIFVEKKDKTKRMCVDYRALNEVTIKNKYPLPRIDDLFDQLKGATVFSKIDLRSGYHQLRIRDEDIPKTAFTTRYGLYEFTVMSFGLTNAPAFFMNLMNKVFMEYLDKFVVVFIDDILVYSQSEEDHQHHLRLVLGKLREHQLYAKLSKCEFWLSEVKFLGHVISAKGVAVDPETVTAVIDWKQPKIVTQVRSFLGLAGYYRRFIENFSKIARPMTQLLKKEEKFVWSPQCEKAFKTLKEWLVSSPVLILPDTRKDFMVYCDASRQGLGCVLMQDGHVVAYASRQLRPHEGNYPTHDLELAAVVHALKIWRHYLIGNRCEIYTDHKSLKYIFTQSDLNLRQRRWLELIKDYDVGIHYHPGKANVVADALSRKSHCNTLNVRGIPPELNQQMEALNLSIVGRGFLAALEAKPTLLDRIREAQKNDPDMHGLLKNMKQGKAAGFTEDEHGTLWNGNRVCVPDNRELKQLILQEAHESPYSIHPGSTKMYLDLKEKYWWVSMKREIAEFVALCDVCQRVKAEHQRPAGLLQPLQVPEWKWDEIGMDFITGLPKTQGGYDSIWVVVDRLTKVARFIPVKTTYGGNKLAELYFARIVSLHGVPKKIVSDRGSQFTSHFWKKLQEELGTRLNFSTAYHPQTDGQTERLNQILEDMLRACVLDFGKTWDKSLPYAEFSYNNSYQASIQMAPYEALYGRKCRTPLLWDQVGESQVFGTDILREAEAKVRTIRDNLKVAQSRQKSYADNRRRNLEFAVDDFVYLRVTPLRGVHRFQTKGKLAPRYVGPFRIVARRGEVAYQLDLPASLGNVHDVFHVSQLKKCLRVPSAQADSEQIEVREDLTYVERPVKILDTMERRTRNRVIRFCKVQWSNHAEEEATWEREDELKAAHPDLFASSSESRGRDSV

SEQ ID NO: 19098 - protein, 877 aa, Oryza sativa
  Clone ID: TF_OSC29969j.C1.p1.gm
RRDASGPQRLCFNCFEPGHFADKCPKPRRQQGQAPPRSNNGGKDVIRGRVNHVTAEDVLTTPDVIVEKKDKTKRMCVDYRALNEVTIKNKYPLPRIDDLFDQLKGATVFSKIDLRSGYHQLRIREEDIPKTAFTTRYGLYEFTVMSFGLTNAPAFFMNLMNKVFMEYLDKFVVVFIDDILIYSQTEEDHQHHLRLVLGKLREHQLYAKLSKCEFWLSEVKFLGHVISAKGVAVDPETVTAVTDWKQPKTVTQIRSFLGLAGYYRRFIENFSKIARPMTQLLKKEEKFVWSPQCEKAFQTLKEKLVSSPVLILPDTRKDFMVYCDASRQGLGCVLMQDGHVVAYASRQLRPHEGNYPTHDLELAAVVHALKIWRHYLIGNRCEIYTDHKSLKYIFTQSDLNLRQRRWLELIKDYDVGIHYHPGKANVVADALSRKSHCNTLNVRGIPPELNQQMEALNLSIVGRGFLAALEAKPTLLDQIREAQKNDPDMHGLLKNMKQGKAAGFTEDEHGTLWNGKRSLWPYVMCASVSRQNTNDRPDFSNLSKCRNGNGMKLGWISSPAFQKPKTTYGGNKLAELYFARIVSLHGIPKKIVSDRGSQFTSHFWKKLQEELGTRLNFSTAYHPQTDGQTERLNQILEDMLRACVLDFGKTWDKSLPYAEFSYNNSYQASIQMAPYEALYGRKCRTPLLWDQVGESQVFGTDILREAEAKVRIIRDNLKVAQSRQKSYADNRRRDLEFAVDDFVYLRVTPLRGVHRFQTKGKLAPRYVGPFRIIARRGEVAYQLELPASLGNVHDVFHVSQLKKCLRVPSEQADSEQIEVREDLTYVEKPVKILDTMERRTRNRVIRFCKVQWSNHAEEEATWEREDELKAAHPDLFA

SEQ ID NO: 19099 - protein, 1745 aa, Oryza sativa
  Clone ID: TF_OSC30011j.C1.p3.fg
MDEVGGRWTFSRANEGYTSCGPMAGSVTRRGLDMTGFVLELRGMCVVLGYPHGEDYQARPLPDQEGDDAEPHAGWEVTAVILSGSPERTSLAVTAGGDSFPAACQNAALLAIGTLHQRYPDELQHSPYRYHPRRGGARDYATFWDASSEDDATIVHLARMVEAYDAARIDFHQMVRRGMVENNMKILELRQENLQLKKDLDAVEAQLHQLKVAQGEICRPKRRRVCRSQKITARKSTSRPELVRQSLAWTCFVETPRAEPAPVVPQEGEASGVGSSEAVDEQLVGLRVCSFSFVFFGVVWGMVMPMVTTRRNAVTGDGNQPEGSNPNHQGNPPPPPPPPPPPPPDTNAILTQILAQQANMMNAFLHHLQNPPQQNAPPPPPQHSKLAEFLRIRPPTFSSSNNPVDALDWLHAVGKKLDTVQCSDEEKVVFAAHQLQGPASLWWDHFQATQPEGQPITWARFTAAFRRTHVPAGVVALKKREFRELKQGNRSVMEYLHEFNNLARYAPEDVREDEEKQEKFLAGMDPELSVRLVSGDYPDFQRLVDKSIRLEAKHKELESHKRRLANFRNQQGANQRVRYTNPYPGGSSSQQQQQQQQPRPAPRPQFVVRVPQPQQQQNQQGTRAPRPPTPTVQPVQGRRDAQGQQRLCFNCFEPGHFADKCPKPRRQQGQAPPRSNNGGKDVIRGRVNHVTAEDVLTTPDVIVGTFLVHSIPATILFDSGASHSFISVPFVGKNQLGVERLRNPLLITTPGGVMTAKFYSPAVPIEIQGIPFPSDLILLDTKNLDVILGMNWLAQFQGVVDCARRTVTLYRGPEQPVVFFAPPTSVRSSELHQIELSEIPIVREFGDVFPEELPGMPPKREIEFRIDLAPGTTPLHKRPYRMAANELAEVKKQLEELKEKGYIRPSTSPWGAPVIFVEKKDKTKRMCVDYRALNEVTIKNKYPLPRIDDLFDQLKGATVFSKIDLRSGYHQLRIREEDIPKTAFTTRYGLYEFTVMSFGLTNAPAFFMNLMNKVFMEYLDKFVVVFIDDILIYSQSEEDHQHHLRLVLGKLREHQLYAKLSKCEFWLSEVKFLGHVISAKGVAVDPETVTAVTDWKQPKTVTQVRSFLGLAGYYRRFIENFSKIARPMTQLLKKEEKFVSSPQCEKAFQTLKEKLVSSPVLILPDTRKDFMVYCDASRQGLGCVLMQDGHVVAYASRQLRPHEGNYPTHDLELAAVVHALKIWRHYLIGNRCEIYTDHKSLKYIFTQSDLNLRQRRWLELIKDYDVGIHYHPGKANVVADALSRKGHCNTLNVRGIPPELSQQMEALNLNIVGRGFLAALEAKPTLLDQIREAQKNDPDMHGLLKNMKQGKAAGFTEDEHGTLWNGNRVCVPDNRELKQLILQEAHESPYSIHPGSTKMYLDLKEKYWWVSMKREIAEFVALCDVCQRVKAEHQRPAGLLQPLQVPEWKWDEIGMDFITGLPKTQGGYDSIWVVVDRLTKVARFILVKTTYGGNKLAELYFARIVSLHGVPKKIVSDRGSQFTSHFWKKLQEELGTRLNFSTAYHPQTDGQTERLNQILEDMLRACVLDFGKTWDKSLPYAEFSYNNSYQSSIQMAPYEALYGRKCRTPLLWDQVGESQVFGTDILREAEAKVRIIRDNLKVAQSRQKSYADNRRRDLEFAVDDFVYLRVTPLRGVHRFQTKGKLAPRYVGPFRIVARRGEVAYQLELPASLGNVHDVFHVSQLKKCLRVPSSRPTQSKLKFAKI

SEQ ID NO: 19100 - protein, 1382 aa, Oryza sativa
  Clone ID: TF_OSC30068j.C1.p1.fg
ANSSSVPGDPLESTCRHAVGKKLDTVQCSDEEKVIFAAHQLQGPASLWWDHFQATQPEGQPITWARFTAAFRRTHVPAGVVALKKREFRELKQGNRSVMEYLHEFNNLARYAPEDVREDEEKQEKFLAGMDPELSVRLVSGDYPDFQRLVDKSIRLEAKHKELESHKRRLANFRNQQGANQRVRYTNPYPGGSSSQQQQQQQQPRPAPRPQFVVRVPQPQQQNQQGTRASRPPTPAVQPVQGRRDASGPQRLCFNCFEPGHFADKCPKPRRQQGQAPPRSNNGGKDVIRGRVNHVTAEDVLTTPDVTVGTFLVHSIPATILFDSGASHSFISVPFVGKNQLGVERLRNPLLITTPGGVMTAKYYSPAVPIEIQGIPFPSDLILLDTKNLDVILGMNWLAQFQGVVDCARRTVTLYRGPEQPVVFFAPPTSVRSSKLHQIELSEIPIVREFGDVFPEELPGMPPKREIEFRIDLAPGTTPLYKRPYRMAANELAEVKKQLEELKEKGYIRPSTSPWGAPVIFVEKKDKTKRMCVDYRALNEVTIKNKYPLPRIDDLFDQLKGATVFSKIDLRSGYHQLRIREEDIPKTAFTTRYGLYEFTVMSFGLTNAPAFFMNLMNKAFMEYLDKFVVVFIDDILIYSQSEEDHQHHLRLVLGKLREHQLYAKLSKCEFWLSEVKFLGHVISAKGVAVDPETVTAVTDWKQPKTVTQIRSFLGLAGYYRRFIENFSKIARPMTQLLKKEEKFVWSPQCEKAFQTLKEKLVSSPVLILPDTRKDFMVYCDASRQGLGCVLMQDGHVVAYASRQLRPHEGNYPTHDLELAAVVHALKIWRHYLIGNRCEIYTDHKSLKYIFTQSDLNLRQRRWLELIKDYDVGIHYHPGKANVVADALSRKSHCNTLNVRGIPPELNQQMEALNLNIVGRGFLAALEAKPTLLDQIREAQKNDPDMHGLLKNMKQGKAAGFTEDEHGTLWNGKRVCVPDSRELKQLILQEAHESPYSIHPGSTKMYLDLKEKYCVSRQSTSDRLDFSNLSKYQNGNGMKLGWISSPDFQKPKVARFIPVKTTYGGHKLAELYFARIVSLHGVPKKIVSDRGSQFTSHFWKKLQEELGTRLNFSTAYHPQTDGQTERLNQILEDMLRACVLDFGKTWDKSLPYAEFSYNNSYQASIQMAPYEALYGRKCRTPLLWDQVGESQVFGTDILREAEAKVRIIRDNLKVAQSRQKSYADNRRRDLEFAVDDFVYLRVTPLRGVHRFQTKGKLAPRYVGPFRITARRGEVAYQLELPASLGNVHDVFHVSQLKKCLRVPSEQADSEQIEVREDLTYVEKPVKILDTMERRTRNRVIRFCKVQWSNHAEEEATWEREDELKAAHPDLFASSSESRGRDSV

SEQ ID NO: 19101 - protein, 387 aa, Oryza sativa
  Clone ID: TF_OSC30470j.C1.p1.fg
MAINLKAATTTTRATHLHLFLRPPPPPPDTNAILTQILAQQANMMTTFLHHLQNPPQQNAPPPPPQHSKLAEFLRIRPPTFSSSNNPVDALDWLHAVGKKLDTVQCSDEEKVIFAAHQLQGPASLWWDHFQATQPEGQPITWARFTAAFRRTHVPAGVVALKKREFRELKQGNRSVMEYLHEFNNLARYAPEDVREDEEKQEKFLAGMDPELSVRLVSGDYPDFQRLVDKSIRLEAKHKELESHKRRLANFRNQQGANQRVRYTNPYPGGSSSQQQQQQQQPRSAPRPQFVVRVPQPQQQQNQQGTRAPRPLTPAVQPGQGHRDAQGQQRLCFNCFEPGHFADKCPKPRRQQGQAPPRSNNGGKDVIRGRVNHVTAEDVLTTPDVIV

SEQ ID NO: 19102 - protein, 651 aa, Oryza sativa
  Clone ID: TF_OSC30764j.C1.p2.gm
MMNAFLHHLQNPPQQNAPPPPPQHSKLAEFLRIRPPTFSSSNNPVDALDWLHAVGKKLDTVQCSDEEKVVFAAHQLQGPASLWWDHFQATQPEGQPITWARFTAAFRRTHVPAGVVALKKREFRELKQGNRSVMEYLHEFNNLARYAPEDVREDEEKQEKFLAGMDPELSVRLVSGDYPDFQRLVDKSIRLEAKHKELESHKRRLANFRNQQGANQRVRYTNPYPGGSSSQQQQQQQQPRSAPRPQFVSGQGRRDASGPQRLCFNCFEPGHFADKCPKPRRQQGQAPPRSNNGGKDVIRGRVNHVTAEDVLTTPDVIVGTFLVHSIPATILFDSGASHSFISVPFVGRNQLGVERLRNPLLITTPGGVMTANTAYHPQTDGQTERLNQILEDMLRACVLDFGKTWDKSLPYAEFSYNNSYQASIQMAPYEALYGRKWRTPLLWDQVGESQVFGTDILREAEAKVRIIRDNLKVAQSRQKSYADNRRRDLEFAVDDFVYLRVTPLRGVHRFQTKGKLAPRYVGPFRIVARRGEVAYQLELPASLGNVHDVFHVSQLKKCLRVPSEQADSEQIEVREDLTYVERPVKILDTMERRTRNRVIRFCKVQWSNHAEEEATWEREDELKAAHPVVTANQGHSVADDYEMLLGEYWQT

SEQ ID NO: 19103 - protein, 181 aa, Oryza sativa
  Clone ID: TF_OSC31097j.C1.p1.fg
MDPELSVRLVSGDYPDFQRLVDKSIRLEAKHKELESHKRRLANFRNQQGANQRVRYTNPYPGGSSSQQQQQQQPPRSAPRPQFVVRVPQQQQQQNQQGTRAPHPPTPAGQPVQGRRDASGPQRLCFNCFEPGHFADKCPKPRRQQGQAPPRPNNGGQDVIRGRVNHVTAEDVLTTPDVIVA

SEQ ID NO: 19104 - protein, 643 aa, Oryza sativa
  Clone ID: TF_OSC31430j.C1.p1.fg
MTGFVLELRGMCVVLGYPHGVDYQARPLPEQEGEDAEPHAGWEVTAVILSGSPERTSLAVTAGGDSFPAACQNAALLAIGTLHQRYPDELQHSPYRYHPRRGGARDFATFRDASSEDDATVVHLARMVEAYDAARIDFHQMVRRGMVENNMKILELRQENLQLKKDLDALEAQLHQLKIAQGEVSRPKRRRVCRSQKITARKSTSRPELVRQSLAWTCFVETPRAEPAPVVPQEGEASGVGSSEGALLLTFRPGPSQRRNVNTGEGNQPEGSNPNPQGNPPPPPPPDTNAILTQILAQQANMMNAFLHHLQNPPQQNAPPPPPQHSKLAEFLRIRPPTFSSSNNPVDALDWLHAVGKKLDTVQCSDEEKVVFAAHQLQGPASLWWDHFQATQPEGQPITWARFTAAFRRTHAPEDVREDEEKQEKFLAGMDPELSVRLVSGDYPDFQRLVDKSIRLEAKHKELESHKRRLANFRNQQGANQRVRYTNPYPGGSSSQQQQQQQPRPAPRPQFVVRVPQPQQQQNQQGTRAPRPPTPTVQPVQGRRDAQGQQRLCFNCFEPGHFADKCPKPRRQQGQAPPRSNNGGKDVIRGRVNHVTAEDVLTTPDVIVEKKDKTKRMCVDVTTGNNPTGIPYVRALILVPGGK

SEQ ID NO: 19105 - protein, 310 aa, Oryza sativa
  Clone ID: TF_OSC31430j.C1.p3.fg
MALKKREFRELKQGNRSVMEYLHEFNNLARYAPEDVREDEEKQEKFLAGMDPELSVRLVSGDYPDFQRLVDKSIRLEAKHKELESHKRRLANFRNQQGANQRVRYTNPYPGGSSSQQQQQQQQPRPAPRPQFVVRVPPPQQQQNQQGTRAPRPPTPTVQPVQGRRDAQGQQRLCFNCFEPGHFADKCPKPRRQQGQAPPRSNNGGKDVIRGRVNHVTAEDVLTTPDVIVGVAVDPETVTAVTEWKQPKTVTQIRSFLGLAGYYRSVSRQNTNDRLDFSSLSKCRNGNGMKLGWISSPAFQKPKVDMTLYG

SEQ ID NO: 19106 - protein, 1934 aa, Oryza sativa
  unsure (1)..(1934): unsure at all Xaa locations
  Clone ID: TF_OSC31890j.C1.p1.np
MSARRPGRFPSSPGRPLPLPTLFKPSXHLLRSFPPFAVPSPRRNRARAVALSLLRRRRRPAGLLRSPGPSPAPASPPPASRHRRRPRPPPRRARRPPKHRHPRRPEPRRRLPPLRPPFSSSPSTXGETWTTASFPPSLPLSRPPLRRAYGRRRRPXGRAASRRLRRRGHLRARRVATAWGPAVSRPCPRVRQTRGAHGAGRASPGAPGLPWTHLGHIRTGLQASVAKHYRFHMSSGANEGYTSCGPANEGYTSCGPVVEMSWHRAGVLLLGAQSCLPILEVPAVGRVGSMYTSDQSITYSNSRALGYGQAXQCTQMAGSLNRRGLDLTGFVLELRGMCVVLGYPHGVDYQGKQLPEQEGDDAEPHAAWEVTAVILTGSPERTSLAVTAGGDSFSAACQNAALLAIGTLHQRYPDELQHSPYRYHPCRGGARDYATFRDASSEDDATIMHLARMVEAYNAARIDFHRMVRRGLVENNMKILELRXENLQLKKDLDAVEAQLCQLKIAQGEVCRPKRRRVCRSLKITARKSTSRPELVRQSLAWTCFVETPRAEPTPSVPQEEGASGVGSTEDVLLLTFHGETRRSAVTGKGNHPEGSNHSNHGRPPSPSSPPPPPPPDTNPILTQILAQQANMMAAFLHHIQNPPQHNAPPPPPPPQHSKLAEFLRIRPPTFSSSNNPVDALDWLHAAGKKLDTVQCNDEEKVIFATHQLQGPASLWWDHFQATQPEGXPITWACFTAAFRRTHVPAGVMALKKREFRELKQGNHSVMEYLHEFNSLARYAPEDVWEDEEKQEKFLAGMDPELSVRLVSGDYPDFQRLVDNSIRLEAKHKELESHKRRLANFRNQQGANQMIRYTNPYPGGSSSQQQQQPRSAPRPQFVVRVPQSQQQQSQQGTRAPRPPAPAVQLGQGRRDAQGQQRLCFNCFEPGHFADKCPKPRRQQGQAPPRPNNGGKDVTRGRVNHVTAEDVLTTPDVIVGTFLIHSIPATILFDSGASHSFISVPFVERNXLRVERLRNPLLITTLGGVMTAKYYSPAVPIEIQGIPFPSDLILLDTKNLDVILGMNWLAQFQGVVDRARRTVTLYRGPDQPVVFFAPPTSAGSSVLNQLGLPEIPIVSEFGDVFPEELPSMPPQREIEFQIDLAPGTTPLYKRPYRMAAHELAEVKKQLEELKEKGYIRPSTSPWGSPVIFVEKKDKTKRICVDYRALNEVTIKNKYALPRIDDLFDQLKGATVFSKIDLRSGYHQLRIREEDIPKTAFTTHYGLYEFTVMSFGLTNAPAFFMNLMNKVFMEYLDKFVVVFIDDILVYLQSEEDHQQHLRLALGKLREHPLYAKLSKCEFWLSEVKFLGHVISAKGVAVDPETVTAVTDWKQPKTVTQVRSFLGLAGYYRRFIENFSKIARPMTQLLKKEEKFVWSPQCEKAFQTLKEKLVSSPVLILLDTRKDFLVYCDASRQGLGCVLMQEGHVVAYASRQPRPHEGNYPTHDLELAAVVHALKIXRHYLIGNRCKIYTDHKSLKYIFTQSDLNLRQRRWLELIKDYDVGIHYHPGKANVVADALSRKSSCNTLGVRGIPPELNQQLEALNLSIVSHGFLATLEAKPTLLDQIREAQKNDLDMHGILKNMKQGKAAGFTEDEHGTLWNGNRCVKAEHQRPARLLQPLQVPEWKWDEIGMDFITGLPKTQGRYDSIWVVVDRLTKVARFIPVKTTYGGNKLAELYFARIVSLHGVPKKIVSDQGSQFTSDIWKKLQEELGTRLNFSTAYHPQTDGQTERLNQILEDMLHACVLDFGKTWDKSLPYAEFSYNNSYQASIQMAPYEALYGRKCQTPLLWDQVGESQVFGTDILREAEAKVRTIRDNLKVAQSRQKSYADTRRRNLEFAVDDFVYLRVTPLRGVHRFQMKGKLAPRFVGPFRIIARRGEVAYQLELPTSLGNVHDVFHVS

SEQ ID NO: 19107 - protein, 1070 aa, Oryza sativa
  Clone ID: TF_OSC32968j.C1.p2.fg
MSWHRAGVLLLGAQSCLPVPGVPAVGGIGSVLLSMARMDWKLCHVFRLYTVVMAGSVTRRGLDMTGFVLELRGMCVVLGYPHGVDYQARPLPEQEGDDAEPHAGWEVTAVILSGSPERTSLAVTAGGDSFPAACQNAALLAIGTLHQRYPDELQHSPYRYHPRRGGARDYATFRDASSEDDATIVHLARMVEAYDAARIDFHQMVRRGMVENNLKILELRQENLQLKKDLDAVEAQLHQLKIAQGEDCRPKRRCVCRSQKITARKSTSRPELVRQSLAWTCFVETPRAEPAPVVPQEGEASGVGSTEDALLLTFRPGPSQRRNANTGDGNQPEGSNHNHQGNPPPPPPPPPPPPPDTNAILTQILAQQANMMTAFLHHLQNPPQHNAPPPPPQHSKLAEFLRIRPPTFSSSNNPVDALDWLHAVGKKLDTVRCSDEEKVVFAAHQLQGPASLWWDHFQATQPEGQPITWARFTAAFRRTHVPAGVVALKKREFRELKQGNRSVMEYLHEFNNLARYAPEDVREDEEKQEKFLAGMDPELSVRLVSGDYPDFQRLVDKSIRLEAKHKELESHKRRLANFRNQQGANQRVRYTNPYPGGTSSQQQQQQQPRPAPRPQFVVRVPQPQQQQNQQGTRAPRPPTPTVQPVQGRRDAQGPQRLCFNCFEPGHFADKCPKPRRQQGQAPPRSNNGGKDVIRGRVNHVTAEDVLTTPDVIVGTFLVHSIPATILFDSGASHSFISVPFVGRNQLGVERLRNPLLITTPGGVMTAKYYSPAVPIEIQGIPFPSDLILLDTKNLDVILGMNWLAQFQGVVDCARRTVTLYRGPEQPVVFFAPPTSVRSSELHQIGLSEIPIVREFGDVFPEELPGMPPKREIEFRIDLAPGTTPLYKRPYRMAANELAEVKKQLEELKEKGYIRPSTSPWGAPVIFVEKKDKTKRMCVDYRALNEVTIKNKYPLPRIDDLFDQLKGATVFSKIDLRSGYHQLRIREEDIPKTAFTTRYGLYEFTVMSFGLTNAPAFFMNLMNKVFMEYLDKFVVVFIDDILIYSQSEEDHQHHLCHILIFVSGFINYLIN

SEQ ID NO: 19108 - protein, 1286 aa, Oryza sativa
  Clone ID: TF_OSC33328j.C1.p1.fg
MALKKREFRELKQGNRSVMEYLHEFNNLARYAPEDVREDEEKQEKFLAGMDPELSVRLVSGDYLDFQRLVDKSIRLEAKHKELESHKRRLANFRNQQGANQRIRYTNPYPGGSSSQQQQQQQPRSAPRPQFVVRVPQPQQQQSQQGTRAPRPPTPAAQSGQGRRDVQGPQRLCFNCFEPGHFADKCPKPRRQQGQAPPRSNNGGKDVIRGRVNHVTAEDVLTTPDVIVGTFLIHSIPATILFDSGASHSFISVPFVGRNQLGVERFRNPLLITTPGGVMTAKYYSPAVPIEIQGIPFPSDLILLDTKNLDVILGMNWLAQFQGVVDCARRTVTLYRGPEQPVVFFAPPTSVSSSELHQIGLSEIPIVREFGDVFPEELPDMPPKREIEFRIDLAPGTTPLYKRPYRMAANELAEVKKQLEELKEKGYIRPSTFPWGAPMIFVEKKDKTKRMCVDYRALNKVTIKNKYPLPRIDDLFDQLKGATVFSKIDLRSGYHQLRIREEDIPKTAFTTRYGLHGHIILVYSQSEEDHQHHLRLVLGKLREHQLYAKLSKCEFWLSEVKFLGHVISAKGVAVDPETVTPSRLEATQDSHSNPQFLRFGRILPELLKKKYKFVWSPQCEKAFKTLKEKLVSSPVLILPDTRKDFMVYCDASRQGLGCVLMQEGHVVAYASRQLRPHEGNYPTHDLELAAVVHALKIWRHYLIGNRCEIYTDHKSLKYIFTQSDLNLRQRRWLELIKDYDVGIHYHPGKANVVVDALSQKSHCNTLNVRGIPPELNQQMEALNLSIVGRGFLAALEAKPTLLDQIREAQKNDPDMRGLLKNMKQGKAAGFTEDEYGTLWNGNRVCVPDNRELKQLILQEAHESPYSIHPGSTKMYLDLKEKYWWVSMKREIAEFVALCDVCQRVKAEHQRPAGLLQPLQVPEWKWDEIGMDFITGLPKTQGGYDSIWVVVDRLTKVARFIPVKTTYGGNKLAELYFARIVSLHGVPKKIVSDRGSQFTSHFWKKLQEELGTRLNFSTAYHPQTDGQTERLNQILEDMLRACVLDFGKTWDKSLPYAEFSYNNSYQASIQMAPYEALYGRKCRTSLLWDQVGESQVFGTDILREAEAKVRTIRDNLKVAQSWQKSYADNRRRNLEFAVDDFVYLRVTPLRGVHRFQTKGKLAPRYVGPFRIVARRGEVAYQLELPASLGNVHDVFHVSQLKKCLRVPSEQADSEQIEVREDLTYVERPVKILDTMERRTRNRVIRFCKVQWSNHAEEEATWEREDELKAAHPDLFASSSESRGRDSV

SEQ ID NO: 19109 - protein, 668 aa, Oryza sativa
  Clone ID: TF_OSC34304j.C1.p5.fg
MTGFVLELRGMCVVLGYPHGVDYQARPLPEQEGEDAEPHAGWEVTAVILSGSPERTSLAVTAGGDSSPAACQNAALLAIGTLHQRYPDELQHSPYRYHPRRGGARDFATFRDASLEDDATVVHLARMVEAYDAARIDFHQMVRRGMVENNLKILELRQENLQLKKDLDALEAQLHQLKIAQGEDSRPKRRRVCRSQKITARKSTSRPELVRQSLAWTCFVETPRAEPAPVVPQEGEASGVGSTEDALLLTFRPGPSQRRNVSTGEGNQPEGSNPNPQGNPPPPPPPDTNAILTQILAQQANMMTAFLHHLQNPPQQNAPPPPPQHSKLAEFLRIRPPTFSSSNNPVDALDWLHAVGKKLDTVQCSDEEKVIFAAHQLQGPASLWWDHFQATQPEGQPITWARFTAAFRRTHVPAGVVALKKREFRELKQGNRSVMEYLHEFNSLARYAPEDVREDEEKQEKFLAGMDPELSVRLVSGDYPDFQRLVDKSIRLEAKHKELETHKRRLANFRNQQGANQRVRYTNPYPGGSSSQQQQQQQQPRSAPRPQFVVRVPQPQQQQSQQGTRVARPPTPVVQPVQGRRDAQGQQRLCFNCFEPGHFADKCPKPRRQQGQAPPRSNNGGKDVIRGRVNHVTAEDVLTTPDVIVESSEMCFRKNYLVCRLSERLSSG

SEQ ID NO: 19110 - protein, 471 aa, Oryza sativa
  Clone ID: TF_OSC3431j.C1.p1.fg
MKILELRQENLQLKKDLDAVEAQLHQLKIAQGEVCRPKRRRVCRSQKITARKSTSRPELVRQSLAWTCFVETPRAEPAPVVPQEGEASGVGSNHNHQGNPPPPPPPPPPPPPDTNAILTQILAQQANMMTTFLHHLQNPPQQNAPPPPPQHSKLAEFLRIRPPTFSSSNNPVDALDWLHAVGKKLDTVQCSDEEKVIFAAHQLQGPASLWWDHFQATQPEGQPITWARFTAAFRRTHVLAGVVALKKREFRELKQGNRSVMEYLHEFNNLARYAPEDVREDEEKQEKFLAGMDPELSVRLVSGDYPDFQRLVDKSIRLEAKHKELESHKRRLANFRNQQGANQRVRYTNPYPGGSSSQQQQQQQQPRSAPRPQFVVRVPQPQQQQNQQGTRAPRPPTPAVQPGQGHRDAQGQQRLCFNCFEPGHFADKCPKPRRQQGQAPPRSNNGGKDVIRGRVNHVTAEDVLTTPDVIV

SEQ ID NO: 19111 - protein, 1275 aa, Oryza sativa
  Clone ID: TF_OSC34810j.C1.p2.fg
MSWQRVGALLLGGSVLPACPGCPGRRGIGSVLLFMARMGWELCHVFRPYTVVMVMTRRSANTGDGNQPEGSNHNHQGNPPPPPPPPPPPPPDTNAILTQILAQQANMMTAFLHHLQNPPQQNAPPPPPQHSKLAEFLRIRPPTFSSSNNPVDALDWLHAVGKKLDTVQCSDEEKATQPEGQPITWARFTAAFRRTHVPAGVVALKKREFRELKQGNRSVMEYLHEFNNLARYAPEDVREDEEKQEKFLAGMDLELSVRPVSGDYPDFQRLVDKSIRLEAKHKELESHKRRLANFRNQQGANQRVRYTNPYPGGSSSQQQQQPRFAPRPQFVVRVPQPQHSRVSKRPVRPVLLRPLCSLVKSRRDVQGQQRLCFNCFEPGHFADKCPKPRRQQGQAPPRPNNGGKDVIRGRVNHVTAEDMLTTPDVIVGTFLIHSIPATILFDSGASHSFISVPFVGRNQLGVERLRNPLLITTPGGVMTAKYYSPAVPIEIQGIPFPSDLILLDTKNLDVILGMNWLAQFQGVVDCARRTVTLYRGPEQPVVFFAPPTSVRSSELHQIGLSEIPIVREFGDVFPEELPGMPPKREIEFRIDLAPGTTPLYKRPYRMAANELAEVKKRLEELKEKGYIRPSTSPWGAPVIFVEKKDKTKRMCVDYRALNEVTIKNKYPLPRIDDLFDQLKGATVFSKMDLRSGYHQLRIREEDIPKTAFTTRYGLYEFTVMSFGLTNAPAFFMNLMNKVFMEYLDKFVVVFIDDILVYSQSDEDHQQHLRLVLGKLREHQLYAKLSKCEFLLSEVKFLGHVISAKGVAVDPETVTAVTDWKQPKTVTQVRNFLGLAGYYRRFIENFSKIARPMTQLLKKEEKFVWSPQCKKAFQTLKEKLVSLPVLILPDTRKDFMVCCDASRQRLGVSRQSTNDRPDFSNLSKYLNENGMKLGWISSPDFQRPKVARFIPVKTTYGGNKLAELYFARIVSLHGVPKKIVSDRGSQFTFHFWKKLQEELGTRLNFSTAYHPQTDGQTERLNQILEDMLRACVLDFGKTWDKSLPYAEFSYNNSYQASIQMAPYEALYGRKCRTPLMWDQVGESQVFGTDILREAEAKVRTIRDNLKVAQSRQKSYADNRRRDLEFAVDDFVYLRVTPLRGVHRFRTKGKLAPRYVGPFHIVARRGEVAYQLELPASLGNVHDVFHVSQLKKCLRVPSEQADPEQIEVREDLTYVERPVKILDTMERRTRNRVIRFCKVQWSNHAEEEATWEREDELKAAHPDLFACSSESRGRDSV

SEQ ID NO: 19112 - protein, 311 aa, Oryza sativa
  Clone ID: TF_OSC34815j.C1.p1.np
RSVMEYLHEFNNLARYALENVREDEKKQEKFLAGMDPELSVRLVSGDYPDFQRLVDKSIRLAKHKELESHKRRLANFRNQQGANQRVRYTNPYPGGSSSQQQQQQQQPRSAPRPQFVVRVPQPQQQQSQQGTRAPRPPTPTVQPGQGRRDASGPQRLCFNCFEPGHFADKCPKPRRQQGQAPPRSNNGGKDVIRCRVNHVTAEDMLTTPDVIVGTFLIHSIPATILFDSGASHSFISVPFVGRNQLGVERLRNPLLITTPGGVMTAKYYSSAVPIEIQGIPFPSDLILLDTKNLDVIPGMNWLAQFQGVVD

SEQ ID NO: 19113 - protein, 1786 aa, Oryza sativa
  Clone ID: TF_OSC400024j.C1.p11.fg
MSWHRAGVLLLGAQSCLPVPGVPAVGGIGSVLLSMARMGWKLCHVFRLYTVVMAGSVTRRGLDMTGFVLELRGMCVVLGYPHGVDYQGRPLPEQEGDDAEPHAAWEVTAVILAGSPERTSLTVTAGGDSFPAACQSAALLAIGTLHQRYPDELQHSPYRYHPRRGGARDYATFRDASSEDDATIMHLARMVEAYDAARIDFHQMVRRGMVENNMKILELRQENLQLKKDLDAVEAQLHQLKIAQGEVCRPKRRRVCRSQKITARKSTSRPELVRQSLAWTCFVETPRAEPAPVVPQEGEASGVGSTEDALLLTFRPGPSQRRSAATGDSNQPEGSNHHHQGSPPPPPPPPPPPPDTNAILTQILAQQADMMAAFLHHIQNPPQHNAPPPPSQHSKLAEFLRIRPLTFSSSNNPVDALDWLHAVGKKLDTVQCSDEEKVIFAAHQLQGPASLWWDHFQATQPEGQPITWARFTAAFRRTHVPAGVVALKKREFRELKQGNRSVTEYLHEFNNLARYAPEDVREDEEKQEKFLAGMDPELSVRLVSGNYPDFQRLVDKSIRLEAKHKELESHKRRLANFRNQQGANQRVRYTNPYPGGSSSQQQQQQQQPRSAPRPQFVVRVPQPQQQQNQQGTRAPRPPTPTVQPGQGRRDAQGPQRLCFNCFEPGHFADKCPKPRRQQGQAPPRSNNGGKDVIRGRVNHVTAEDVLTTPDVIVGTFLIHSIPATILFDSGASHSFISVPFVGRNQLGVERLRNPLLITTPGGVMTAKYYSPAVPIEIQGIPFPSDLILLDTKNMDVILGMNCSSELHQIGLSEIPIVREFGDVFPDELPGMPPKREIEFRIDLAPGTTPLYKRPYRMAANELAEVKKQLEELKEKGYIRPSTSPWGAPVIFVEKKDKTKRMCVDYRALNEVTIKNKYPLPRIDDLFDQLKGATVFSKIDLRSGYHQLRIRDEDIPKTAFTTRYGLYEFTVMSFGLTNAPAFFMNLMNKVFMEYLDKFVVVFIDDILVYSQSEEDHQHHLCLVLGKLREHQLYAKLSKCEFWLSEVKFLGHVISAKGVAVDPETVTAVTDWKQPKTVTQVRSFLGLAGYYRRFIENFSKIAQPMTQLLKKEEKFVWSPQCEKAFKTLKEKLVASPVLILPDTRKDFMVYCDASRQGLGCVLMQDGHVVAYASRQLRPHEGNYPTHDLELAAVVHALKIWRHYLIGNRCEIYTDHKSLKYIFTQSDLNLRQRRWLELIKDYDVGIHYHPGKANVVADALSRKSHCNTLNVRGIPPKLSQQMEALNLSIVGRGFLAALEAKPTLLDQIREAQKNDPDMHGLLKNMKQGKAAGFTEDEHGTLWNGNRVCVPDNRELKQLILQEAHESPYSIHPGSTKMYLDLKEKYWWVSMKREIAEFVALCDVCQRVKAEHQRPAGLLQPLQVPEWKWDEIGMDFITGLPKTQGGYDSIWVVVDRLTKVARFIPVKTTYGGNKLAELYFARIVSLHGVPKKIVSDRGSQFTSHFWKKLQEELGTRLNFSTAYHPQTDGQTERLNQILEDMLRACVLDFGKTWDKSLPYAEFSYNNSYQASIQMAPYEALYGRKCRTPLLWDQVGESQVFGTDILREAEAKVRTIRDNLKVAQSRQKSYADNRRRNLEFAVDDFVYLRVTPLRGVHRFQTKGKLAPRYVGPFRIVARHGEVAYQLELPASLGNVHDVFHVSQLKKCLRVPSEQADSEQIEVREDLTYVERPVKILDTMERRTRNRVIRFCKVQWSNHAEEEATWEHEDELKAAHPDLFASSSESRGRDSV

SEQ ID NO: 19114 - protein, 1273 aa, Oryza sativa
  Clone ID: TF_OSC400036j.C1.p74.fg
MDISRTNEGYTSCGPVVEMSWHSAGVLLLGAQSCLPILEVPAVGGVGSVLLSMARMGWKLCHVFRPYAVVMAGSVNRHGLDLCGFVLELRGMCIVLGYPHGVDYQGKKLPEQDGDDAEPHAAWEVTAVILTGSPERTSLAVTAGGDSFSAACQNAALLAIGTLHQRYPDELQHSPYRYHPRRGGARDYATFWDASSEDDATIMHLACMVEAYDAARIDFHHMVRRGLVENNMKILELRQENLQLKKDLDAVEAQLFQLKIAQGEVCHPKRRRVCRSLKITARKSTFRPELVRQSLAWTCFVETPCAEPAPVVPQEEEASGVGSTEDMVTTRRSAVAGDGNQPEGSNPNTQGGPPPPPPPPPPPPPDTNPILTQILAQQANMMAAFLHHIQNPPQHNAPPPPPPQHSKLAEFLRIRPPTFSSSNNPVDALDWLHAVGKKLDTVQCNNEEKIIFATHQLQGPASLWWDHFQATQPEGHPITWARFTAAFRRTHVPAGVMALKKREFRELKQGNRSVMKYLHEFNNLARYAPEDVREDEEKQEKFLVGMDPELSVRLVSGDYPDFQRLQQQQPQPRFAPRPQFVVRVPQPQQQQSQQGTRALRPPAPAVQLGQGRMDAQGQQRLCFNCFEPGHFADKCPKPRRQQGQAPPCPNNGGNDVARGRVNHVTAEDVLTTPDVIVGTFLIHSIPATILFDSGASYSFISVPFVGRNQLGVERPRNPLLITTPGGDMTAKYYSPTVPIEIQGIPFPFDLILLDTNNLDVILGMNWLAQFQGVVDCARRTVILYQGPKQPVVFFAPPTSVGSSELHQIGLSEIPIVSEFGDVFPEELPGMPPKREIEFRIDLAPGTTPLYKRPYRMAANKLAEVKKQLEELKKKGALNEVTIKNKYPLPRINDLFDQLKGAIVFSKIDLRSGYHQLRIREEDIPKTAFTTRYGLFEFTVMSFGLTNAPAFFMNLMNKVFMEYLDKFVVVFIDDILLSKCEFWLSEVKFLGHVISAKEVAVDPETVTAVTDWKQPKTLLKKEEKFVWSPQCEKAFQTLKEKLVSSPVLILPDTRKDFLVYCDASRQGLGCVLMQEGHVVAYASRQLRPHEGNYPTHDLELAAVVHALKIWRHYLIGNRCEIYTDHKSLKYIFTQSDLNLRQRRWLELIKDYDVGIHYHPGKANVVADALSRKSHCNTLGVRGIPPELNQQLEALNLSIVGRGFLATLEAKPTLLDQIREAQKNDPDMHGILKNMKQGKAAGFTEDEHGTLWNGNRVCVPDESPSSRRSRRLARS

SEQ ID NO: 19115 - protein, 1198 aa, Oryza sativa
  Clone ID: TF_OSC400104j.C1.p3.gm
MVTPMVTTRRNVNTGEGNQPEGSNPNHQGNPPPPPPPDTNAILTQILAQQANMMTAFLHHLQNPPQQNAPPPPPQHSKLAEFLRIRPPTFSSSNNPVDALDWLHAVGKKLDTVQCSDEEKVIFAAHQLQGPASLWWDHFQATQPAGQPITWAHFTAAFRRTHVPAGVVALKKREFRELKQGNRSVMEYLHEFNNLARYAPEDVREDEEKQEKFLAGMDPELSVRLVSGDYPDFQRLVDKSIRLEAKHKELESHKRRLANFRNQQGANQRVRYTNPYPGGSSSQQQQQQQQPRPAPRPQFVVRVPQPQQQQNQQGTRAPRPPTPAGQPVQGRRDASGPQRLCFNCFEPGHFADKCPKPRRQQGQAPPRSNNGGKDVIRGRVNHVTAEDVLTTPDVIVELHQIGLSEIPIVREFGDVFREELPGMPPKREIEFRIDLAPGTTPLYKRPYRMAANELAEVKKQLEELKEKGYIRPSTSPWGAPVIFVEKKDKTKRMCVDYRALNEVTIKNKYPLPRIDDLFDQLKGATVFSKIDLRSGYHQLRIREEDIPKTAFTTRYGLYEFTVMSFGLTNAPAFFMNLMNKVFMEYLDKFVVVFIDDILIYSQSEEDHQHHLRLVLGKLRKHQLYAKLSKCEFWLSEVKFLGHVISAKGVAVDPETVTAVTDWKQPKTVTQIRSFLGLAGYYRRFIENFSKIARPMTQLLKKEEKFVWSPQCEKAFQTLKEKLVSSPVLILPDTRKDFMVYCDASRQGLGCVLMQDGHVVAYASRQLRPHEGNYPTHDLKLAAVVHALKIWRHYLIGNRCEIYTDHKSLKYIFTQSDLNLRQRRWLELIKDYDVGIHYHPGKANVVADALSRKSHCNTLNVRGIPPELNQQMEALNLSIVGRGFLAALEAKPTLLDQIREAQKNDPDMHGLLKNMKQGKAAGFTEDEHGTLWNGKRVCVPDSRELKQLILQEAHESPYSIHPGSTKMYLDLKENYWWVSMKREIAEFVALCDVCQRVKAEHQRPAGLLQPLQVPEWKWDEIGMDFITGLPKTQGGYDSIWVIVDRLTKVARFIPVKTTYGGNKLAELYFARITDGQTERLNQILEDMLRACVLDFGKTWDKSLPYAEFSYNNSYQASIQMAPYEALYGRKCRTPLLWDQVGESQVFGTDILREAEAKVRIIRDNLKVAQSRQKSYADNRRRDLEFAVDDFVYLRVTPLR

SEQ ID NO: 19116 - protein, 1804 aa, Oryza sativa
  Clone ID: TF_OSC400177j.C1.p48.fg
MDEVGGRWTFSRANEGYTSCGPMAGSVTRRGLDMTGFVLELRGMCVVLGYPHGVDYQVRPLPEQEGEDAEPHAAWEVTAVILSGSPERTSLTVTAGGDSFPAACQNAALLAIGTLHQRYPDELQHSPYRYHPRRGGARDYATFRDASSEDDATVVHLARMVEAYDAARIDFHQMVRRGMVENNMKILELRQENLQLKKDLDALEAQLHQLKIAQGEISRPKRRRVCRSQKITARKSTSRPELVRQSLAWTCFVETPCAEPAPVVPQEGEASGVGSSEGALLLTFRPGPSQRSSSLFAGSVWGFQMVTTRRNVNTGGGNQPEGSNPNPQGNPPPPPPPDTNAILTQILAQQANMMNAFLHHLQNSPQQNAPPPPPQHSKLAEFLRIRPPTFSSSNNPVDALDWLHAVGKKLDTVQCSDEEKVIFAAHQLQGPASLWWDHFQATQPEGQPITWTRFTAAFRRTHVPAGVVALKKREFRELKQGNRSVMEYLHEFNNLARYAPEDVREDEEKQEKFLAGMDPELSVRLVSGDYPDFQRLVDKSIRLEAKHKELESHKRRLANFRNQQGANQRVRYTNPYPGGSSSQQQQQQQQPRSAPRPQFVVRVPQQQQQQNQQGTRAPRPPTPTVQPVQGRRDASGPQRLCFNCFEPGHFADKCPKPRRQQGQAPPRSNNGGKDVIRGRVNHVTAEDVLTTPDVIVGTFLVHSIPATILFDSGASHSFISVPFVGRNQLGVERLRNPLLITTPGGVMTAKYYSPAVPIEIQGIPFPSDLILLDTKNLDVILGMNWLAQFQGVVDCARRTVTLYRGPEQPVVFFAPPTSVRSSELHQIGLSEIPIVREFGDVFPEELPGMPPKREIEFRIDLAPGTTPLYKRPYRMAANELAEVKKQLEELKEKGYIRPSTSPWGAPVIFVEKKDKTKRMCVDYRALNEVTIKNKYPLPRIDDLFDQLKGATVFSKIDLRSGYHQLRIREEDIPKTAFTTRYGLYEFTVMSFGLTNAPAFFMNLMNKVFMEYLDKFVVVFIDDILIYSQSEEDHQHHLRLVLGKLREHQLYAKLSKCEFWLSEVKFLGHVISAKGVAVDPETVTAVTDWKQPKTVTQIRSFLGLAGYYRRFIENFSKIARPMTQLLKKEEKFVWSPQCEKAFQTLKEKLVSSPVLILPDTRKDFMVYCDASRQGLGCVLMQDGHVVAYASRQLRPHEGNYPTHDLELAAVVHALKIWRHYLIGNRCEIYTDHKSLKYIFTQSDLNLRQRRWLELIKDYDVGIHYHPGKANVVADALSRKSHCNTLNVRGIPPELNQQMEALNLSIVGRGCLAALEAKPTLLDQIREAQKNDPDMHGLLKNMKQGKAAGFTEDEHGTLWNGKRVCVPDSRELKQLILQEAHESPYSIHPGSTKMYLDLKEKYWWVSMKREIAEFVALCDVCQRVKAEHQRPAGLLQPLQVPEWKWDEIGMDFITGLPKTQGGYDSIWVIVDRLTKVARFIPVKTTYGGNKLAELYFARIVSLHGVPKKIVSDRGSQFTSHFWKKLQEELGTRLNFSTAYHPQTDGQTERLNQILEDMLRACVLDFGKTWDKSLPYAEFSYNNSYQASIQMAPYEALYGRKCRTPLLWDQVGESQVFGTDILREAEAKVRIIRDNLKVAQSRQKSYADNRRRDLEFAVDDFVYLRVTPLRGVHRFQTKGKLAPRYVGPFRIIARRGEVAYQLELPASLGNVHDVFHVSQLKKCLRVPSEQADSEQIEVREDLTYVEKPVKILDTMERRTRNRVIRFCKVQWSNHAKEEATWEREDELKAAHPGLFASSSESRGRDSV

SEQ ID NO: 19117 - protein, 2009 aa, Oryza sativa
  unsure (1)..(2009): unsure at all Xaa locations
  Clone ID: TF_OSC400263j.C1.p2.np
MAAGSSAADSPSSGRSLPLPTLYKHSPCLPPPFPPLAALSLRRNRARAVALSLRRHRRAPVRRRSRPGPSPASASPSPGSPQPRRPRPPLRFARQPPERRRPRRPEPRRRLPPLRSPFPSSLSTRGEPWTRFASPFPHLSRAPLRRAGGRRRRPSGRGCATSRRLCRRGRLRARPAAAMWGPVVSRPRPRVRLTRGTHGAGRCEPGAPGPPWTHLGHIRTGLRASVAXHYRFHMSSGANEGYTSCGPVVEMSWHRAGVLLLGAQSCLPVPGVPAVGGIGSMYTSDQSIIYSNSRALGYGQAEQCTQMAGSVSRRGLDMTGFVLELRGMCVVLGYPHGVDYQGRPLPEQEGDDAEPHAAWEVTAVILTGSPERTSLAVTAGGDSFSAACQSAALLAICTLHQRYPDELQHSPYRYHPRRGGARDYATFRDASSEDDATIMHLARMVEAYDAARIDFHQMVRRGMVENNLKILELRQENLQLKKDLDAVEAQLHQLKIAQGEVCRPKRRRVCRSQKITARKSTSRPELVRQSLAWTCFVENPRAEPAPVVPQEGEASGVGSTEDALLLTFHGETRRSASTGDGNQPEGSNHNHQGSPPPPPPPPPPPPPDTNAILTQILAQQANMMIAFLHHLQNPPQHNAPPPPPQHSKLAEFLRIRPPTFFSSNNPVDALDWLHAVGKKLDTVQCSDEEKVIFAAHQLQGPASLWWDHFQATQPEGQPITWARFTAAFRRTHVPAGVVALKKREFRELKQGNRSVMEYLHEFNNLARYAPEDVRDEEKQEKFLAGMDPELSVRLVSGDYPDFQRLVDKSIRLEAKHKELESHKRRLANFRNQQGANQRVRYTNPYPGGSSSQQQPRSAPRPQFVVRVPQPQQQQSQQGTRAPRPPTPTVQPGQGRRDAQGPQRLCFNCFEPGHFADKCPKPRRQQGQAPPRSNNGGKDVIRGRVNHVTAEDVLTTPDVIVGTFLIHSIPATILFDSGASHSFISVPFVGRNQLGVERLRNPLLITTPGGVMTAKYYSPAVPIEIQGIPFPSDLILLDTKNLDVILGMNWLAQFQGVVDCARRTVTLYRGPEQPVVFFAPPTSVRSSELHQIVLSEIPIVREFGDVFPEELPGMPPKREIEFRIDLAPGTTPLYKRPYRMAANELAEFKKQLEELKEKGYIRPSTSPWGAPVIFVEKKDKTKRMCVDYRALNEVTIKNKYPLPRIDDLFDXLKSATVFSKIDLRSGNHQLRIREEDIPKTAFTTRYGLYEFTVMSFGLTNAPAFFMNLMNKVFMEYLDKFVVVFIDDILIYSQSEEDHQHHLRLVLGKLREHQLYAKLSKCEFWLSEVKFLGHVISAKGVAMDPETVTAVTDWKQPKTVTQVRSFLGLAGYYRRFIENFSKIARPMTQLLKKEEKFVWSPQCEKAFQTLKEKLVSSLVLVLPDTRKDFMVYCDASRQGLGCVLMQDGHVVAYASRQLRPHEGNYPTHDLELAAVVHALKIWRHYLIGNRCEIYTDHKSLKYIFTQSDLNLRQRRWLELIKDYDVGIHYHPGKANVVADALSRKSHCNTLNVRGIPPELNQQMEALNLSIVGRGFLATLEAKPTLLDQIREAQKNDPDMRGLLKNMKQGKAAGFTEDEHGALWNGNRRVKAEHQRPAGLLQPLQVPEWKWDEIGMDFITGLPKTQGGYDSIWVVVDRLTKVARFIPVKTTYGGNKLAELYFARIVSLHGVPKKIVSDRGSQFTSHFWKKLQEELGTRLNFSTAYHPQTDGQTERLNQILEDMLRACVLDFGKTWDKSLPYAEFSYNNSYQASIQMAPYEALYGRKCRTPLLWDQVGESQVFGTDILREAEAKVRTIRDNLKVAQPRQKSYADNRRRNLEFAVDDFVYLRITPLRGVHRFRTKGKLAPRFVGPFRIIARRGEVAYQLELPASLGNVHDVFHVSQLKKCLRVPSEQADSEQIEVREDLTYVERPVKILDTMERRTRNRVIRFCKVQWSNHAEEEATWEREDELKAAHPDLFASSSESRGRDSV

SEQ ID NO: 19118 - protein, 1708 aa, Oryza sativa
  Clone ID: TF_OSC400440j.C1.p3.fg
MDEVRGRWTFSRANEGYTSCGPMAGSVTRRGLDMTGFVLELRGMCVVLGYPHGVDYQARPLPEQEGEDAEPHAGWEVTAVILSGSPERTSLAVTAGGDSFPAACQNAALLAIGTLHQRYPDELQHSPYRYHPRRGGARDYATFRDASSEDDATVVHLARMVEAYDAARIDFHQMVRRGMVENNLKILELRQENLQLKKDLDAVEAQLHQLKIAQGEDSRLKRRRVCRSQKITARKSTSRPELVRQSLAWTCFVETPRAEPAPVVPQEGEASGVGSSEGALLLTFRPGPSQRSPSLFAGSVWGFQMNAPPPPPQHSKLAEFLRIRPPTFSSSNNPVDALDWLHAVGKKLDTVQCSDEEKVVFAAHQLQGPASLWWDHFQAAQPEGQPITWARFTAAFRRTHVPAGVVALKKREFRELKQGNRSVMEYLHEFNNLARYAPEDVREDEEKQEKFLAGMDPELSVRLVSGDYPDFQRLVDKSIRLEAKHKELESHKRRLANFRNQQGANQRVRYTNPYPGGSSSQQQQQQQQPRSAPRPQFVVRVPPPQQQQNQQGTRAPRPPTPTVQPVQGRRDAQGQQRLCFNCFEPGHFADKCPKPRRQQGQAPPRSNNGGKDVIRGHVNHVTAEDVLTTPDVIVGTFLVHSIPATILFDSGASHSFISVPFVGKNQLGVERLRNPLLITTPGGVMTAKYYSPAVPIEIQGIPFPSDLILLDTKNLDVILGMNWLAQFQGVVDCARRTVTLYRGPEQPVVFFAPPTSVRSSELHQIGLSEIPIVREFGDVFPEELPGMPPKREIEFRIDLAPGTTPLHKRPYRMAANELAEVKKQLEELKEKGYIRPSTSPWGAPVIFVEKKDKTKRMCVDYRALNEVTIKNKYPLPRIDDLFDQLKGATVFSKIDLRSGYHQLRIREEDIPKTAFTTRYGLYEFTVMSFGLTNAPAFFMNLMNKVFMEYLDKFVVVFIDDILIYSQSEEDHQHHLRLVLGKLREHQLYAKLSKCEFWLSEVKFLGHVISAKGVAVDPETVTAVTDWKQPKTVTQIRSFLGLAGYYRRFIENFSKIARPMTQLLKKEEKFVWSPQCEKAFQTLKEKLVSSPVLILPDTRKDFMVYCDASRQGLGCVLMQDGHVVAYASRQLRPHEGNYPTHDLELAAVVHALKIWRHYLIGNRCEIYTDHKSLKYIFTQSDLNLRQRRWLELIKDYDVGIHYHPGKANVVADALSRKSHCNTLNVRGIPPELNQQMEALNLSIVGRGFLAALEAKPTLLDQIREAQKNDPDMHGLLKNMKQGKAAGFTEDEHGTLWNGKRVCVPDNRELKQLILQEAHESPYSIHPGSTKMYLDLKEKYCVSRQNTNDRPDFSSLSKCQNGSGMKLGWISSPDFQKPKVARFIPVKTTYGGNKLAELYFARIVSLHGIPKKIVSDRGSQFTSHFWKKLQEELGTRLNFSTAYHPQTDGQTERLNQILEDMLRACVLDFGKTWDKSLPYAEFSYNNSYQASIQMAPYEALYGRKCRTPLLWDQVGESQVFGTDILREAEAKVRIIRDNLKVAQSRQKSYADNRRRDLEFAVDDFVYLRVTPLRGVHRFQTKGKLAPRYVGPFRIIARRGEVAYQLELPASLGNVHDVFHVSQLKKCLRVPSEQADSEQIEVREDLTYVERPVKILDTMERRTRNRVIRFCKVQWSNHAEEEATWEREDELKAAHPDLFASSSESRGRDSV

SEQ ID NO: 19119 - protein, 1753 aa, Oryza sativa
  Clone ID: TF_OSC400477j.C1.p45.fg
MSWHRAGVLLLGAQSCLPVPGVLAVGGIGSVLLSMARMGWKLCHVFRLYTVVMAGSVTRRGLDMTGFVLELRGMCVVLGYPHGVDYQGRPLPEQEGDDAEPHAAWEVTAVILVGSPERTSLAVTAGGDSFPAACQSAALLAIGTLHQRYPDELQHSPYRYHPRRGGARDYATFRDASSEDDATIVHLARMVEAYDAARIDFHQMVRRGMVENNMKILELRQENLQLKKDLDAVEAQLHQLKIAQGEMVTTRRNAATGDGNQPEGSNHNNHQGNPPPPPPPPPPPPPDTNAILTQILAQQANMMTAFLHHLQNPPQHNAPPPPPQHSKLAEFLRIRPPTFSSSNNPVDALDWLHAVGKKLDTVQCSDEEKVIFAAHQLQGPASLWWDHFQATQPEGQPITWARFTAAFQRTHVPAGVVALKKREFRELKQGNCSVMEYLHEFNNLARYAPEDVREDEEKQEKFLAGMDPELSVRLVSGDYPDFQRLVDKSIRLEAKHKELESHKRRLANFRNQQGANQRVRYTNPYPGGSSSQQQQQQQQPRSAPRPQFVVRVPQPQQQQNQQGTRAPRPPTPAVQPGQGRRDAQGQQRLCFNCFEPGHFADKCPKPRRQQGQAPPRSNNGGKDVIRGRVNHVTAEDVLTTPDVIVGTFLIHSIPATILFNSGASHSFISVPFVGRNQLGVERLRNPLLITTPGGVMTAKYYSPAVPIEIQGIPFPSDLILLDTKNLNVILGMNWLAQFQGVVDCARRTVTLYRGPEQPVVFFAPPTSVSSSELHQIGLSEIPIVREFGDVFPEELPGMPPKREIEFWIDLAPGTTPLYKRPYRMAANELAEVKKQLEELKEKGYIRPSTSPWGAPVIFVEKKDKTKRMCVDYRALNEVTIKNKYPLPRIDDLFDQLKGATVFSKIDLRSGYHQLRIREEDIPKTAFTTRYGLYEFTVMSFGLTNAPAFFMNLMNKVFMEYLDKFVVVFIDDILIYSQSEEDHQHHLRLVLGKLREHQLYAKLSKCEFWLSEVKFLGHVISAKGVAVDPETVTAVTDWKQPKTVTQVRSFLGLAGYYRRFIENFSKIARPMTQLLKKEEKFVWSPQCEKAFKTLKEKLVASPVLILPDTRKDFMVYCDASRQGLGCVLMQDGHVVAYASRQLRPHEGNYPTHDLELAAVVHALKIWRHYLIGNRCEIYTDHKSLKYIFTQSDLNLRQRRWLELIKDHDVGIHYHPGKANVVADALSRKSHCNTLNVRGIPPELSQQMAALNLSIVSRGFLAALEAKPTLLDQIREAQKNDPDMHGLLKNMKQGKAAGFTEDEHGTLWNGNRVCVPDNRELKQLILQEAHESPYSIHPGSTKMYLDLKEKYWWVSMKREIAEFVALCDVCQRVKAEHQRPAGLLQPLQVPEWKWDEIGMDFITGLPKTQGGYDSIWVVVDRLTKVARFIPVKTTYGGNKLAELYFARIVSLHGVPKKIVSDRGSQFTSHFWKKLQEELGTRLNFSTAYHPQTDGQTERLNQILEDMLRACVLDIGKTWDKSLPYAEFSYNNSYQASIQMAPYEALYGCKCRTPLLWDQVGESQVFGTDILREAEAKVRTIRDNLKVAQSRQKSYANNRRRNLEFAVDDFVYLRVTPLRGVHRFQTKGKLAPRYVSPFRIVARRGEVAYQLELPASLGNVHDVFHVSQLKKCLRVPSEQADSKQIEVREDLTYVERPVKILDTMERRTRNRVIRFCKVQWSNHAEEEATWEREDELKAAHPDLFASSSESRGRDSV

SEQ ID NO: 19120 - protein, 1469 aa, Oryza sativa
  Clone ID: TF_OSC400477j.C1.p54.gm
MVMPMVTTRRSANTGDGNQPEGSNHNNHGSPPPPPPPPPPPPPDTNAILTQILAQQANMMTAFLHHLQNPPQQNAPPPPPQHSKLAEFLRIRPPTFSSSNNPVDVLDWLHAVGKKLDTVQCSDEEKVIFAAHQLQGPASLWWDHFQATQPEGQPITWARFTAAFRRTHVPAGVMALKKREFRELKQGNRSVMEYLHEFNNLARYAPEDVREDEERQKKFLAGMDPELSVRLVSGDYPDFQRLVDKSIRLEAKHKELESHKRRLANFRNQQGANQRIRYTNPYPGGSSSQQQQQPRSAPRPQFVVRVPQPQQQQSQQGTCAPRPPTPAAQSGQGRRDVQGPQRLCFNCFEPGHFADKCPKPRRQQGQAPPRSNNGGKDVIRGRVNHVTAEDVLTTPDVIVELHQIGLSEIPIVREFGDVFPEELPGMPPKREIEFRIDLAPGTTPRYKRPYRMAANELAEVKKQLEELKEKGYIRPSTSPWGAPVIFVEKKDKTKRMCVDYRALNEVTIKNKYPLPRIDDLFDQLKGATVFSKIDLHSGYHQLRIREEDIPKTAFTTRYGLYEFTVMSFGLTNAPAFFMNLMNKVFMEYLDKFVVVFIDDILEKYWWVSMKREIAEFVALCDVCQRVKAEHQRPAGLLQPLQVPEWKWDEIGMDFITGLPKTQGGYDSIWVVVDRLTKVARFIPMKTTYGGNKLAELYFARIVSLHGVPKKIVSDRGSQFTSHFWKKLQEELGTRLNFSTAYHPQTDGQTERLNQILEDMLRACVLDIGKTWDKSLPYAEFSYNNSYQASIQMAPYEALYGCKCRTPLLWDQVGESQVFGTDILREAEAKADLEQIEVREDLTYVERPVKILDTMERRTRNRGRGRTASCRCAGVVAFGRTERLPRGARLSAARALRTMIITSSEFTPEDAARIPKLQVLGQALLLIAFGSGENRREEQVLFDVVDIPYNYNAILGRATLNQFEAISHHNYLKLKIPGPAGVIVVKGLQPSATSKGDLAIINRAVHNVEAELHSRPKHAPKPTPHSKIVKVQIDDADPAKLISLGDGMGEQEAEGILAVLKKNIDIFAWSPDEVGVVSTDLIMHQLAIKPDAKPRKQKLCKMSADRQEAAKAEVQKLLRAGVIQEIDHPEWLANPVLVRKSNGKWRMCVDFTDLNKACPKDDFPLPRIDQLVDSTAGYELMSFLDAYSSYHQIHMNPPDIPKTAFITLLGIFCHLRMPFGLRNAGATFARLVYKETFDNLRAAGIKLNPEKCVFGIRAGKLLGFLVSERGIEANPEKIDAIQQMKPPSSVHEVQKLAGRITALSRFLPKVAERGLPFFKTLRGMGKFSWTPECQAAFDELKQYLQSPPALISPTLGSELLLYLAASPVAVSAALVQETEFGQKPVYFVSEALQGAKARYIEMEKLAYALVMASRKLKHYFQAHKVIVPSQYPLGEILRGKEISGRLSKWAAELSPFDLHFVARTAVKSQA

SEQ ID NO: 19121 - protein, 1858 aa, Oryza sativa
  Clone ID: TF_OSC400482j.C1.p1.fg
MANLNPNPLRFLMHGLVVHAGGDFRIPRVDLTVPQRPARRHEDFYVAIVEPIPLEQDWDHHRALIANFVQDELHYEVCNSFWYPSVVGFFQMRSAMNRDALVLSPPEFYDGVHSVIFVNHDQCPNWRAANYHREGWFMFLDFPLDFIDRHHVHQAVTSFGAQSCLPVPGVPAVGGIGSVLLSMARMGWKLCHVFRLYTVVMAGSVTRRGLDMTGFVLELRGMCVVLGYPHGVGYQARPLPEQEGEDAEPHAGWEVTAVILAGSSERTSLTVTAGGDSFPAACQNAALLAIGTLHQRYPDELQHSPYRYHPRRGGARDYATFRDASSEDDATVVHLARMVEAYDAARIDFHQMVRRGMVENNLKILELRQENLQLRKDLDAVEAQLHQLKIAQGEICRPKRRRVCRSQKITARKSTSRPELVRQSLAWTCFVETPRAEPAPVMVTTRRNTVTGDGNQPEGSNHNHQGNPPPPPPSSPPPPPDTNAILTQILAQQANMMNAFLHHLQNPPQQNVSPPPSQHSKLAEFLRIRPPTFSSSNNPVDALDWLHAVGKKLDTDVRGDEEKQEKFLAGMDLELSVRLVSGDYPDFHRLVDKSIRLEAKHKELESHKRRLANFRNQQGANQRVRYTNPYPGGSSSQQQQQQQQPRPAPRPQFVVRVPQPQQQQNQQGTRAPRPPTPTVPPGQGRRDAQGQQRLCFNCFEPGHFADKCPKPRRQQGQAPPRSNNGGKDVIRGRVNHVTAEDVLTTPDVIVGTFLVHSIPATILFDSGASHSFISVPFVGRNQLGVERLRNPLLITTPGGVMTAKYYSPAVPIEIQGIPFPSDLILLDTKNLDVILGMNWLAQFQGVVDCARRTVTLYRGPEQPVVFFAPPTSVRSSELHQIGLSEIPIVREFGDVFPEELPGMPPKREIEFRIDLAPGTTPLYKRPYRMAANELAEVKKQLEELKEKGYIRPSTSPWGAPVIFVEKKDKTKRMCVDYRALNEVTIKNKYPLPRIDDLFDQLKGATVFSKIDLRSGYHQLRIREEDIAKTAFTTRYGLYEFTVMSFGLTNAPAFFMNLMNKVFMEYLDKFVVVFIDDILIYSQSEEDHQHHLRLVLGKLREHQLYAKLSKCEFWLSEVKFLGHVISAKGVAVDPEIVTAVTDWKQPKTVTQVRSFLGLAGYYRRFIENFSKIARPMTQLLKKEEKFVWSPQCEKAFQTLKEKLVSSPVLILPDTRKDFMVYCDASRQGLGCVLMQDGHVVAYASRQLRTHEGNYPTHDLELAAVVHALKIWRHYLIGNRCEIYTDHKSLKYIFTQSDLNLRQRRWLELIKDYDVGIHYHPGKANVVADALSRKSHCNTLNVRGIPPELNQQMEALNLSIVGRGFLATLEAKPTLLDQIREAQKNDPDMHGLLKNMKQGKAAGFTEDEHGTLWNGNRVCVPDNRELKQLVLQVAHESPYSIHPGSTKMYLDLKEKYWWVSMKREIAEFVALCDVCQRVKAEHQRPAGLLQPLQVPEWKWDEIGMDFITGLPKTQGGYDSIWVVVDRLTKVARFIPVKTTYGGNKLAELYFARIVSLHGVPKKIVSDRGSQFTSHFWKKLQEELGTRLNFSTAYHPQTDGQTERLNQILEDMLRACVLDFGKTWDKSLPYAEFSYNNSYQSSIQMAPYEALYGRKCRTPLLWDQVGESQVFGTDILREAEAKVRIIRDNLKVAQSRQKSYADNRRRDLEFAVDDFVYLRVTPLRGVHRFQTKGKLAPRYVGPFRIVARRGEVAYQLELPASLGNVHDVFHVSQLKKCLRVPSEQADSEQIEVREDLTYVERPVKILDTMERRTRNRVIRFCKVQWSNHAEEEATWEREDELKAAHPDLFASSSESRGRDSV

SEQ ID NO: 19122 - protein, 1847 aa, Oryza sativa
  Clone ID: TF_OSC400486j.C1.p8.fg
MEMDEVGGRWTFSRADEGYTSCGPVVEMSWHRAGVLLLGAQSCLPVPGVPAVGRIGSVLLSMARMGWKLCHVFCLYTMVMAGSVTRRGLDMTGFVLELRGMCVVLGYPHGVDYQARPLPEQEGDDAEPHAGWEVTAVILSGSPERTSLAVTAGGDSFPAACQSAALLAIGTLHQRYPDELQHSPYRYHPRRGGARDYATFRDASSEDDATIVHLARMVEAYDAARIDFHQMVRRGMVENNLKILELRQENLQLQKDLDAVEAQLHQLKIAQGEVCRPKRRRVCRSQKITARKSTSRPELVRQSLAWTCFIETPRAEPAPVVPQEGETSGVGSTEDALLLTFRPGPSQRRSANTGDGNQLEGSNHNHQGNPPPPPPPPPPPPPDTNAILTQILAQQANMMTAFLHHLQNPPQHNAPPPPPQHSKLAEFLRIRPPTFSSSNNPVDALDWLHAVGKKLDIVQCSDEEKVIFAAHQLQGPASLWWDHFQATQPEGQPITWARFTAAFRRTHVPAGVVALKKREFRELKQGNRSVMEYLHEFNNLARYAPEDVREDEEKQENFLAGMDPELSVRLVSGDYPDFQRLVDKSICLEAKHKELESHKRRLANFRNQQGANQRVRYTNPYPGGSSSQQQQQQPRPAPRPQFVVRVPQPQQQQNQQGTRAPRPPTPTVQPGQGRRDAQGPQRLCFNCFEPGHFADKCPKPRRQQGQAPPRSNNGGKDVIRGRVNHVTAEDVLTTPDVIVGTFLIHSIPATILFDSGASHSFISVPFVGRNQLGVERLRNPLLITTPGGVMTAKYYSPAVPIEIQGIPFPSDLILLDTKNLDVILGMNWLAQFQGVVDCARRTVTLYRGPEQPVVFFASPTSVRSSELHQIGLSEIPIVREFRDVFPEELPGMLPKREIEFRIDLAPGTTPLYKRPYRMAANELAEVKKQLEELKEKGYIRPSTSPWGAPVIFVEKKDKTKRMCVDYRALNEVTIKNKYPLPRIDDLFDQLKGATVFSKIDLRSGYHQLRIREEDIPKTAFTTRYGLYEFTVMSFGLTNAPAFFMNLMNKVFMEYLDKFVVVFIDDILIYSQSEEDHQHHLRLVLGKLREHQLYAKLSKCEFWLSEVKFLGHVISAKGVAVDPETVTAVTDWKQPKTVTQVRSFLGLAGYYRRFIENFSKIARPMTQLLKKEEKFVWSPQCEKAFQTLKEKLVSSPVLILPDTRKDFVVYYDASRQGLGCVLMQDGHVVAYASRQLRPHEGNYPTHDLELAAVVHALKIWRHYLIGNRYEIYTDHKSLKYIFTQSDLNLRQRRWLELIKDYDVGSHYHPGKANVVADALSRKSHCNTLNIRGVPPELNQQMEALNLSIVGRGFLAALEAKPTLLDQIREAQKNDLDMHGLLRNMKQGKAAGFTEDEHGTLWNGNRVCVPDNRELKQLILQEAHESPYSIHPGSTKMYLDLKEKYWWVSMKREIAEFVALCDVCQRVKEEHQRPAGLLQPLQVPEWKWDEIGMDFITGLPKTQGGYDSIWVVVDRLTKVARFIPVKTTYGGNKLAELYFARIVSLHGVPKKIVSDRGSQFTSHFWKKLQEELGTRLNFSTAYHPQTDGQTERLNQILEDMLRACVLDFGKTWDKSLPYAEFSYNNSYQASIQMAPYEALYGRKCRTPLLWDQAGESQVFGTDILREAEAKVRTIRDNLKVAQSRQKSYADNRRRDLEFAVDDFVYLRVTPLRGVHRFQTKRKLAPRYVGPFRIIARRGEVAYRLELPASLGNVHDVFHVSQLKKCLRVPSEQADSEQIEVREDLTYVERPVKILDTMERGTRNRVIRFCKVQWSNHAEEEATWEREDELKAAHPDLFASSSESRGRDSV

SEQ ID NO: 19123 - protein, 2014 aa, Oryza sativa
  unsure (1)..(2014): unsure at all Xaa locations
  Clone ID: TF_OSC400492j.C1.p14.np
MAAGSSAADSPSSGRSLPLPTLYKRSPCLPPPFPPLAALSPRRNRARAVVLSLRRRRRAPVRRRRRPGPSPASASPPSSPPRPRRPRPPLRFARRPPERRRPRRPVPRRRLPPLRSPFPSSPSTRGEPWTRFVSPFPPLSRAPLRRAGGRRRRPSGRGRVASHRLCRRGLRARPAAAMWGPAVSRPRPRVRLTRGTHGAGRRKPRAPGPPWTHPGHIRTGLRASVAKHYRFHMSSGTNEGYTSCGPVVEMSWHRAGVLLLGAQSCLPVPGVPAVGGIRSMYTSDQSKTYSNSRALGYGQAEQCTQMAGSVTRRGLDMTGFVLELRGMCVVLGYPHGVDYQARPLPEQEGDDAEPRAGWEVTAVILAGSSERTSLTVTAGGDSFPAACQNAALLAIGTLHQRYPDELQHSSYRYHPRRGGARDYATFRDASSEDDATVVHLARMVEAYDAARIDFHQMVRRGMVENNLKILELRQENLQLKKDLDAVEAQLHQLKIAQGEVCRPKRRRVCRSQKITARKSTSRPELVRQSLAWTCFVETPCAEPAPVVPQEGEASGVGSTEDVLLLTFHGETRRNAVTGDGNQPEGSNHNHQGNPPPPPPPPPPPPPDTNAILTQILAQQANMMNAFLHHLQNPPQQNAPPPPPQHSKLAEFLRIRPPTFSSSNNPVDALDWLHAVGKKLDTVQCTDEEKVIFAAHQLQGPASLWWDHFQATQPEGQPITWARFTAAFRRTHVPAGVVALKKREFRELKQGNRSVLEYLHEFNNLARYAPEDVRGDEEKQEKFLAGMDPELSVRLVSGDYPDFQRLVDKSIRLEAKHKELESHKRRLANFRNQQGANQRVRYTNPYPGGSSSQQQQQQQQPRPAPRPQFVVRVPQPQQQQNQQGTRAPRPPTPTVPPGQGRRDAQGQQRLCFNCFEPGHFADKCPKPRRQQGQAPPRSNNGGKDVIRGRVNHVTAEDVLTTPDVIVGTFLVHSIPATILFDSGASHSFISVPFVGRNQLGVERLRNPLLITTPGGVMTAKYYSPAVPIEIQGIPFPSDLILLDTKNLDVILGMNWLAQFQGVVDCARRTVTLYRGPEQPVVFFAPPTSVRSSELHQIGLSEIPIVREFGDVFPEELPGMPPKREIEFRIDLAPGTTPLYKRPYRMAANELAEVKKQLEELKEKGYIRPSTSPWGAPVIFVEKKDKTKRMCVDYRALNEVTIKNKYPLPRIDDLFDQLKGATVFSKIDLRSGYHQLRIREEDIPKTAFTTRYGLYEFTVMSFGLTNAPAFFMNLMNKVFMEYLDKFVVVFIDDILIYSQSEEDHQHHLRLVLGKLREHQLYAKLSKCEFWLSEVKFLGHVISAKGVAVDPETVTAVTDWKQPKTVTQVRSFLGLAGYYRRFIENFSRIARPMTRLLKKEEKFVWSPQCEKAFQTLKEKLVSSPVLILPDTRKDFMVYCDASRQGLGCVLMQDGHVVAYASRQLRPYEGNYPTHDLELAAVVHALKIWRHYLIGNRCEIYTDHKSLKYIFTQSDLNLRQRRWLELIKDYDVGIHYHPGKANVVADALSRKSHCNTLNVRGIPPALNQQMEALNLSIVGRGFLAALEAKPNLLDQIREAXKNDPDMHGLLKKMKQGKAAGFTEDEHGTLWNGKRRVKAEHQRPAGLLQPLQVPEWKWDEIGMDFITGLPKTQGGYDSIWVVVDRLTKVARFIPVKTTYGGNKLAELYFARIVSLHGVPKKIVSDRGSQFTSHFWKKLQEELGTRLNFSTAYHPQTDGQTERLNQILEDMLRACVLDFGKTWDKSLPYAEFSYNNSYQSSIQMAPYEALYGRKCRTPLLWDQVGESQVFGTDILREAEAKVRIIRDNLKVAQSRQKSYADNRRRDLEFAVDDFVYLRVTPLRGVHRFQTKGKLAPRYVGPFRIVARRGEVAYQLELPASLGNVHDVFHVSQLKKCLRVPSEQADSEQIEVREDLTYVERPVKILDTMERRTRNRVIRFCKVQWSNHAEEEATWEREDELKAAHPDLFASSSESRGRDSV

SEQ ID NO: 19124 - protein, 713 aa, Oryza sativa
  Clone ID: TF_OSC400534j.C1.p1.fg
MSWQRVGALLLGAQSCLPVPGVPAMAGSVTRRGLDMTGFVLELRGMCVVLGYPHGVDYQARPLPDQEGDDAEPHAGWEVTAVILSGSPERTSLAVTAGGDSFPAACQNAALLAIGTLHQRYPDELQHSPYRYHPRRGGARDYATFRDASSEDDATVVHLARMVEAYDAARIDFHQMVRRGMVENNMKILELRQENLQLKKDLDAVEAQLHQLKIAQGEDCRPKRRRVCRSQKITARKSTSRPELVRQSLAWTCFVETPRAEPAPVVPQEGEASGVGSTEGSNHNHQGNPPPPPPPPPPPPPDTNAILTQILAQQANMMTAFLHHLQNPPQQNAPPPPPQHSKLAEFLRIRPPTFSSSNNPVDALDWLHAVGKKLDTVQCSDEEKVIFAAHQLQGPASLWWDHFQATQPEGQPITWARFTAAFRRTHVPAGVVALKKREFRELKQGNRSVMEYLHEFNSLARYAPEDVREDEEKQEKFLAGMDPELSVRLVSGDYPDFQRLVDKSIRLEAKHKELESHKRRLANFRNQQGANQRVRYTNPYPGGSSSQQQQQQQPRSAPRPQFVVRVPQPQQQQNQQGTRAPRPPTPTVQPGQGRRDAQGQQRLCFNCFEPGHFADKCPKPRRQQGQAPPRSNNGGKDVIRGRVNHVTAEDVLTTPDVIVGTFLIHSIPATILFDSGASHSFISVTFVGRNQLGVERLRNPLLITTPGGVMTAK

SEQ ID NO: 19125 - protein, 2012 aa, Oryza sativa
  unsure (1)..(2012): unsure at all Xaa locations
  Clone ID: TF_OSC400675j.C1.p46.np
MAAGPPAPVSFPSGRSLPLPTLFKPSPRLPRPFPPLAAPSPRRNRARAVAPSLLRRRRPPAGLLRSPGPSPALASPPPASPHRRRPRPPPRRVRRPPERRRPRRPEPRRRLPPLRPPFSSSPSTXGEPWTAASFAPSLPLSRPPLRRACGRRRRPXGRGAASRRPRRGRLRARRVAAAWGPAVSRPRPRVRLTRGAHGAGRASPGAPGQPWTGLIFVFTGVIASKIKRIXEVKIKSSGSTDPGNCSPLLQMAITWPFELGIGPFKSLFFPXEVKNPFLCFVPACYMEFIRVKALLFSVGRVDFCLXMAGSINRRGLDLTGFVLELRGMCVALGYPHGVDYQGKQLPEQEGDDAEPHAAWEVTAVILTGSPERTSLAVTAGGDSFSAACQNAALLAIGTLHQRYPDELQHSPYRYHPRHGGARDYATFRDASSEDDATIMHLARMVEAYDAARIDFHQMVRRGLVENNMKILELRQENLQLKKDLDAVEAQLCQLKITQGEVCRPKGRRVCRSLKITARKSTSRPELVRQSLAWTCFVKTPRAEPAPVVPQEEGASGVGSTEACACVLLMVTTRRSAATGDGNQPEGSNPNIQGGPPPPPPPPLPPPPDINSILTQILAQQANMMAAFLHHIQNPPQHNAPPPPPPPQHSKLAKFLRIRPPTFSSSNNPVDALDWLHAVGKKLDTAQCNDEEKVIFAAHQLXGPASLWWDHFQATQPEGRPITWAHFTAAFQRTHVPAGVMALKKREFRELKQGNRSVMEYLHEFNNLARYAPEDVEDEEKQEKFLAGMDPELSVRLVSGDYPDFQRLVDKSIRLEAKHKELESHKRRLANFRNQQGVNQRVRYTNPYPGGSSSQQQQQQPRSMPRPQFVVRVPQPQQQQSQQGTRAPRPPSPVVQPGQGRRDVQGQQRLCFNCFEPGHFADKCPKPRRQQGQAPPRPNNGGKDVIRGRVNHVTAEDVLTTPDVIVGTFFIHSIPATILFDSGASHSFISVPFVGRNQLGVERLRNPLLITTPGGVMTAKYYSPVVPIEIQGIPFPSDLILLDTKNLDVILGMNWLAQFRVVDCARRTVTLYRGPEQPVVFFAPPTTVGSSELHQIGLSEIPIVSEFGDVFPEELPGMPPKREIEFRIDLALGTTPLYKRPYRMAANELAEVKKQLEELKEKGYIRPSTSPGAPVIFVEKKDKIKRMCVDYRALNEVTIKNKYPLPRIDDLFDQLKGATVFSKIDLRSGYHQLRIHEEDIPKTAFTTRYGLYEFTVMSFGLTNAPTFFMNLMNKVFMEYLDKFVVVFIDDILVYSQSEEDHQQHLRLVLGKLWEHQLYAKLSKCEFWLSEVKFLGHVISAKGVAVDPETVIAVTDWKQPKTVTQVRSFLGLAGYYRRFIENFSKIARPMTQLLKKEEKFVWSPQCEKAFQTLKEKLVSSPVLILPDTRKDFMVYCDASRQGLGCVLMQEGHVVAYASRQLLPHEGNYPTHDLELAAVVHALKIWQHYLIGNRCEIYTDHKSLKYIFTQSDLNLRQRRWLELIKDYDVGIHYHPGKANVVADALSRKSRCNSLGVCGIPPELHQQMEALNLSIVGRGFLATLEAKPTLLDQIREAQKNDPDMHGILKNMKQGKAAGFTEDEHGTLWNGNRRVKAEHQRPAGLFQPLQVPEWKWDEIGMDFITGLPKTQGGYDSIWVVVDGLTKVARFIPVKTTYGGNKLAELYFARIVSLHGVPKKIVSDRGSQFTSHFXKKLQEELGTRLNFSTAYHPQTDGQTERLNQILEDMLRACVLDFGKTGDKSLPYAEFSYNNSYQASIQMAPYEALYGRKCRTPLLWDQVGESQVFGTDIFREAEAKVRTIRENLKVAQSRQKSSADNRRRDLEFAVDDFVYLWVTPLRGVHRFQTKGKLAPRFVGHFRIIARRGEVAYQLELPASLGNVHDVFHVSQLKKCLRVPSEQADSEQIEVREDLTYVERPVKILHAMERRTRNRVIRFCKVQWSNHAEEEATWEREDELKAAHLDLFASSSESRGRDSV

SEQ ID NO: 19126 - protein, 1791 aa, Oryza sativa
  Clone ID: TF_OSC400677j.C1.p1.fg
MGWKLCHVFRLYTVVMAGSVTRRGLHMTGFVLELRGMCVVLGYPHGVDYQARPLPEQEGEDAEPHAGWEVTAVILSGSPERTSLAVTAGGDSFPAACQNAALLAIGTLHQRYPDELQHSPYRYHPRRGGARDYATFRDASSEDDATVVHLARMVEAYDAARIDFHQMVRRGMVENNMKILELRQENLQLKKDLDALEAQLHQLKIAQGEDSRPKRRRVCRSQKITARKSTSRPELVRQSLAWTCFVETPRAEPAPVVPQEGEASGVGSSEVLIVSSPSLFAGSVRGFQMVTTRRNVNTGEGNQPEGSNPNHQGNPPPPPPPPPPPDTNAILTQILAQQANLMNAFLHHLQNPPQHNAPPPPPQHSKLAEFLRIRPPTFSSSNNPVDALDWLHAVGKKLDTVQCSDEEKVIFAAHQLQGPASLWWDHFQATQPEGQPITWTRFTAAFRRTHVPAGVVALKKREFRELKQGNRSVMEYLHEFHNLARYAPEDVREDEEKQEKFLAGMDPELSVRLVSWDYPDFQRLVDKSIRLEAKHKELESHKRRLANFRNQQGANQRVRYTNPYPGGSSSQQQQQQQPRSAPRPQFVVRVPQQQQQQNQQGTRAPRPPTPTVQPVQGRRDAQGQQRLCFNCFEPGHFADKCPKPRRQQGQAPPRSNNGGKDVLRGRVNHVTAEDVLTTPDVIVGTFLVHSIPATILFDSGASHSFISVPFVGKSQLGVERLRNPLLITTPGGVMTAKYYSPAVPIEIQGIPFPSDLILLDTKNLDVILGMNWLAQFQGVVDCARRTVTLYRGPEQPVVFFAPPTSVRSSELHQIGLSEIPIVREFGDVFPEELPGMPPKREIEFRIDLAPGTTPLHKRPYRMAANELAEVKTQLEELKEEGYIRPSTSPWGAPVIFVEKKDKTKRMCVDYRALNEVTIKNKYPLPRIDDLFDQLKGATVFSKIDLRSGYHQLRIREEDIPKTAFTTRYGLYEFTVMSFGLTNAPAFFMNLMNKVFMEYLDKFVVVFIDDILIYSQSEEDHQHHLRLVLGKLREHQLYAKLSKCEFWLSEVKFLGHVISAKGVAVDPETVTAVTDWKQPKTVTQIRSFLGLAGYYRRFIENFSKIARPMTQLLKKEEKFVWSPQCEKAFQTLKEKLVSSPVLILPDTRKDFMVYCDASRQGLGCVLMQDGHVVAYASRQLRPHEGNYPTHDLELAAVVHALKIWRHYLIGNRCEIYTDHKSLKYIFTQSDLNLRQRRWLELIKDYDVGIHYHPGKANVVADALSRKSHCNTLNVRGIPPELNQQMEALNLNIVGRGFLAALEAQPTLLDQIREAQKNDPDMHGLLKNMKQGKAAGFTEDEHGTLWNGKRVCVPDSRELKQLILQEAHESPYSIHPGSTKMYLDLKEKYWWVSMKREIAEFVALCDVCQRVKAEHQRPAGLLQPLQVPEWKWDEIGMDFITGLPKTQGGYDSIWVIVDRLTKVARFIPVKTTYGGNKLAELYFARIVSLHGVPKKIVSDRGSQFTSHFWKKLQEELGTRLNFSTAYHPQTDGQTERLNQILEDMLRACVLDFGKTWDKSLPYAEFSYNNSYQASIQRAPYEALYGRKCRTPLLWDQVGESQVFGTDILREAEAKVRIIRDNLKVAQSRQKSYADNRRRDLEFAVYDFVYLRVTPLRGVHRFQTKGKLAPRYVGPIRITARRGEVAYQLELPASLGNVHDVFHVSQLKKCLRVPSEQADSEQIEVREDLTYVEKPVKILDAMERRTRNRVIRFCKVQWSNHAEEEATWEREDELKAAHPDLFASSSESRGRDSV

SEQ ID NO: 19127 - protein, 1666 aa, Oryza sativa
  Clone ID: TF_OSC400702j.C1.p30.fg
MDISRANEGYTSCGPMAGSINRRGLDLTGFVLELRGMCVVLGYPHGVDYQGKQLLEQEVILTGSPERTSLAVTAGGDSFSAACQNAALLAIGTLHQRYPDELQHSPYRYHPRRGGARDYATFQDASSEDDATIMHLARMVEAYDAARIDFHQMVRRGLVKNNMKILELRQENLQLKKDLDAVEAQLCQLKIAQGEMVTTRRSAATGDGNQPEGSNPNIQGGPPPPPPPPPPPPPDTNSILTQILAQQANMMAAFLHHIQNPPQHNAPPPPPPPQHSKLAELLRIRPPTFSSSNNPVDALDWLHAVGKKLDTVQCNDEEKVIFAAHQLQGPASLWWDHFQATQPEGQPITWARFTAAFRRTHVPAGVMALKKREFRELKQGNRSVMEYLHGFNNLARYAPEDVREDEEKQEKFLARMDPELSVRLVSGDYPDFQRLVDKSIRLEAKHKELESQKRRLANLRNQQGANQRVRYTNPYPGGSSSQPQQQQSQQGTRVPRPPAPVVQPGQGRREVQGQQRLCFNCFEPGHFADKCPKPRRQQGQAPPRPNNGGKDVIRGRVNHVTAEDVLTTPDVIVGTFLIHSIPATILFDSGASHSFISVPFVGRNQLGVERLRNPLLITTPRGVMTAKYYSPAVPIEIQGIPFPSDLILLDTKNLDVILGMNWLAEFQGVVDCARRTVTLYRGPEQPVVFFAPPTSIGSSELHQIGLSEIPIVSEFGDVFPEELPGMPPKREIEFRIDLAPGTTPLYKRLYRMAANELAEVKKQLEELKEKGYIRPSTSPWGAPVIFVEKKDKTKRMCVDYRALNEVTIKNKYPLPRIDDLFDQLKGATVFSKIDLRSGYHQLRIREEDIPKTAFTTRYGLYEFTVMSFGLTNAPAFFMNLMNKVFMEYLDKFVVVFIDDILVYSQSEEDHQQHLRLVLGKLREHQLYAKLSKCEFWLSEVKFLGHVISAKGVAVDPETVTAVTDWKQPKTVTQVRSFLGLAGYYRRFIENFSKIARPMTQLLKKEKKFVWSPQCEKAFQTLKEKLVSSPVLILPDTRKDFMVCCDASRQGLGCVLMQEGHVVAYASRQLRHHEGNYPTHDLELAAVVHALKIWRHYLIGNRCEIYTDHKSLKYIFTQSDLNLRQRRWLELIKDYDVGILYHPGKANVVADALSRKSRCNTLGVRGIPPELHQQMEALNLSIVGRGFLATLEAKPTLLDQIREAQKNDPDMHGILKNMKQGKAAGFTEDEHGTLWNGSRVCVPDDKELKQLIVQEAHESPYSIHPGSTKMYLDLKGTYWWVSMKWEIAEFVALCDVCQRVKAENGRPDFSNLYKYQNGNGMKLGWISSPDFQKPKAVARFIPVKTTYGGNKLAELYFARIVSLHGVPKKIVSDRGSQFTSHFWKKLQEELGTRLNFSTAYHPQTDGQTERLNQILEDMLRACVQDFRKTWDKSLPYAEFSYNNSYQASIQMALYEALYGRKCRTPLLWDQVGESQVFGTDILREAEAKVRTIRENLKVAQSRQKSYADNRRRDLEFAVDDFVYLRVTPLRGVHRFQTKGKLAPRFVGPFRIIARHGEVANQLELPASLGNVHDVFHVSQLKKCLRVLSEQADSEQIEVREYLTYVERPVKILDAMERRTRKRVIRFCKVQWSNHAEEEATWEREDELKAAHPDLFASSSESRGRDSV

SEQ ID NO: 19128 - protein, 1811 aa, Oryza sativa
  Clone ID: TF_OSC400724j.C1.p17.gm
MTGFVLELRGMCVVLGYPHGVDYQARPLPEQEGDDAEPHAGWEVTAVILSGSPERTSLAVTAGGDSFPAACQNAALLAIGTLHQRYPDELQHSPYRYHPRRRGARDHATFRDASSEDDATIVHLARMVEAYDAARIDFHQMVRRGMVENNLKILELRQENLQLKKDLDAVEAQLHQLKIAQGEVCRPKRRRVCRSQKITARKSTSRPELVRQSLEWTCFVETPRTEPAPVVPQEGEASGVGSTEDALLLTFRPGPSQRRSANTGDGNQPEGSNHNHQGNPPPPPPPPPPPPPDTNAILTQILAQQANMMTAFLHHLQNPPQHNAPPPPPQHSKLAEFLRIRPPTFSSSNNPVDALDWLHAVGKKLDTVQCSDEEKVIFAAHQLQGPASLWWDHFQATQPEGQPITWARFTAAFRRIHVPAGVVALKKREFRELKQGNRSVMEYLHEFNNLARYAPEDVREDEEKQEKFLAGMDPELSVRLVSGDYPDFQRLVDKSIRLEAKHKELESHKRRLANFRNQQGANQRVRYTNPYPGGSSSQQQQQQQQPRSAPRPQFVVRVPQPQQQQNQQGTRAPRPPTPTVQPGQGRRDTQGQQRLCFNCFEPGHFADKCPKPRRQQGQAPPRSNNGGKDVIRGRVNHVTAEDVLTTPDVIVGLSEIPIVREFGDVFPEELPGMPPKREIEFRIDLAPGTTPLYKRPYRMAANELAEVKKQLEELKEKGYIRPSTSPWGAPVIFVEKKDKTKRMCVDYRALNEVTIKNKYPLPRIDDLFDQLKGATVFSKIDLRSGYHQLRIREEDIPKTAFTTRYGLYEFTVKSFGLTNAPAFFMNLMNKVFMEYLDKFVVVFIDDILIYSQSEEDHRHHLRLVLGKLRDHQLYAKLSKCEFWLSEVKFLGHVISAKGVAVDPETVTAVTDWKQPKTVTQVRSFLGLAGYYRRFIENLSKIALPMTQLLKKEEKFVWNPQCEKAFKTLKEKLGSSPVLILPDTRKDFMVYCDASRQGLGCVLMQDGHVVAYASRQLRPHEGNYPTHDLELAAVVHALKIWRHYLIGNRCEIYTDHKSLKYIFTQSDLNLRQRRWLELIKDYDVGIHYHPGKANVVADALSRKSHCNTLNVRGIPPELNQQMEALNLSIVGRRFLATLEAKPTLLDQIREAQKNDPDMHGLLKNMKQGKAAGFTEDEHGTLWNGNRVCVPDNRELKQLILQEAHESPYSIHPGSTKIVSRQSTNDRPDFSNLSKYQNGNGMKLGWISSPDFQKPKADMILYGTAYHPQTDGQTERLNQILKDMLRACVLDFGKTWDKSLPYAEFSYNNSYQASIQMAPYEALYGRKCRTPLLWDQVGESQVFGTDILREAEAKVRTIRDNLKVAQSRQKSYADNRRRDLEFAVDDFVYLRVTPLRGVHRFQTKGKLAPRYVGPFRIIARRGGVAYQLELPASLGNVHDVFHVSQLKKCLRVPSEQADSEQIEVREDLTYVERPVKILDTMERRTRNRVIRFCKVQWNNHAEEEATWKREDELKAAHPDLFATPRPYKDRSSGLCCKALPYFHMSSGANEGYTSCGPVVEMSWHRAGVLLLGAQSCLPVPGVPAVGGIGSRDSGPCTLKVEGAIEVHNPVPGANVGVWVSSVSGEEGNIGRNMVELSELDGPLYDPTGTLLIVQDLAERGSRWTWCTAAAHGNERPRSILSTTNGQDLTVYDRSTTDDNDDVGDDVITGGGSGGKLAGERRCDDANGGHQLVDGNAANLPVTKTTAEDQRRRGRSGGNLRLNDDGGAPATYGDGGGVDEIGDGLVTTKATSPSSDDDWSDGGARMELRRRRRR

SEQ ID NO: 19129 - protein, 2024 aa, Oryza sativa
  unsure (1)..(2024): unsure at all Xaa locations
  Clone ID: TF_OSC400738j.C1.p8.np
MAAGPPAPVSFPSGRSLPLPTLFKPSPHLLRPFPPLAALPPRRIRARALSLSLHRRRQAPVRRRRRPGPPPTSAPPPSGSPHPRQPRPPLRFGRRPPERRXPRRPEPRRHLPLLRPPPPSPPSPRGEPWTRLLSPFPPLSRLPLRRAGGRRRRPSGRGRAASRRPRRRGRPRARRVAAAWGPAVSRPRPRVRLTCGAYGAGRASPGASGPPWTHLGHIRTGLRASVAKHYRFHMSSGTNEGYTSCGPTNEGYTSCGPVVEMSWHRAGVLLLGAQSCLPVPGVPAVGGVGSMYTSDQSIIYSNSRALGYGQAKQCTQMAGSINRRGLDLTGFVLELRGMCVVLGYPHGVDYQGKQLPEQEGDDAEPHAAWEVTAVILTGSPERTSLAVTAGGDSFSAACQNAALLAIGTLHQRYPDELQHSPYRYHPRRGGARDYATFRDASSEDDATIMHLARMVEAYDAARIDFHQMVRRGLVENNMKILELRQENLQLEKDLYAVEAQLRQLKIAQGEVCRLKRLRVYRSLKLPARKSTSRPELVRQSLAWTCFVETPRAELAPVVPQEDGASGVGSTEDALLLTFHGETRRRANTGDGNQPEGSNHNNHGSPPPPPPPPPPPPPDTNAILTQILAQQANMMPAFLHHIQNPPQHNAPPPPPQHSKLVEFLRIRPPTFSSSNNPVDALDWLHAVGKKLDTVQCSDEEKVIFAAHQLQGPASLWWDHFQATQPEGQPFTWARFTAAFRRTHVPAEVMALKKREFRELKQGNRSVMEYLHEFNNLARYAPEDVREDKEKQEKFLAGMDPELSMRLVSGDYPDFQRLVDKSIRLEAKHKKLESHKRCLANFRNQQGANQRVRYTNPYLGGSSSQQQQQQQPRSAPRPHFVVRVPQPQQQQSQQGTRAPRPPTPAVQPGQGRRDVQGQQRLCFNCFEPGHFADKCPKPRRQQGQPPPRPNNDGKDVIWGRVNHVTAEDVLTTPNVIVGTFLIHSIPTTILFDSGASHSFISVPFVGRNQLGVERLRNSLLITTPRGVMTAKYYSPAVPIEIQGIPFPSDLILLDTKNLDVILGMNWLAQFQGVVDCARRTVTLYRGPEQPVVFFAPPTSVGSSELHQIGLSEIPIVREFGDVFPEELPGMPPKREIEFRIDLAPGTTPLYKRPYRMASNELAEVKKQLEELKEKGYIRPSTSPXGAPVIFVXKEDKTKRMCIDYRALNEVTIKNKYPLPRIDDLFDXLKGATVFSKIDLRSGYHQLRIREEDIPKTAFTTRYGLYEFTVMSFGLTNAPTFFMNLMNKVFMEYLDKFVVVFIDDILVYSQSEEDHQHHLRLVLGKLREHQLYAKLSKCEFWLSEVKFLGHVISAKGVAVDPETVTAVTGWKQSKTVTQIRSFLGLAGYYRRFIENFSKIARPMTQLLKKEEKFVWSPQCEKAFQTLKEKLVSSPVLILPDTRKDFMVYCDALRQGLGCVLMQEGHVVAYASRQLRPHEGNYPTHDLELAAVVHALKIWRHYLIGNRCEIYTDHKSLKYIFTQSDLNLRQRRWLELIKDYDVGIHYHPGKANVVANALSRKSHCNTLDVRGIPPELNQQMEALNLSIVGRGFLATLEAKPTLLDQIREAQKNDPDMRGLLKNMKQGKAAGFTEDEHGTLWNGNRRVKAEHQRPAGLLQPLQVPEWKWDEIGMDFITGLPKTQGGYNSIWVVVDRLTKVARFIPVKTTYGGNKLAELYFARIVSLHGVPKKIVSDRGSQFTSHFWKKLQEELRTRLNFSTAYHPQTDGQTERLNQILEDMLRACVLDFGKTWDKSLPYAEFSYNNSYQASIQMAPYEALYGRKCRTPLLWDQVGESQVFGTDILREAEAKVRTIRDNLKVAQSRQKSYADNRRCNLEFAVDDFVYLRVTPLRGVHRFQTKGKLAPRFVGPFRIIARRGEVAYQLELPASLGNVHDVFHVSQLKKCLRVPSEQADSEQIEVREDLTYVERPVKILDTMERRTRNRVIRFCKVQWSNHAEEEATWXREDEMKAAHPDLFASSSESRGRDSV

SEQ ID NO: 19130 - protein, 1795 aa, Oryza sativa
  Clone ID: TF_OSC400773j.C1.p37.fg
MDEVGGRWTFSRANEGYTSCGPMAGSVTRRGLDMTGFVLELRGMCVVLGYPHGVDYQARPLPEQEGEDAEPHAGWEVTAVILSGSPERTSLAVTAGGDSFPAACQNAALLAIGTLHQRYPDELQHSPYRYHPRRGGARDYATFRDASSEDDATVVHLARMVEAYDAARIDFHQMVRRGMVENNMKILELRQENLQLKKDLDALEAQLHQLKIAQGEDSRPKRRRVCRSQKITARKSTSRPELVRQSLAWTCFVETPRAEPAPVIPQEGEASGVGSTEVLIVSSPSLFAGSVWGFQMVTTRRNVNTGEGNQPEGSNPNHQGNPPPPPPPDTNAILTQILAQQANMMNAFLHHLQNPPQQNAPPPPPQHSKLAEFLRIRPPTFSSSNNPVDALDWLHAVGKKLDTVQCSDEEKVVFAAHQLQGPASLWWDHFQATQPEGQPITWTRFTAAFRRTHVPAGVVALKKREFRELKQGNRSVMEYLHEFNNLARYAPEDVREDEEKQEKFLAGMDPELSVRLVSGDYPDFQRLVDKSIRLEAKHKELESHKRRLANFRNQQGANQRVRYTNPYPGGSSSQQQQQQQQPRSAPRPQFVVRVPQQQQQQNQQGTRAPRPPTPTVQPVQGRRDASGPQRLCFNCFEPGHFADKCPKPRRQQGQAPPRSKNGGKDVIRGRVNHVTAEDVLTTPDVIVGTFLVHSIPATILFDSGASHSFISVPFVGRNQLGVERLRNPLLITTPGGVMTAKYYSPAVPIEIQGIPFPSDLILLDTKNLDVILGMNWLAQFQGVVDCARRTVTLYRGPEQPVVFFAPPTSVRSSELHQIGLSEIPIVREFGDVFPEELPGMPPKREIEFRIDLAPGTAPLYKRPYRMAANELAEVKKQLEELKEKGYIRPSTSPWGALVIFVEKKDKTKRMCVDYRALNEVTIKNKYPLPRIDDLFDQLKGATVFSKIDLRSGYHQLRIREEDIPKTAFTTRYGLYEFTVMSFGLTNAPAFFMNLMNKVFMEYLDKFVVVFIDDILIYSQSEEDHQHHLRLVLGKLREHQLYAKLSKCEFWLSEVKFLGHVISAKGVAVDPETVTAVTDWKQPKTVTQIRSFLGLAGYYRRFIENFSKIARPMTQLLKKEEKFVWSPQCEKAFQTLKEKLVSSPVLILPDTRKDFMVYCDASRQGLGCVLMQDGHVVAYASRQLRPHEGNYPTHDLELAAVVHALKIWRHYLIGNRCEIYTDHKSLKYIFTQSDLNLRQRRWLELIKDYDVGIHYHPGKANVVADALSRKSHCNTLNVRSIPPELNQQMEALNLSIVGRGFLAALEAKPTLFDQIREAQKNDPDMHGLLKNMKQGKAAGFTEDEHGTLWNGKRVCVPDNRELKQLILQEAHESPYSIHPGSTKMYLDLKEKYWWVSMKREIAEFVALCDVCQRVKAEHQRPAGLLQPLQVPEWKWDEIGMDFITGLPKTQGGYDSIWVIVDRLTKVARFIPVKTTYGGNKLAELYFARIVSLHGVPKKIVSDRGSQFTSHFWKKLQEELGTRLNFSTAYHPQTDGQTERLNQILEDMLRACVLDFGKTWDKSLPYAEFSYNNSYQASIQMAPYEALYGRKCRTPLLWDQVGESQVFGTDILREAEAKVRIIRDNLKVAQSRQKSYADNRRRDLEFAVDDFVYLRVTPLRGVHRFQTKGKLAPRYVGPFRIIARRGEVAYQLELPASLGNVHDVFHVSQLKKCLRVPSEQANSEQIEVREDLTYVEKPVKILDTMERRTRNRVIRFCKVQWSNYAEEEATWEREDELKAAHPDLFASSSESRGRDSV

SEQ ID NO: 19131 - protein, 2015 aa, Oryza sativa
  unsure (1)..(2015): unsure at all Xaa locations
  Clone ID: TF_OSC400834j.C1.p6.np
NGAEISAAVSSLSGRALPLSALYICSPCLSPPFPPLAARSRRRIRASAVLLSLRRRRQPSVRRRRRSGLPPDSAPPPSASPRRRRPRPLLRFARRPPEHRRPRHPEPRRRLSPLRSSFPPPSSSRGEPRTRSLSLFSPLSRAPLRRAGGRRRXPSGSGCAASRRPCRRGRLRPPPAAARWGPAVSRPRPRVRLTRGTHGADRRQPRAPGPPWTHLGHIRTGLRASVAKHYRFHMSSGANEGYTSCGPVVEMSWQRVGALLLGAQSCLPVPEVPAVGGIGSMYTSDQSLIYSNSRALGYGQAEQCTQMAGSVTRRGLHMTGFVLELRGMCVVLGYPHGVDYQARPLPEQEGEDAEPHAGWEVTAVILSGSPERTSLAVTAGGDSFPAACQNAALLAIGTLHQRYPDELQHSPYRYHPRRGGARDFATFRDASSEDDATIVHLARMVEAYDAARIDFHQMVRRGMVENNMKILELRQENLQLKKDLDAVEAQLHQLKIAQGEVCRPKRRRVCRSQKITARKSTSRPELVRQSLAWTCFVETPRAEPAPVVPQEGEASGVGSTEDALLLTFHGETRRNAVTGDGNQPEGSNHNHQGNPPPPPPPPPPPPPDTNAILTQILAQQANMMTTFLHHLQNPPQQNAPPPPPQHSKLAEFLRIRPPTFSSSNNPVDALDWLHAVGKKLDTVQCSDEEKVIFAAHQLQGPASLWWDHFQATQPEGQPITWARFTAAFRRTHVLAGVVALKKREFRELKQGNRSVMEYLHEFNNLARYAPEDVREDEEKQEKFLAGMDPELSVRLVSGDYPDFQRLVDKSIRLEAKHKELESHKRRLANFRNQQGANQRVRYTNPYPGGSSSQQQQQQQQPRSAPRPQFVVRVPQPQQQQNQQGTRAPRPPTPAVQPGQGHRDAQGQQRLCFNCFEPGHFADKCPKPRRQQGQAPPRSNNGGKDVIRGRVNHVTAEDVLTTPDVIVGTFLVHSIPATILFDSGASHSFISVPFVGRNQLGVERLRNPLLITTPGGVMTAKYYSPAVPIEIQGIPFPSDLILLDTKKLDVILGMNWLAQFQGVVVCARRTVTLYRGPEQPVVFFAPPASVRSSELHQIGLSEIPIVREFGDVFPEELPGMPPKREIEFRIDLAPGTTPLYKRPYRMAANELAEVKKQLEELKEKGYIRPSTSPWGAPVIFVEKKDKTKRMCVDYRALNEVTIKNKYPLPRIDDLFDQLKGATVFSKIDLRSGYHQLRIREEDIPKTAFTTRYGLYEFTVMSFGLTNAPAFFMNLMNKVFMEYLDKFVVVFIDDILIYSQSEEDHQHHLRLVLGKLREHQLYAKLSKCEFWLSEVKFLGHVISAKGVAVDPETVTAVTDWKQPKTVTQIRSFLGLAGYYRRFIENFSKIARPMTQLLKKEEKFVWSPQCEKAFQTLKEKLVSSPVLILPDTRKDFMVYCDASRQGLGCVLMQDGHVVAYASRQLRPHEGNYPTHDLELAAVVHALKIWRHYLIGNRCEIYTDHKSLKYIFTQSDLNLRQRRWLELIKDYDVGIHYHPGKANVVADALSRKSHCNTLNVRGIPPELSQQMEALNLSIVGRGFLAALEAKPTLLDQIREAQKNDPDMHGLLKNMKQGKAAGFTEDEHGTLWNGNRRVKAEHQRPAGLLQPLQVPEWKWDEIGMDFITGLPKTQGGYDSIWVVVDRLTKVARFIPVKTTYGGNKLAELYFARIVSLHGIPKKIVSDRGSQFTSHFWKKLQEELGTRLNFSTAYHPQTDGXTERLNQILEDMLRACVLDFGKTWDKSLPYAEFSYNNSYQASIQMAPYEALYGRKCRTPLLWDQVGESQVFGTDILREAEAKVRTIRDNLKVAQSRQKSYADNRRRDLEFAVDDFVYLRVTPLRGVHRFQTKGKLAPRYVGPFRIIARRGEVAYQLELPASLGNVHDVFHVSQLKKCLRVPSEQADSEQIEVREDLTYVERPVKILDTMERRTRNRVIRFCKVQWSNHAEEEATWEREDELKAAHPDLFASSSESRGRDSV

SEQ ID NO: 19132 - protein, 1805 aa, Oryza sativa
  Clone ID: TF_OSC400948j.C1.p3.fg
MDEVGRRWTFSRANEGYTSCGPMAGSVTRRGLDMTGFVLELRGMCVVLGYPHGVDYQARPLPEQEGEDAEPHAGWEVTAVILSGSPERTSLAVTAGGDSFPAACQNAALLAIGTLHQRYPDELQHSPYRYHPRRGGARDYATFRDASSEHDATVVHLARMVEAYDAARIDFHQMVRRGMVENNMKILELRQENLQLKKDLDALEAQLHQLKIAQGEDSRPKRRRVCRSQKITARKSTSRPELVRQSLAWTCFVETPRAEPAPVVPQEGEASGVGSSEGALLLTFRPGPSQRSPSLFAGSVWGFQMVTTRRNVNTGEGNQPEGSNPNPQGNPPPPPPPDTNAILTQILAQQANMMNAFLHHLQNPPQQNAPPPPPQHSKLAEFLRIRPPTFSSSNNPVDALDWLHAVGKKLDTVQCSDEEKVVFAAHQLQGPASLWWDHFQATQPEGQPITWTRFTAAFRKTHVPAGVVALKKREFRELKQGSRSVMEYLHEFNNLARYAPEDVREDEEKQEKFLAGMDPELSVRLVSGDYPDFQRLVDKSIRLEAKHKELESHKRRLANFRNQQGANQRVRYTNPYPGGSSSQQQQQQQQQPRSAPRPQFVVRIPQPQQQQNQQGTRAPRPPTPTVQPVQGRRDAQGPQRLCFNCFEPGHFADKCPKPRRQQGQVPPRSNNGGKDVIRGRVNHVTAEDVLTTPDVIVGTFLVHSIPATILFDSGASHSFISVPFVGKNQLGVERLRNPLLITTPGGVMTAKYYSPAVPIEIQGIPFPSDLILLDTKNLDVILGMNWLAQFQGVVDCARRTVTLYRGPEQPVVFFAPPTSVRSSELHQIGLSEIPIVREFGDVFPEELPGMPPKREIEFRIYLAPGTTPLYKRPYRMAANELAEVKKQLEELKEKGYIRPSTSPWGAPVIFVEKKDKTKRMCVDYRALNEVTIKNKYPLPRIDDLFDQLKGATVFSKIDLRSGYHQLRIREEDIPKTAFTTRYGLYEFTVMSFGLTNAPAFFMNLMNKVFMEYLDKFVVVFIDDILIYSQSEEDHQHHLRLVLGKLREHQLYAKLSKCEFWLSEVKFLGHVISAKGVAVDPETVTAVTDWKQPKTVTQIRSFLGLAGYYRRFIENFSKIARPMTQLLKKEEKFVWSPQCEKAFQTLKEKLVSSPVLILPDTRKDFMVYCDASRQGLGCVLMQDGHVVAYASRQLRPHEGNYPTHDLELAAVVHALKIWRHYLIGNRCEIYTDHKSLKYIFTQSDLNLRQRRWLELIKDYDVGIHYHPGKANVVADALSRKSHCNTLNVRGIPPELNQQMEALNLSLVGRGFLAALEAKPTLLDQIREAQKNDPDMHGLLKNMKQGKAAGFTEDEHGTLWNGKRVCVPDNRELKQLILQEAHESPYSIHPGSTKMYLDLKEKYWWVSMKREIAEFVALCDVCQRVKAEHQRPAGLLQPLQVPEWKWDEIGMDFITGLPKTQGGYDSIWVIVDRLTKVARFIPVKTTYGGNKLAELYFARIVSLHGVPKKIVSDRGSQFTSHFWKKLQEELGTRLNFSTAYHPQTDGQTERLNQILEDMLRACVLDFGKTWDKSLPYAEFSYNNSYQASIQMAPYEALYGRKCRTPLLWDQVGESQVFGTDILREAEAKVRIIRDNLKVAQSRQKSYADNRRRDLEFAVDDFVYLRVTPLRGVHRFQTKGKLAPRYVGPFRIVARRGEVAYQLELPASLGNVHDVFHVSQLKKCLRVPSEQADSEQIEVREDLTYVEKPVKILDTMERRTRNRVIRFCKVQWSNHAEEEATWEREDELKAAHPDLFASSSESRGRDSV

SEQ ID NO: 19133 - protein, 1774 aa, Oryza sativa
  Clone ID: TF_OSC400979j.C1.p1.fg
MAGSVTRRGLDMTGFVLELRGMCVALGYPHGVDYQARPLPEQEGDDAEPHAGWEVTAVILAGSPERTSLTVTAGGDSFPAACQSAALLAIGTLHQRYPDELQHSPYRYHPRHGGARDYATFRDASSEDDATIVHLARMVEAYDAARIDFHQMVRRGMVENNMKILELRQENLQLKKDLDAVEAQLHQLKIAQGEVCRPKRRRVCRSQKITARKSTSRPELVRQSLAWTCFVETPRAEPAPVVPQEGEASGVGSTEALSLFAGSVWGFQMVTTRRNANTGDGNQPESSNHNHQGNPPPPPPPPPPPPPDTNAILTQILAQQANMMTAFLHHLQNPPQHNAPPPPPQHSKLAEFLRIRPPTFSSSNNPVDALDWLHAVGKKLDTVQCSDEEKVIFAAHQLQGPASLWWDHFQATQPEGQPITWARFTAAFRRTHVPAGVVALKKREFRELKQGNRSVMEYLHEFNNLARYAPEDVREDEEKQEKFLAGMDPELSVRLVSGDYPDFQRLVDKSIRLEAKHKELESHKRRLANFRNQQGANQRVRYTNPYPGGSSSQQQQQQQQPRSAPRPQFVVRVPQPQQQQNQQGTRAPHPPTPTVQSGQGRRDAQGQQRLCFNCFEPGHFADKCPKPRRQQGQAPPRSKNGGKDVIRGRVNHVTAEDVLTTPDVIVGTFLVHSIPATILFDSGASHSFIFVPFVGRNQLGVERLRNPLLITTPGGVMTAKYYSPAVPIEIQGIPFPSDLILLDTKNLDVILGMNWLAQFQGVVDCARRTVTLYRGPAQPVVFFAPSTSIRSSELHQIGLSEIPIVREFGDVFPEELPGMPPKREIEFRIDLAPGTTPLHKRPYRMAANELAEVKKQLEELKEKGYIRPSTSPWGAPVIFVEKKDKTKRMCVDYRALNEVTIKNKYPLPRIDDLFDQLKGATVFSKIDLRSGYHQLRIREEDIPKTAFTTRYGLYEFTVMSFGLTNAPAFFMNLMNKVFMEYLDKFVVVFIDDILIYSHSEEDHQHHLRLVLGKLREHQLYAKLSKCEFWLSEVKFLGHVISAKGVAVDPETVTAVTDWKQPKTVTQVRSFLGLAGYYRRFIENFSKIARPMTQLLKKEEKFVWSPQCEKAFQTLKEKLVSSPVLILPDTRKDFMVYCDASRQGLGCVLMQDGHVVAYASRQLRPHEGNYPTHDLELAAVVHALKIWRHYLIGNRCEIYTDHKSLKYIFTQSDLNLRQRRWLELIKDYDVGIHYHPGKANVVADALSRKSHCNTLNVRGIPPELSQQMEALNLSIVSRGFLAALEAKPTLLDQIREAQKNDPDMHGLLKNMKQGKAAGFTEDEHGTLWNGKRVCVPDNRELKQLILQEAHESPYSIHPGSTKMYLDLKEKYWWVSMKREIAEFVALCDVCQRVKAEHQRPAGLLQPLQVPEWKWDEIGMDFITGLPKTQGGYDSIWVVVDRLTKVARFIPVKTTYGGNKLAELYFARIVSLHGVPKKFVSDRGSQFTSHFWKKLQEDLGTRLNFSTAYHPQTDGQTECLNQILEDMLRACVLDFGKTWDKSLPYAEFSYNNSYQASIQMAPYEALYGRKCRTPLLWDQVGESQVFGTDILREAEAKVRTIRDNLKVAQSRQKSYADNRRCDLEFAVDDFVYLRVTPLRGVHRFQTKGKLAPRYVGPFRIVARRGEVAYQLELPASLGNVHDVFHVSQLKKCLRVPSEQADSEQIEVREDLTYVERPVKILDTMERRTRNRVIRFCKVQWSNHAEEEATWEREDELKAAHPDLFASSSESRGRDSV

SEQ ID NO: 19134 - protein, 2853 aa, Oryza sativa
  Clone ID: TF_OSC400979j.C1.p10.gm
AFQTLKEKLVSSPVLILPDTRKDFMVYCDASRQGLGCVLMQDGHVVAYASRQLRPHEGNYPTHDLELAAVVHALKIWRHYLIGNRCEIYTDHKSLKYIFTQSDLNLRQRRWLELIKDYDVGIHYHPGKANVVADALSRKSHCNTLNVRGIPPELSQQMEALNLSIVSRGFLAALEAKPTLLDQIREAQKNDPDMHGLLKNMKQGKAAGFTEDEHGTLWNGNREKYWWVSMKREIAEFVALCDVCQRVKAEHQRPAGLLQPLQVPEWKWDEIGMDFITGLPKTQGGYDSIWVVVDRLTKVARFIPVKTTYGGNKLAELYFARIVSLHGVPKKFVSDRGSQFTSHFWKKLQEELGTRLNFSTAYHPQTDGQTECLNQILEDMLRACVLDFGKTWDKSLPYAEFSYNNSYQASIQMAPYEALYGRKCRTPLLWDQVGESQVFGTDILREAEAKVRIIRDNLKVAQSRQKSYADNRRCDLEFAVGDFVYLRVTPLRGVHRFQTKGKLAPRYVGPFRIIARRGEVAYQLELPASLGNVHDVFHASQLKKCLRVPSEQADSEQIEVREDLTYVERPVKILDTMERRTRNRPIPISSPVPPNLGVEIPFKGGRRARPPPSLTGGAHPSSPFSRRARRRARALAPPPPPNPPHPAVPARIKEGEITPRDSLPFFPLFPLSLSLGFVRNRARDLRRRHQWRPRFPRPIPSPPGALSLSRRYLIASRAPLLRFRRSPLTLPVGIEPAPSFSLSAIAAELRSVAVVAPDLLPFRRHPLRLRRVLADPVRPSASLADRRNAAVLVDPSPRRRRPPLRSPFPPPSSSRGEPWTAVRFPSSLLSLGCRSAAPLVAGGDHRGAGAPPPVGRAGEAAFGRARGCQVGPAVSRPRPWVRLTRGTHGAGRRQPRAPGPPWAVRLPRGPHSRGPAPLPYKDRSSGLCCKALPYFHMSSGANEGYTGCGSVVEMSWHRAGVLLLGAQSCLPVPGVPAVGGIGSMAGSVTRRGLDMTGFVLELRGMCVVLGYPHGVDYQARPLPEQEGEDAEPHAGWEVTAVILSGSPERTSLAVTAGGDSFPAACQNAALLAIGTLHQRYPDELQHSPYRYHPRSGGARDYATFRDAGSEDDAPIVHLARMVKAYDAARIDFHQMVRRGMVENNMKILELRQENLQLKKDLDAVEAQLHQLKIAQGEDCRPKRRRVCRSQKITARKSTSRPELVRQSLAWTCFVETPRAEPAPVVPQEGEASGVGSTEALSLFAGSVWGFQMVTTRRNANTGDGNQPESSNHNHQGNPPPPPPPPSPPPPDTNAILTQILAQQANMMTAFLHHLQNPPQHNAPPPPPQHSKLAEFLRIRPPTFSSSNNPVDALDWLHAVGKKLDTVQCSDEEKVIFAAHQLQGPASLWWDHFQATQPEGQPITWARFTAAFRRTHVPAGVVALKKREFRELKQGNRSVMEYLHEFNNLARYAPEDVREDEEKQEKFLAGMDPELSVRLVSGDYPDFQRLVDKSIRLEAKHKELESHKRRLANFRNQQGANQRVRYTNPYPGGSSSQPQQQHQQPRSAPRPQFVPGQGRRDASGPQRLCFNCFEPGHFADKCPKPRRQQGQAPPRSNNGGKDVIRGRVNHVTAEDVLTTPDVIVGTFLIHSIPATILFDSGASHSFISVPFVGRNQLGVERLRNPLLITTPGGVMTAKEFGDVFPEELPGMPPKREIEFRIDLAPGTTPLYKRPYRMAANELAEVKKQLEELKEKGYIRPSTSPWGAPVIFVEKKDKTKRMCVDYRALNEVTIKNKYPLPRIDDLFDQLKGATVFSKIDLRSGYHQLRIREEDIPKTAFTTRYGLYEFTVMSFGLTNAPAFFMNLMNKVFMEYLDKFVVVFIDDILIYSHSEEDHQHHLRLVLGKLREHQLYAKLSKCEFWLTEVKFLGHVISAKGVAVDPEAVTAVTDWKQPKTVTQIRSFLGLAGYYQRFIENFSKIARPMTQLLKKEEKFVWSPQCEKAFQTLKEKLVSSPVLILPDTRKDFMVYCDASRQGLGCVLMQDGHVVAYAFRQLRPHEGNYPTHDLELAAVVHALKIWRHYLIGNRCEIYTDHKSLKYIFTQSDLNLLQRRWLELIKDYDVGIHYHPGKANVVADALSRKSHCHALNVRGIPPELNQQMEALNLSIVSRGFLAALEAKPTLLDQIREAQKNDPDMHGLLKNMKQGKAAGFTEDEHGTLWNGNREKYWWVSMKREIAEFVALCDVCQRVKAEHQRPAGLLQPLQVPEWKWDEIGMDFITGLPKTQGGYDSIWVVVDRLTKVARFIPVKTTYGGNKLAELYFARIVSLHGVPKKIVSDRGSQFTSHFWKKLQEELGTRLNFSTAYHPQTDGQTERLNQILEDMLRACVLDFGKTWDKSLPYAEFSYNNSYQASIQMAPYEALYGRKCRTPLLWDQVGESQVFGTDILREAEAKVRIIRDNLKVAQSRQKSYADNRRCDLEFAVGDFVYLRVTPLRGVHRFQTKGKLAPRYVGPFRIIARRGEVAYQLELPASLGNVHDVFHASQLKKCLRVPSEQADSEQIEVREDLTYVERPVKILDTMERRTRNRPIPISSPVPPNLGVEIPFKGGRRARPPPSLTGGAHPSSPSSRRARRRARALAPPPPPNPPHPAVPARIKEGEITPRDSLPFFPLFPLSLSLGFVRNRARDLRRRHQWRPRFPRPIPSPPAALSLSRRYLIASRAPLLRFRRSPLTLPVGIEPAPSSSHSTVAAELRSVAVVAPDLLPFRRRPLRLRRVLADPVRPSASLADRRNAAVLLRSGRRFRHPRRPGVSRGPPFAFPLPSSLSGAAPPRRWSPAATIGARVRRLPLAVPARPPSGAPAAARWARPSAARARGCG

SEQ ID NO: 19135 - protein, 1799 aa, Oryza sativa
  Clone ID: TF_OSC401000j.C1.p56.fg
MSWHRAGVLLLGAQSCLPVLGVPAVGGIGSVLLSMARMGWKLCHVFRLYTVVMAGSVTRRGLDMTGFVLELRGMCVALGYPHGVDYQARPLPEQEGDDAEPHAAWEVTAVILAGSPERTSLTVTAGGDSFPAACQSAALLAIGTLHQRYPDELQHSPYRYHPRRGGARDHTTFRDASSEDDATIVHLARMVEAYDAARIDFHQMVRRGMVEDNLKILELRQENLQLKKDLDAVEAQLHQLKIAQGEICRPKRRRVCRSLKITARKSTSRPELVRQSLAWTCFVETPRAEPAPVMVMTRRSANTGDGNQPEGSNHNHQGNPPPPPPLPPPPPPDTNAILTQILAQQANMMTAFLHHLQNPPQLNAPPPPPQHSKLAEFLRIRPPTFSSSNNPVDALDWLHAVGKKLDTVQCSDEEKVIFAAHQLQGPASLWWDHFQATQPEGQPITWARFTAAFRRTHVPAGVVALKKREFREWKQGNRSVMEYLHEFNNLARYAPEDVREDEEKQEKFLAGMDPELSVRLVSGDYPDFQRLVDKSIRLEAKHKELESHKRRLANFRNQQGANQRVRYTNPYPGGSSSQQQQQQQQPRSAPRPQFVVRVPQPQQQQNQQGTRAPRPPPPTVQPGQGRRDAQGPQRLCFNCFEPGHFADKCPKPRRQQGQAPPRPNNGVKDVIRGRVNHVTAEDVLTTPDVIVGTFLIHSIPATILFDSGASHSFISVPFVGRNQLGVERLRNPLLITTPGGVMTAKYYIPAVPIEIQGIPFPSDLILLDTKNLDVILGMNWLAQFQGVVDCARRTVTLYRGPEQPVVFFAPPTSVRSSELHQIELSEIPIVREFGDVFPEELPGMPPKREIEFRIDLAPGTAPLYERPYRMAANELAEVKKQLEELKEKGYIRPSTSPWGAPVIFVEKKDKTKRMCVDYRALNEVTIKNKYPLPRIDDLFDQLKGATVFSKIDLRSGYHQLRIREEDIPKTAFTTRYGLYEFTVMSFGLTNAPAFFMNLMNKVFMEYLDKFVVVFIDDILIYSQSEEDHQHHLRLVLGKLREHQLYAKLSKCEFWLSEVKFLGHVISAKGVAVDPETVTAVTDWKQPKTVTQVRSFLGLAGYYRRFIENFSKIARPMTQLLKKEEKFVWSPQCEKAFQTLKEKLVSSPVLILPDTHKDFMVYCDASRQGLGCVLMQDGHVVAYASRQLRPHEGNYPTHDLELAAVVHALKIWRHYLIGNRCEIYTDHKSLKYIFTQSDLNLRQRRWLELIKDYDVGIHYHPGKANVVADALSRKSHCNTLNVRGIPPELNQQMEALNLSIVSRGFLAALEAKPTLLDQIREAQKNDPDMHGLLKNMKQGKAAGFTEDEHGTLWNGNRVCVPDNRELKQLILQEAHESPYSIHPGSTKIYLDLKEKYWWVSMKREIAEFVALCDVCQRVKAEHQRPAGLLQPLQVLEWKWDEIGMDFITGLPKTQGGYDSIWVVVDRLTKVARFIPVKTTYGGNKLAELYFARIVSLHGVPKKIVSDRGSQFTSHFWKKLQEELGTRLNFSTAYHPQTDGQTERLNQILEDMLRACVLDFGKTWDKSLPYAEFSYNNSYQASIQMAPYEALYGRKCRTPLMWDQVGESQVFGTDILREAEAKVRTIRDNPKVAQSRQKSYADNRRRDLEFAVDDFVYLRVTPLRGVHRFRTKGKLAPRYVGPFRIVARRGEVAYQLELPASLGNVHDVFHGSQLKKCLRVPSEQADSEQIEVREDLTYVERPVKILDTMERRTRNRVIRFCKVQWSNHAEEEATWEREDELKAAHPDLFASSSESRGRDSV

SEQ ID NO: 19136 - protein, 2016 aa, Oryza sativa
  Clone ID: TF_OSC401018j.C1.p26.np
MAAGSSAADSPSSGRSLLLPTLHKHSPCLPPSFPPLAALSPRRNRARAVVLSLRRRRRAPVRRRRRPGPPPVSASPSSGSPRPRRSRPPLRFARRPPERRRPRRPEPRRRLPPLRSPFPSSPSTRGEPWTAHFVSPFPLLSRAPLRRAGGRRRRPSGRGCAASRRLCRRGRLRARPAAAMWGPAVSRPCPRVRLTRGTHGAGRRKPRAPGPPWTHLGHIRTGLRASVAKHYRFHMSSGANEGYTSCGPVVEMSWHRAGVLVLGAQSCLPVPGVPAVGGIGSMYTSDQSKIYSNSRALGYGQAEQCTQMAGSVSRRGLDMTGFVLELRGMCVVLGYPHGVDYQARPLPEQEGDDAEPHAAWEVTAVILAGSPERISLTVTAGGDSFPAACQSAALLAIGTLHQRYPDELQHSPYRYHPRRGGARDYATFRDASSEDDATIVHLARMVKAYDAARIDFHQMVRRGMVENNMKILELRQENLQLKKDLDAVEAQLHQLKIAQGEVCRPKRRRVCRSQKITARKSTSRPELVRQSLAWTCFVETPRAEPTPVVPQKGEASGVGSTEDALLLTFHGETRRNAATSDGNQPEGSNHNNHGSPPPPPPPPPPPPPDTNAILTQILAQQANMMTAFLHHLQNPPQHNAPPPPPQHSKLAEFLRIRPPTFSSSNNPVDALDWLHAVGKKIDTVQCSDEEKVIFAAHQLQGPASLWWDHFQATQPEGQPITWARFTAAFRRTHVPAGVVALKKREFRELKQGNRSVMEYLHEFNNLARYAPEDVREDEEKQKKFLAGMDPELSVRLVSGDYPDFQRLVDKSIRLEVKHKELESHKRRLANFRNQQGANQRVRYTNPYPGGSSSQQRQQQQQPRSAPRPQFVVRVPQPQQQQSQQGTRAPRPPTPTVQPGQGRRDASGPQRLCFNCFEPGHFADKCPKPRRQQGQAPPRSNNGGKDVIRGRVNHVTAEDVLTTPDVIVGTFLIHSIPATILFDSGASHSFISVPFVGRNQLGVERLRNPLLITTPGGVMTAKYYSPAVPIEIQGIPFPSDLILLDTKNLDVVLGMNWLAQFQGVVDCARRTVTLYRGPGQPVVFFAPPTSVSSSELHQIGLSEIPIVREFGDVFPEELPGMPPKREIEFRIDLALGTTPLCKRPYRMAANELAEVKKQLEELKEKGYIRPSTSPWGAPVIFVEKKDKTKRMCVDYRALNEVTIKNKYPLPRIDDLFDQLKGATVFSKIDLRSGYHQLRIREEDFPKTAFTTRYGLYEFTVMSFGLTNAPAFFMNLMNKVFMEYLDKFVVVFIDDILIYSQSEEDHQHHLLLVLGKLREHQLYAKLSKCEFWLSEVKFLGHVISAKGVAVDPETVTAVTDWKQPKTVTQVRSFLGLAGYYRRFIENFSKIARPMTQLLKKEEKFVWSPQCEKAFRTLKEKLVASPVLILPDTRKDFIVYCDASRQGLGCVLMQDGHVVAYASRQLRPHEGNYPTHDLELAAVVHALKIWRHYLIGNRCEIYTDHRSLKYIFTQSDLNLRQRRWLELIKDYDVGIHYHPGKANVVADALSRKSHCNTLNVRGIPPELNQQMEALNLSIVSRGFLATLEAKPTLLDQIREAQKNDPDMHGLLKNMKQGKAAGFTEDEHGTLWNGNRRVKAEHQRPAGLLQPLQVPEWKWDEIGMDFITGLPKTQGGYDSIWVVVDRLTKVARFIPVKTTYGGNKLAELYFARIVSLHGVPKKIVSDRGSQFTSHFWKKLQEELGTRLNFSTAYHPQIDGQTERLNQILEDMLRACVLDFGKTWDKSLPYAEFSYNNSYQASIQMAPYEALYGRKYRTPLLWDQVGESQVFGTDILREAEAKVRTIRDNLKVAQSRQKSYADNRRRDLEFAVDDFVYLRVTPLRGVHRFRTKGKLAPRYVGPFRITARRGEVAYQLELPASLGNVHDVFHVSQLKKCLRVPSEQADSEQIVVREDLTYVERPVKILDTMERRTRNRVIRFCKVEWSNHAEEEATWEREDELKAAHPDLFASSSESRGRDSV

SEQ ID NO: 19137 - protein, 1820 aa, Oryza sativa
  Clone ID: TF_OSC401018j.C1.p35.gm
MMTAFLHHLQNPPQHNAPPPPPQHSKLAEFLRIRPPTFSSSNNPVDALDWLHAVGKKLDTVECSDEEKVIFAAHQLQGPASLWWDHFQATQPEGQPITWARFTAAFRRTHVPAGVVALKKREFRELKQGNRSVMEYLHEFNNLARYAPEDVREDEEKQEKFLAGMDPELSVRLVSGDYLDFQRLVDKSIRLEAKHKELESHKRRLANFRNQQGANQRVRYTNPYPGGSSSQQQQQQQQPRSAPRPQFVVRVPQPQQQQSQQGTRAPRPPTPTVQPGQGRRDASGPQRLCFNCFEPGHFADKCPKPRHQQGQAPPCSNNGGKDVIRGRVNHVTAEDVLTTPDVIVELHQIGLSEIPIVREFGDVFPEELPGMPPKREIEFQIDLAPGTTPLCKRPYRMAANELAEVKKQLEELKEKGYIRPSTSPWGAPVIFVEKKDKTKRMCVDYRALNEVTIKNKYPLPRIDDLFDQLKGATVFSKIDLRSGYHQLRIRDEDIPKTAFTTRYGLYEFTVMSFGLTNAPAFFMNLMNKVFMEYLDKFVVVFIDDILIYSQSEEDHQHHLGLVLGKLREHQLYAKLSKCEFWLSEVKFLGHVISAKGVAVDPETVTAVTDWKQPKTVTQVRSFLGLAGYYRRFIENFSKIARPMTQLLKKEEKFVWSPQCEKAFKTLKEKLVASPVLILPDTRKDFMVYCDASRQGLGCVLMQDGHVVAYASRQLRPHEGNYPTHDLELAAVVHALKIWRHYLIGNRCEIYTDHKSLKYIFTQSDLNLRQRRWLELIKDYDVGIHYHPGKANVVADALSRKSHCNTLNIRGIPPELNQQMAALNLNIVSRGFLAALEAKPTLLDQIREAQKNDPDMHGLLKNMKQGKAAGFTEDEHGTLWNGNRYEDVLRLEGEILSTNDRPDFSNLSKYQNGKGMKLGWISSPDFQKPKVDMILYGIVSLHGVPKKIVSDRGSQFTSHFWKKLQEELGTRLNFSTAYHPQTDGQTERLNQILEDMLRACVLDFGKTWDKSLPYAEFSYNNSYQASIQMAPYEALYGRKCRTPLLWDQVGESQVFGTDILRQAEAKVRTIRDNLKVAQSRQKSYADNHRRDLEFAVDDFVYLRVTPLRAVHSFRTKGKLAPRFVGPFRIIARRGEVAYQLELPASLGNVHDVFHVSQLKKCLRVPSEQADSEQIEVREDLTYVERPVKILDAMERRTRSRPFPSSPSTRGEPWTAVSLPPSLPSLGRRSAAPVVAGGDHRGAGVPPPVGCAGEAAFGRAPRLPCGARPSAARALGANEGYTSCGPVVEMSWHRAGVLLLGAQSCLPVPGVPAVGGIGSRFMENFSKIARPMTQLLKKEEKFVWSPQCEKAFRTLKEKLVASPVLILPDTRKDFIVYCDASRQGLGCVLMQDGHVVAYASRQLRPHEGNYPTHDLELAAVVHALKIWRHYLIGNRCEIYTDHKSLKYIFTQSDLNLRQRRWLELIKDYDVGIHYHPGKANVVADALSRKSHCNTLNVRGIPPELNQQMEALNLSIVSRGFLATLEAKPTLLDQICKAQKNDPDMHGLLKNMKQGKAAGFTEDEHGTLWNGNREAHESPYSIHPGSTKMYLDLKEKYWWVSMKREIAEFVALCDVCQRVKAEHQRPAGLLQPLQVPEWKWDEIGMDFITGLPKTQGGYDSIWVVVDRLTKVARFIPVKTTYGGNKLAELYFARIVSLHGVPKKIVSDRGSQFTSHFWKKLQEELGTRLNFSTAYHPQTDGQTERLNQILEDMLRACVLDFGKTWDKSLPYAEFSYNNSYQASIQMAPYEALYGRKCRTPLLWDQVGESQVFGTDILREAEAKD

SEQ ID NO: 19138 - protein, 2015 aa, Oryza sativa
  unsure (1)..(2015): unsure at all Xaa locations
  Clone ID: TF_OSC401018j.C1.p37.np
DGAEIAAPVSFPSGRPLSLPTLFKHSPCLPPPFPTLAAFSPRRNRARAVVLSLRRCRRASVRRRRRPGPPPASASPPSASPRPRRPRPPLRFARRPPERRRPRRPEPRRRLSPLRSPFPSSPSTRGEPRTHLASPFPPLSRAPLRRAGGRRRXPSGRGRAASRRPCRRGRHRARPAAAMWGPAVSRPRPRVRLTRGTHGAGRRKPCAPGPPWTHLGHIRTGVRASVAKHYRFHMSSGANEGYTSCGPVVEMSWHRAGVLLLGAQSCLPVPGVPAVDGIGSMYTSDQSKIYSNSRALGYGQAEQCTQMAGSVSRRGLDMTGFVLELRGMCVVLGYPHGVDYQARPFPEQEGDDAEPHAAWEVTAVILAGSPERTSLTVTAGGDSFPAACQSAALLAIGTLHQRYPDELQHSPYRYHPRRGGARDYATFRDASSEDDATIVHLARMVEAYDAARIDFHQMVRRGMVENNMKILELRQENLQLKKDLDAVEAQLHQLKIAQGEICRPKHRRVYRSQKITARKSTSRPELVRQSLAWTCFVETPRAEPAPVVPQEGEASGVGSTEDALLLTFHGETRRNAATSDGNQPEDSNHNNHGSPPPPPPPPPPPPPDTNAILTQILAQQANMMTAFLHHLQNPPQHNAPPPPPQHSKLAEFLRICPPTFSSSNNPVDALDWLHAVGKKLDTVQCSDEEKVIFAAHQLQGPASLWWDHFQATQPEGQPITWARFTAAFRRTHVPAGVVALKKREFRELKQGNRSVMEYLHEFNNLARYAPEDVREDEEKQEKFLAGMDPELSVCLVSGDYPDFQRLVDKSIRLEAKHKELESHKRRLANFHNQQGANQRVRYTNPYPGGSSSQQQQQQQQPRSAPRPQFVVRVPQPQQEQNQQGTRAPRPPPPTVQPGQGRRDAQGPQRLCFNCFEPGHFADKCPKPRRQQGQAPPRPNNGGKDVIRGRVNHVTAEDVLTTPDVIVGTFLIHSIPATILFDSGASHSFISVPFVGRNQLGVERLRNPLLITTPGGVMTAKYYSPAVPIEIQGIPFPSDLILLGTKNLDVILGMNWLAQFQGVVDCARRTVTLYRGPEQPVVFFAPPTSVRSSELHQIELSEIPIVREFGDVFPEELPGMPPKREIEFRIDLAPGTAPLYKRPYRMAANELAEVKKQLEELKEKGYIRPSTSPWGAPVIFVEKKDKTKRMCVDYRALNEVTIKNKYPLPRIDDLFNQLKGATVFSKIDLRSGYHQLRIREEDIPKTAFTTRYGLYEFTVMSFGLTNAPAFFMNLMNKVFMEYLDKFVVVFIDDILIYSQSEEDHQHHLRLVLGKLREHQLYAKLSKCEFWLSEVKFLGHVISAKGVAVDPETVIAVTDWKQPKTVTQVRSFLGLAGYYRRFIENFSKIARPMTQLLKKEEKFVWSPQCEKAFQTLKEKLVSSPVLILPDTHKDFMVYCDASRQGXGCVLMQDGYVVAYASRQLRPHEGNYPTHDLELAAVVHALKIWWHYLIGNRCEIYTDHKSLKYIFTQSDLNLRQRRWLELIKDYDVGIHYHPGKANVVADALSRKGHCNTLNVRGIPPELNQQMEALNLSIVSRGFLAALEAKPTLLDQIREAQKNAPDMHGLLKNMKQGKAAGFTEDEHGTLWNGNRRVKAEHQRPAGLLQPLQVPEWKWDEIGMDFITGLPKTQGGYDSIWVVVDRLTKVARFIPVKTTYRGNKLAELYFARIVSLHGVPKKIVSDRGSQFTSHFWKKLQEELGTRLNFSTAYHLQTDGQTERLNQILEDMLRACVLDFEKTWDKSLPYAEFSYNNSYQASIQMAPYEALYGRKCRTPLMWDQVGESQVFGTDILREAEAKVRTIRDNLKVARSRQKSYADNRRRDLEFAVDDFVYLRVTPLRGVHRFRTKGKLAPRYVGPFRIVARRGEVAYQLELPASLGNVHNVFHVSQLKKCLRVPSEQADSEQIEVREDLTYVERPVKILDTMERRTRNRVIRFCKDQWSNHAEEEATWEREDELKAAHPDLFASSSESRGRDSV

SEQ ID NO: 19139 - protein, 1047 aa, Oryza sativa
  Clone ID: TF_OSC401054j.C1.p1.fg
MGWKLCHVFRPYTVVMAGSVTRRGLSMTGFVLELRGMCVVLGYPHGVDYQARPLPEQEGEDAEPHAGWEVTAVILSGSPERTSLAVTAGGDSFPAACQNAALLAIGTLHQRYPDELQHSPYRYHPRRGGARDYATFRDASSEDDATVVHLARMVEAYDAARIDFHQMVRRGMVENNLKILELRQENLQLKKDLDALEAQLHQLKIAQGEDSRPKRRRVCRSQKITARKSTSRPELVRQSLAWTCFVETPRAEPAPVVPQEGEASGVGSSEGALLLTFRPGPSQRSLSLFAGSVWGFQMVTTRRNVNTGEGNQPEGSNHNHQGNPPPPPPPPPPPPPDTNAILTQILAQQANMMTAFLHHLQNPPQQNAPPPPPQHSKLAEFLRIRPPTFSSSNNPVDALDWLHAVGKKLDTVQCSDEEKVVFAAHQLQGPASLWWDHFQATQPEGQPITWARFTAAFRRTHVPAGVVALKKREFRELKQGNRSVMEYLHEFNNLARYAPQDVREDEEKQEKFLAGMDPELSVRLVSGDYPDFQRLVDKSIRLEAKHKELESHKRRLANFRNQQGANQRVRYTNPYPGGSSSQQQQQQQQPRSAPRPQFVVRIPQPQQQQNQQGTRAPRPPTPTVQPVQGRRDAQGQQRLCFNCFEPGHFADKCPKPRRQQGQAPPRSNNGGKDVIRGRVNHVTAEDVLTTPDVIVGTFLVHSIPATILFDSGASHSFISVSFVGRNQLGVERLRNPLLITTPGGVMTAKYYSPAVPIEIQGIPFPSDLILLDTKNLDVILGMNWLAQFQGVVDCARRTVTLYRGPEQPVVFFAPPTSVRSSELHQIGLSEIPIVREFGDVFPEELPGMPPKREIEFRIDLAPGTTPLHKRPYRMAANELAEVKKQLEELKEKGYIRPSTSPWGAPMIFVEKKDKTKRMCVDYRALNEVTIKNKYPLPRIDDLFDQLKGATVFSKIDLRSGYHQLRIREEDIPKTAFTTRYGLYEFTVMSFGLTNAPAFFMNLMNKVFMEYLDKFVVVFIDDILIYSQSEEDHQHHLRLVLGKLREHQ

SEQ ID NO: 19140 - protein, 1805 aa, Oryza sativa
  Clone ID: TF_OSC401054j.C1.p116.gm
MVMPMVTTRRNVNTGEGNQPEGSNPNHQGNPPPPPPPPPPPPPDTNAILTQILAQQANMMTAFLHHLQNPPQQNAPPPPPQHSKLAEFLRIRPPTFSSSNNPVDALDWLHAVGKKLDTVQCSDEEKVVFAAHQLQGPASLWWDHFQATQPEGQPITWTRFTAAFRRTHVPAGVVALKKREFRELKQGNRSVMEYLHEFNNLARYAPEDVREDEEKQEKFLAGMDPELSVRLVSGDYPDFQRLVDKSIRLEAKHKELESHKRRLANFRNQQGANQRVRYTNPYPGGSSSQQQQQQQQPRSAPRPQFVVRVPQPQQQQNQQGTRAPRPPTPTVQPVQGRRDAQGQQRLCFNCFEPGHFADKCPKPRRQQGQAPPRSNNGGKDVIRGRVNHVTAEDVLTTPDVIVELHQIELSEIPIVREFGDVFPEELPGMPPKREIEFRIDLAPGTTPLHKRPYRMAANELAEVKKQLEELKEKGYIRPSTSPWGAPVIFVEKKDKTKRMCVDYRALNEVTIKNKYPLPRIDDLFDQLKGATVFSKIDLRSGYHQLRIREEDIPKTAFTTRYGLYEFTVMSFGLTNAPAFFMNLMNKVFMEYLDKFVVVFIDDILIYSQSEEDHQHHLRLVLGKLREHQLYAKLSKCEFWLSEVKFLGHVISAKGVAVDPETVTAVTDWKQPKTVTQVRSFLGLAGYYRRFIENFSKIARPMTQLLKKEEKFVWSPQCEKAFQTLKEKLVSSPVLILPDTRKDFMVYCDASRQGLGCVLMQDGHVVAYASRQLRPHEGNYPTHDLELAAVVHALKIWRHYLIGNRCEIYTDHKSLKYIFTQSDLNLRQRRWLELIKDYDVGIHYHPGKANVVADALSRKSHCNNLNVRGIPPELSQQMEALNLNIVGRGFLAALEAKPTLLDQIREAQKNDPDMHGLLKNMKQGKAAGFTEDEHGTLWNGNRRVKAEHQRPAGLLQPLQVPEWKWDEIGMDFITGLPKTQGGYDSIWVVVDRLTKVARFIPVKTTYGGNKLAELYFARIVSLHGVPKKIVSDRGSQFTSHFWKKLQEELGTRLNFSTAYHPQTDGQTERLNQILEDMLRACVLDFGKTWDKSLPYAEFSYNNSYQASIQMAPYEALYGRKCRTPLLWDQVGESQVFGTDILREAEAKVRIIRDNLKVAQSRQKSYADNRRRDLEFAVDDFVYLRVTPLRGVHRFQTKGKLAPRYVGPFRIVARRGEVAYQLELPASLGNVHDVFHVSQLKKCLRVPSEQADSEQIEVREDLTYVERPVKILDTMERRTRNRVIRFCKVQWSNHAEEEATWEREDELKAAHPDLFATAKGGPVKKVAKKKGLVDVARVFSDDESSDGTPTSPAGRSLDLSAAPIPSLGVAGVGGSTAAGASASAERIVTAAAKVFGSPPHQPVASPLIEAKGKRAVAETSTSEYSLSVPRFAPGDFETRADLLPFVEGVSNLVLPASAPSLFTELNEFDEGCTAIKSLAVRILAAHCSMERTVRARLDGFKSHLRAKDDELGRKNLEMDALANSLKEAKAENKRLQSELEKGKEARAEVDRLKAELEKEKAHTAVLIDYYSLTEPKMEALRQEVRKAEASAAEESWRFSREIVKTTESARTACQTLRLARIDMGAKVWGVPSEDASAFDFSEWTQQAGGSVSDCATAYGDCCARVSATFTMGLLQQFGCEHIAEFPKYAKGDWEISAQDISPTLRAWRKQFWQKDGRSAAKARLLEQLAKAEAADLCEDEGAAARGGGGDARDHAEIILGRGLASAMTLATFALLDLLNTDFQHSGPINSLSKYFGGHCSCSLVRAT

SEQ ID NO: 19141 - protein, 1821 aa, Oryza sativa
  Clone ID: TF_OSC401054j.C1.p41.fg
MSWHRAGVLLLGAQFCLPVPGVPAVGRIGSVLLSMARMGWKLCHVFRLYTVVMAGSVTRRGLDMTGFVLELRGMCVALGYPHGVDYQARPLPEQEGDDAEPRAGWEVTAVILAGSSERTSLTVTAGGDSFPAACQSAALLAIGTLHQRYPDELQHSPYRYHPRRGGARDYATFRDASSEDDATIVHLARMVEAYDAARIDFHQMVRRGMVENNMKILELRQENLQLKKDLDAVEAQLHQLKIAQGEICRPKRRRVCRSQKITARKSTSRPELVRQSLAWTCFVETPRAEPAPVVPQEGEASGVGSTEVVWGMVMPMVTTRRNANTGDGNQPECSNHNHQGNPPPPPPPPPPPPPDTNAILTQILAQQANMMTAFLHHLQNPPQQNAPPPPPQHSKLAEFLRIRPPTFSSSNNPVDALDWLHAVGKKLGTVQCSDEEKVIFAAHQLQGPASLWWDHFQATQPEGQPITWARFTAAFRRTHVPAGVVALKKREFRELKQGNRSVMEYLHEFNNLARYAPEDVREDEEKQEKFLAGMDPELSVRLVSGDYPDFQRLVDKSIRLEAKHKELESHKRRLANFRNQQGANQRVRYTNPYPGGSSSQQQQQQQQPRSAPRPQFVVRVPQPQQQQNQQGTRAPRPPTPTVQPGQGRRDAQGQQRLCFNCFEPGHFADKCPKPRRQQGQAPPRSNNGGRDVIRGRVNHVTAEDVLTTPDVIVGTFLVHSIPATILFDSGASHSFISVPFVGRNQLGVERLRNPLLITTPGGVMTAKYYSPTVPIEIQGIPFPSDLILLDTKNLDVILGMNWLAQFQGVVDCARRTVTLYRGPEQPVVFFAPPTSVRSSELHQIELSEIPIVREFGDVFPEELPGMPPKREIEFRIDLAPGTTPLYKRPYRMAANELAEVKKQLEELKEKGYIRPSTSPWDAPVIFVEKKDKTKRMCVDYRALNEVTIKNKYPLPRIDDLFDQLKGATVFSKIDLRSGYHQLRIREEDIPKTAFTTRYGLYEFTVMSFGLTNAPAFFMNLMNKVFMEYLDKFVVVFIDDILIYSQSEEDHQHHLRLVLGKLREHQLYAKLSKCEFWLSEVKFLGHVISAKGVAVDPETVIAVTDWKQPKTVTQIRSFLGLAGYYRRFIENFSKIARPMTQLLKKEEKFVWSPQCEKAFQTLKEKLVSSPVLILPDTRKDFMVYCDASRQGLGCVLMQDGHVVAYASRQLRPHEGNYPTHDLELAAVVHALKIWRHYLIGNRCEIYTDHKSLKYIFTQSDLNLRQRRWLELIKDYDVGIHYHPGKANVVADALSRKSHCNTLNVRGIPPELSQQMEALNLSIVGHGVLAALEAKPTLLDQIREAQKNDPDMHGLLKNMKQGKAAGFTEDEHGTLWNGNRVCVPDDRELKQLILQEAHESPYSIHPGSTKMYLDLKEKYWWVSMKREIAEFVALCDVCQRVKAEHQRPAGLLQPLQVPEWKWDEIGMDFITGLPKTQGGYDSIWVVVDRLTKVARFIPVKTTYGGNKLAELYFARIVSLHGVPKRIVSDRGSQFTSHFWKKLQEELGTRLNFSTAYHPQTDGQTERLNQILEDMLRACVLDFGKTWDKSLPYAEFSYNNSYQASIQMAPYEALYGRKCRTPLLWDQVGESQVFGTDILREAEAKVRIIRDNLKVAQSRQKSYADNRRRDLEFAVDDFVYLRVTPLRGVHRFQTKGKLAPRYVGPFRIVARRGEVAYQLELPASLGNVHDVFHVSQLKKCLRVPSEQADSEQIEVREDLTYVERPVKILDTMERRTRNRVIRFCKVQWSNHAEEEATWEREDELKAAHPDLFASSSKSRGRDSV

SEQ ID NO: 19142 - protein, 1821 aa, Oryza sativa
  Clone ID: TF_OSC401054j.C1.p71.fg
MSWQRVGALLLGAQSCLPVPGVPAVGRIGSVLLSMARMGWKLCHVFRLYTVVMAGSVTRRGLDMTGFVLELRGMCVALGYPHGVDYQARPLPEQEGDDAEPRAGWEVTAVILAGSSERTSLTVTAGGDSFPAACQSAALLAIGTLHQRYPDELQHSPYRYHPRRGGARDYATFRDASSEDDATIVHLARMVEAYDAARIDFHQMVRRGMVENNMKILELRQENLQLKKDLDAVEAQLHQLKIAQGEICRPKRRRVCRSQKITARKSTSRPELVRQSLAWTCFVETPRAEPAPVVPQEGEASGVGSTEVVWGMVMPMVTTRRNANTGDGNQPECSNHNHQGNPPPPPPPPPPPPPDTNAILTQILAQQANMMTAFLHHLQNPPQQNAPPPPPQHSKLAEFLRIRPPTFSSSNNPVDALDWLHAVGKKLGTVQCSDEEKVIFAAHQLQGPASLWWDHFQATQPEGQPITWARFTAAFRRTHVPAGVVALKKREFRELKQGNRSVMEYLHEFNNLARYAPEDVREDEEKQEKFLAGMDPELSVRLISGDYPDFQRLVDKSIRLEAKHKELESHKRRLANFRNQQGANQRVRYTHPYPGGSSSQQQQQQQQPRSAPRPQFVVRVPQPQQQQNQQGTRAPRPPTPTVQPGQGRRDAQGQQRLCFNCFEPGHFADKCPKPRRQQGQAPPRSNNGGRDVIRGRVNHVTAEDVLTTPDVIVGTFLVHSIPATILFDSGASHSFISVPFVGRNQLGVERLRNPLLITTPGGVMTAKYYSPAVPIEIQGIPFPSDLILLDTKNLDVILGMNWLAQFQGVVDCARRTVTLYRGPEQPVVFFAPPTSVRSSELHQIELSEIPIVREFGDVFPEELPGMPPKREIEFRIDLAPGTTPLYKRPYRMAANELAEVKKQLEELKEKGYIRPSTSPWGAPVIFVEKKDKTKRMCVDYRALNEVTIKNKYPLPRIDDLFDQLKGATVFSKIDLRSGYHQLRIREEDIPKTAFTTRYGLYEFTVMSFGLTNAPAFFMNLMNKVFMEYLDKFVVVFIDDILIYSQSEEDHQHHLRLVLEKLREHQLYAKLSKCEFWLSEVKFLGHVISAKGVAVDPETVIAVTDWKQPKTVTQIRSFLGLAGYYRRFIENFSKIARPMTQLLKKEEKFVWSPQCEKAFQTLKEKLVSSPVLILPDTRKDFMVYCDASRQGLGCVLMQDGHVVAYALRQLRPYEGNYPTHDWELAAVVHALKIWRHYLIGNRCEIYTDHKSLKYIFTQSDLNLRQRRWLELIKDYDVGIHYHPSKANVVADALSRKSHCNTLNVRGIPPELSQQMEALNLSIVGHGVLAALEAKPTLLDQIREAQKNDPDMHGLLKNMKQGKAAGFTEDEHGTLWNGNRVCVPDDRELKQLILQEAHESPYSIHPGSTKMYLDLKEKYWWVSMKREIAEFVALCDVCQRVKAEHQRPAGLLQPLQVPEWKWDEIGMDFITGLPKTQGGYDSIWVVVDRLTKVARFIPVKTTYGGNKLAELYFARIVSLHGVPKRIVSDRGSQFTSHFWKKLQEELGTRLNFSTAYHPQTDGQTERLNQILEDMLHACVLDFGKTWDKSLPYAEFSYNNSYQASIQMAPYEALYGRKCRTPLLWDQVGESQVFGTDILREAEAKVRIIRDNLKVAQSRQKSYADNRRRDLEFAVDDFVYFRVTPLRGVHRFQTKGKLAPRYVGPFRIVARRGEVAYQLELPASLGNVHDVFHVSQLKKCLRVPSEQADSEQIEVREDLTYVERPVKILDTMERRTRNRVIRFCKVQWSNHAEEEATWEREDELKAAHPDLFASSSESRGRDSV

SEQ ID NO: 19143 - protein, 1767 aa, Oryza sativa
  Clone ID: TF_OSC401058j.C1.p35.fg
MDEVGGRWTFSRANEGYTSCGPMAGSVTRRGLDMTGFVLELRGMCVVLGYPHGEDYQARPLPDQEGDDAEPHAGWEVTAVILSGSPERTSLAVTAGGDSFPAACQNAALLAIGTLHQRYPDELQHSPYRYHPRRGGARDYATFRDASSEDDATIVHLARMVEAYDAARIDFHQMVRRGMVENNMKILELRQENLQLKKDLDAVEAQLHQLKVAQGEICRPKRRRVCRSQKITARKSTSRPELVRQSLAWTCFVETPRAEPAPVMVTTRRNAATGDGNQPESSNHNHQGNPPPPPPPPPPPPPDTNAILTQILAQQANMMNAFLHHLQNPPQQNAPPPPPQHSKLAEFLRIRPPTFSSSNNPVDALDWLHAVGKKLDTVQCSDEEKVVFAAHQLQGPASLWWDHFQATQPEGQPITWARFTAAFRRTHVPAGVVALKKREFRELKQGNRSVMEYLHEFNNLARYAPEDVREDEEKQEKFLAGMDPELSVRLVSGDYPDFQRLVDKSIRLEAKHKELESHKRRLANFRNQQGANQRVRYTNPYPGGSSSQQQQQQPRPAPRPQFVVRVPQPQQQQNQQGTRAPRPPTPAVQPVQGRRDAQGQQRLCFNCFEPGHFADKCPKPRRQQGQAPPRSNNGGKDVIRGRVNHVTAEDVLTTPDVIVGTFLVHSIPATILFDSGASHSFISVPFVGRNQLGVERLRNPLLITTPGGVMTAKFYSPAVPIEIQGIPFPSDLILLDTKNLDVILGMNWLAQFQGVVDCARRTVTLYRGPEQPVVFFAPPTSVRSSELHQIELSEIPIVREFGDVFPEELPGMPPKREIEFRIDLAPGTTPLHKRPYRMAANELAEVKKQLEELKEKGYIRPSTSPWGAPVIFVEKKDKTKRMCVDYRALNEVTIKNKYPLPRIDDLFDQLKGATVFSKIDLRSGYHQLRIREEDIPKTAFTTRYGLYEFTVMSFGLTNAPAFFMNLMNKVFMEYLDKFVVVFIDDILIYSQSEEDHQHHLRLVLGKLREHQLYAKLSKCEFWLSEVKFLGHVISAKGVAVDPETVTAVTDWKQPKTVTQVRSFLGLAGYYRRFIENFSKIARPMTQLLKKEEKFVWSPQCEKAFQTLKEKLVSSPVLILPDTRKDFMVYCDASRQGLGCVLMQDGHVVAYASRQLRPHEGNYPTHDLELAAVVHALKIWRHYLIGNRCEIYTDHKSLKYIFTQSDLNLRQRRWLELIKDYDVGIHYHPGKANVVADALSRKGHCNTLNVRGIPPELSQQMEALNLNIVGRGFLAALEAKPTLLDQIREAQKNDPDMHGLLKNMKQGKAAGFTEDEHGTLWNGNRVCVPDNRELKQLILQEAHESPYSIHPGSTKMYLDLKEKYWWVSMKREIAEFVALCDVCQRVKAEHQRPAGLLQPLQVPEWKWDEIGMDFITGLPKTQGGYDSIWVVVDRLTKVARFILVKTTYGGNKLAELYFARIVSLHGVPKKIVSDRGSQFTSHFWKKLQEELGTRLNFSTAYHPQTDGQTERLNQILEDMLRACVLDFGKTWDKSLPYAEFSYNNSYQSSIQMAPYEALYGRKCRTPLLWDQVGESQVFGTDILREAEAKVRIIRDNLKVAQSRQKSYADNRRRDLEFAVDDFVYLRVTPLRGVHRFQTKGKLAPRYVGPFRIVARRGEVAYQLELPASLGNVHDVFHVSQLKKCLRVPSEQTDSEQIEVREDLTYVERPVKILDTMERRTRNRVIRFCKVQWSNHAEEEATWEREDELKAAHPDLFASSSESRGRDSV

SEQ ID NO: 19144 - protein, 1796 aa, Oryza sativa
  Clone ID: TF_OSC401058j.C1.p48.fg
MDEVGGRWTFSRANEGYTSCGPMAGSVTRRGLDMTGFVLELRGMCVVLGYPHGVDYQARPLPEQEGDDTEPRAGWEVTAVILAGSSERTSLTVTAGGDSFPAACQNAALLAIGTLHQRYPDELQHSPYRYHPRRGGARDYATFWDASSEDDATIVHLARMVEAYDAARIDFHQMVRRGMVENNMKILELRQENLQLKKDLDAVEAQLHQLKIAQGEICRPKRRRVCRSQKITARKSTSRPELVRQSLAWTCFVETPRAEPAPVVPQEGEASGVGSSEALSLLAGSVWGFQMVTTRRNAVTGDGNQPEGSNPNHQGNPPPPPPPPPPPPPDTNAILTQILAQQANMMNAFLHHLQNPPQQNAPPPPPQHSKLAEFLRIRPPTFSSSNNPVDALDWLHAVGKKLDTVQCSDEEKVVFAAHQLQGPASLWWDHFQATQPKGQPITWARFTAAFRRTHVPAGVVALKKREFRELKQGNRSVMEYLHEFNNLARYAPEDVREDEEKQEKFLAGMDPELSVRLVSGDYPDFQRLVDKSICLEAKHKELESHKRRLANFRNQQGANQRVRYTNPYPGGSSSQQQQQQQQPRPAPRPQFVVRVPQPQQQQNQQGTRAPRPPTPTVQPGQGRRDAQGQQRLCFNCFEPGHFADKCPKPRRQQGQAPPRSNNGGKDVIRGRVNHVTAEDVLTTPDVIVGTFLVHSIPATILFDSGASHSFISVPFVGKNQLGVERLRNPLLITTPGGVMTAKYYSPAVPIEIQGIPFPSDLILLDTKNLDVILGMNWLAQFQGVVDCARRTVTLYRGPEQPVVFFAPPTSVRSSELHQIELSEIPIVREFGDVFPEELPGMPPKREIEFRIDLAPGTTPLHKRPYRMAANELAEVKKQLEELKEKGYIRPSTSPWGAPVIFVEKKDKTKRMCVDYRALNEVTIKNKYPLPRIDDLFDQLKGATVFSKIDLRSGYHQLRIREEDIPKTAFTTRYGLYEFTVMSFGLTNAPAFFMNLMNKVFMEYLDKFVVVFIDDILIYSQSEEDHQHHLRLVLGKLREHQLYAKLSKCEFWLSEVKFLGHVISAKGVAVDPETVTAVTDWKQPKTVTQVRSFLGLAGYYRRFIENFSKIARPMTQLLKKEEKFVWSPQCEKAFQTLKEKLVSSPVLILPDTRKDFMVYCDASRQGLGCVLMQDGHVVAYASRQLRPHEGNYPTHDLELAAVVHALKIWRHYLIGNRCEIYTDHKSLKYIFTQSDLNLRQRRWLELIKDYDVGIHYHPGKANVVADALSRKSHCNTLNVRGIPPELNQQMEALNLSIVGRGFLAALEAKPTLLDQIREAQKNDPDMHGLLKNMKQGKAAGFAEDEHGTLWNGNRVCVPDNRELKQLILQEAHESPYSIHPGSTKMYLDLKEKYWWVSMKREIAEFVALCDVCQRVKAEHQRPAGLLQPLQVPEWKWDEIGMDFITGLPKTQGGYDSIWVVVDRLTKVARFIPVKTTYGGNKLAELYFARIVSLHGVPKKIVSDRGSQFTSHFWKKLQEELGTRLNFSTAYHPQTDGQTERLNQILEDMLRACVLDFGKTWDKSLPYAEFSYNNSYQASIQMAPYEALYGRKCRTPLLWDQVGESQVFGTDILREAEAKVRIIRDNLKVAQSRQKSYADNRRRNLEFAVDDFVYLRVTPLRGVHRFQTKGKLAPRYVGPFRIIARRGEVAYQLELPASLGNVHDVFHVSQLKKCLRVPSEQTDSEQIKVREDLTYVERPVKILDTMERRTRNRVIRFCKVQWSNHAEEEATWEREDELKAAHPDLFASSSESRGRDSV

SEQ ID NO: 19145 - protein, 1503 aa, Oryza sativa
  Clone ID: TF_OSC401068j.C1.p3.gm
MVTPMVTTRRNVNTGEGNQPEGSNPNHQGNPPPPPPPDTNAILTQILAQQANMMNAFLHHLQNPPQQNAPPPPPQHSKLAEFLRIRPPTFSSSNNPVDALDWLHAVGKKLDTVQCSDEEKVIFAAHQLQGPASLWWDHFQATQPEGQPITWARFTAAFRRTHVPAGVVALKKKEFRELKQGNRSVMEYLHEFNNLARYAPEDVREDEEKQEKFLAGMDPELSVRLVSGDYPDFQRLVDKSIRLEAKHKELELHKRRLANFRNQQGANQRVRYTNPYPGGSSSQQQQQQQPRPAPRPQFVVRVPQPQQQQNQQGTRAPRPPTPTVQPVQGRRDASGPQRLCFNCFEPGHFADKCPKPRRQQGQAPPRSNNGGKDVSRGRVNHVTAEDVLTTPDVIVEKKDKTKRMCVDYRALNEVTIKNKYPLPRIDDLFDQLKGATVFSKIDLRSGYHQLRIREEDIPKTAFTTRYGLYEFTVMSFGLTNAPAFFMNLMNKVFMEYLDKFVVVFIDDILIYSQSEEDHQHHLRLVLGKLREHQLYAKLSKCEFWLSEVKFLGHVISAKGVAVDPETVTAVTDWKQPKTVTQIRSFLGLAGYYRRFIENFSKIARPMTQLLKKEEKFGWSPQCEKAFQTLKEKLVSSPVLILPDTRKDFMVYCDASRQGLGCVLMQDGHVVAYASRQLRPHEGNYPTHDLELAAVSDLNLRQRRWLELIKDYDVGIHYHPGKANVVADALSRKSHCNTLNVRGIPPELNQQMEALNLSIVGRGFLAALEAKPTLLDQIREAQKNDPDMHGLLKNMKQGKAAGFTEDEHGTLWNGKREKYWWVSMKREIAEFVALCDVYQRVKAEHQRPAGLLQPLQVPEWKWDEIGMDFITGLPKTQGGYDSIWVIVDRLTKVARFIPVKTTYGGNKLAELYFARIVSLHGIPKKIVSDRGSQFTSHFWKKLQEELGTRLNFSTAYHPQTDGQTERLNQILEDMLRACVLDFGKTWDKSLPYAEFSYNNSYQASIQMAPYEALYGRKCRTPLLWDQVGESQVFGTDILREAETKVRIIRDNLKVAQSRQKSYADNRRRDLEFAVDDFVYLRVTPLRGVHRFQTKGKLAPRYVGPFRITARRGEVAYQLELPASLGNVHDVFHVSQLKKCLRVPSEQADSERIEVREDLTYVEKPVKILDTMERRTRNRVIRFCKAGPPAALADGWDPPVIALLAPRPPPRPCPSAAAAANPAAPVRPACNQEGGITPRNPLPRFPLFPLSLSLGFARNQSRIHRRRNQWRPNPPRAIPPSPAALSFPRRYLNVARAPLFRFRRSPLALAVGIVLAPCSSLSAVAAELRCAAVVAPVLLPTRRPLPRHRRIAVDLVRASVSLADCRSAVVIVIPNRAAAFFRSVRRFRRLRCLGVSRGPSPSFPPSLLSLGCRSAAPLVAGSDHRGAGAPLPSAVPARPPSGAPSRLPSGPGRQPPAPAGAADARDPRRRPPPAACARSTVDRAADAWAPLPVDPVRAPAPRLTQ

SEQ ID NO: 19146 - protein, 1804 aa, Oryza sativa
  Clone ID: TF_OSC401143j.C1.p10.fg
MDEVGRRWTFSRANEGYTSCGPMAGSVTRRGLDMTGFVLELRGMCVVLGYPHGVDYQARPLPEQEGEDAEPHAGWEVTAVILSGSPERTSLAVTAGGDSFPAACQNAALLAIGTLHQRYPDELQHSPYRYHARRGGARDYATFRDASSEDDATVVHLARMVEAYDAARIDFHQMVRRGMVENNMKILELRQENLQLKKDLDAVEAQLHQLKIAQGEDSRPKRRRVCRSQKITARKSTSRPELVRQSLAWTCFVETPRAEPAPVVPQEGEASGVGSSEGALLLTFRPGPSQRSPSLFAGSVRGFQMVTTRRNVNTGEGNQPEGSNPNHQGNPPPPPPPDTNAILTQILAQQANMMNAFLHHLQNPPQQNAPPPPPQHSKLAEFLRIRPPTFSSSNNPVDALDWLHAVGKKLDTVQCSDEEKVIFAAHQLQGPASLWWDHFQATQPEGQPITWARFTAAFRRTHVPAGVVALKKREFRELKQGNRSVMEYLHEFNNLARYAPEDVREDEEKQEKFLAGMDPELSVRLVSGDYPDSQRLVDKSIRLEAKHKELESHKRRLANFRNQQGANQRVRYTNPYPGGSSSQQQQQQQQPRSAPRPQFVVRVPQQQQQQNQQGTRAPRPPTPTVQPVQGRRDAQGQQRLCFNCFEPGHFADKCPKPRRQQGQAPPRSNNGGKDVIRGRVNHVTAEDVLTTPDVIVGTFLVHSIPATILFDSGASHSFISVPFVGRNQLGVERLRNPLLITTPGGVMTAKYYSPAVPIEIQGIPFPSDLILLDTKNLDVILGMNWLAQFQGVVDCARRTVTLYRGPEQPVVFFAPPTSVRSSELHQIGLSEIPIVREFGDVFPEELPGMPPKREIEFRIDLAPGTTPLHKRPYRMAANELAEVKTQLEELKEKGYIRPSTSPWGAPVIFVEKKDKTKRMCVDYRALNEVTIKNKYPLPRIDDLFDQLKGATVFSKIDLRSGYHQLRIREEDIPKTAFTTRYGLYEFTVMSFGLTNAPAFFMNLMNKVFMEYLDKFVVVFIDDILIYSQSEEDHQHHLRLVLGKLREHQLYAKLSKCEFWLSEVKFLGHVISAKGVAVDPETVTAVTDWKQPKTVTQIRSFLGLAGYYRRFIENFSKIARPMTQLLKKEEKFVWSPQCEKAFQTLKEKLVSSPVLILPDTRKDFMVYCDASRQGLGCVLMQDGHVVAYASRQLRPHEGNYPTHDLELAAVVHALKIWRHYLIGNRCEIYTDHKSLKYIFTQSDLNLRQRRWLELIKDYDVGIHYHPGKANVVADALSRKSHCNTLNVRGIPPELNQQMEALNLNIVGRGFLAALEAQPTLLDQIREAQKNDPDMHGLLKNMKQGKAAGFTEDEHGTLWNGKRVCVPDSRELKQLILQEAHESPYSIHPGSTKMYLDLKEKYWWVSMKREIAEFVALCDVCQRVKAEHQRPAGLLQPLQVPEWKWDEIGMDFITGLPKTQGGYDSIWVIVDRLTKVARFIPVKTTYGGNKLAELYFARIVSLHGVPKKIVSDRGSQFTSHFWKKLQEELGTRLNFSTAYHPQTDGQTERLNQILEDMLRACVLDFGKTWDKSLPYAEFSYNNSYQASIQMAPYEALYGRKCRTPLLWDQVGESQVFGTDILREAEAKVRIIRDNLKVAQSRQKSYADNRRRDLEFAVDDFVYLRVTPLRGVHRFQTKGKLAPRYVGPFRITARRGEVAYQLELPASLGNVHDVFHVSQLKKCLRVPSEQADSEQIEVREDLTYVEKPVKILDAMERRTRNRVIRFCKVQWSNHAEEEATWEREDELKAAHPDLFASSSESRGRDSV

SEQ ID NO: 19147 - protein, 1344 aa, Oryza sativa
  Clone ID: TF_OSC401143j.C1.p3.fg
MSWHRAGVLLLGAQSCLPVPEVPAVGGIGSVLLSMARMGWKLCHVFRPYTVVMAGSISRRGLDLTGFVLELRGMCVVLGYPHGVDYQGRPLPEQEGDDAEPHAAWEVTAVILTGSPERTSLAVTAGGDSFPAACQNAALLAIGTLHQRYPDELQHSPYRYHPRRGGARDFATFRDASSEDDATIMHLARMVEAYDAARIDFHQMVRRGMVENNMKILELRQENLQLKKELDAVEAQLHQLKIAQGEVCRPKRRRVCRSQKITARKSTSRPELVRQSLAWTCFVETPRAEPAPVVPQEGEASGVGSTEDALLLTFRPGPSQRRSANTGDGNQPEGSNHNNHGSPPPPPPPPPPPPPDTNAILTQILAQQANMMTAFLHHLQNPPQQNAPPPPPQHCKLAEFLRIRPPTFSSSNNPVDALDWLHAVGKKLDTVQCSDEEKVIFAAHQLQGPASLWWDHFQATQPEGQPITWARFTAAFRRTHVPAGVVALKKREFRELKQGNRSVMEYLHEFNNLARYALEDVREDEEKQEKFLAGMDPELSVRLVSGDYPDFQRLVDKSIRLEAKHKELESHKRRLANVRNQQGANQRVRYTNPYPGGSSSQQQQQQQPRSAPRPQFVVRVPQPQQQQSQQGTRVPRPPTPAAQSGQGRRDASGPQRLCFNCFEPGHFADKCPKPRRQQGQAPPRSNNGGKDVIRGRVNHVTAEDVLTTPDVIVGTFLIHSIPATILFDSGASHSFISVPFVGRNQLGVERLRNPLLITTPGGVMTAKYYSPAVPIEIQGIPFPSDLILLDTKNLDVILGMNWMAQFQGVVDCARRTVTLYRGPEQSVVFFAPPTSVSSSELHQIGLSEIPIVREFGDVFPEELPGMPPKREIEFRIDLAPGTTPLYKRPYRMAANELAEVKKQLEELKEKGALNEVTIKNKYPLPRIDDLFDQLKGATVFSKIDLRSGYHQLRIREEDIPKTAFTTRYGLYEFTVMSFGLTNAPAFFMNLMNKVFMEYLDKFVVVFIDDILVYSQSEEDHQHHLRLVLGKLREHQLYAKLSKCEFWLSEVKFLGHVISAKGVAVDPETVTAVTDWKQPKTVTQVRSFLGFAGYYRRFIENFSKIARPMTQLLKKEEKFVWSPQCEKAFQTLKEKLVSSPVLTLPDTRKDFMVYCDASRQGLGCVLMQDGHVVAYASRQLRPHEGNYPTHDLELAAVVHALKIWRHYLIGNRSEIYTDHKSLKYIFTQSDLNLRQRRWLELIKDYDVGIHYHPGKANVVADALSRKSHCNTLNVRGIPPELNQQMEALNLSIVGRGFLVALEAKPTLLDQIREAQCRDRENCLFPNASVLIPVPGKAGVHHTSMI

SEQ ID NO: 19148 - protein, 1728 aa, Oryza sativa
  Clone ID: TF_OSC401235j.C1.p53.fg
MSWHRAGVLLLGAQSCLPVPGVTAVGGIGSVLLSIARMGWKLCHVFRLYTVVMAGSVSRRGLDMTGFVLELRGMCVVLGYPHGVDYQARPLPEQEGDDAEPHAAWEVTAVILTGSPERTSLAVTAGGDSFPAACQSAALLAIGTLHQRYPDELQHSPYRYHPRRGGARDYATFRDASSEDDATIVHLACMVEAYDAARIDFHQMVRRGMVENNMKILELRQENLQLKKDLDAVEAQLHQLKIAQGEVCRPKRRRVCRSQKITARKSTSRPELVRQSLAWTCFMETPRAEPAPMVPQEGEASGVGSTEDALLLTFRPGPSQRRSVNTGDGNQPEGSNHNNHGSPPPPPPPPPPPPPDTNAILTQILAQQANMMTAFLHHLQNPLQQNAPPPPPQHSKLAEFLRIRPPTFSSSNNPVDALDWLHAVGKKLDTVQCSDEEKVIFAAHQLQGPASLWWYHFQATQPEGQPITWARFTAAFRRTHVPAGVVALKKREFRELKQGNLSVMEMCGKMRRSKRSSGMDPELSVRLVSGDYPDFQRLVDKSIRLEAKHKELESHKRRLANFRNQQGANQRVRYTNPYPGGSSSQQQQQQQPRSAPRPQFVVRVPQPQQQQSQQGTRAPRPSTPTVQPGQGRRDAQGPQRLCFNCFEPGHFADKCPKPRRQQGQAPPRSNNGGKDVIRGRVNHVTAEDVLTTPDVIVGTFLIHSIPATILFDSGASHSFISVPFVGRNQLGVERLRNPLLITTPGGVMTAKYYSPAVPIEIQGIPFPSDLILLDTKNLDVILGMNWLAQFQGVVDCARRTVTLYRGPEQPVVFFAPPTSVSSSELHQIGLSEIPIVREFGDVFPEELPGMPPKREIEFRIDLAPGTTPLYKRPYRMAANELAEVKKQLEELKEKGYIRPSTSPWGAPVIFVEKKDKTKRMCVDYRALNEVTIKNKYPLPRIDDLFDQLKGATVFSKIDLRSGYHQLRIREEDIPKTAFTTRYGLYEFTVMSFGLTNAPAFFMNLMNKVFMEYLDKFVVVFIDDILVYSQTEEDHQHHLRLVLGKLREHQLYAKLSKCEFWLSEVKFLGHVISAKGVAVDPETVTAVTDWRQPKTVTQIRSFLGLAGYYRRFIENFSKIARPMTQLLKKEEKFVWSPQCEKAFQTLKEKLVSSPVLILPDTRKDFMVYCDAARQGLGCVLMQDGHVVAYASRQLRPHEGNYPTHDLELAAVVHALKIWRHYLIGNCCEIYTDHKSLKYIFTQSDLNLRQRRWLELIKDYDVGIHYHPGKANVVADALSRKSHCNTLNVRGIPLELNQQMEALNLSIVGRGFLAALEAKPTLLDQIREAQKNDPDMRGLLKNMKQGKATGFTEDEHGTLWNGNRVCVPDNRELKQLILQEAHESPYSIHPGSTKMYLDLKKKYWWVSMKREIAEFVALCDVCQRVKAEHQRPAGLLQPLQVPEWKWDEIGMDFITGLPKTQGGYDSIWVVVDRLTKVARFIPVKTTYGGNKLAELYFARIVSLHGVPKKIVSDRGSQFTSHFWKKLQEELGTRLNFSTAYHPQTDGQTERLNQILEDMLRACVLDFGKTWDKSLPYAEFSYNNSYQASIQMAPYEALFQTKGKLAPRFVGPFRIIARRGEVAYQLELPASLGNVHDVFHVSQLKKCLRVPSEQADSEQIEVREDLTYVERPVKILDTMERRTRNRVIRFCKVQWSNHAEEEATWEREDELKAAHPDLFASSSESRGRDSV

SEQ ID NO: 19149 - protein, 1784 aa, Oryza sativa
  Clone ID: TF_OSC401235j.C1.p71.fg
MDEVGGRWTFSRANEGYTSCGPMAGSVTRRGLDMTGFVLELRGMCVVLGYPHGVDYQARPLPEQEGEDAEPHAGWEVTAVILSGSPERTSLAVTAGGDSFPAACQNAALLAIGTLHQRYPDELQHSPYRYHPRRGGARDHATFRDASSEDDATVVHLARMVEAYDAARIDFHQMVRRGMVENNMKILELRQENLQLKKDLDALEAQLHQLKVAQGEDSRPKRRRVCRSQKITARKSTSRPELVRQSLAWTCFVETPRAEPAPVVPQEGEASGVGSTEDALLLTFRPGPSQRRNVSTGEGNQPEGSNPNPQGNPPPPPPPDTNAILTQILAQQANLMTAFLHHLQNPPQQNAPPLPPQHSKLAEFLRIRPPTFSSSNNPVDALDWLHAVGKKLDTVQCSDEEKVTFAAHQLQGPASLWWDHFQATQPEGQPITWARFTAAFRRTHVPAGVVALKKREFRELKQGNRSVMEYLHEFNNLARYAPEDVREDEEKQEKFLAGMDPELSVRLVSGDYPDFQRLVDKSIRLEAKHKELESHKRRLANFRNQQGANQRVRYTNPYPGGSSSQQQQQQPRSAPRPQFVVRVPQPQQQQNQQGTRAPRPPTPAVQPVQGRRDASGPQRLCFNCFEPGHFADKCPKPRRQQGQAPPRSNNGGKDVIRGRVNHVAAEDVLTTPDVIVGTFLIHSIPATILFDSGASHSFISVPFVGKNQLGVERLRNPLLITTPGGVMTAKYYSPAVPIEIQGIPFPSDLILLDTKNLDVILGMNWLAQFQGVVDCARRTVTLYRGPEQPVVFFAPPTSVRSSELHQIELSEIPVVREFGDVFPEELPGMPPKREIEFRIDLAPGTTPLHKRPYRMAANELAEVKKQLEELKEKGYIRPSTSPWGAPVIFVEKKDKTKRMCVDYRALNEVTIKNKYPLPRIDDLFDQLKGATVFSKIDLRSGYHQLRIREEDIPKTAFTTRYGLYEFTVMSFGLTNAPAFFMNLMNKVFMEYLDKFVVVFIDDILIYSQSEEDHQHHLRLVLGKLREHQLYAKLSKCEFWLSEVKFLGHVISAKGVAVDPETVTAVTDWKQPKTVTQVRSFLGLAGYYRRFIENFSKIARPMTQLLKKEEKFVWSPQCEKAFQTLKEKLVSSPVLILPDTRKDFMVYCDASRQGLGCVLMQDGHVVAYASRQLRPHEGNYPTHDLELAAVVHALKIWRHYLIGNRCEIYTDHKSLKYIFTQSDLNLRQRRWLELIKDYDVGIHYHPGKANVVADALSRKSHCNTLNARDIPPELNQQMEALNLSIVGRGFLAALEAKPTLLDQIREAQKNDPDMHGLLKNMKQGKAAGFTEDEHGTLWNGNRVCVPADKELKQLILQEAHESPYSIHPGSTKMYLDLKGKYWWVSMKREIAEFVALCDVCQRVKAEHQRPAGLLQPLQVPEWKWDEIGMDFITGLPKTQGGYDSIWVIVDRLTKVARFIPVKTTYGGNKLAELYFARIVSLHGIPKKIVSDRGSQFTSHFWKKLQEELGTRLNFSTAYHPQTDGQTERLNQILEDMLRACVLDFGKTWDKSLPYAEFSYNNSYQASIQMAPYEALYGRKCRTPLLWDQVGESQVFGTDILREAEAKVRIIRDNLKVAQSRQKSYADNRRRDLEFAVDDFVYLRVTPLRGVHRFQTKGKLAPRYVGPFRVIARRGEVAYQLELPASLGNVHDVFHVSQLKKCLRVPSEQADSEQIEVREDLTYVERPVKILDTMERRTRNRVIRFCKVQWSNHAEEEATWEREDELKAAHPDLFASSSESRGRDSV

SEQ ID NO: 19150 - protein, 1684 aa, Oryza sativa
  Clone ID: TF_OSC401237j.C1.p35.fg
MDISRANEGYTSCGPVVEMSWHRAGVLLLGAQSCLPVPEIPAVGGIGSVLLSMARMGWKLCHVFRLYTVVMAGSINRRGLDLTGFVLELRGMCVVLGYPHGVDYQGRQLPEQEGDDAEPHAAWEVTAVILTGSPERTSLAVTAGGDSFSAACQNAALLAIGTLHQRYPDELQHSPYRYHPRRGGARDHATFRDASSEDDATIMHLARMVEAYDAARIDFHQMVRRGMVENSMKILELRQENLQLKKDLDAVEAQLHQLKIAQGEVCRPKRRRVCRSQKITARKSTSRPELVRQSLAWTCFVETPRAEPAPVVPQEGEASGVGSTEDALLLTFRPGPSQRRSANTGDGNQPEGSNHNNHGSPPPPPPPPPPPPLDTNAILTQILAQQANMMAAFLHHIQNPPQHNAPPPPPQHSKLAEFLRIRPPTFSSSNNPVDALDWLHAVGKKLDTVQCSDEEKVVFAAHQLQGPASLWWDHFQATQPEGQPITWARFTAAFRRTHVPAGVMALKKREFRELKQGNRSVMEYLHEFNNLARYAPEDVREDEEKQEKFLAGMDPELSVRLVSGGSSSQQQQQQQPRSAPRPQFVVRIPQPQQQQSQQGTRAPRPPTTAAQSGQGRRDVQGPQRLCFNCFEPGHFADKCPKPRRQQGQAPPRSNNGGKDVIRGRVNHVTAEDVLTTPDVIVGTFLIHSIPATILFDSGASHSFISVPFVGRNQLGVERLRNPPLITTPGGVMTAKYYSPAVPIEIQGIPFPSDLILLDTKNLDVILGMNWLAQFQGVVDCARRTVTLYRGPEQPVVFFAPPTSVSSLELHQIGLSEIPIVKEFGDVFPEELPGMPPKREIEFRIDLAPGTTPLYKRPYRMAANELAEVKKQLEELKEKGYIRPSTSPWGAPVIFVEKKDKTKRMCVDYRALNEVTIKNKYPLPRIDDLFNQLKGATVFSKIDLRSGYHQLRIREEDIPKTAFTTRYGLYEFTVMSFGLTNAPAFFMNLMNKVFMEYLDKFVVVFIDDIMVYSQSEEDHQHHLRLVLGKLREHQLYAKLSKCEFWLSEVKFLGHVISAKGVAVDPETVTAVTDWKQPKTVTQIRSFLGLAGYYRRFIENFSKIARPMTQLLKKEEKFVWSPQCEKAFQTLKEKLEGHVVAYASRQLRPHEGNYPTHDLELAAVVHALKIWRHYLIGNRCEIYTDHKSLKYIFTQSDLNLRQRRWLELIKDYDVGIHYHPGKANVVADALSRKSHCNTLVVRGIPPELNQQMEALNLSIVSRGFLATLEAKPSLLDQIREAQKNDPDMRGLLKNMKQGKAAGFTEDEHGTLWNGNRVCVPDVRELKQLILQEAHESPYSIHPGSTKMYLDLKEKYWWVSMKREIAEFVALCDVCQRVKAEHQRPAGLLQPLQVPEWKWDEIGMDFITGLPKTQGGYDSIWVVVDRLTKVARFIPVKTTYGGNKLAELYFARIVSLHGVPKKIVSDRGSQFTSHFWKKLQEELGTRLNFSTAYHPQTDGQTERLNQILEDMLRACVLDFGKTWDKSLTYAEFSYNNSYQASIQMAPYEALYGRKCRTPLLWDQVGESQVFGTDILREAEAKVRTIRDNLKVAQSRQKSYADNRRRDLEFAVDDFVYLRVTPLRGVHRFQTKGKLAPRFVGPFRIIARRGEVAYQLELPASLGNVHDVFHVSQLKKCLRVPSEQADSE

SEQ ID NO: 19151 - protein, 1783 aa, Oryza sativa
  Clone ID: TF_OSC401303j.C1.p1.fg
MDEVGGRWTFSRANEGYTSCGPMAGSVTRRGLHMTGFVLELRGMCVVLGYPHGVDYQARPLPDQEGEDAEPHAGWEVTAVILSGSPERTSLAVTAGGDSFPAACQNAALLAIGTLHQRYPDELQHSPYRYHPRRGGARDYATFRDASSEDDATVVHLARMVEAYDAARIDFHQMVRRGMVENNMKILELRQENLQLKKDLDALEAQLHQLKIAQGEICRPKRRRVCRSQKITARKSTSRPELVRQSLAWTCFVETPRAEPAPVVPQEGEASGVGSSEGALLLTFRPGPSQRSPSLFAGSVWGFQMVTTRRNVNTGEGNQPEGSNPNPQGNPPPPPPPDTNAILTQILAQQANMMNAFLHHLQNPPQQNAPPPPPQHSKLAEFLRIRPPTFSSSNNPVDALDWLHAVGKKLDTVQCSDEEKVIFAAHQLQGPASLWWDHFQATQPEGQPITWARFTAAFRRTHVPAGVVALKKREFRELKQGNRSVMEYLHEFNNLARYAPEDVREDEEKQEKFLAGMDPELSVRLVSGDYPDFQRLVDKSIRLEAKHKELESHKRRLANFRNQQGANQRVRYTNPYPGGSSSQQQQQQQNQQGTRAPRPPTPTVQPVQGRRDASGPQRLCFNCFEPGHFADKCPKPRRQQGQAPPRSNNGGKDVIRGRVNHVTAEDVLTTPDVIVGTFPVHSIPATILFDSGASHSFISVPFVEKNQLGVERLRNPLLITTPGGVMTAKYYSPAVPIEIQGIPFPSDLILLDTKNLDVILGMNWLAQFQGVVDCARRTVTLYRGPEQPVVFFAPPTSVRSSELHQIGLSEIPIVREFGDVFPEELPGMPPKREIEFRIDLAPGTTPLYKRPYRMAANELAEVKKQLEELKEKGYIRPSTSPWGAPVIFVEKKDKTKRMCVDYRALNEVTIKNKYPLPRIDDLFDQLKGATVFSKIDLRSGYHQLRIREEDIPKTAFTTRYGLYEFTVMSFGLTNAPAFFMNLMNKVFMEYLDKFVVVFIDDILIYSQSEEDHQHHLRLVLGKLREHQLYAKLSKCEFWLSEVKFLGHVISAKGVAVDPETVTAVTDWKQPKTVTQIRSFLGLAGYYRRFIENFSKIARPMTQLLKKEEKFVWSPQCEKAFQTLKQKLVSSPVLILPDTRKDFMVYCDASRQGLGCVLMQDGHVVAYASRQLRPHEGNYPTHDLELAAVVHALKIWRHYLIGNRCEIYTDHKSLKYIFTQSDLNLRQRRWLELIKDYDVGIHYHPGKANVVADALSRKSHCNTLNVRGIPPELSQQMEALNLNIVGRGFLAALEAKPTLLDQIREAQKNDPDMHGLLKNMKQGKAAGFTEGEHGTLWNGKRVCVPDSRELKQLILQEAHESPYSIHPGSTKMYLDLKEKYWWVSMKREIAEFVALCDVCQRVKAEHQRPAGLLQPLQVPEWKWDEIGMDFITGLPKTQGGYDSIWVIVDRLTKVARFIPVKTTYGGNKLAELYFARIVSLHGVPKKIVSDRGSQFTSHFWKKLQEELGTRLNFSTAYHPQTDGQTERLNQILEDMLRACVLDFGKTWDKSLPYAEFSYNNSYQASIQMAPYEALYGRKCRTPLLWDQVGESQVFGTDILREAEAKVRIIRDNLKVAQSRQKSYADNRRRDLEFAVDDFVYLRVTPLRGVHRFQTKGKLAPRYVGPFRIIARRGEVAYQLELPASLGNVHDVFHVSQLKKCLRVPSEQANSEQIEVREDLTYVERPVKILDTMERRTRNRVIRFCKVQWSNHAEEEATWEREDELKAAHPDLFASSSESRGRDSV

SEQ ID NO: 19152 - protein, 1807 aa, Oryza sativa
  Clone ID: TF_OSC401317j.C1.p24.fg
MEVDEVGGRWTFSRANEGYTSCGPVVEMSWHRAGVLLLGAQSCLPVSGVPAVGGIGSVLLSIARMGWKLCHVFRLYTVVMAGSVTRRGLDMTGFVLELRGMCVVLGYPHGVDYQARPLPEQEGDDAEPHAAWEVTAVILAGSPERTSLTVTAGGDSFPAACQSAALLAIGTLHQRYPDELQHSPYCYHPRRGGARDHATFRDASSEDDATIVHLARMVEAYDAARIDFHQMVRRGMVENNMKILELRQENLQLKKDLDAVEAQLHQLKIAQGEVCRPKRRRVCRSLKITARKSTSRPELVRQSLAWTCFIETPRAEPAPVMVTTRRNAVTGDGNQPEGSNHNNHGSPPPPPPPPPPPPPDTNAILTQILAQQANMMTAFLHHLQNPPQLNAPPPPPQHSKLAEFLRIRPPTFSSSNNPVDALDWLHAVGKKLDTVQCSDEEKVIFAAHQLQGPASLWWDHFQATQPEGQPITWARFTAAFRRTHVPAGVVALKKREFRELKQGNRSVMEYLHEFNNLARYAPEDVREDEEKQEKFLAGMDPELSVRLVSGDYPDFQRLVDKSIRLEAKHKELESHKCHLENFRNQQGANQRVRYTNPYPGGSSSQQQPQQQQPRSAPRPQFVVRVPQPQQQQNQQGTRAPRPPTPTVQPGQGRRDASGPQRLCFNCFEPGHFADKCPKPRRQQGQAPPRPNNGGKDVIQGRVNHVTAEDVLTTPDVIVGTFLIHSIPATILFDSGASHSFISVPFVGRNQLGVERLRNPLLITTPGEVMTAKYYSPAVPIEIQGIPFPSDLILLDTRNLDVILGMNWLAQFQGVVDCARRTVTLYRGPEQPVVFFAPPTSVNRSELHQIGLSEIPIVREFGDVFPEELPGMPPKREIEFRIDLAPGTTPLYKRPYRMAANELAEVKKQLEELKEKGYIRPSTSPWGAPVIFVEKKDKTKRMCVDYRALNEVTIKNKYPLPRIDDLFDQLKGATVFSKIDLRSGYHQLRIREEDIPKTAFTTRYGLYEFTVMSFGLTNAPAFFMNLMNKVFMEYLDKFVVVFIDDILIYSQSEEDHQHHLRLVLGKLREHQLYAKLSKCEFWLSEVKFLGHVISAKGVAVDPETVTAVTDWKPPKTVTQVRSFLGLAGYYRRFIENFSKIARPMTQLLKKEEKFVWSPQCEKAFQTLKEKLVSSPVLILPDTRKDFMVYCDASRQGLGCVLMQDGHVVAYASRQLRPHEGNYPTHDLELAAVVHALKIWRHYLIGNRCEIYTDHKSLKYIFTQSDLNLRQRRWLELIKDYDVGIHYHPGKANVVADALSQKGHCNTLNVRGIPPELNQQMEALNLSIVSRGFLAALEAKPTLLDQIREAQKNDPDMHGLLKNMKQGKAAGFTEDEHGTLWNGNRVCVPDNRELKQLILQEAHESPYSIHPGSTKMYLDLKEKYWWVSMKREIAEFVALCDVCQRVKAEHQRPAGLLQPLQVPEWKWDEIGMDFITGLPKTQGGYDSIWVVVDRLTKVARFIPVKTTYGGNKLAELYFARIVSLHGVPKKIVSDRGSQFTSHFWKKLQEELGTRLNFSTAYHPQTDGQTERLNQILQDMLRACVLDFGKTWDKSLPYAEFSYNNSYQASIQMAPYEALYGRKCRTPLLWDQVGESQVFGTDILREAEAKVRTIRDNLKVAQSRQKSYADNRRRDLEFAVDDFVYLRVTPLRGVHRFQTKGEARTSLPASLGNVHDVFHVSQLKKCLRVPSEQADSEQIEVREDLTYVERPVKILDTMERRTRNRVIRFCKVQWSNHAEEEATWEREDELKAAYPDLFASSSESRGRDSV

SEQ ID NO: 19153 - protein, 1635 aa, Oryza sativa
  Clone ID: TF_OSC401317j.C1.p25.fg
MSWHRAGVLLLGAQSCLPVPGVPAVGGIGSVLLSMARMGWKLCHVFRLYTVVMAGSINRRGLDLTGFVLELRGMCVVLGYAHGVDYQGRQLPEQEGDDAEPHAAWEVTAVILTGSPERTSLAVTTGGDSFSAACQNAALLAIGTLHQRYPDELQHSPYRYHPRRGGARDYATFRDASSEDDATIMHLARMVEAYDAARIDFHQMLKKDLDAAEAQLHQLKIAQGEVCRPKRRRVCRSQKITARKSTSRPELVRQSLAWTCFVETPRAEPAPMAPQEGEASGVDGDDQEKCCYGEGSHPEGSNHNNQGSPPPPPPPPLPPPPDTNAILTQILAQQANMMAALLHHIQNPPQHNAPPPPPQHSKLAEFLRIRPPTFSSSNNPVDALDWLHAVGKKLDTVQCSDEEKATQPEGQPITWARFTAAFRRTHVPAGVMALKKREFRELKQGNRSVMEYLHEFNNLARYAPEDVREDEEKQKKFLAGMDPELSVCLVSGDYPDFQRLVDKSIRLEAKHKELESHKRRLANFRNQQGANQRIRYTNPYPGGSSSQQQKQQQPRSAPRPQFVVCVPQPQQQQSQQGTRAPRPPTPAAQSGQGRRDVQGPQRLCFNCFEPGHFADKCPKPRRQQGQAPPRSNNGGKDVIRGRVNHVTAEDVLTTPDVIVGTFLIHSIPATILFDSGASHSFISVPFVGRNQLGVERLRNPLLITTPGGVMTAKYYSPAVPIEIQGIPFPSDLILLDTKNLDVILGMNWLAQFQGVVDCARRTVTLYRGPEQPVVFFAPPTSVSSSELHQIGLSEIPIVREFGDVFPEELPGMPPKREIEFWIDLAPGTTPLYKRPYRMAANELAEVKKQLEELKERGYIRPSTSPWGAPVIFVEKKDKTKRMCVDYRALNEVTIKNKYPLPRIDDLFDQLKGATVFSKIDLRSGYHQLRIREEDIPKTAFTTRYGLHEFTVMSFGLTNAPAFFMNLMNKVFMEYLDKFVVVFIDDILVYSQSEEDHQHHLRLVLGKLREHQLYAKLSKFVEERREICVEPAMREGVQEKLVSSPVLILPDTRKDFMVYCDASRQGLGCVLMQEGHVVAYALRQLRPHEGNYPTHDLELAAVVHALKIWRHYLIGNRYEIYTDHKSLKYIFNQSDLNLRQRRWLELIKDYDVGIHYHPGKANVVADALSRKSHCNTLNVRGIPPELNQQMEALNLSIVGRGFLAALEAKPTLLDQIREAQKNDPDMRGLLKNMKQGKAAGFTEDEHGTLWNGNRVCVPDNRELKQLILQEAHESPYSIHPGSTKMYLDLKEKYWWVSMKREIAEFVALCDVCQRVKAEHQRPAGLLQPLQVPEWKWDEIGMDFITGLPKTQGGYDSIWVVVDRLTKVARFIPVKTTYGGNKLAELYFARIVSLHGVPKKIVSDRGSQFTSHFWKKLQEEMDTRLNFSTAYHPQTDGQTERLNQILEDMLRACVLDFGKTWDKSLPYAEFSYNNSYQASIQMAPYEALYGRKCRTPLLWDLVGENQVFGTDILREAEAKVIIARRGEVAYQLDLPASLGNVHDVFDVSQLKKCLRVPSEQADSEQIEVREDLTYVERPVKILDTMERGTRNRVIRFCKVQWSNHAEEEATWEREDELKAAHPDLFASSSESRGRNSV

SEQ ID NO: 19154 - protein, 785 aa, Oryza sativa
  unsure (1)..(785): unsure at all Xaa locations
  Clone ID: TF_OSC401341j.C1.p51.np
MAATGDHRGAPPPAAAPAWPPSGAPSGCRVGPGRQPPAPLGAADAWDPRCRPMAGSINRRGLDLTGFVLELRGMCVVLGYPHGVDYQGKQLPEQEGDDAEPHAAWEVTAVILTGSPERTSLAVTAGGDSFSAACQNAALLAIGTLHQRYPDELQHSPYRYHPRRGGARDYATFRDASSEDDATIMHLARMVEAYDAARMDFHQMVRRGLVENNMKILELRQENLQLKKDLDVVEAQLCQLKIAQGEVCRPKRRRVCRSLKITARKSTSRPELVRQSLAWTCFVETPRAEPAPVVPQEDGVSGVGSTEDALLLTFRPGPLQKRSAATGDGNQPVGSNHNNHGSPPPPPPPPPPPPLDTNTILTQIIAQRANMMAAFLHHIQNPPQHNAPPPPPQHSKLAEFLRIRPPTFSSSNNPVDALDWLHAVGKKLDTVQCNDEEKVIFAAHXLQGPASLWWDHFQATXPEGQPITWARFTASFQRTHVPVGVMALKKREFXELKQGNRSMMEYLHEFNNLARYAPEDVREDEEKQEKFLAGMDPELSVRLVSGDYPDFQRLVDKSIRLEAKHKELESHKRRLANFRNQQGANQRVRYTNPYPGGSSSQQQQQQQPRSTSRPQFVVHVPQPQQQQSQQGTRAPRPPTPAVQPVQGRRDAQGQQRLCFNCFEPGHFADKCPKPRCQQGQAPPRSNNGGKDVIRGRVNHVTAENVLTTPDVIVGTFLIHSIPATIFVTSQNDSKIHPLNYAXNNXNPCESLQQIKSLTSPAPLMAAGSSAPVSPSSGRPLSPPTL

SEQ ID NO: 19155 - protein, 1822 aa, Oryza sativa
  Clone ID: TF_OSC401344j.C1.p11.fg
MSWHRAGVLLLGAQSCLPVPEVPAVGGIGSVLLSMARMGWKLCHVFRLYTVVMAGSVTRRGLDMTGFVLELRGMCVVLGYPHGVDYQARPLPEQEGDDAEPHAGWEVTAVILSGSPERTSLAVTAGGDSFPAACQSAALLAIGTLHQRYPDELQHSPYRYHPRRGGARDYATFRDASSEDDATIVHLARMVEAYDAARIDFHQMVRRGMVENNMKILELRQENLQLKKDLDVVEAQLHQLKIAQGEVCRPKRRRVCRSQKITARKSTSRPELVRQSLAWTCFVETPRAEPAPVVPQEGEASGVGSTEDALLLTFRPGPSQRRSANTGDGNQPEGSNHHHQCSPPPPPPPPPPPPPDTNAILTQILAQQANMMTAFLHHLQNPPQHNAPPPPPQHSKLAEFLRIRPPTFSSSNNPVDALDWLHAVGKKLDTVQCSDEEKVIFAAHQLQGPASLWWDHFQATQPEGQPITWARFTAAFRRTHVPAGVVALKKREFRELKQGNRSVMEYLHEFNNLARYAPEDVREDEEKQEKFLAGMDPELSVRLVSGDYPDFQRLVDKSIRLEAKHKELESHKRRLANFRNQQGANQRVRYTNPYPGGSSSQQQQQQQQPRSAPRPQFVVRVPQPQQQQNQQGTRAPRPPTPTVQPGQGRRDAQGPQRLCFNCFEPGHFADKCPKPRRQQGQAPPRSNNGGKDVIRGRVNHVTAEDVLTTPDVIVGTFLIHSIPATILFDSGASHSFISVPFVGRNQLGVERLRNPLLITTPGGVMTAKYYSPAVPIEIQGIPFSSDLILLDTKNLDVILGMNWLAQFQGVVDCARRTVTLYRGPEQPVVFFAPPTSVSSSELHQIGLSEIPIVREFGDVFPEELPGMPPKREIEFRIDLAPGTTPLYKRPYRMAANELAEVKKQLEELKEKGYIRPSTSPWGAPVIFVEKKDKTKRMCVDYRALNEVTIKNKYPLPRIDDLFDQLKGATVFSKIDLRSGYHQLRIREEDIPKTAFTTRYGLYEFTVMSFGLTNAPAFFMNLMNKVFMEYLDKFVVVFIDDILIYSQSEEDHQYHLRLVLGKLREHQLYAKLSKCEFWLSEVKFLGHVISAKGVAVDPETVTAVTDWKQPKTVTQVRSFLGLAGYYRRFIENFSKIARPMTQLLKKEEKFVWSPQCEKAFKTLKEKLVSSPVLILPDTCKDFMVYCDASRQGLGCVLMQDGHVVAYASRQLRPHEGNYPTHDLELDAVVHALKIWRHYLIGNRCEIYTDHKSLKYIFTQSDLNLRQRRWLELIKDYDVGIHYHPGKANVVADALSRKSHCNTLNVRGIPLELSQQMEALNLSIVGRGFLAALEAKPTLLDQIREAQKNDPDMHGLLKNMKQGKAAGFTEDEHGTLWNGNRVCVPDNRELKQLILQEAHESPYSIHPGSTKMYLDLKEKYWWVSMKREIAEFVALCDVCQRVKAEHQRPAGLLQPLQVPEWKWDEIGMDFITGLRKTQGGYDSIWVVVDRLTKVARFIPVKTTYGGNKLAELYFARIVSLHGVPKKIVSDRGSQFTSHFWKKLQEELGTRLNFSTAYHPQTDGQTERLNQILEDMLRACVLDFGKTWDKSLPYAEFSYNNSYQASIQMAPYEALYGRKCRTPLLWDQVGESQVFGTDILREAEAKVRTIRDNLKVAQSRQKSYADNRRRDLEFAVDDFVYLRVTPLRGVHRFRTKGKLAPRYVGPFRIVARRGEVAYQLELPASLGNVHDVFHVSQLKKCLRVPSEQADSEQIEVREDLTYVERPVKILDTMERRTRNRVIRFCKVQWSNHVEEEATWEREDELKAAHPDLFASSSESRGRDSV

SEQ ID NO: 19156 - protein, 238 aa, Oryza sativa
  Clone ID: TF_OSC401344j.C1.p4.fg
MEYLHEFNNLARYAPEDVREDEEKQEKFLAGMDPELSVRLVSGDYPDFQRLVDKSIRLEAKHKELESHKRRLANFRNQQGANQRVRYTNPYPGGSSSQQQQQQQPRSTSRPQFVVHVPQPQQQQSQQGTRAPRPPTPAVQPVQGRRDAQGQQRLCFNCFEPGHFADKCPKPRCQQGQAPPRSNNGGKDVIRGRVNHVTAENVLTTPDVIVGTFLIHSIPATIFVTSQNDSKIHPLNYA

SEQ ID NO: 19157 - protein, 1800 aa, Oryza sativa
  Clone ID: TF_OSC401348j.C1.p7.fg
MSWHRAGVLLLGAQSCLPVPEVPAVGGIGSMAGSVTRRGLDMTGFVLELRGMCVVLGYPHGVDYQARPLPEQEGDDAEPHAGWEVTAVILSGSPERTSLAVTAGGDSFPAACQSAALLAIGTLHQRYPDELQHSPYRYHPRRGGARDYATFRDASSEDDATIVHLARMVEAYDAARIDFHQMVRRGMVENNMKILELRQENLQLKKDLDAVEAQLHQLKIAQGEVCRPKRRRVCRSQKITARKSTSRPELVRQSLAWTCFVETPRAEPAPVVPQEGEASGVGSTEDALLLTFRPGPSQRRSANTGDGNQPEGSNHHHQGSPPPPPPPPPPPPPDTNAILTQILAQQANMMTAFLHHLQNPPQHNAPPPPPQHSKLAEFLRIRPPTFSSSNNPVDALDWLHAVGKKLDTVQCSDEEKVIFAAHQLQGPASLWWDHFQATQPEGQPITWARFTAAFRRTHVPAGVVALKKREFRELKQGNRSVMEYLHEFNNLARYAPEDVREDEEKQEKFLAGMDPELSVRLVSGDYPDFQRLVDKSIRLEAKHKELESHKRRLANFRNQQGANQRVRYTNPYPGGSSSQQQQQQQQPRSVPRPQFVVRVPQPQQQQNQQGTRAPRPPTPTVQPGQGRRDAQGPQRLCFNCFEPGHFADKCPKPRRQQGQAPPRSNNGGKDVIRGRVNHVTAEDVLTTPDVIVGTFLIHSIPATILFDSGASHSFISVPFVGRNQLGVERLRNPLLITTPEGVMTAKYYSPAVPIEIQGIPFPSDLILLDTKNLDVILGMNWLAQFQGVVDCARRTVTLYRGPEQPVVFFAPPTSVSSSELHQIGLSEIPIVREFGDVFPEELPGMPPKREIEFRIDLAPGTTPLYKRPYRMAANELAEVKKQLEELKEKGYIRPSTSPWGAPVIFVEKKDKTKRMCVDYRALNEVTIKNKYPLPRIDDLFDQLKGATVLSKIDLRSGYHQLRIREEDIPKTAFTTRYGLYEFTVMSFGLTNAPAFFMNLMNKVFMEYLDKFVVVFVDDILIYSQSEEDHQHHLRLVLGKLREHQLYAKLSKCEFWLSEVKFLGHVISAKGVAVDPETVTAVTDWKQPKTVTQVHSFLGLAGYYRRFIENFSKIARPMTQLLKKEEKFVWSPQCEKAFKTLKEKLVSSPVLILPDTRKDFMVYCDASRQGLGCVLMQDGHVVAYASRQLRPHEGNYPTRDLELAAVVHALKIWLHYLIGNRCEIYTDHKSLKYIFTQSDLNLRQRRWLELIKDYDVGIHYHPGKANVVADALSRKSHCNTLNVRGIPLELSQQMEALNLSIVGRGFLAALEAKPTLLDQIREAQKNDPDMHGLLKNMKQGKAAGFTEDEHGTLWNGNRVCVPDNRELKQLILQEAHESPYSIHPGSTKMYLDLKEKYWWVSMKREIAEFVALCDVCQRVKAEHQRPAGLLQPLQVPEWKWDEIGMDFITGLPKTQGGYDSIWVVVDRLTKVARFIPVKTTYGGNKLAELYFARIVSLHGVPKKIVSDRGSQFTSHFWKKLQEELGTRLNFSTAYHPQTDGQTERLNQILEDMLRACVLDFGKTWDKSLPYAEFSYNNSYQASIQMAPYEALYGRKCRTPLLWDQVGESQVFGTDILREAEAKVRTIRDNLKVAQSRQKSYADNRRRDLEFAVDDFVYLRVTPLRGVHRFRTKGKLAPRYVGPFRIVARRGEVAYQLELPASLGNVHDVFHVSQLKKCLRVPSEQADSEQIEVREDLTYVERPVKILDTMERRTRNQVIRFCKVQWSNHVEEEATWEREDELKAAHPDLFASSSESRGRDSV

SEQ ID NO: 19158 - protein, 1797 aa, Oryza sativa
  Clone ID: TF_OSC401354j.C1.p21.fg
MDISRANEGYTSCGPVVEMSWHRAGVLLLGAQSCLPIPEVPAVGGIGSVLLSMARMGWKLCHVFRLYTVVMAGSVTRRGLDMTGFVLELRGMCVVLGYPHGVDYQARPLPEQEGDDAEPHAGWEVTAVILSGSPERTSLAVTAGGDSFPAACQSAALLAIGTLHQRYPDELQHSPYRYHPRRGGARDYATFRDASSEDDATIVHLARMVEAYDAARIDFHQMVRRGMVENNMKILELRQENLQLKKDLDAVEAQLHQLKIAQGEVCRPKRRRVCRSQKITARKSTSRPELVRQSLAWTCFVEIPRAEPAPVVPQEGEASGVGSTEDALLLTFRPGPSQRRSANTGDGNQPEGSNHHHQGSPPPPPPPPPPPPPDTNAILTQILAQQANMMTAFLHHLQNPPQHNAPPPPPQHSKLAEFLRIRPPTFSSSNNPVDALDWLHAVGKKLDTVQCSDEEKVIFAAHQLQGPASLWWDHFQATQPEGQPITWARFTAAFRRTHVPAGVVALKKREFRELKQGNRSVMEYLHEFNNLARYAPEDVREDEEKQEKFLAGMDPELSVRLVSGDYPDFQRGSSSQQQQQQQQPRSAPRPQFVVRVPQPQQQQNQQGTRAPRPPTPTVQPGQGRRDAQGPQRLCFNCFEPGHFADKCPKPRRQQGQAPPRSNHGGKDVIRGRVNHVTAEDVLTTPDVIVGTFLIHSIPATILFDSGASHSFISVPFVGRNQLGVERLRNPLLITTPGGVMTAKYYSPAVPIEIQGIPFPSDLILLDTKNLDVILGMNWLAQFQGVVDCARRTVTLYRGPEQPVVFFAPPTSVSSSELHQIGLSEIPIVREFGDVFPEELPGMPPKREIEFRIDLAPGTTPLYKRPYRMAANELAEVKKQLEELKEKGYIRPSTSPWGAPVIFVEKKDKTKRMCVDYRALNEVTIKNKYPLPRIDDLFDQLKGATVFSMIDLRSGYHQLRIREEDIPKTAFTTRYGLYEFTVMSFGLTNAPAFFMNLMNKVFMEYLDKFVVVFIDDILIYSQSEEDHQHHLRLVLGKLREHQLYAKLSKCEFWLSEVKFLGHVISAKGVAVDPETVTAVTDWKQPKTVTQVRSFLGLAGYYRRFIENFSKIARPMTQLLKKEEKFVWSPQCEKAFKTLKEKLVSSPVLILPDTRKDFMVYCDASRQGLGCVLMQDGHVVAYASRQLRPHEGNYPTHDLELAAVVHALKIWRHYLIGNRCEIYTDHKSLKYIFTQSDLNLRQRRWLELIKDYDVGIHYHPGKANVVADALSRKSHCNTLNVRGIPLELSQQMEALNLSIVGRGFLAALEAKPTLLDQIREAQKNDPDMHGLLKNMKQGKAAGFTEDEHGTLWNGNRVCVPDNRELKQLILQEAHESPYSIHPGSTKMYLDLKEKYWWVSMKREIAEFVALCDVCQRVKAEHQRPAGLLQPLQVPEWKWDEIGMDFITGLPKTQGGYDSIWVVVDRLTKVARFIPVKTTYGGNKLAELYFARIVSLHGVPKKIVSDRGSQFTSHFWKKLQEELGTRLNFSTAYHPQTDGQTERLNQILEDMLRACVLDFGKTWDKSLPYAEFSYNNSYQASIQMAPYEALYGRKCRTPLLWDQVGESQVFGTDILREAEAKVRTIRDNLKVAQSRQKSYADNRRRDLEFAVDDFVYLRVTPLRGVHRFRTKGKLAPRYVGPFRIVARRREVAYQLELPASLGNVHDVLHVSQLKKCLRVPSEQADSEQIEVREDLTYVERPVKILDTMERRTRNRVIHFCKVQWSNHVEEEATWEREDELKAAHPDLFASSSESRGRDSF

SEQ ID NO: 19159 - protein, 1862 aa, Oryza sativa
  unsure (1)..(1862): unsure at all Xaa locations
  Clone ID: TF_OSC401478j.C1.p79.np
MDEVGGRWTSRTNEGYTSCGPVVEMSWHRAGVLLLGAXFCLPVPGVPAVGGVGSMYTSDQSIIYSNSRAPGYGQAEQCTQMASSINRRGLDLTGFVLELRGMCVVLGYPHGVDYQGKQLPEQEGDDAEPHAAWEVTAVILTGSPERTSLAVTAGGDSFSVACQNAALLAIGTLHQRYPDELQHSPYRYHPRRGGARDYATFRDASLEDDATIVHLARMVEAYDAARIDFHQMVRRGLVENNMKILELRQENLQLKMDLDTVDAQLRQLKIAQGEVCRPKRRRVCRSLKITARKSTSRPELVRQSLAWTCFVETPRAESAPVVPQEEGASGVGHGGCAAAHLPSWLVAAVDEQLVGLRMVTTRRSAATGECSHPEGSNHNNHGSPPPPPSPPPPPPPDTNAILTQILAXQANMMAAFLHHIQNPPQHNAPPPPPQHSKLAEFLRIRPPTFSSSNNPVDALDWLHAVGKKLDTVQCSDEEKVIFGAHQLQGPASLWWDHFQATQPEGQPITWARFTAAFRRTHVPAGVMALKKREFRELKQGNRSVMEYLHEFNNLARYAPEDVREDEEKQEKFLAGMDPELSVRLVSGDYPDFQRLVDKSIRLEAKHKELESHKRRLANFRNQQGANQRVRYTNPYPGXSSSQQQQQQQPRSVPRPQFVVRVPQPQQQQSQQGTRAPRPPTLAVQPGQVRRDVQGQQRLCFNCFEPGHFADKCPKPRRQQGQAPPRSNNGGKDVIRGRVNHVTAEDVLTTPDVIVGTFLIHSIPATILFDSGASHSFISMPFVGRNQLGVERLRNPLLITTPGGVMTAKXYSPAVPIEIQGIPFPSDLILLDTKNLDVILGMNWLAQFQGVVDCARRTVTLYRGPEQPVVFFAPPTSVGSSELHQIGMSEIPIVREFGDMFPEELPGMPPKREIEFRIDLAPGTTPQYKRPYRMASNELAEVKKQLGELKEKGYIRPSTSPWGAPVIFVEKKDMTKRMCVDNRALNEVTIKNKYPLPRIDDLFDQLKGATVFSKIDLRSGYHQLRIREEDIPKTAFTTRYGLYEFTVMSFGLTNAPAFFMNLMNKVFMEYLDKFVVVFIDDILVYSQSEEDHQQHLRLVLGKLREHQLYAKLSKCEFWLSEVKFLGHMISAKGVAVDPETVTAVTDWKQPKTVTQVRSFLGLAEYYRRFIKNFSKIARPMTQLLKKEEKFVWSPQCEKAFQTLKEKLVSSPVLILPDTRKDFLVYCDASRQGLGCVLMQEGHMVAYASQQLRPHEGNYPTHDLELAAVVHALKIWRHYLIGNRCEIYTDHKSLKYIFTQSDLNLRQRRWLELIKDXDVGIHYHPGKTNVVADALSRKSRCNTLGVRGIPPKLHQQMEALNLSIVGRGFLATLEAKPTLLDQIREAQKNDPDMHGILKNMKQGKAAGFTEDEHGTLWNGNRVCVPDDRELKQLILQEAHESPYSIHPGSTKMYLDLKEKYWWVSMKREIAEFVALYDVCQRVKAEHQRPAGLLQPLQVLEWKWDEIGMDFITGLPKTQGGYDSIWVVVDRLTKVARFIPVKTTYGGNKLAELYFARIVSLHGVPKKIVSDRGSQFTSHFWKKLQEELGTRLNFSTAYHPQTDGQTECLNQILEDMLRACILDFGKTWDKSLPYAEFSYNNSYQASIQMAPYEALYGRKCRTPLLXDQVGESQVFGTDILREAEAKVRTIRDNLKVAQSRQESYADNRRRNLEFAVDDFVYLRVTPLRGVHRFQTKGKLASRFVGPFRIIARRGEVAYQLELPASLGNVHDVFHVSQLKKCLRVLSEQADSEQIEVRENLTYMERPVKILDTMERRTRNRVIRFCKVQWSNHAEEEATWERENELKAAHPDLFASSSESRGRDSV

SEQ ID NO: 19160 - protein, 656 aa, Oryza sativa
  Clone ID: TF_OSC401486j.C1.p1.fg
MAGSVTRRGLDMTGFVLELRGMCVVLGYPHGVDYQARPLPEQEGEDAEPHAGWEVTAVILSGSPERTSLAVTAGGDSSPAACQNAALLAIGTLHQRYPDELQHSPYRYHPRRGGARDFATFRDASLEDDATVVHLARMVEAYDAARIDFHQMVRRGMVENNLKILELRQENLQLKKDLDALEAQLHQLKIAQGEDSRPKRRRVCRSQKITARKSTSRPELVRQSLAWTCFVETPRAEPAPVVPQEGEASGVGSTEDALLLTFRPGPSQRRNVSTGEGNQPEGSNPNPQGNPPPPPPPDTNAILTQILAQQANMMTAFLHHLQNPPQQNAPPPPPQHSKLAEFLRIRPPTFSSSNNPVDALDWLHAVGKKLDTVQCSDEEKVIFAAHQLQGPASLWWDHFQATQPEGQPITWARFTAAFRRTHVPAGVVALKKREFRELKQGNRSVMEYLHEFNSLARYAPEDVREDEEKQEKFLAGMDPELSVRLVSGDYPDFQRLVDKSIRLEAKHKELETHKRRLANFRNQQGANQRVRYTNPYPGGSSSQQQQQQQQPRSAPRPQFVVRVPQPQQQQSQQGTRVARPPTPVVQPVQGRRDAQGQQRLCFNCFEPGHFADKCPKPRRQQGQAPPRSNNGGKDVIRGRVNHVTAEDVLTTPDVIV

SEQ ID NO: 19161 - protein, 1804 aa, Oryza sativa
  Clone ID: TF_OSC401664j.C1.p29.fg
MDEVGGRWTFSRANEGYTSCGPMAGSVTRRGLHMTGFVLELRGMCVVLGYPHGVDYQARPLPEQEGEDVEPHAGWEVTAVILSGSPERTSLAVTAGGDSFPAACQNAALLAIGTLHQRYPDELQHSPYRYHPRRGGASDHATFRDASSEDDATVVHLARMVEAYDAARIDFHQMVRRGMVENNMKILELRQENLQLKKDLDAVEAQLHQLKIAQGEICRPKRRRVCRSQKITARKSTSRPELVRQSLAWTCFVETPRAEPAPVVPQEGEASGVGSSEGALLLTFRPGPSQRSPSLFAGSVWGFQMVTTRRNVNTGEGNQPEGSNPNPQGNPPPPPPPDTNAILTQILAQQANMMNAFLHHLQNPPQQNAPPPPPQHSKLAEFLRIRPPTFSSSNNPVDALDWLHAVGKKLDTVQCSGEEKVIFAAHQLQGPASLWWDHFQAAQPEGQPITWARFTAAFRRTHVPAGVVALKKREFRELKQGNRSVMEYLHEFNNLARYAPEDVREDEEKQEKFLAGMDPELSVRLVSGDYPDFQRLVDKSIRLEAKHKELESHKRRLANFRNQQGANQRVRYTNPYPGGSSSQQQQQQQQPRPAPRPQFVVRVPQPQQQQNQQGTRAPRPPTPAVQPVQSRRDASGPQRLCFNCFEPGHFADKCPKPRRQQGQAPPRSNNGGQDVIRGRVNHVTAEDVLTTPDVIVGTFLVHSIPATILFDSGASHSFISVPFVGKNQLGVERLRNPLLITTPGGVMTAKYYSPAVPIEIQGIPFPSDLILLDTKNLDVILGMNWLAQFQGVVDCARRTVTLYRGPEQPVVFFAPPTSVRSSELHQIGLSEIPIVREFGDVFPEELPGMPPKREIEFRIDLAPGTTPLYKRPYRMAANELAEVKKQLEELKEKGYIRPSTSPWGAPVIFVEKKDKTKRMCVDYRALNEVTIKNKYPLPRIDDLFDQLKGATVFSKIDLRSGYHQLRIREEDIPKTAFTTRYGLYEFTVMSFGLTNAPAFFMNLMNKVFMEYLDKFVVVFIDDILIYSQSEEDHQHHLRLVLGKLREHQLYAKLSKCEFWLSEVKFLGHVISAKGVVVDPETVTAVTDWKQPKTVTQIRSFLGLAGYYRRFIENFSKIARPMTQLLKKEEKFVWSPQCEKAFQTLKEKLVSSPVLILPDTRKDFMVYCDASRQGLGCVLMQDGHVVAYASRQLRPHEGNYPTHDLELAAVVHALKIWRHYLIGNRCEIYTDHKSLKYIFTQSDLNLRQRRWLELIKDYDVGIHYHPGKANVVADALSRKSHCNNLNARSIPPELSQQMEALNLNIVGRGFLAALEAKPTLLDQIREAQKNDPDMHGLLKNMKQGKAAGFTEDEHGTLWNGKRVCVPDSRELKQLILQEAHESPYSIHPGSTKMYLDLKEKYWWVSMKREIAEFVALCDVCQRVKAEHQRPAGLLQPLQVPEWKWDEIGMDFITGLPKTQGGYDSIWVVVDRLTKVARFIPVKTTYGGNKLAELYFARIVSLHGVPKKIVSDRGSQFTSHFWKKLQEELGTRLNFSTAYHPQTDGQTERLNQILEDMLRACVLDFGKTWDKSLPYAEFSYNNSYQANIQMAPYEALYGRKCRTPLLWDQVGESQVFGTDILREAEAKVRIIRDNLKVAQSRQKSYADNRRRDLEFAVDDFVYLRVTPLRGVHRFQTKGKLAPRYVGPFRIIARRGEVAYQLELPASLGNVHDVFHVSQLKKCLRVPSEQADSEQIEVREDLTYVEKPVKILDTMERRTRNRVIRFCKVQWSNHAEEEATWEREDELKAAHPDLFASSSESRGRDSV

SEQ ID NO: 19162 - protein, 1804 aa, Oryza sativa
  Clone ID: TF_OSC401716j.C1.p49.fg
MDEVGGRWTFSRANEGYTSCGPMAGSVTRRGLDMTGFVLELRGMCVVLGYPHGVDYQARPLPEQEGEDAEPHAGWEVTAVILSGSPEWTSLAVTAGGDSFPAACQNAALLAIGTLHQRYPDELQHSPYRYHPRRGGASDHATFRDASSEDDATVVHLARMVEAYDAARIDFHQMVRRGMVENNLKILELRQENLQLKKDLDALEAQLHQLKVAQGEICRPKRRRVCRSQKITARKSTSRPELVRQSLAWTCFVETPRAEPAPVVPQEGEASGVGSSEGALLLTFRPGPSQRSPSLFAGSVWGFQMVSTRRNVNTGEGNQPEGSNPNPQGNPPPPPPPPDTNAILTQILAQQANMMNAFLHHLQNLPQQNAPPPPPQHSKLAEFLRIRPPTFSSSNNPVDALDWLHAVGKKLDTVQCSDEEKVIFAAHQLQGPASLWWDHFQATQPEGQPITWARFTAAFRRTHVPAGVVALKKREFRELKQGNRSVMEYLHEFNNLARYAPEDVREDEEKQEKFLAGMDPELSVRLVSGDYPDFQRLVDKSIRLEAKHKELESHKRRLANFRNQQGANQRVRYTNPYPGGSSSQQQQQQQPRSAPRPQFVVRVPQQQQQQNQQGTRAPRPPTPTVQPVQGRRDAQGQQRLCFNCFEPGHFADKCPKPRRQQGQAPPRSNNGGKDVIRGRVNHVTAEDVLTTPDVIVGTFLVHSIPATILFDSGASHSFISVPFVGKNQLGVERLRNPLLITTPGGVMTAKYYSPAVPIEIQGIPFPSDLILLDTKNLDVILGMNWLAQFQGVVDCARRTVTLYRGPEQPVVFFAPPTSVRSSELHQVGLSEIPIVREFGDVFPEELPGMPPKREIEFRIDLAPGTTPLYKRPYRMAANELAEVKKQLEELKEKGYIRPSTSPWGAPVIFVEKKDKTKRMCVDYRALNEVTIKNKYPLPRIDDLFDQLKGATVFSKIDLRSGYHQLRIREEDIPKTAFTTRYGLYEFTVMSFGLTNAPAFFMNLMNKVFMEYLDKFVVVFIDDILIYSQSEEDHQHHLRLVLGKLREHQLYAKLSKCEFWLSEVKFLGHVISAKGVAVDPETVTAVTDWKQPKTVTQIRSFLGLAGYYRRFIENFSKIARPMTQLLKKEEKFVWSPQCEKAFQTLKEKLVSSPVLILPDTRKDFMVYCDASRQGLGCVLMQDGHVVAYASRQLRPHEGNYPTHDLELAAVVHALKIWRHYLIGNRCEIYTDHKSLKYIFTQSDLNLRQRRWLELIKDYDVGIHYHPGKANVVADALSRKSHCNTLNVRGIPPELNQQMEALNLSIVGRGFLAALEAKPTLLDQIREAQKNDPDMHGLLKNMKQGKAAGFTEDEHGTLWNGKRVCVPDSRELKQLILREAHESPYSIHPGSTKMYLDLKEKYWWVSMKREIAEFVALCDVCQRVKAEHQRPAGLLQPLQVPEWKWDEIGMDFITGLPKTQGGYDSIWVIVDRLTKVARFIPVKTTYGGNKLAELYFARIVSLHGVPKKIVSDRGSQFTSHFWKKLQEELGTRLNFSTAYHPQTDGQTERLNQILEDMLRACVLDFGKTWDKSLPYAEFSYNNSYQASIQMAPYEALYGRKCRTPLLWDQVGESQVFGTDILREAEAKVRIIRENLKVAQSRQKSYADNRRRDLEFAVDDFVYLRVTPLRGVHRFQTKGKLAPRYVGPFRITARRGEVAYQLELPASLGNVHDVFHVSQLKKCLRVPSEQADSEQIEVREDLTYVERPVKILDTMERRTRNRVIRFCKVQWSNHAEEEATWEREDELKAAHPGLFASSSESRGRDSV

SEQ ID NO: 19163 - protein, 1592 aa, Oryza sativa
  Clone ID: TF_OSC401831j.C1.p2.fg
MSWHRAGVLLLGAQSCLPVPGVPAVGGIGSVLLSMARMGWKLCHVFRLYTVVMAGSVTRRGLDMTGFVLELRGMCVVLGYPHGVDYQARPLPEQEGEDAEPHAGWEVTAVILSGSPERTSLAVTAGGDSFPAACQNAALLAIGTLHQRYPDELQHSPYRYHPRRGGARDYATFRDAGSEDDAPIVHLARMVEAYDAARIDFHQMVRRGMVENNMKILELRQENLQLKKDLDAVEAQLHQLKIAQGEDCRPKRRRVCRSQKITARKSTSRPELVRQSLAWTCFVETPRAEPAPVVPQEGEASGVGSTEDALLLTFRPGPSQRDEEKVIFAAHQLQGPASLWWDHFQATQPEGQPITWARFTAAFRRTHVPAGVVALKKREFRELKQGNRSVMEYLHEFNNLARYAPEDVREDEEKQEKFLAGMDPELSVRLVSGDYPDFQRLVDKSIRLEAKHKELESHKRRLANFRNQQGANQRVRYTNPYPGGSSSQPQQQHQQPRSAPRPQFVPGQGRRDASGPQRLCFNCFEPGHFADKCPKPRRQQGQAPPRSNNGGKDVIRGRVNHVTAEDVLTTPDVIVDTKNLDVILGMNWLAQFQGVVDCARRTVTLYRGPEQPVVFFAPPTSVKSSELHEIGLSEIPIVREFGDVFPEELPGMPPKREIEFRIDLAPGTTPLYKRPYRMAANELAEVKKQLEELKEKGYIRPSTSPWGAPVIFVEKKDKTKRMCVDYRALNEVTIKNKYPLPRIDDLFDQLKGATVFSKIDLRSGYHQLRIREEDIPKTAFTTRYGLYEFTVMSFGLTNAPAFFINLMNKVFMEYLDKFVVVFIDDILIYSQSEEDHQHHLRLVLGKLREHQLYAKLSKCEFWLTEVKFLGHVISAKGVAVDPEAVTAVTDWKQPKTVTQIRSFLGLAGYYQRFIENFSKIARPMTQLLKKEEKFVWSPQCEKAFQTLKEKLVSSPVLILPDTRKDFMVYCDASRQGLGCVLMQDGHVVAYASRQLRAHEGNYPTHDLELAAVVHALKIWRHYLIGNRCEIYTDHKSLKYIFTQSDLNLRQRRWLELIKDYDVGIHYHPGKANVVADALSRKSHCHALNVRGIPPELNQQMEALNLSIVSRGFLAALEAKPTLLDQIREAQKNDPDMHGLLKNMKQGKAAGFTEDEHGTLWNGNREAHESPYSIHPGSTKMYLDLKEKYWWVSMKREIAEFVALCDVCQRVKAEHQRPAGLLQPLQVPEWKWDEIGMDFITGLPKTQGGYDSIWVVVDRLTKVARFIPVKTTYGGNKLAELYFARIVSLHGVPKKIVSDRGSQFTSHFWKKLQEELGTRLNFSTAYHPQTDGQTERLNQILEDMLRACVLDFGKTWDKSLPYAEFSYNNSYQASIQMAPYEALYGRKCRTPLLWDQVGESQVFGTDILREAEAKVRIIRDNLKVAQSRQKSYADNRRCDLEFAVGDFVYLRVTPLRGVHRFQTKGKLAPRYVGPFRIIARRGEVAYQLELPASLGNVHDVFHASQLKKCLRVPSEQADSEQIEVREDLTYVERPVKILDTMERRTRNRVIRFCKVQWSNHAEEEATWEREDELKAAHPDLFASPSESRGRDSV

SEQ ID NO: 19164 - protein, 1095 aa, Oryza sativa
  Clone ID: TF_OSC401832j.C1.p10.fg
MVMAGSVTRRGLDMTGFVLELRGMCVVLGYPHGVDYQARPLPDQEGDDAEPHAGWEVTAVILSGSPERTSLAVTAGGDSFPAACQNAALLAIGTLHQRYPDELQHSPYRYHPRRGGACDYATFRDASSEDDATIVHLARMVEAYDAARIDFHQMVRRGMVKSNLMILELRQENLQLKKNLDAVEAQLHQLKITQGEICRPKRRRVCRSQKITARKSTSRPELVRQSLAWTCFVETPRAEPAPVVPQEGEAFGVGSTEAPSLFAGSVWGFQMVTTRRNAATGDGNQPEGSNHNHQGNPPPPPPPPPPPPPDTNAILTQILAQQANMMNAFLHHLQNPPQQNAPPPPPQHSKLAEFLRIRPPTFSSSNNPVDALDWLHAVGKKLDTVQCSDEEKVVFAAHQLQGPASLWWDHFQATQPEGQPITWARFTAAFRRTHVPAGVVALKKREFRELKQGNRSVMEYLHEFNNLARYAPEDVREDEEKQEKFLAGMDPELSVRLVSGDYPDFQRLVDKSIRLEAKHKELESHKRRLANFRNQQGANQRVRYTNPYPGGSSSQQQQQQQQPRSAPRPQFVSGQGRRDASGPQRLCFNCFEPGHFADKCPKPRRQQGQAPPRSNNGGKDVIRGRVNHVTAEDVLTTPDVIVGTFLVHSIPATILFDSGASHSFISVPFVGRNQLGVERLRNPLLITTPGGVMTAKYYSPAVPIEIQGIPFPSDLILLDTKNLDVILGMNWLAQFQGVVDCARRTVTLYRGPEQPVVFFAPPTKVARFIPVKTTYGGNKLAELYFARIVSLHGVPKKIVSDRGSQFTSHFWKKLQEELGTRLNFSTAYHPQTDGQTERLNQILEDMLRACVLDFGKTWDKSLPYAEFSYNNSYQASIQMAPYEALYGRKWRTPLLWDQVGESQVFGTDILREAEAKVRIIRDNLKVAQSRQKSYADNRRRDLEFAVDDFVYLRVTPLRGVHRFQTKGKLAPRYVGPFRIVARRGEVAYQLELPASLGNVHDVFHVSQLKKCLRVPSEQADSEQIEVREDLTYVERPVKILDTMERRTRNRVIRFCKVQWSNHAEEEATWEREDELKAAHPGLFASSSESRGRDSV

SEQ ID NO: 19165 - protein, 808 aa, Oryza sativa
  Clone ID: TF_OSC401838j.C1.p1.fg
MVTTRRNAVTGDGNQPEGSNHNHQGNPPPPPPPPPPPPPDTNAILTQILAQQANMMTAFLHHLQNPPQQNAPPPPPQHSKLAEFLRIRPPTFSSSNNPVDALDWLHAVGKKLDTVQCSDEEKVIFAAHQLQGPASLWWDHFQATQPEGQPITWARFTAAFRRTHVPAGVVALKKREFRELKQGNRSVMEYLHEFNNLARYAPEDVREDEEKQEKFLAGMDPELSVRLVSGDYPDFQRLVDKSIRLEAKHKELESHKRRLANFRNQQGANQRVRYTNPYPGGSSSQQQQQQQQPRSAPRPQFVVRVPQPQQQQNQQGTRAPRPPTQTVQPGQGRRDAQGQQRLCFNCFEPGHFADKCPKPRRQQGQAPPRPNNGGKDVIRGRVNHVMAEDVLTTPDVIVVTAVTDWKQPKTVTQVRSFLGLAGYYRSVSRQSTNDRPDFSNLSKYQNGNGMKLGWISSPDFQKPKVARFIPVKTTYGGNKLAELYFARIAGPPATLADRWGPPVIPYLAPLPPPARALAPPPPPNPPHPAVPARHKEGEITPRDSLSLSPRFSLSLSLGFARIYSRNPRRRNQWRPRFPRPIPSSPAALSPSRRYIIVPRASLLRFRHSPLTLPVGFVPAPSSSLSAVAAELRFAVVVAPDLLPTRRHLLRLRRVLVDLVRSSVSVADCRSAAVLVDPNRAAAFLRSGLSFPPSSSTRGEPRTVVSLPPSLPSLGRRSVAPEVAAGDHRGAGAPPPVGRAGEAAFGRAPRLPGGPGRQPPAPAGAADAWDPRRRSAAAACTRSTVDREAGAWAPLPWTRSARPLSRLTQ

SEQ ID NO: 19166 - protein, 1244 aa, Oryza sativa
  Clone ID: TF_OSC401845j.C1.p3.gm
MVMPMVTTRRSAATGDGNQPEGSNHHHQGSPPPPPPPPPDTNAILTQILAQQANMMTAFLHHLQNPPQHNAPPPPPQHSKLAEFLRIRPPTFSSSNNPVDALDWLHVVGKKLDTVQCSDEEKVIFAAHQLQGPASLWWDHFQATQPEGQPITWARFTAAFRRTHVPAGVMALKKREFRELKQGNRSVMEYLHEFNNLARYAPEDVREDEEKQEKFLAGMDPELSVRLVSGDYPDFQRLVDKSIRLEAKHKELESHKRRLANFRNQQGANQRVRYTNPYPGGSSSQQQQQQQQPRSAPRPQFVVRVPQPQQQQNQQGTRAPRPPTPTVQPGQGRRDAQGPQRLCFNCFEPGHFADKCPKPRRQQGQAPPRSNNGGKDVIRGRVNHVTAEDVLTTPDVIVGTFLIHSIPATILFDSGASHSFISVPFVGRNQLGVERLRNPLLITTPGGVMTAKYYSPAVPIEIQGIPFPSDLILLDTKNLDIGLLEIPIVREFGDVFPEELPEEDHQHHLRLVLGKLREHQLYAKLSKCEFWLSEVKFLGHVISAKGVAVDPETVTAVTDWKQPKTVTQVRSFLGLAGYYRRFIENFSKIARPMTQLLKKEEKFVWRPQCEKAFKTLKERLDGHVVAYASRQLRPHEGNYPTHDLELAAVVHALKIWRHYLIGNRCEIYTDHKSLKYIFTQSDLNLRQRRWLELIKDYDVGIHYHPGKANVVADALSRKSHCNTLNVRGIPPELNQQMEALNLSIVGRGFLAALEAKPTLLDRIREAQKNDPDMHGLLKNMKQGKAAGFTEDEHGTLWNGNRVCVPDNRELKQLILQEAHESPYSIHPGSTKMYLDLKEKYWWVSMKREIAEFVALCDVCQRVKAEHQRPAGLLQPLQVPEWKWDEIGMDFITGLPKTQGGYDSIWVVVDRLTKVARFIPVKTTYGGNKLAELYFARIVSLHGVPKKIVSDRGSQFTSHFWKKLQEELGTRLNFSTAYHPQTDGQTERLNQILEDMLRACVLDFGKTWDKSLPYAEFSYNNSYQASIQMAPYEALYGRKCRTPLLWDQVGESQVFGTDILREAEAKVRTIRDNLKVAQSRQKSYADNRRRNLEFAVDDFVYLRVTPLRGVHRFQTKGKLAPRYVGPFRIVARRGEVAYQLELPASLGNVHDVFHVSQLKKCLRVPSEQADSEQIEVREDLTYVERPVKILDTMERRTRNRVIRFCKVQWSNHAEEEATWERENELKAAHPDLFASSSESRGRDSV

SEQ ID NO: 19167 - protein, 1801 aa, Oryza sativa
  Clone ID: TF_OSC401848j.C1.p1.fg
MSWHRAGVLLLGAQSCLPVPGVPAVGGIGSVLLSMARMGWKLCHVFRPYTVVMAGSISRRGLDLTGFVLELRGMCVVLGYPHGVDYQGRPLPEQEGDDAEPHAAWEVTTVILTGSPERTSLAVTAGGDSFSAACQNAALLAIGTLHQRYPDELQHSPYRYHPRRGGARDYATFRDASSEDDATIMHLARMVEAYDAARIDFHQMVRRGMVENNMKILELRQENLQLKKDLDTVEAQLHQLKIAQGEVCRPKRRRVCRSQKITARKSTSRPELVRQSLAWTCFVETPRAEPAPVVPQEGEAFGVGSTEDALLLTFRPGPSQRRSANTGDGNQPEGSNHNNHGSPPPPPPPPPPPPPDTNAILTQILAQQANMMAAFLHHIQNPPQHNAPPPPPQHSKLAEFLRIRPPTFSSSNNPVDALDWLHAVGKKLDTVQCSDEEKATQPEGQPITWARFTAAFRRTHVPAGVMALKKREFRELKQGNRSVMEYLHEFNNLARYAPEDVREDEEKQEKFLAGMDPELSVRLVSGDYPDFQRLVDKSIRLEAKHKELESHKRRLANFRNQQGANQRVRYTNPYPGGSSSQQQQQQQPRSAPRPQFMVRVPQPQQQQSQQGTRAPRPPMPAVQPGQGRRDVQGPQRLCFNCFEPGHFADKCPKPRRQQGQAPPRSNNGGKDVIRGRVNHVTAEDVLTTPDVIVGTFLIHSIPATILFDSGASHSFISVPFVGRNQLGVERLRNPLLITTPGGVMTAKYYSPAVPIEIQGIPFPSDLILLDTKNLDVILGMNWLAQFQGVVDCARRTVTLYREPEQPVVFFAPPTSVSSLELYQIGLSEIPIVREFGDVFPEELPGMPPKREIEFRIDLAPGTTPLYKRPYRMAANELAEVKKQLEELKEKGYIRPSTSPWGAPVIFVEKKDKTKRMCVDYRALNEVTIKNKYPLPRIDDLFDQLKGATVFSKIDLRSGYHQLRIREEDIPKTAFTTRYGLYEFTVMSFGLTNAPAFFMNLMNKVFMEYLDRFVVVFIDDILVYSQSEEDHQHHLRLVLGKLREHQLYAKLSKCEFWLSEVKFLGHVISAKGVAVDPETVTAVTDWKQPKTVTQIRSFLGLAGYYRRFIENFSKIARPMTQLLKKEEKFVWSPQCEKAFQTLKEKLVSSPVLILPDTRKDFMVYCDASRQGLGCVLMQDGHVVAYASRQLRPHEGNYPTHDLELAAVVHALKIWRHYLIGNRCEIYTDHKSLKYIFTQSDLNLRQRRWLELIKDYDVGIHYHPGKANVVADALSRKSHYNTLDVRGIPPELSQQMEALNLSIVGRGFLATLEAKPTLLDQIREAQKNDPDMHGLLKNMKQGKAAGFTEDEHGTLWNGNRICVPDNRELKQLILQEAHESPYSIHPGSMKMYLDLKEKYWWVSMKREIAEFVALCDVCQRVKAEHQRPAGLLQPLQVPEWKWDEIGMDFITGLPKTQGGYDSIWVVVDRLTKVARFIPVKTTYGGNKLAELYFARIVSLHGVPKKIVSDRGSQFTSHFWKKLQEELGTRLNFSTAYHPQTDGQTERLNQILEDMLRACVLDFGKTWDKSLPYAEFSYNNSYQASIQMAPYEALYGRKCRTPLLWDQVGESQVFRTDILREAEAKVRTIRDNLKVAQSRQKSYADNRRRNLEFAVDDFVYLRVTPLRGVHRFQTKGKLAPRFMGPFRIIARRGEVAYQLELPASLGNVHDVFHVSQLKKCLRVPSEQADSEQIEVREDLTYVERPVKILDTMERRTRNRVIRFCKVQWSNHAEEEATWEREDELKAAHPDLFASSSESRGRDSV

SEQ ID NO: 19168 - protein, 1803 aa, Oryza sativa
  Clone ID: TF_OSC401855j.C1.p4.fg
MDEVGGRWTFSRANEGYTSCGPMAGSVTRRGLDMTGFVLELRGMCVVLGYPHGVDYQARPLPEQEGEDAEPHAGWEVTAVILSGSPERTSLAVTAGGDSFPAACQNAALLAIGTLHQRYPDELQHSPYRYHPRRGGARDFATFRDASSEDDATVVHLARMVEAYDAARIDFHQMVRRGMVENNMKILELRQENLQLKKDLDALETQLHQLKIAQGEISRPKRRRVCRSQKITARKSTSRPELVRQSLAWTCFVETPRAEPAPVVPQEGEASGVGSSEGALLLTFRPGPSQCSPSLFAGSVWGFQMVTTRRNVNTGEGNQPEGSNPNPQGNPPPPPPPDTNAILTQILAQQANMMNAFLHHLQNPPQQNAPPPPPQHSKLAEFLRIRPPTFSSSNNPVDALDWLHAVGKKLDTVQCSDEEKVIFAAHQLQGPASLWWDHFQATQPEGQPITWTRFTAAFRKTHVPAGVVALKKREFRELKQGNRSVMEYLHEFNNLARYAPEDVREDEEKQEKFLAGMDPELSVRLVSGDYPDFQRLVDKSIRLEAKHKELESHKRRLANFRNQQGANQRVRYTNPYPGGSSSQQQQQQQPRSAPRPQFVVRVPQQQQQQNQQGTRAPRPPTPAVQPVQGRRDAQGPQRLCFNCFEPGHFADKCPKPRRQQGQAPPRSNNGGKDVIRGRVNHVTAEDVLTTPDVIVGTFLVQSIPATILFDSGASHSFISVPFVGRNQLGVERLRNPLLITTPGGVMTAKYYSPAVPIEIQGIPFPSDLILLDTKNLDVILGMNWLAQFQGVVDCARRTVTLYRGPEQPVVFFAPPTAVRSSELHQIELSEIPIVREFGDVFPEELPGMPPKREIEFRIDLAPGTTPLYKRPYRMAANELAEVKKQLEELKEKGYIRPSTSPWGAPVIFVEKKDKTKRMCVDYRALNEVTIKIKYPLPRIDDLFDQLKGATVFSKIDLRSGYHQLRIREEDIPKTAFTTRYGLYEFTVMSFGLTNAPAFFMNLMNKVFMEYLDKFVVVFIDDILIYSQSEEDHQHHLRLVLGKLREHQLYAKLSKCEFWLSEVKFLGHVISAKGVAVDPETVTAVTDWKQPKTVTQIRSFLGLAGYYRRFIENFSKIARPMTQLLKKEEKFVWSPQCEKAFQTLKEKLVSSPVLILPDTRKEFMVYCDASRQGLGCVLMQDGHVVAYASRQLRPHEGNYPTHDLELAAVVHALKIWRHYLIGNRCEIYTDHKSLKYIFTQSDLNLRQRRWLELIKDYDVGIHYHPGKANVVADALSRKSHCNTLNVRGIPPELNQQMEALNLSIVGRGFLAALEAKPTLLDQIREAQKNDPDMHGLLKNMKQGKAAGFTEDEHGTLWNGKRVCVPDSRELKQLILQEAHESPYSIHPGSTKMYLDLKEKYWWVSMKREIAEFVALCDVCQRVKAEHQRPAGLLQPLQVPEWKWDEIGMDFITGLPKTQGGYDSIWVIVDRLTKVARFIPVKTTYGGNKLAELYFARIVSLHGIPKKIVSDRGSQFTSHFWKKLQEELGTRLNFSTAYHPQTDGQTERLNQILEDMLRACVLDFGKTWDKSLPYAEFSYNNSYQASIQMAPYEALYGRKCRTPLLWDQVGESQVFGTDILREAEAKVRIIRDNLKVAQSRQKSYADNRRRDLEFAVDDFVYLRVTPLRGVHRFQTKGKLAPRYVGPFRIIARRGEVAYQLELPASLGNVHDVFHVSQLKKCLRVPSEQADSEQIEVREDLTYVEKPVKILDTMERRTRNRVIRFCKVQWSNHAEEEATWEREDELKAAHPDLFASSSESRGRDSV

SEQ ID NO: 19169 - protein, 1370 aa, Oryza sativa
  Clone ID: TF_OSC401859j.C1.p2.fg
MGWELCHVLRPYAVVMAANLNRRGLDLTGFALELRGMCVVLGYPHGVDYQGKRLPEQDGDDAEPRAAWEVTAMILTGSPKRTSLAVTAGRDSFPATCQNAALLAIGTLHQRYPDELQHSPYRYYPRRGGARDYATFQDASSEDDATIMHLARMVEAYDAARIDFYRMARRGLVENNMKILELRQENLQLKDLDAMEAQLCQLKIAQGEICRPKRRRNPPQHNAPPPPPPPPQHSKLAEFLRIRPPTFSSSNNHVDALDWLHAVGKKLDTVQCNDKEKVIFVTHQLQGPASLWWDHFQATQPEGQPITWARFTAAFQRTHVPAGVVALKKREFRELKQGNRSVMEYLHEFNNLARYAPEDVRKDEEKQEKFLAGMDPELSVRLVSGDYPDFQRLVDKSIRLEAKHKELESHKRRLANFRNQQGANQRIRYTNPYLGGSSSQQQQQQPRPVPRPQYVVRVPQPQQQRQNQQGNRAPRPPAPAMQPGQGRKDAQGQQRLCFNCFEPGHFADKCPKPRRQQGPAPKPRRQPRRQQGPAPPGPNNGGKDATRGRVNHVTAEDVLTTPDVILDTFFIHSIPATILLDSGASHSFISVQFVGRNQLRVAKLRSSLLITTPGGAMTAKYYSPTIPIEIQGISFPSDLILLDTKDLDVILGKNWPDQPVVFFAHPTPTGNSVLHQLGLSEIPVASKFSDVFPEELPGMPPKREIEFRIDLAPGTTPMYKRPYRMAANELAEVKKQLEGLKEKGYIRPSTSPWGAPVIFVEKKDKTKRMCVDYRALNEVTIKNKYPLPRIDDLFDQLKGASVFSKIDLRSGYHQLRIREEDIPKTAFTTRYGLYEFTVMSFGLTNAPAFFMNLMNKVFMEYLDKFVVVFIDDILVYSQSEKEHQQHLRLVLGKLREHQLYAKLSKCEFWLSEVKFLGHVISAKGVAVAPETVTAVTDWKQPKTVTQVHSFLGLAGYYRRFIENFSKIARPMTQLRKEEKFVWSPQCERAFQTLKEKLVSSPVLILPDTRKDFLVYCEASRQGLGCVLMQEGHVVAYASRQLRPHEGNYPTHDLELAAVRRWLELIKDYDVGIHYHPGKANVVADALSRKGHCNALCVRGIPPELNQQLEALNLSVVSHGFLAALEAKPTLLDHIRKAQKNDPDIQEILKNMKQGKATGFTEDEHGTLWNGNRVCVPDNKELKQLILQEALMLRACVLDFGRTWDKSLPYAEFSYNNSYQASIQMAPYEALYGRKCRTPLLWDQVGESQVFGTDILREAEAKVRTIRDNLKVAQSRQKMDDFVYLRVTPQRGVHRFQTKGKLAPRYVGPFRIIARRGEVAYQLELPTSLGNVHDVFHVSQLKKCLRVPSEQADSEQIDVREACEDSGHNGA

SEQ ID NO: 19170 - protein, 1756 aa, Oryza sativa
  Clone ID: TF_OSC402412j.C1.p1.fg
MDISRANEGYTSCGPVVEMSWHRAGVLLLGAQSCLPIPEVPAVGGIGSVLLSMARMGWKLCHVFRLYTVVMAGSVTRRGLDMTGFVLELRGMCVVLGYPHGVDYQARPLPEQEGDDAEPHAGWEVTAVILSGSPERTSLAVTAGGDSFPAACQSAALLAIGTLHQRYPDELQHSPYRYHPRRGGARDYATFRDASSEDDATIVHLARMVEAYDAARIDFHQMVRRGMVENNMKILELRQENLQLKKDLDAVEAQLHQLKIAQGEVCRPKRRRVCRSQKITARKSTSRPELVRQSLAWTCFVEIPRAEPAPVVPQEGEASGVGSTEDALLLTFRPGPSQRRSANTGDGNQPEGSNHHHQGSPPPPPPPPPPPPPDTNAILTQILAQQANMMTAFLHHLQNPPQHNAPPPPPQHSKLAEFLRIRPPTFSSSNNPVDALDWLHAVGKKLDTVQCSDEEKVIFAAHQLQGPASLWWDHFQATQPEGQPITWARFTAAFRRTHVPAGVVALKKREFRELKQGNRSVMEYLHEFNNLARYAPEDVREDEEKQEKFLAGMDPELSVRLVSGDYPDFQRGSSSQQQQQQQQPRSAPRPQFVVRVPQPQQQQNQQGTRAPRPPTPTVQPGQGRRDAQGPQRLCFNCFEPGHFADKCPKPRRQQGQAPPRSNHGGKDVIRGRVNHVTAEDVLTTPDVIVGTFLIHSIPATILFDSGASHSFISVPFVGRNQLGVERLRNPLLITTPGGVMTAKYYSPAVPIEIQGIPFPSDLILLDTKNLDVILGMNWLAQFQGVVDCARRTVTLYRGPEQPVVFFAPPTSVSSSELHQIGLSEIPIVREFGDVFPEELPGMPPKREIEFRIDLAPGTTPLYKRPYRMAANELAEVKKQLEELKEKGYIRPSTSPWGAPVIFVEKKDKTKRMCVDYRALNEVTIKNKYPLPRIDDLFDQLKGATVFSMIDLRSGYHQLRIREEDIPKTAFTTRYGLYEFTVMSFGLTNAPAFFMNLMNKVFMEYLDKFVVVFIDDILIYSQSEEDHQHHLRLVLGKLREHQLYAKLSKCEFWLSEVKFLGHVISAKGVAVDPETVTAVTDWKQPKTVTQVRSFLGLAGYYRRFIENFSKIARPMTQLLKKEEKFVWSPQCEKAFKTLKEKLVSSPVLILPDTRKDFMVYCDASRQGLGCVLMQDGHVVAYASRQLRPHEGNYPTHDLELAAVVHALKIWRHYLIGNRCEIYTDHKSLKYIFTQSDLNLRQRRWLELIKDYDVGIHYHPGKANVVADALSRKSHCNTLNVRGIPLELSQQMEALNLSIVGRGFLAALEAKPTLLDQIREAQKNDPDMHGLLKNMKQGKAAGFTEDEHGTLWNGNRVCVPDNRELKQLILQEAHESPYSIHPGSTKMYLDLKEKYWWVSMKREIAEFVALCDVCQRVKAEHQRPAGLLQPLQVPEWKWDEIGMDFITGLPKTQGGYDSIWVVVDRLTKVARFIPVKTTYGGNKLAELYFARIVSLHGVPKKIVSDRGSQFTSHFWKKLQEELGTRLNFSSAYHPQTDGQTERLNQILEDMLRACVLDFGKTWDKSLPYAEFSYNNSYQASIQMAPYKRCMGANPNTLLWIKLGKAKCSVDDFVYLRVTPLRGVHRFRTKGKLAPRYVGPFRIVARRREVAYQLELPASLGNVHDVLHVSQLKKCLRVPSEQADSEQIEVREDLTYVERPVKILDTMERRTRNRVIHFCKVQWSNHVEEEATWEREDELKAAHPDLFTSSSESRSRDSF

SEQ ID NO: 19171 - protein, 1849 aa, Oryza sativa
  Clone ID: TF_OSC402669j.C1.p3.fg
MEVDEVGGRWTFSRANEGYTSCGPVVEMSWHRAGVLLLGAQSCLPVPGLPPVGGIGSVLLSMARMGWKLCHVFRLYTVVMAGSVTRRGLDMTGFVLELRGMCVVLGYPHGVDYQARPLPDQEGDDAEPHAGWEVTAVILSGSPERTSLAVTAGGDSFPAACQNAALLAIGTLHQRYPDELQHSPYRYHPRRGGACDHATFRDASSEDDATIVHLARMVEAYDAARIDFHQMVRRGMVENNMKILELRQENLQLKKDLDTVEAQLHQLKIAQGEVCRPKRRRICRSQKITARKSTSRPELVRQSLAWTCFVETPRAEPAPVVPQEGEASGVGSTEGALLLTFRPGPSQRRNANTGDGNQPEGSNHNHQGNPPPPPPPPPPPPPDTNAILTQILAQQANMMTAFLHHLQNPPQQNAPPPPPQHSKLAEFLRIRPPTFSSSNNPVDALDWLHAVGKKLDTVQCSDEEKVIFAAHQLQGPASLWWDHFQATQPEGQPITWARFTAAFRRTHVPAGVVALKKREFRELKQGNRSVMEYLHEFNNLARYAPEDVREDEEKQEKFLAGMDPELSVRLVSGDYPDFQRLVDKSIRLEAKHKELESHKRRLANFRNQQGANQRVRYTNPYPGGSSSQQQQQQQQPRSAPRPQFVVRVPQPQQQQNQQGTRAPRPPTPTVQPGQGRRDAQGQQRLCFNCFEPGHFADKCPKPRRQQGQAPPRSNNGGKDVIRGRVNHVTAEDVLTTPDVIVGTFLVHSIPATILFDSGASHSFISVPFVGRNQLGVERLRNPLLITTPGGVMTAKYYSPAVPIEIQGIPFPSDLILLDTKNLDVILGMNWLAQFQGVVDCARRTVTLYRGPEQPVVFFAPPTSVRSSELHQIELSEIPIVREFGDVFPEELPGMPPKREIEFRIDLAPGTTPLHKRPYRMAANELAEVKKQLEVLKEKGYIRPSTSPWGAPVIFVEKKDKTKRMCVDYRALNEVTIKNKYPLPRIDDLFDQLKGATVFSKIDLRSGYHQLRIRKEDIPKTAFTTRYGLYEFTVMSFGLTNAPAFFMNLMNKVFMEYLDKFVVVFIDDILIYSQSEEDHQHHLRLVLGKLREHQLYAKLSKCEFWLSEVKFLGHVISAKGVAVDPETVTAVTDWKQPKTVTQVRSFLGLAGYYRRFIENFSKIARPMTQLLKKEEKFVWSPQCEKAFQTLKEKLVSSPVLILPDTRKDFMVYCDASRQGLGCVLMQDGHVVAYASCQLRPHEGNYPTHDLELAAVVHALKIWRHYHIGNRCEIYTDHKSLKYIFTQSDLNLRQRRWLELIKDYDVGIHYHPGKANVVADALSRKSHCNTLNVRGIPPELSQQMEALNLSIVGRGFLAALEAKPTLLDQIREAQKNDPDMHGLLKNMKQGKATGFTEDEHGTLWNGKRVCVPDNRELKQLILQEAHESPYSIHPGSTKMYLDLKEKYWWVSMKREIAEFVALCDVCQRVKAEHQRPAGLLQPLQVPEWKWDEIGMDFITGLPKTQGGYDSIWVVVDRLTKVARFIPVKTTYGGNKLAELYFARIVSLHGVPKKIVSDRGSQFTSHFWKKLQEELGTRLNFSTAYHPQTDGQTERLNQILEDMLRACVLDFGKTWDKSLPYAEFSYNNSYQASIQMAPYEALYGRKCRTPLLWDQVGESQVFGTDILREAEAKVRIIRDNLKVAQSRQKSYADNRRRDLEFAVGDFVYLRVTLLRGVHRFQTKGKLAPRYVGPFRINARRGEVAYQLELPASLGNVHDVFHVSQLKKCLRVPSEQADSEQIEVREDLTYVERPMKILDTMERRTRNRVIRFCKVQWSNHAEEEATWEREDELKAAHPDLFASSSESRGRDSV

SEQ ID NO: 19172 - protein, 1767 aa, Oryza sativa
  Clone ID: TF_OSC404680j.C1.p3.gm
MVTTRRTAVTGDGNQPEGSNPNHQGNPPPPPPPPPPPPPDTNAILTQILAQQANMMTAFLHHLQNPPQQNAPPPPPQHSKLAEFLRIRPPTFSSSNNPVDALDWLHAVGKKLDTVQCSDEEKVIFAAHQLQGPASLWWDHFQATQPEGQPITWARFTAAFRRTHVPAGVVALKKREFRELKQGNRSVMEYLHEFNNLARYAPEDVREDEEKQEKFLAGMDPELSVRLVSGDYPDFQRLVDKSIRLEAKHKELESHKRRLANFRNQQGANQRVRYTNPYPGGSSSQQPQQQQPRSAPRPQFVVRVPQPQQQQNQQGTRAPRPPTPAVQPGQGRRDAQGQQRLCFNCFEPGHFADKCPKPRRQQGQAPPRPNNGGKDVIRGRVNHVTAEDVLTTPDVIVGLSEIPIVREFGDVFPEELPGMPPKREIEFRIDLAPGTTPLHKRPYRMAANELAEVKKQLEELKEKGYIRPSTSPWGAPVIFVEKKDKTKRMCVDYRALNEVTIKNKYPLPRIDDLFDQLKGATVFSKIDLRSGYHQLRIREEDIPKTAFTTRYGLYEFTVMSFGLTNAPAFFMNLMNKVFMEYLDKFVVVFIDDILIYSQSEEDHQHHLRLVLGKLREHQLYAKLSKCEFWLSEVKFLGHVISAKGVAVDPETVTAVTDWKQPKTVTQVRSFLGLAGYYRRFIENFSKIARPMTQLLKKEEKFVWSPQCEKAFQTLKEKLDGHVVAYASRQLRPHEGNYPTHDLELAAVVHALKIWRHYLIGNRCEIYTDHKSLKYIFTQSDLNLRQRRWLELIKDYDVGIHYHPGKANVVADALSRKSHCNTLNVRGIPPELSQQMEALNLSIVGRGFLAALEAKPTLLDQIREAQKNDPDMHGLLKNMKQGKAAGFTEDEHGTLWNGKRSLWPYVMCASVSRQNTNDRPVFSNLSKYQNGNGMKLGWISSPDFQKPKVDMIPYGTAYHPQTDGQTERLNQILEDMLRACVLDFGKTWDKSLPYAEFSYNNSYQASIQMAPYEALYGRKCRTPLLWDQVGESQVFGTDILREAEAKADSEQIEVREDLTYVERPMKILDTMERRTRNRAGPPATLADGWDPPVISFLAPRPPPARALAPPPPRIPPHPAVPARIKEGEITPRDSLSRFPLFSLSLSLGFVRFESRNRRRRLQWRPRSPRPIPPSPAAFSPSRCYIFVPRAPLFRFRRSPLALAVGFVLAPCTSLSAVAVDLRFAADVAPGFLPTRRHLHRLRRVVADPVRPFASPADRRSSVVLAVPNRAAAFLRFGRRFRRRCSPGVSRGLPFAFPLPFSLSGAAPPRRWSPAATIGARVRRLPSAVPARPPSGRAPRLPGGPGRQPPAPAGAADAWDPRRRPPPAACSRSTVDREADAWAPPPVDPMADRDEEQILYDTIAEGSSQYWNEEEGNKDPNQYLNEEGNVERDAEGNQEGNVQRDAEGNEEEEASGRQTRGKGVIPWKIGFKEDIHTYRSRMRSKRDTEAKIADLEYRVSSYELSMQEEVASRASTGQVGSQSMDAMQTLDETTCLVDDITQRTPCELYIPFKNLSIKVASGMAIPMDPSGTYHCRLIPAGYSKVEVELVEGATSSSLGDKRRLVHHLLRLRHLLLRLLHRLLRRLLHRLLRKLLVRLLPSQGPPKLHHLPPQATKKAKVDTAKNKDLGYDCTQEELDAYVALEVRRQLKPRSPEKKIPIVPSVRNFFRGMSAPAKEAIKLSDYERTLKKASSEKSKPVPQLGEQPNQEIEPLVTVKILEYKNLLMTPG

SEQ ID NO: 19173 - protein, 1791 aa, Oryza sativa
  Clone ID: TF_OSC404798j.C1.p16.fg
MDEVGGRWTFSRANEGYTSCGPMAGSVTRRGLDMTGFVLELRGMCVVLGYPHGVDYQARPLPDQEGDDAEPHAGWEVTAVILSGSPERTSLAVTAGGDSFPAACQNAALLAIGTLHQRYPDELQHSPYRYHPRRGGACDYATFRDASSEDDATIVHLARMVEAYDAARIDFHQMVRRGMVENNMKILELRQENLQLKKDLDAVEAQLHQLKIAQGEICRPKRRRVCRSQKITARKSTSRPELVRQSLAWTCFVETPRAEPAPVVPQEGEASGVGSTEVVWGMVMPMVTTRRNAVTGDGNQPEGSNHNHQGNPPPPPPPPPPPPPDTNAILTQILAQQANMMTAFLHHLQNPPQQNAPPPPPQHSKLAEFLRIRPPTFSSSNNPVDALDWLHAVGKKLDTVQCSDEEKVVFAAHQLQGPASLWWDHFQATQPEGQPITWARFTAAFRRTHVPAGVVALKKREFRELKQGNRSVMEYLHEFNNLARYAPEDVREDEEKQEKFLAGMDPELSVRLVSGDYPDFQRLVDKSIRLEAKHKELESHKRRLANFRNQQGANQRVRYTNPYPGGSSSQQQQQQQQPRSAPRPQFVVRIPQPQQQQNQQGTRAPRPPTPTVQSGQGRRDAQGQQRLCFNCFEPGHFADKCPKPRRQQGQAPPRSNNGGKDVIRGRVNHVTAEDVLTTPDVIVGTFLVHSIPATILFDSGASHSFISVPFVGRNQLGVERLRNPLLITTPGGVMTAKYYSPAVPIEIQGIPFSSDLILLDTKNLDVILGMNWLAQFQGVVDCARRTVTLYRGPEQPVVFFAPPTSVRSSGLHQIGLSEIPIVREFGDVFPEELPGMPPKREIEFRIDLAPGTTPLYKRPYRMAANELAEVKRQLEELKEKGYIRPSTSPWGAPVIFVEKKDKTKRMCVDYRALNEVTIKNKYPLPRIDDLFDQLKGATVFSKIDLRSGYHQLRIREEDIPKTAFTTRYGLYEFTVMSFGLTNAPAFFMNLMNKVFMEYLDKFVVVFIDDILIYSQSEEDHQHHLRLVLGKLREHQLYAKLSKCEFWLSEVKFLGHVISAKGVAVDPETVTAVTDWKQPKTVTQVRSFLGLAGYYRRFIENFSKIARPMTQLLKKEEKFVWSPQCEKAFQTLKEKLVSSPVLILPDTRKDFMVYCDASRQGLGCMLMQDGHVVAYASRQLRPHEGNYPTHDLELAAVVHALKIWRHYLIGNRCEIYTDHKSLKYIFTQSDLNLRQRRWLELIKDYDVGIHYHPGKANVVADALSRKSHCNTLNVRGIPPELSQQMEALNLSIVGRGFLAALEAKPILLDQIREAQKNDPDMHGLLKNMKQGKAAGFTEDEHGTLWNGKRVCVPHNRELKQLILQEAHESPYSIHPGSTKMYLDLKEKYWWVSMKREIAEFVALCDVCQRVKAEHQRPAGLLQPLQVPEWKWDEIGMDFITGLPKTQGGYDSIWVVVDRLTKVARFIPVKTTYGENKLAELYFARIVSLHGVPKKIVSDRGSQFTSHFWKKLQEELGTRLNFSTAYHPQTDGQTERLNQILEDMLRACVLDFGKTWDKSLPYAEFSYNNSYQASIQMAPYEALYGRKCRTPLLWDQVGESQVFGTDILREAEAKVRIIRDNLKVAQSRQKSYADNRRRDLEFAVDDFVYLRVTPLRGVHRFQTKEKLAPRYVGPFRIVARRGEVAYQLELPASLGNVHDVFHVSQLKKCLRVPSEQADSEQIEVREDLTYVERPVKILDTMERRTRNRVIRFCKVQWSNHAEEEATWEREDELKAAHPDLFASSSESRGRDSV

SEQ ID NO: 19174 - protein, 405 aa, Oryza sativa
  Clone ID: TF_OSC405314j.C1.p2.fg
MMTAFLHHLQNPPQQNAPPPPPQHSKLAEFLRIRPPTFSSSNNPVDALDWLHAVGKKLDTVQCSDEEKVVFAAHQLRGPASLWWDHFQATQPGEQPITWARFTAAFRRTHVPAGVVALKKREFRELKQGNRSVMEYLHEFNNLARYAPEDVREDEEKQEKFLAGMDPELSVRLVSGDYPDFQRLVDKSIRLEAKHKELESHKRRLANFRNQQGANQRVRYTNPYPGGSSSQQQQQQQQPRSAPRPQFVVRVPQPQQQQNQQGTRAPRPLTPTVQPGQGRRDASGPQRLCFNCFEPGHFADKCPKPRRQQGQAPPRSNNGGKDVIRGRVNHVTAEDVLTTPDVIVEKKDKTKRMCVDYRALNEVTIKNKYPLPRIDDLFDQLKGRPSTPSPSGVGKVAGTSIVCQA

SEQ ID NO: 19175 - protein, 709 aa, Oryza sativa
  Clone ID: TF_OSC405532j.C1.p2.fg
MSWHRAGVLLLGAQSCLPVPGVPAMAGSVTRRGLDMTGFVLELRGMCVVLGYPHGVDYQGRPLPEQEGDDGEPHAAWEVTAVILAGSPERTSLAVTAGGDSFPAASQSAALLAIGTLHQRYPDELQHSPYRYHPRRGGARDYATFRDASSEDDATIVHLARMVEAYDAARIDFHQMVRRGMVENNLKILELRQENLQLKKDLDAVEAQLHQLKIAQGEVCRPKRRRVCRSQKITARKSTSRPELVRQSLAWTCFVETPRAEPAPVVPQEGEASGVGSTEDALLLTFRPGPSQRRSANTGDGNQPEGSNHHHQGSPPPPPPPPPPPPPDTNAILTQILAQQANMMTAFLHHLQNPPQHNAPPPPPQHSKLAEFLRIRPPTFSSSNNPVDALDWLHAVGKKLDTVQCSDEEKVIFAAHQLQGPASLWWDHFQATQPEGQPITWARFTAAFRRTHVPAGVVALKKREFRELKQGNRSVMEYLHEFNNLARYAPEDVREDEEKQEKFLAGMDPELSVRLVSGDYPDFQRLVDKSIRLEAKHKELESHKRRLANFRNQQGANQRIRYTNPYPGGSSSQQQQQQQQPRFAPRPQFVVRVPQPQQQQNQQGTRAPRPPTPTVQPGQGRRDAQGPQRLCFNCFEPGHFADKCPKLRRQQGQAPSRSNNGEKDVIWGRVNHVTAEDVLTTPDVIVGSSETCFRKNYPVCRPNERLSSG

SEQ ID NO: 19176 - protein, 1809 aa, Oryza sativa
  Clone ID: TF_OSC405754j.C1.p5.fg
MDEVGGRWTFSRANEGYTSCGPMAGSVTRRGLDMTGFVLELRGMCVVLGYPHGVDYQARPLPEQEGEDAEPHAGWEVTAVILSGSPERTSLAVTAGGDSFPAACQNAALLAIGTLHQRYPDELQHSPYRYHPRRGGARDYATFRDASSEDDATVVHLARMVEAYDAARIDFHQMVRRGMVENNLKILELRQENLQLKKDLDALEAQLHQLKIAQGEDSRPKRRRVCRSQKITARKSTSRPELVRQSLAWTCFVETPRAEPAPVVPQEGEASGVGSSEGALLLTFRPGPSQRSPSLFAGSVWGFQMVTTRRNVNTGEGNQPEGSNPNHQGNPPPPPPPPPPPPPDTNAILTQILAQQANMMNAFLHHLQNPPQQNAPPPPPQHSKLAEFLRIRPPTFSSSNNPVDALDWLHAVGKKLDTVQCSDEEKVVFAAHQLQGPASLWWDHFQAAQPEGQPITWARFTAAFRRTHVPAGVVALKKREFRELKQGNRSVMEYLHEFNNLARYAPEDVREDEEKQEKFLAGMDPELSVRLVSGDYPDFQRLVDKSIRLEAKHKELESHKRRLANFRSQQGANQRVRYTNPYPGGSSSQQQQQQQPRPAPRPQFVVRVPQPQQQQNQQGTRAPRPPTPAVQPGQGRRDAQGQQRLCFNCFEPGHFADKCPKPRRQQGQAPPRSNNGGKDVIRGRVNHVTAEDVLTTPDVIVGTFLVHSIPATILFDSGASHSFISVPFVGRNQLGVERLRNPLLITTPGGVMTAKYYSPAVPIEIQGIPFPSDLILLDTKNLDVILGMDWLAQFQGVVDCARRTVTLYRGPEQPVVFFAPPTSVRSSELHQIGLSEIPIVREFGDVFPEELPGMPPKREIEFRIDLVPGTTPLHKRPYRMAANELAEVKKQLEELKEKGYIRPSTSPWGAPVIFVEKKDKTKRMCVDYRALNEVTIKNKYPLPRIDDLFDQLKGATVFSKIDLRSGYHQLRIREEDIPKTAFTTRYGLYEFTVMSFGLTNAPAFFMNLMNKVFMEYLDKFVVVFIDDILIYSQSEEDHQHHLRLVLGKLREHQLYAKLSKCEFWLSEVKFLGHVISAKGVAVDPETVTAVTDWKQPKTVTQIRSFLGLAGYYRRFIENFSKIARPMTQLLKKEEKFVWSPQCEKAFQTLKEKLVSSPVLILPDTRKDFMVYCDASRQGLGCVLMQDGHVVAYASRQLRPHEGNYPTHDLELAAVVHALKIWRHYLIGNRCEIYTDHKSLKYIFTQSDLNLRQRRWLELIKDYDVGIHYHPGKANVVADALSRKGHCNALNVRSIPPELNQQMEALNLSIVGRGFLAALEAKPTLLDQIREAQKNDPDMHGLLKNMKQGKAAGFTEDEHGTLWNGKRVCVPDSRELKQLILQEAHESPYSIHPGSTKMYLDLKEKYWWVSMKREIAEFVALCDVCQRVKAEHQRPAGLLQPLQVPEWKWDEIGMDFITGLPKTQGGYDSIWVIVDRLTKVARFIPVKTTYGGNKLAELYFARIVSLHGVPKKIVSDRGSQFTSHFWKKLQEELGTRLNFSTAYHPQTDGQTERLNQILEDMLRACVLDFGKTWDKSLPYAEFSYNNSYQASIQMAPYEALYGRKCRTPLLWDQVGESQVFGTDILREAEAKVRIIRDNLKVAQSRQKSYADNRRRDLEFAVDDFVYLRVTPLRGVHRFRTKGKLAPRYVGPFRITARRGEVAYQLELPASLGNVHDVFHVSQLKKCLRVPSEQADSEQIEVREDLTYVERPVKILDAMERRTRNRVIRFCKVQWSNHAEEEATWEREDELKAAHPDLFASSSESRGRDSV

SEQ ID NO: 19177 - protein, 1757 aa, Oryza sativa
  Clone ID: TF_OSC408104j.C1.p1.fg
MDEVGGRWTFSRANEGYTSCGPMAGSVTRRGLDMIGFVLELRGMCVVLGYPHGVDYQARPLPEQEGEDAEPHAGWEVTVVILSGSPERTSLAVTAGGDSFPAACQNAALLAIGTLHQRYPDELQHSPYRYHPRRGGARDFATFRDASSEDDATVVHLARMVEAYDAARIDFHQMVRRGMVENNMKILELRQENLQLKKDLDALEAQLHQLKIAQGEDSRPKRRRVCRSQKITARKSTSRPELVRQSLAWTCFVETPRAEPAPVVPQEGEASGVGSSEAPSLFAGSVWGFQMVTTRRNVNTGEGNQPEGSNPNPQGNPPPPPPPDTNAILTQILAQQANMMNAFLHHLQNPPQQNAPPPPPQHSKLAEFLRIRPPTFSSSNNPVDALDWLHAVGKKLDTVQCSDEEKVVFAAHQLQGPASLWWDHFQATQPEGQPITWARFTAAFRRTHVPAGVVALKKREFRELKQGNRSVMEYLHEFNNLARYAPEDVREDEEKQEKFLAGMDPELSVRLVSGDYPDFQRLVDKSIRLEAKHKELESHKRRLANFRNQQGANQRVRYTNPYPGGSSSQQQQQQPRPAPRPQFVVRVPQPQQQQNQQGTRAPRPPTPAGQPVQGRRDASGPQRLCFNCFEPGHFADKCPKPRRQQGQAPPRPNNGGQGVIRGRVNHVTAEDVLTTPDVIVGTFLVHSIPATILFDSGASHSFISVPFVGRNQLGVERLRNPLLITTPGGVMTAKYYSPAVPIEIQGIPFPSDLILLDTKNLDVILGMNWLAQFQGVVDCARRTVTLYRGPEQPVVFFAPPTSVRSSELHQIELSEIPVVREFGDVFPEELPGMPPKREIEFRIDLAPGTTPLYKRPYRMAANELAEVKKQLEELKEKGYIRPSTSPWGAPVIFVEKKDKTKRMCVDYRALNEVTIKNKYPLPRIDDLFDQLKGATVFSKIDLRSGYHQLRIREEDIPKTAFTTRYGLYEFTVMSFGLTNAPAFFMNLMNKVFMEYLDKFVVVFIDDILIYSQSEEDHQHHLRQVLGKLREHQLYAKLSKCEFWLSEVKFLGHVISSKGVAVDPETVTAVTDWKQPKTVTQVRSFLGLAGYYRRFIENFSKIARPMTQLLKKEEKFVWSPQCEKAFQTLKEKLVSSPVLILPDTRKDFMVYCDASRQGLGCVLMQDGHVVAYASRQLRPHEGNYPTHDLELAAVVHALKIWRHYLIGNRCEIYTDHKSLKYIFTQSDLNLRQRRWLELIKDYDVGIHYHPGKANVVADALSRKSHCNTLNVRGIPPELNQQMEALNLNIVGRGCLAALEAKPTLLDQIREAQKNDPDMHGLLKNMKQGKAAGFTEDEHGTLWNGKRVCVPDSRELKQLILQEAHESPYSIHPGSTKMYLDLKEKYWWVSMKREIAEFVALCDVCQRVKAEHQRPAGLLQPLQVPEWKWDEIGMDFIPGLPKTQGGYDSIWVIVDRLTKVARFIPVKTTYGGNKLAELYFARVVSLHGVPKKIVSDRGSQFTSHFWKKLQEELGTRLNFSTAYHPQTDGQTERLNQILEDMLRACVLDFGKTWDKSLPYAEFSYNNSYQASIQMAPYEALYGRKCRTPLLWDQAGESQVFGTDILREAEAKVRIIRDNLKVAQSRQKSYADNRRRDLEFAVDDFVYLRVTPLRGVHRFQTKGKLAPRYVGPFRIIARRGEVAYQLELPASLGNVHDVFHVSQLKKCLRVPSEQADSEQIEVREDLTYVEKPVKILDTMERRTRNRVIRFCKVQWSNHAE

SEQ ID NO: 19178 - protein, 893 aa, Oryza sativa
  Clone ID: TF_OSC408351j.C1.p6.fg
QVQTTTVDAAGHLQTKTKEKSNILKPGQGRRDVQGQQRLCFNCFEPGHFADKCPKPRRQQGQAPPRPNNGGKDVIRGRVNHVTAEDVLTTPDVIVGVVDCARRTVTLYRGPEQPVVFFAPPTSVGSSELHQIGLSEIPIVSEFGDVFPEELPGMPPKREIEFWIDLAPGTTPLYKRPYRMAANELAEVKKQLEELKEKGYIWPSTSPWGAPVIFVEKKDKTKRMCVDYRALNEVTIKKQLKGATVFSKIDLRSGYHQLRIREEDIPKTVFTTRYGLYEFTVMSFGLTNAPAFFMNLMNKVFMVYLDKFVVVFIDDILVYSQSEEDHQQHLRLVLGKLREHQLYAKLSKCEFWLSKVKFLGHVISAKGVAVDPETVTAVTDWKQPKTVTQVRNFLGLAGYYRRFIENFSKIARPMTQLLKKEEKFVWSPQCEKAFQTFKEKLVSPPVLILPDTRKDFMVYCDASRQGLGCVLMQEGHVVAYASCQLWPHEGNYPTHDLELAAVGKAAGFTEDEHGTLWNGNRVCVPNDKELKQLILQEAHESPYSIHPGSTKMCLDLKEKYWWVSIKREIAEFVALCDVCQRVKAEHQRPAGLLQPLQVPEWKWVEIGMNFITGLPKTQGCYDSIWVVVDRLTKVARFIPVKTTYGGNKLAELYFARIVSLHGVPKKIVSDRGSQFTSHFWKKLQEELDFGKTWDKSLPYAEFSYNNSYQASIQMAQYEALYGRKCRTPLLWDQVGESQVFGTDILREAEAKVRTIRENLKVAQSRQKSYADNRRRDLEFAVDDFVFLRVTPLRGVHWFQTKGKLAPRFVGPFRIIARRGEVAYQLELPASLGNVHDVFHVSQLKKCLRVPSEQADSEKIEVREDLTYVERPVKILDTMERRTRNQVIRFCKVQ

SEQ ID NO: 19179 - protein, 1538 aa, Oryza sativa
  Clone ID: TF_OSC408405j.C1.p4.fg
MSWHRAGVLLLGVQSCLPVPGVPAVGGIGSVLLSMARMGWKLCHVFRLYTVVMLTTRRSAATGDGNQPEGSNHHHQGSPPPPPPPPPPPPPDTNAILTQILAQQANMMTAFLHHLQNSPQHNAPPPPPQHSKLAEFLRIRPPTFSSSNNPVDALDWLHAVGKKLDTVQCSDEEKATQPEGQPITWARFTAAFRRTHVPAGVMALKKREFRELKQGNRSVMEYLHEFNNLARYAPEDVREDEEKQEKFLAGMDPELSVRLVSGDYPDFQRLVDKSIRLEAKHKELESHKRRLANFRNQQGANQRVRYTNPYPGGSSSQQQQQQQQPRSAPRPQFVVRVPQPQQQQNQQGTRAPRPPTPTVQPGQGRRDAQGPQRLCFNCFEPGHFADKCPKPRRQQGQAPPRSNNGGKDVIRGRVNHVTAEDVLTTPDVIVGTFLIHSIPATILFDSGASHSFISVPFVGRNQLGVERLRNPLLITTPGGVMTAKYYSPAVPIEIQGIPFPSDLILLDTKNLDVILGMNWLAQFQGVVDCARRTVTLYRGPEQPVVFFAPPTSVSSSELHQIGLSEIPIVREFGDVFPEELPGMPPKRQIEFRIDLAPGTTPLYKRPYRMAANELAEVKKQLEELKEKGYIRPSTSPWGAPVIFVEKKDKTKRMCVDYRALNEVTIKNKYPLPRIDDLFDQLKGATVFSKIDLRSGYHQLRIRDEDIPKTAFTTRYGLYEFTVMSFGLTNAPAFFMNLMNKVFMEYLDKFVVVFIDDILVYSQSEEDHQHHLRLVLGKLREHQLYAKLSKCEFWLSEVKFLGHVISAKGVAVDPETVTAVIDWKQPKIVTQVRSFLGLAGYYRRFIENFSKIARPMTQLLKKEEKFVWSPQCEKAFKTLKEWLVSSPVLILPDTRKDFMVYCDASRQGLGCVLMQDGHVVAYASRQLRPHEGNYPTHDLELAAVVHALKIWRHYLIGNRCEIYTDHKSLKYIFTQSDLNLRQRRWLELIKDYDVGIHYHPGKANVVADALSRKSHCNTLNVRGIPPELNQQMEALNLSIVGRGFLAALEAKPTLLDRIREAQKNDPDMHGLLKNMKQGKAAGFTEDEHGTLWNGNRVCVPDNRELKQLILQEAHESPYSIHPGSTKMYLDLKEKYWWVSMKREIAEFVALCDVCQRVKAEHQRPAGLLQPLQVPEWKWDEIGMDFITGLPKTQGGYDSIWVVVDRLTKVARFIPVKTTYGGNKLAELYFARIVSLHGVPKKIVSDRGSQFTSHFWKKLQEELGTRLNFSTAYHPQTDGQTERLNQILEDMLRACVLDFGKTWDKSLPYAEFSYNNSYQASIQMAPYEALYGRKCRTPLLWDQVGESQVFGTDILREAEAKVRTIRDNLKVAQSRQKSYADNRRRNLEFAVDDFVYLRVTPLRGVHRFQTKGKLAPRYVGPFRIVARRGEVAYQLDLPASLGNVHDVFHVSQLKKCLRVPSAQADSEQIEVREDLTYVERPVKILDTMERRTRNRVIRFCKVQWSNHAEEEATWEREDELKAAHPDLFASSSESRGRDSV

SEQ ID NO: 19180 - protein, 1713 aa, Oryza sativa
  Clone ID: TF_OSC409045j.C1.p3.fg
MSWHRAGVLLLGAQSCLPVPGVPAVGGIGSVLLSMARMGWKLCHVFRPYTMVMAGSVSRRGLDMTGFVLELRGMCVVLGYPHGVDYQGRPLPEQEGDDAEPHAAWERYPDELQHSPYRYHPRRGGARDYATFWDASSEDDATIMHLARMVEAYDAARIDFHQMVRRGMVENDLKILELRQENLQLKKDLDAVEAQLHQLKITQGEVCRPKRRRVCRSQKITARKSTSRPELVRQSLAWTCFVETPRAEPAPVVPQEGEASGVGSTEDALLLTFRPGPSQWRNAATSDGNQPEGSNHNNHGSPPPPPPPPPPPPPDTNAILTQILAQQANMMAAFLHHIQNPPQHNAPPPPPQHSKLAEFLRIRPPTFSSSNNPVDALDWLHAVGKKLDTVQCSDEEKVVFAAHQLQGPASLWWDHFQATQPEGQPITWARFTAAFRRTHVPAGVMALKKREFRELKQGNRSVMEYLHEFNNLARYAPEDVREDEEKQEKFLAGMDPELSVRLVSGDYPDFQRLVEKSIRLEAKHKELESHKRRLANFRNQQGANQRIRYTNPYPGGSSSQQQQPRSAPRPQFVVRVPQPQQQQSQQGTRAPRPPTPAAQSGQGRRDVQGPQRLCFNCFEPGHFADKCPKPRRQQGQAPPRSNNGGKDVIRGRVNHVTAEDVLTTPDVIVGTFLIHSIPATILFDSGASHLFISVPFVGRNQLGVERLRNPLLITTPGGVMTAKYYSPAVPIEIQGIPFPSDLILLDTKNLDVILGMNWLAQFQGVVDCARRTVTLYRGPEQPVVFFAPPTSVSSSELHQIGLSEIPIVREFGDVFPEELPGMPPKREIEFRIDLALGTTPLYKRPYRMAANELAEVKKQLEELKEKGYIRPSTSSWGAPVIFVEKKDKTKRMCVHYRALNEVTIKNKYPLPRIDDLFDQLKGATVFSKIDLRSGYHQLRIREEDIPKTAFTTRYGLYEFTVMSFGLTNAPAFFMNLMNKVFMEYLDKFVVVFIDDILKQPKTVTQIRSFLGLAGYYRRFIENFSKIARPMTQLLKKEEKFVWSPQCEKAFKTLKEKLVSSPVLILPDTRKDFMVYCDASRQGLGCVLMQDGHVVAYASRQLRPHEGNYPTHDLELAAVVHALKIWRHYLIGNRCEIYTDHKSLKYIFTQSDLNLRQRRWLELIKNYDVGIHYHPGKANVVADALSRKSHCNTLNVRGIPPELNQQMEALNLSIVGRGFLAALEAKPTLLDQIREAQKNDPDMHGLLKNMKQGKAAGFTEDEHGTLWNRNRVCVPDNRELKQLILQEAHESPYSIHPGSTKMYLDLKEKYWWVSMKREIAEFVALCDVCQRVKAEHQRPAGLLQPLQVPEWKWDEIGMDFITGLPKTQGGYDSIWVVVDRLTKVARFIPVKATYGGNKLAELYFARIVSLHGVPKKIVSDRGSQFTSHFWKKLQEELGTRLNFSTAYHPQTDGQTERLNQILEDMLRACVLDFGKTWDKSLPYAEFSYNNSYQASIQMAPYEALYGRKCRTPLLWDQVGESQVFGTDILREAEAKVRTIRDNLKVARSRQKSYADNRRRDLEFAVDDFVYLRVTPLRGVHRFQTKGKLAPRFVGPFRIIARRGEVAYQLELPASLGNVHDVFHVSQLKKCLRVPSEQADSEQIEVREDLTYVERPVKILDTMERRTRNRVIRFCKVQWSNHAEEEATWEREDELKAAHPDLFVSSSESRGRDSV

SEQ ID NO: 19181 - protein, 548 aa, Oryza sativa
  Clone ID: TF_OSC410295j.C1.p1.hg
MMTAFLHHLQNPPQQNAPPPPPQHSKLAEFLRIRPPTFSSSNNPVDVLDWLHAVGKKLDTVQCSDEEKVIFAAHQLQGPAFLWWDHFQATQPEGQPITWARFTAAFQRTHVPAGVVALKKREFRELKQGNCSVMEYLHEFNNLARYAPEDVREDEEKQEKFLAGMDPELSVRLVSGDYPDFQRLVDKSIRLEAKHKELESHKRRLANFRNQQGANQRVRYTNPYPGGSSSQQQQQQQQPRSAPRPQFVVRVPQPQQQQNQQGTRAPRPPTPAVQPGQGRRDAQGQQRLCFNCFEPGHFADKCPKPRRQQGQAPPRSNNGGKDVIRGRVNHVTAEDVLTTPDVIVGTFLIHSIPATILFNSGASHSFISVPFVGRNQLGVERLRNPLLITTPGGVMTAKYYSPAVPIEIQGIPFPSDLILLDTKNLDVILGMNWLAQFQGVVDCARRTVTLYRGPEQPVVFFAPPTSVSSSELHQIGLSEIPIVREFGDVFPEELLGMPPKREIEFRIDLAPGTTPRYKRPYRMAANELAQNWDSTCHWLALIRSSRYI

SEQ ID NO: 19182 - protein, 1705 aa, Oryza sativa
  Clone ID: TF_OSC411279j.C1.p18.fg
MSWHRAGVLLLGAQSCLPVPGVPAVGGIGSVLLSMPRMGWKLCHVFRLYTVVMAGSVTRRGLDMTGFVLELRGMCVVLGYPHGVDYQARPLPEQEGDDAEPHAGWEVTVVILSGSPERTSLAVTAGGDSFPAACQNAALLAIGTLHQRYPDELQHSPYRYHPRRGGARDYATFRDASSEDDATIVHLARMVEAYDAARIDFHQMVRRGMVENNLKILELRQENLQLKKDLDAVEAQLHQLKIAQGEVCRPKRRRVCRSQKITARKSTSRPELVRQSLAWTCFVETPRAEPVPVVPQEGEASGVGSTEDALLLTFRPGPSQRRSANTGAGNQPEGSNHNHEGNPPPPPPPPPPPPPDTNAILTQILAQQANMMTAFLHHLQNPPQHNAPPPPPQHSKHAEFLRIRPPTFSSSNNPMDALDWLHAVGKKLDTVQCSDEEKVIFAAHQLQGPASLWWDHFQAAQPEGQPITWARFTAAFRRTHVPAGVVALKKREFRELKQGNRSVMEYLHEFNNLARYAPEDVREDEEKQEKFLAGMDPELSVRIVSGDYPDFQRLVDKSIRLEAKHKELESHKRRLANFRNQQGANQRPQQQQNQQGTRAPRPPTPAVQPGQGRRDAQGQQRLCFNCFEPGHFADKCPKPRRQQGQAPPRSDNGGKDVIRGRVNHVTAEDVLTTPDVIVGTFLIHSIPATILFDSGASHSFISVPFVGRNQLGVERLRNPLLITTPGGVMTAKYYSPAVPIEIQGVPFPTDLILLDTKNLDVILGMNWLAQFQGVVDCARRTVTLYRGPEQPVVFFAPPTSVRSSELHQIGLSEIPIVREFGDVFPEELPGMPPKREIEFRIDLAPGTTPLYKRPYRMAANELAEVKKQLEELKEKGYIRPSTSPWGAPVIFVEKKDKTKRMCVDYRALNEVTIKNKYPLPRIDDLFDQLKEEDHQHHLRLVLGKLREHQLYAKLSKCEFWLSEVKFLGHVISAKGVAVDPETVTAVTDWKQPKTVTQIRSFLGLAGYYRRFIENFSKIARPMTQLLKKEEKFVWSPQCEKAFQTLKEKLVSSPVLILPDTHKDFMVYCDASRQGLGCVLMQDGHVVAYASRQLRPHEGNYPTHDLELAAVVHALKIWRHYLIGNRCEIYTDHKSLKYIFTQSDLNLRQRRWLELIKDYDVGIHYHPGKANVVADALSRKSHCNTLNVRGIPPELNQQMEALNLSIVSRGFLATLEAKPTLLDQIREAQKNDPDMHGLLKNMKQGKAAGFTEDEHGTLWNGNRVCVPDNRELKQLILQEAHESPYSIHPGSTNMYLDLKEKYWWVSMKREIAEFVALCDVCQRVKAEHQRPAGLLQPLQVPEWKWDEIGMDFITGLPKTQGGYDSIWVVVDRLTKVARFIPVKTTYGGNKLAELYFARIVSLHGVPKKIVSDRGSQFTSHFWKKLQEELGTRLNFSTAYHPQTDGQTERLNQILEDMLRACVLDFGKTWDKSLPYAEFSYNNSYQASIQMAPYEALYGRKCRTPLLWDQVGESQVFGIDILREAEAKVRTIRDNLKVAQSRQKSYADNRRRDLEFAVDDFVYLRVTPLRGVHRFQTKGKLAPRYVGPFRIIARRGEVAYQLELPASLGNVHDVFHVSQLKKCLRVPFEQADSEQIEVRKDLTYVERPVKILDTMERRTRNRVIRFCKVQWSNHAEEEATWEREDELKAAHPDLFASSSESRGRDSV

SEQ ID NO: 19183 - protein, 1809 aa, Oryza sativa
  Clone ID: TF_OSC411279j.C1.p19.fg
KIWKWLAWLAWDELNPGSGCQFGPNHRRPGLRQMAGSVTRRGLHMTGFVLELRGMCVVLGYPHGVDYQARPLPEQEGEDAEPHAGWEVTAVILSGSPERTSLAVTAGGDSFPAACQNAALLAIGTLHQRYPDELQHSPYRYHPRRGGARDYATFRDASSEDDATVVHLARMVEAYDAARIDFHQMVRRGMVENNMKILELRQENLQLKKDLDALEAQLHQLKIAQGEDSRPKRRRVCRSQKITARKSTSRPELVRQSLAWTCFVETPRAEPAPVVPQEGEASGVGSSEVLIVSSPSLFAGSVRGFQMVTTRRNVNTGEGNQPEGSNPNHQGNPPPPSPPPPPPDTNAILTQILAQQANLMNAFLHHLQNPPQHNAPPPPPQHSKLAEFLRIRPPTFSSSNNPVDALDWLHAVGKKLDTVQCSDEEKVIFAAHQLQGPASLWWDHFQATQPEGQPITWTRFTAAFRRTHVPAGVVALKKREFRELKQGNRSVMEYLHEFHNLARYAPEDVREDEEKQEKFLAGMDPELSVRLVSGDYPDFQRLVDKSIRLEAKHKELESHKRRLANFRNQQGANQRVRYTNPYPGGSSSQQQQQQQPRSAPRPQFVVRVPQQQQQQNQQGTRAPRPPTPTVQPVQGRRDAQGQQRLCFNCFEPGHFADKCPKPRRQQGQAPPRSNNGGKDVLRGRVNHVTAEDVLTTPDVIVGTFLVHSIPATILFDSGASHSFISVPFVGKSQLGVERLRNPLLITTPGGVMTAKYYSPAVPIEIQGIPFPSDLILLDTKNLDVILGMNWLAQFQGVVDCARRTVTLYRGPEQPVVFFAPPTSVRSSELHQIGLSEIPIVREFGDVFPEELPGMPPKREIEFRIDLAPGTTPLHKRPYRMAANELAEVKTQLEELKEEGYIRPSTSPWGAPVIFVEKKDKTKRMCVDYRALNEVTIKNKYPLPRIDDLFDQLKGATVFSKIDLRSGYHQLRIREEDIPKTAFTTRYGLYEFTVMSFGLTNAPAFFMNLMNKVFMEYLDKFVVVFIDDILIYSQSEEDHQHHLRLVLGKLREHQLYAKLSKCEFWLSEVKFLGHVISAKGVAVDPETVTAVTDWKQPKTVTQIRSFLGLAGYYRRFIENFSKIARPMTQLLKKEEKFVWSPQCEKAFQTLKEKLVSSPVLILPDTRKDFMVYCDASRQGLGCVLMQDGHVVAYASRQLRPHEGNYPTHDLELAAVVHALKIWRHYLIGNRCEIYTDHKSLKYIFTQSDLNLRQRRWLELIKDYDVGIHYHPGKANVVADALSRKSHCNTLNVRGIPPELNQQMEALNLNIVGRGFLAALEAQPTLLDQIREAQKNDPDMRGLLKNMKQGKAAGFTEDEHGTLWNGKRVCVPDSRELKQLILQEAHESPYSIHPGSTKMYLDLKEKYWWVSMKREIAEFVALCDVCQRVKAEHQRPAGLLQPLQVPEWKWDEIGMDFITGLPKTQGGYDSIWVIVDRLTKVARFIPVKTTYGGNKLAELYFARIVSLHGVPKKIVSDRGSQFTSHFWKKLQEELGTRLNFSTAYHPQTDGQTERLNQILEDMLRACVLDFGKTWDKSLPYAEFSYNNSYQASIQMAPYEALYGRKCRTPLLWDQVGESQVFGTDILREAAAKVRIIRDNLKVAQSRQKSYADNRRRDLEFAVDDFVYLRVTPLRGVHRFQTKGKLAPRYVGPFRIIARRGEVAYQLELPASLGNVHDVFHVSQLKKCLRVPSEQADSEQIEVREDLTYVEKPVKILDAMERRTRNRVIRFCKVQWSNHAEEEATWEREGELKAAHPDLFASSSESRGRDSV

SEQ ID NO: 19184 - protein, 1988 aa, Oryza sativa
  unsure (1)..(1988): unsure at all Xaa locations
  Clone ID: TF_OSC413096j.C1.p1.np
MAAGSSAPVSPSSGRPLSLPTLYKHSPCLPPPFPPLAAPSLRRNRARAVALSLRRHRRAPVCRRRRPGPSSASAPPPSVSPQPRRPRPPLRFARRQPERRRPRLPEPRRRLPPLRSPFPSSPSTRGELWTAFVSPFPPLSRAPLYRAGGHRRRPSGRGCAASRRLCRRGRLRARPAAAMWGPAVSRPRPRVRLTRGTHGAGRCEPGAPGPPWTHLGHIRTGLRASVAKHYRFHMSSGANEGYTSCGPVVEMSWHRAGVLLLGAQSCLPVPGVPGVGGIGSMYTSDQSIIYSNSRALGYGQAEQCTQMAGSVSRRGLDLTGFVLELRGMCVVLGYPHGVDYQGRPLPEQEGDDAEPHAAWEVTAVILTGSPERTSLAVTAGGDSFSAACQSAALLAISTLHQRYPDELQHSPYRYHPRRGGARDYATFRDASSEDDATIMHLARMVEAYDAARIDFHQMVRHGMVENNLKILKLRQENLQLKKDLDAVEAQLHQLKIAQREVCRPQRRRVCRSQKITARKSTSRPELVRQSLAWTCFVETPRAEPAPVVPQEGEASGVGSMEDALLLTFHGETRRNAATSDSNQPEGSNHNNHGSPPPPPPPPPPPPPDTNAILTQILAQQANMMAAFLHHIQNPPQHNAPPPPPQHSKLAEFLRIRPPTFSSSNNPVDALDWLHAVGKKLDTVQCSDEEKVIFAAHQLQGPASLWWDHFQATQLEGQPITWARFTAAFRRTHVPAGVMALKKREFRELKQGNRSVMEYLHEFNNLARYAPEDVREDEEKQEKFLAGMDPELSVRLVSGDYPDFQRLVDKSIRLEAKHKELESHKRRLANFRNQQGANQRIRYTNPYPGGSSSQQQQPRSAPRPQFVVRVPQPQQQQSQQGTRAPRPPTPAAQSGQGRRDVQGPQRLCFNCFEPGHFADKCPKPRRQQGQAPPHSNNGGKDVIWGRVNHVTAEDVLTTPDVIVGTFLIHSIPATILFDSGASHSFISVPFVGRNQLGVERLRNPLLITTPGGVMTAKYYSPAVPIEIQGIPFPSDLILLDTKNLDVILGMNWLAQFQGVVDCARRTVTLYRGPEXPVVFFAPPTSVSSSELHQIGLSEIPIVREFGDVFPEELPGMPPKREIEFRIDLAPGTTPLYKRPYRMAANELAEVKKQLEELKEKGYIRLSTSPWGAPVIFVEKKDKTKRMCVDYRALNEVTIKNKYPLPRIDDLFDQLKGATVFSKIDLRSGYHQLRIREEDIPKTAFTIRYGLYEFTVMSFGLTNAPAFFMNLMNKVFMEYLDKFVVVFIDDILVYSQSEEDHQHHLRLVLGKLREHQLYAKLSKCEFWLSEVTDWKQPKTVTQIRSFLGLAGYYRRFIENFSKITRPMTQLLKKEEKFVWSPQCEKAFKTLKEKLVSSPVLILLDTRKDFMVYCDASRQGLGVLMQDGHVVAYASRQLRPHEGNYPTHDLELAAVVHALKIWRHYLIGNRCEIYTDHKSLKYIFTQSDLNLRQRRWLELIKDYDVGIHYHPGKANVVADALSRKSHCNTLNVRGIPPELNQQMEALNLSIVGRGFLAALEAKPTLLDQIREAQKNDPDMHGLLKNMKQGKATGFTEDEHGTLWNGNRRVKAEHQRLAGHLQPLQVPEWKWDEIGMDFITGLPKTQGGYDSIWVVVDRLTKVARFILVKATYGGNKLAELYFARIVSLHGVPKKIVSDRGSQFTSHFWKKLQEELGTRLNFSTAYHPQTDGQTERLNQILEDMLRACVLDFGKTWDKSLPYAEFSYNNSYQASIQMAPYEALYGRKCRTPLLWDQVGESQVFGTDILREAEAKVRTIRDNLKVAQSRQKSYVDNRRRDLEFAVDDFVYLRVTPLRGVHRFQTKGKLAPRFVGPFRIIARRGEVAYQLELPASLGNVHDVFHVSQLKKCLRVPSEKADSEXIEVREDLTYVERPVKILDTMERRTRNRVIRFFKVHWSNHAEEEATWEREDELKAAHPDLFVSSSESRGRDSV

SEQ ID NO: 19185 - protein, 2011 aa, Oryza sativa
  unsure (1)..(2011): unsure at all Xaa locations
  Clone ID: TF_OSC413096j.C1.p2.np
MAAGTPAPVSPSSGHPLPLLTLYKPSPCLPPPFPPLAALSPRRNRARAIALSLRRGRRAPVRRRCRPGPPLPSASPPSASPDPRRPRPPLRFARRPPEHRRPRPPEPRRRLPPLRSSFPSSPSTWGEPWTAFVSPFPPLSRPPLRRTYGRRRRPXGRGRAASRLRRRGRLRARPAAAVWGPAVSRPRPXVRLTRGTHGAGRESPGAPGPPWSYLGYYKDXARASVAKHYRFHMSSGANEGYTSCGPVVEMSWHRAGVLLLGAQSCLPVPGVPAVGGVGSMYTSDQSIIYSNSRALGYGQAEQCTQMAGSVSRRGLDLTSFVLELRGMCVALGYPHGVDYQGRPLPEQEGDDAEPHAAWEVTAVILTGSPERTSLAVTAGGDSFSAACQNAALLAIGTLHQRYLDELQHSPYRYHPRRGGARDYATFRDASSEDDATIMHLARMVXAYDAARIDFHQMVRPGMVENNMKILELRQENLQLKKDLDVVEAQLHQLKIAQGEVCRPKRCRVCRSQKITARKSTSRPELVRQSLAWTCFVETPRAEPAPVVPQEGEASGVGSTEDALLLTFHGETRRSAATGDGNQPEGSNHNNHGSPPPPPPPPPPDTNAILTQILAQQANMMAVFLHHIQNPPHHNAPPPPPQHSKLAEFLRIRPPTFSSSNNPVDALDWLHAVGKNLDTVQCSDEEKVVFAAHQLQGPASLWWDHFQATQPEGQPITWARFTAAFRRTHVPAGVMALKKREFRELKQGNRSVMEYLHEFNNLARYAPEDVREDEEKQEKFLAGMDPELSVRLVSGDYPDFQRLVDKSIRLEAKHKELESHKRRLANFRNQQGANQRIRYTNPYPGGSSSQQQQQXQQPRSAPRPQFVVRVPQPQQQQSQQGTHAPRPPTPAAQSGQGRRDVQGPQRLCFNCFEPGHFADKCPKSRRQQGQAPPRSNNGGKDVIRGRVNHVTAEDVLTTPDVIVGTFLIHSIPATILFDSGASHSFISVPFVGRNQLGVERLRNPLLITTPGGVMTAKYYSPAVPIEIQGIPFPSDLILLDTKNLDVILGMNWLAQFQGVVDCARRTVTLYRGPEQPVVFFAPPTSVSSSELHQIGLSEIPIVREFGDVFPEELPGMPPKREIEFRIDLATGTTPLYKRPYRMAANELAEVKKQLEELKEKGYIRPSTSPWGAPVIFVEKKDKTKRMCVDYRALNEVTIKNKYPLPRIDDLFDQLKGATVFSKIDLRSGYHQLRIREEDIPKTAFTTRYGLYEFTVMSFGLTNAPAFFMNLMNKVFMEYLDKFVVVFIDDILVYSQSEEDHQHHLRLVLGKLREHQLYAKLSKCEFWLSEVKFLGHVISAKGVAVDPETVTAVTDWKQPKTVTQIRSFLGLAGYYRRFIENFSKIARPMTQLLKKEEKFVWSPQCEKAFQTLKEKLVSSPVLIMPDTRKDFTVYCDASRQGLGCVLMQDGHVVAYASRQLRPHEGNYPTHDLELAAVVHALKIWRHYLIGNRCEIYTDHKSLKYIFTQSDLNLRQRRWLELIKDYDVGIHYHPGKANMVADALSRKSHCNTLNVRGIPPELNQQMEALNLSIVGRGFLAALEAKPTLLDQIREAQKNDPDMRGLLKNMKQGKAAGFTEDEHGTLWNGNRRVKAEHQRPAGLLQPLQVPEWKWDEIGMDFITGLSKTQGGYDSIWVVVDRLTKVARFIPVKTTYGGNKLAELYFARIVSLHGVPKKIVSDRGSQFTSHFWKKLQEELGTRLNFSTTYHPQTDGQTERLNQILEDMLRACVLDFGKTWDKSLPYAEFSYNNSYQASIQMAPYEALYGCKCRTLLLWDQVGESQVFGTDILREAKAKVRTIRDNLKVAQSRQKSYADNRRRDLEFAVDDFVYLRVTPLRGVHRFQTKGKLAPRFVGPFRIIARCGEVAYQLELPASLGNVHDVFHVSQLKKCLRVPSEQADSEQIEVREDLAYVERPVKILDTMERRTRNRVIRFCKVQWSNHAEEEATWEREDELKAAHPDLFASSSESRGRDSV

SEQ ID NO: 19186 - protein, 419 aa, Oryza sativa
  Clone ID: TF_OSC413731j.C1.p2.fg
MTRRSANTGDGNQPEGSNHNHQGNPPPPPPPPPPPPPDTNAILTQILAQQANMMTAFLHHLQNPPQLNAPPPPPQHSKLAEFLRIRPPTFSSSNNPVDALDWLHAVGKKLDTVQCSDEEKVIFAAHQLQGPASLWWDHFQATQPEGQPITWARFTAAFRRTHVPAGVVALKKREFRELKQGDRSVMEYLHEFNNLARYAPEDVREDEEKQEKFLAGMDPELSVRLVSGDYPDFQRLVDKSIRLEAKHKELESHKRRLANFRNQQGANQRVRYTNPYPGGSSSQQQQQQQQPRSAPRPQFVVRVPQPQQQQNQQGTRAPRPPPPTVQPGQGRRDAQGPQRLCFNCFEPGHFADKCPKPRRQQGQAPPRPNNGGKDVIRGRVNHVTAEDVLTTPDVIVESSETCFRKNYLVCRLSERLSSG

SEQ ID NO: 19187 - protein, 1682 aa, Oryza sativa
  Clone ID: TF_OSC416075j.C1.p2.gm
MDEVGRRWTFSRANEGYTSCGPMAGSVTRRGLDMTGFVLELRGMCVVLGYPHGVDYQARPLPEQEGEDAEPHAGWEVTAVILSGSPERTSLAVTAGGDSFPAACQNAALLAIGTLHQRYPDELQHSPYRYHPRRGGARDHATFRDASSEDDATVVHLARMVEAYDAARIDFHQMVRRGMVENNLKILELRQENLQLKKDLDAVEAQLHQLKIAQGEDSRPKRRRVCRSQKITARKSTSRPELVRQSLAWTCFVETPRAEPAPVVPQEGEASGVGSSEGALLLTFRPGPSQRSSSLFAGSVWGFQMVTTRRNVNTGEGNQPEGSNPNPQGNPPPPPPPDTNAILTQILAQQANMMNAFLHHLQNPPQQNAPPPPPQHSKLAEFLRIRPPTFSSSNNPVDALDWLHAVGKKLDTVQCSDEEKVVFAAHQLQGPASLWWDHFQATQPQGQPITWAHFTAAFRRTHVPAGVVALKKREFRELKQGNRSVMEYLHEFNNLARYAPEDVREDEEKQEKFLAGMDPELSVRLVSGDYPDFQRLVDKSIRLEAKHKELESHKRRLANFRNQQGANQRVRYTNPYPGGSSSQQQQQQQPRPAPRPQFVVRVPQPQQQQNQQGTRAPRPPTPAVQPVQGRRDAQGQQRLCFNCFEPGHFADKCPKPRRQQGQAPPRSNNGGKDVIRGRVNHVTAEDVLTTPDVIVGTFLVHSIPATILFDSGASHSFISVPFVGKNQLGVERLRNPLLITTPGGVMTAKYYSPAVPIEIQGIPFPSDLILLDTKNLDVILGMNWLAQFQGIGLSEIPIVREFGDVFPEELPGMPPKREIEFRIDLAPGTTPLYKRPYRMAANELAEVKKQLEELKEKGYIRPSTSPWGAPVIFVEKKDKTKRMCVDYRALNEVTIKNKYPLPRIDDLFDQLKGATVFSKIDLRSGYHHLRIREEDIPKTAFTTRYGLYEFTVMSFGLTNAPAFFMNLMNKVFMEYLDKFVVVFIDDILIYSQSEEGHQHHLRLVLGKLGNINCMPSLARYYRRFIENFSKIARPMTQLLKKEEKFVWSPQCEKAFQTLKEKLVSSPVLILPDTRKDFMVYCDASRQGLGCVLMQDGHVVAYASRQLRPHEGNYPTHDLELAAVVHALKIWRHYLIGNRCEIYTDHKSLKYIFTQSDLNLRQRRWLELIKDYDVGIHYHPGKANVVADALSRKSHCNTLNVRGIPPELNQQMEALNLSIVGRGFLAALEAKPTLLDQIREAQKNDPDMHGLLKNMKQGKAAGFTEDEHGTLWNGKREKYWWVSMKREIAEFVALCDVCQRVKAEHQRPAGLLQPLQVPEWKWDEIGMDFVTGLPKTQGGYDSIWVIVDRLTKVARFIPVKTTYGGNKLAELYFARIVSLHGIPKKIVSDRGSQFTSHFWKKLQEELGTRLNFSTAYHPQTDGQTERLNQILEDMLRACVLDFGKTWDKSLPYAEFSYNNSYQASIQMAPYEALYGRKCRTPLLWDQVGESQVFGTDILREAEAKVRIIRDNLKVAQSRQKSYADNRRRDLEFAVDDFGYLRVTPLRGVHRFQTKGKLAPRYVGPFRIIARRGEVAYQLELPASLGNVHDVFHVSQLKKCLRVPSEQADSEQIEVREDLTYVERPVKILDTMERRTRNRVIRFCKVQWSNHAEEEATWEREDELKAAHPDLFASSSESRGRDSV

SEQ ID NO: 19188 - protein, 1977 aa, Oryza sativa
  unsure (1)..(1977): unsure at all Xaa locations
  Clone ID: TF_OSC416252j.C1.p1.np
MAAGSPAPVSFPADRPLSLPTLFKPSPLLPRPFLPLAAPFPRQNRARAVVLSLLRHRRPPAGPLRSPGPPPASASSPQASPCRRXPCPPPRRARRPPKRHSPRPPEPRHRLPPLRTPPLPSPSTRGETWTTALSPFPPLSWPPLRCAYGRRRRPXGRAASRRPRRRGRLRARRVAVAWGPAVSRPCPRVRLMRGAYGAGRCEPGAPGPPWTHLGHIRTGLWASVAKHYRFHMSSGRXEKGPTCGPHMSVTRVRGGAAAAWAEFMLPLVKLYIVSTFGVPCLLGQGIIHARKERPLGYFRSXQCLXMAGNINRHGLDLTGFVLELRGMFVVLGYPHGVDYQGKKLPEQDGDDAEPRAAWEVTAVILTGSPERTSLAVTAGGDSFPAACQNAALLVIGTLHQRYLDELRHSPYSYHPRGACDYATFRDASSEDDATIMHLARMVEAYDAARIDFHHIVRRGLVENNMKILELRQENLQLKKDLDAVEAQLCQLKIAKGEVCRPKRRRVCRNLKITARKSTSRPELVRQSLAWTCFVEIPCAESAPLVPQEEGASGVGSTEDVLLLTFHGETRRSAVTGEGSHPEGSNPNNHDSPPPPPPPPPPPPDTNPILTQILAQQANVMAAFLHHIQNPPQHNAPPPPPPLQHSKLAEFLRIRPPTFSSFNNPVDALDWLHAVGKKLDTVQCNDEEKVIFATHQLQGPASLWWDHFQATQPEGXPITWARFTAAFRRTHVPAGVMALKKREFRELKQGNRSVMEYLHEFNNLARYAPEDVREDEEKQQKFLAGMDPELSVHLVSRDYPDFQRLVDKSIHLEAKHKELESHKRRLANFSNQQGANQRVRYTNPYPGGSSSQQQQQQQPRPAPRPPYVVRVPQPQQQQNQQGTRAPRPPAPAVQPGQGRRDAQGQQRLCFNCFEPGHFADKCPKRRQQGQAPPRPNNGGKDVTGGCVNHVTAEDVLTTPDVIVGTFLIHSIPATILFDSGASHSFISVPFVGRNQLGVERLRNPLLITTPGVVMTTKYYSPAVPIEIQGIFPSDLILLDTKNLDVILGMNWLAQFQGVVDCARRTVTLYRGPDQPVVFFAPTPAGTSVLHQLGLSVISIVSEFGDVFPEELPGMPPKREIEFRIDLAPGATPLYKRPYRMAANELAEVKKQLEELKENGYIRPSTSPWSAPVIFVEKKDKTKRMCVDYRALNEVTIKNMYPLPQIDDLFDQLKGATVFSKIDLRSGYHQLRIREEDIPKTALTTRYGLYEFTVMLFGLTNSPAFFMNLMNKVFMEYLDKFVVVFIDDILVYSESEEDHQQHLRLVLGKLREHXLYAKLSKCEFLLSEVKFLGHVISAKGVAVDPKTVTAVTDWKQPKTVTQVRSFLGLAGYYRRFIENFSKIARPMTQLLKKEEKFVWSPQCEKAFQTLKEKLVSSPVLILLDTRKDFLVYCDASRQGLGCVLMQEGHVVAYASRQLRPHEGNYPTHDLELAAVVHDLKIWRHYLIGNRCEIYTDHKSLKYIFTQSDLNLQQRRWLELIKDYDVGIHYHPSKANVVADALSRKSHCSTLGVRGIPPELNQQLEALNLSIVSYGFLAMLEAKPTLLDQIREAQKNDPDIHGILKNMKQGKAAGFTEDEHGTLWNGNHRVKAEHQRPARLLQPLQVPEWKWDEIGMDFITGVPKTQGGYDSIWVIVDRLTKVAWFIPVKTTYGGNKLAELYFARIVSLHGVPKKIVSDRGSQFTYHPQTDGQTDHPNQVLEDWDKSLPYAEFSYNNSYQASIQMAPYEALYGRKCRTPLLWDQVGESQVFGTDILREAEAKVRTIXDNLKVAXSRQKSYADNRRRNLEFAVDDFVYLRVTLLRGVHRFQTKGKLPPRFVGPFRIIARRGEVAYQLELPASLGNVHDVFHVSQLKKCLRVPSEQADSEQIEVREDLTYVEKPVKILDTIERRTRNRVIRFCKVQWSNHAEEEATWEREDELKAAHPDLFASSSESRGRDSV

SEQ ID NO: 19189 - protein, 1451 aa, Oryza sativa
  unsure (1)..(1451): unsure at all Xaa locations
  Clone ID: TF_OSC417437j.C1.p1.np
TATPPSAPPAAPQRPQPPPPPETPPRPRPRPPRPPPQPGPAPPSPRPPPHARPPPSRRPPSPPPPPPAPPRPAPPTPRRPPSRPPRPPPPRPDPTPRRAQPHSPPPPPPRPPPRPPPAERPAPQEASPRSCPRASATGRGNTRPADGEPGGKSTARRPQMQMTGGTHGAGRCEPGCPGPPWTHLGHIRTGLRASVAKHYRFHMSSGANEGYTANEGYTSCGPVVEMSWHRAGVLLLGAQSCLPVPGVPAVGGIGSMYTSDQSIIYSNSRALGYGQAEQCTQMAGSISRRGLDLTGFVLELRGMCVVLGYPHGVDYQGRPLPEQEGDDAEPHAAWEVTAVILTGSPERTSLAVTAGGDSFSVTCQNAALLAIGTLHQRYPDELQHSPYRYHPRRGGARDYATFRDASSEDDATIMHLARMVEAYDAARIDFHQMVRRGMVGNNMKILELRQENLQLKKDLDAVEAQLHQLKIAQGEVCRPKRRRVCRSQKITARKSTSRPELVSQSLAWTCFVEIPVPQEGEASGVGSTEDALLLTFHGETRRSAVTGDGNQPEGSNHNNHGSPPPPPPPPPPPPPDTNAILTQILAQQANMMAAFLHHIQNPPQHNAPPPPPQHSKLAEFLRIRPPTFSSSNNPVDALDWLHAVGKKLDTVQCSDEEKVVFAAHQLQGPASLWWDHFQATQPEGQPITWARFTAAFRRTHVPAGVMALKKREFRELKQGNRSVMEYLHEFNNLARYAPEDVRENEEKQEKFLAGMDPELSVRLVSGDYPDFQRLVDKSIRLEAKHKELESHKRRLANFRNQQGANQRIRYTNPYPGGSSSQQQQQQQQPCSAPRPQFVVRVPQPQQQQSQQGTRAPRPPTPAVQSGQGRRDVQGPQRLCFNCFEPGHFADKCPKPRRQQGQAPPRSNNGGKDVIRGQVNHVTAEDVLTTPDVIVGTFLIHSIPATILFDSGASHSFISVPFVGRNQLGVERLRNPLLITTPGGVMTAKYYSPAVPIEIQGIPFPSDLILLDTKNLDVILGMNWLAQFQGVVDCARRTVTLYRGPEQPVVFFAPPTSVSSSELHQIGLSEIPIVREFGDVFPEELPGMPPKREIEFRIDLAPGTTPLYKRPYRMAANELAEVKKQLEELKEKGYIRPSTSPWGSPVIFVEKKDKTKRMCVDYRALNEVTIKNKYPLPWIDDLFDQLKGATVFSKIDLRSRYHXLRIREEDIPKTAFTTXYGLYEFTVMSFGLTNAPAFFMNLMNKVFMEYLDKFVVVFIDDILVYSQSEEDHQHHLRLVLGKLREHQLYAKLSKCEFWLSEVKFLGHVISAKGVAVDPETVTAVTDWKQPKTVTQIRSFLGLAGYYRRFIENFSKIARPMTQLLKKEEKFVWSPQCEKAFQTLKEKLVSSPVLILPDTRKDFMVYCDASRQGLGCVLMQDGHVVAYASRQLRPHEGNFPTERSIKATQIPAK

SEQ ID NO: 19190 - protein, 1488 aa, Oryza sativa
  Clone ID: TF_OSC417495j.C1.p2.fg
MKILELRQENLQLKKDLDAVEAQLHQLKIAQGEVCRPKRRRVCRSQKITARKSTSRPELVRQSLAWTCFVETPRAEPAPVVPQEGEASGVGSTEDALLLTFRPGPSQRRSANTGDGNQPEGSNHHHQGSPPPPPPPPPPPPPDTNAILTQILAQQANMMTAFLHHLQNPPQHNAPPPPPQHSKLAEFLRIRPPTFSSSNNPVDALDWLHAVGKKLDTVQCSDEEKVIFAAHQLQGLASLWWDHFQATQPEGQPITWARFTAAFRRTHVPAGVVALKKREFRELKQGNRSVMEYLHEFNNLARYAPEDVREDEEKQEKFLAGMDPELSGANQRVRYTNPYPGGSSSQQQQQQQQPRSAPRPQFVVRVPQPQQQQNQQGTRAPRPPTPTVQPGQGRRDAQGPQRLCFNCFEPGHFADKCPKPRRQQGQAPPRSNNGGKDVIRGRVNHVTAEDVLTTPDVIVGTFLVHSIPATILFDSGASHSFISVPFVGRNQLGVERLRNPLLITTPGGVMTAKYYSPAVPIEIQGIPFPSDLILLDTKNLDVILGMNWLAQFQGVVDCARRTVTLYRGPEQPVVFFAPPTSVSSSELHQIGLSEIPIVREFGDVFPEELPVMPPKREIEFRIDLAPGTTPLYKRPYRMAANELAEVKKQLEELKEKGYIRPSTSPWGAPVIFVEKKDKTKRMCVDYRALNEVTIKNKYPLPRIDDLFDQLKGATVFSKIDLRSGYHQLRIREEDILKTAFTTRYGLYEFTVMSFGLTNAPAFFMNLMNKVFMEYLDKFVVVFIDDILVYSQSEEDHQHHLRLVLGKLREHQLYAKLSKCEFWLSEVKFLGHVISAKGVAVDPETVTAVTDWKQPKTVTQVRSFLGLAGYYRRFIENFSKIARPMTQLLKKEEKFVWSPQCEKAFQTLKEKLVSSPVLILPDTRKDFMVYCDASRQGLGCVLMQDGHVVAYASRQLRLHEGNYPTHDLELAAVVHALKIWRHYLIGNRCEIYTDHKSLKYIFTQSDLNLRQRRWLELIKDYDVGIHYHPGKANVVADALSRKSHCNTLNLRGIPPELNQQMAALNLSIVSRGFLAALEAKPALLDQIREAQKNDPDMHGLLKNMKQGKAAGFTEDEHGTLWNGNRVCVPDNRELKQLILQEAHESPYSIHPGSTKMYLDLKEKYWWVSMKREIAEFVALCDVCQRVKAEHQRPAGLLQPLQVPEWKWDEIGMDFITGLPKTQGGYDSIWVVVDRLTKVARFIPVKTTYGGNKLAELYFDRIVSLHGVPKKIVSDRGSQFTSHFWKKLQEELGTRLNFSTAYHPQTDGQTERLNQILEDMLRACVLDFGKTWDKSLPYAEFSYNNSYQASIQMAPYEALYGRKCRTPLLWDQVGESQVFGTDILREAEAKVRTIRDNLKVAQSRQKSYADNRRRNLEFAVGDLVYLRVTPLRGVHRFRTKGKLAPRYVGPFRIVARRGEVAYQLELPASLGNVHDVFHVSQLKKCLRVPS

SEQ ID NO: 19191 - protein, 816 aa, Oryza sativa
  Clone ID: TF_OSC420793j.C1.p1.fg
MTGFVLELRGMCVALGYPHGVDYQARPLPEQEGEDAEPHAGWEVTAVILAGSSERTSLTVTAGGDSFPAACQSAALLAIGTLHQRYPDELQHSPYRYHPRRGGARDYATFRDASSEDDATIVHLARMVEAYDAARIDFHQMVRRGMVENNMKILELRQENLQLKKDLDAVEAQLHQLKVAQGEICRPKRRRVCRSQKITARKSTSRPELVRQSLAWTCFVETPRAEPAPVVPQEGEASGVGSSEAPSLFAGSVWGFQMVTTRRNVSTGEGNQPEGSDHNHQGNPPPPPPPPPPPPPPPDTNAILTQILAQQANMMTAFLHHLQNPPQQNAPPPPPQHSKLAEFLRIRPPTFSSSNNPVDALDWLHAVGKKLDTVQCSDEEKVVFAAHQLQGPASLWWDHFQATQPEGQPITWTRFTAAFRRTHVPAGVVALKKREFRELKQGNRSVMEYLHEFNNLARYAPEDVREDEEKQEKFLAGMDPELSVRLVSGDYPDFQRLVDKSIRLEAKHKELESHKRRLANFRNQQGANQRVRYTNPYPGGSSSQQQQQPRPAPRPQFVVRVPQPQQQQNQQGTRAPRPPTPAVQPVQGRRDAQGQQRLCFNCFEPGHFADKCPKPRRQQGQAPPRSNNGGKDVIRGRVNHVTAEDVLTTPDVIVVVDRLTKVARFIPVKTTYGGNKLAELYFARIFRRRLQWSRDLRGRFPFSPAALSLSRRYKIVPRASLFRFRRSPLALAVGFVLTPCTSLSAVAVELRSAAVVAPVFLPTRRHLHPRRRVVVDPVRISVSPADRRSTVVIVIPNRAAAFFRFGRRSRRRRRPG

SEQ ID NO: 19192 - protein, 700 aa, Oryza sativa
  Clone ID: TF_OSC4210j.C1.p1.fg
MSWHRAGVLLLGAQFCLPVPGVPAMAGSVTRRGLDMTGFVLELRGMCVALGYPHGVDYQARPLPEQEGDDAEPRAGWEVTAVILAGSSERTSLTVTAGGDSFPAACQSAALLAIGTLHQRYPDELQHSPYRYHPRRGGARDYATFRDASSEDDATIVHLARMVEAYDAARIDFHQMVRRGMVENNMKILELRQENLQLKKDLDAVEAQLHQLKIAQGEICRPKRRRVCRSQKITARKSTSRPELVRQSLAWTCFVETPRAEPAPVVPQEGEASGVGSTEVVWGMVMPMVTTRRNANTGDGNQPECSNHNHQGNPPPPPPPPPPPPPDTNAILTQILAQQANMMTAFLHHLQNPPQQNAPPPPPQHSKLAEFLRIRPPTFSSSNNPVDALDWLHAVGKKLGTVQCSDEEKVIFAAHQLQGPASLWWDHFQATQPEGQPITWARFTAAFRRTHVPAGVVALKKREFRELKQGNRSVMEYLHEFNNLARYAPEDVREDEEKQEKFLAGMDPELSVRLVSGDYPDFQRLVDKSIRLEAKHKELESHKRRLANFRNQQGANQRVRYTNPYPGGSSSQQQQQQQQPRSAPRPQFVVRVPQPQQQQNQQGTRAPRPPTPTVQPGQGRRDAQGQQRLCFNCFEPGHFADKCPKPRRQQGQAPPRSNNGGRDVIRGRVNHVTAEDVLTTPDVIVGRSCGSLCLTSATTS

SEQ ID NO: 19193 - protein, 1229 aa, Oryza sativa
  Clone ID: TF_OSC421503j.C1.p5.fg
MSWHRAGVLLLGAQSCLPVPGVPAVGGIGSVLLSMARMGLKLCHVFRLYTVVMAGSVTRRGLSMTGFVLELRGMCVVLGYPHGVDYQARPLPEQEGDDAEPHAAWEVTAVILSGSPERTSLAVTAGGDSFPAACQNAALLAIGTLHQRYPDELQHSPYRYHPRRGGARDYATFRDASSEDDATIVHLARMVEAYDAARIDFHQMVRRGMVENNMKILELHQENLQLKKDLDAVEAQLHQLKIAQGEVCRPKRRRVCRSQKITARKSTSRPELVCQSLAWTCFVETPRAEPAPVVPQEGEASGVGSTEDALLLTFRPGPSQRRNAATGDGNQPEGSNHNHQGNPPPPPPPPPPPPPDTNAILTQILAQQANMMTAFLHHLQNPPQHNAPPPPPQHSKLAEFLRIRPPTFSSSNNPVDALDWLHAVGKKLDTVQCSDEEKVIFAAHQLQGPASLWWDHFQATQPEGQPITWARFTAAFRRTHVPVGVVSLKKREFRELKQGNRSVMEYLHEFNNLARYTPEDVREDEEKQEKFLAGMDPELSVRLVSGDYPDFQRLVDKSIRLEAKHKELESHKRRLANFRNQQGANQRVRYTNPYPGGSSSQQQQQQQQPRSAPRPQFVVRVPQPQQQQNQQGTRAPRPPTPTVQPGQGRRDAQGQQRLCFNCFEPGHFADKCPKPRRQQGQAPPRSNNGAKDVIRGRVNHVTAEDVLTTPDVIVGTFLVHSIPATILFDSGASHSFVSVPFVGRNQLGVERLRNPLLITTPGGVMTAKYYSPAVPIEIQGIPFPSDLILLDTKNLDVILGMNWLAQFQVVVDCARRTVTLYRGPEQPVVFFAPPTSVSSSELHQIGLSEIPIVREFGDVFPEELPGMPPKREIEFRIDLAPGTTPLHKRPYRMAANELAEVKKQLEELKEKGYIRPSTSPWGAPVIFVEKKDKTKRMCVDYRALNEVTIKNKYPLPRIDDLFDQLKGATVFSKIDLRSGYHQLRIREEDIPKTAFTTRYGLYEFTVMSFGLTNAPAFFMNLMNKVFMEYLDKFVVVFIDDILIYSRSEEDHQHHLRLVLGKLHEHQLYAKLSKCEFWLSEVKFLGHVISAKGVAVDPETVTAVTDWKQPKTVTQVRSFLGLAGYYRRFIENFSKIARPMTQLLKKEEKFVWSPQCEKAFQTLKEKLVSSPVLILPDTRKDFMVYCDASRQGLGCVLMQDGHVVAYASRQLRPHEGNYPTHDLELAAVTS

SEQ ID NO: 19194 - protein, 1926 aa, Oryza sativa
  unsure (1)..(1926): unsure at all Xaa locations
  Clone ID: TF_OSC5440j.C1.p1.np
PRPPFRFGRRPPERRRPRRPDPRCRLPSLRPPFLSSPSTXGEPWTAASFPPSLPLSRPPLRRAYGRRRRPXGRAASRRLRRPGRPRARRVAAAWGPAVSRPRPXVRLTRGTHGAGRCEPGAPGPPWTHLGHIRTGLRASVAKHYRFHMSSGAKEGYTSCGPVVEMSWHRAGVLLLGAQSCLPVPEVPAVGGVGSMYTSDQSIIYSNSRALGYGQAEQCTQMAGSINRRGLDLTGFVLELRGMCVVLGYSHGVDYQGKQLPEQEGDDAEPHAAWEVTVVILTGSPERTSLAVTVGGDSFSAACQNAALLAIGTLHQLYPDELQHSPYRYHPRRGGARDYATFRDASSEDDATIRHLARMVEAYDAARIDFHQMVRRGLVENNMKILELRQENLQLKKDLDAVEAQLRQLKIAQGEVGRPKCRRVCRSLKITARKSTSRPELVRQSLAWTCFVETPCAEPAPVVPQEDGASGVGSTEDALLLTFHGETRRSAATGEGSHPEGSNHNNHGSPPPPPPPPPPPPPDTNAILTQILAQQANMMAAFLHHIQNPPQHNAPPPPPQHSKLAEFLRIRPPTFSSSNNPVDALDWLHAVGKKLDTVQCSDEEKVIFAAHQLQGPASLCWDHFQATQPKGQPITWARFTAAFRRTHVPAGVMALKKREFRELKQGNRSMMEYLHEFNNLARYALEDIREDEEKQEKFLAGMDPELSVRLVSGDYPDFQRLVDKSIRLEAKHKELESHKRRLANFRNQQGANQRVRYTNPYPGGSSQQQQQQQPRSAPRPQFVVRVPQPQQQQSQQGTRAPRPPTPAVQPGQGRRDAQGQQRLCFNCFEPGHFADKCPKPRRQQGQAPPRSNNGGKDVIRGRVNHVMAEDVLTTPDVIFGTFPIHSIPATILFDSGASHSFMSVPFVGRNQLGVERLRNPLLITTPGGVMTAKYYSHAVPIEIQGIPFLSDLILLDTKNLDVILGMNWLAQFQGVVDCARRTITLYRGPEQPVVFFAPPTSVGSSELHQIKLSEIPIVREFGDVFPEELPGMPPKREIEFRIDLAPGTAPLYKRPYRMAANELAEVKKQLEELKEKGYIRPSISPWGAPVIFVEKKDKTKRMCVDYRALNEVTIKNKYPLPRIDDLFDQLKGATVFSKIDLRSGYHQLRIREEDIPKTAFTTRYGLYEFTVMSFGLTNAPAFFMNLMNKVFMEYLDKFVVVFIDDILVYSQLEEDHQHHLRLVLGKLREHQLYAKLSKCEFWLSEVKFLGHVISAKGVAVDPETATAVTDWKQPKTVTQIRSFLGLAGYYRRFIENFSKIARPMTQLLKKEEKFVWSPQYEKAFQTLKERLVSSPVLILPDTRKDFMVYCDASRQGLGCVLMQEGHLVAYASRQLRPHEGNYPTHDLELAAVVHALKIWRHYLIGNRCEIYTDHKSLKYIFTQSDLNLRQRRWLELIKDYDVGIHYHPGKANVVADALCRKSHCNTLNVRGIPAKLNQQMEALNLSIVGRGFLATLEAKPTLLDQIREAQKNDPDMRGLLKNMKXGKAAGFTEDEHGTLWNGNRRVKAEHQRPAGLLQPLQVPEWKWDEIGMDFITGLPKTQGGYDSIWVVVDRLTKVARFIPVKTTYGGNKLAELYFARIVSLHGVPKKIVSDRGSQFTSHFWKKLQEELGTQLNFSTAYHPQTDGQTERLNQILEDMLRACVLDFGKTWDKSLPYAEFSYNNSYQASIQMAPYEALYGRKCRTPLLWDQVGEQVFGADILREAEAKVRTIRDNLKVAQSRQKSYADNRRRNLEFVVDDFVYLRVTPLRGVHRFQTKGKLAPRFVGPFRIIARRGEVAYQLELPVSLGNVHDVFHVSQLKKCLRVPSEQADSEQIVVCEDLTYVXRLVKILDTMERRTRNRVIRFCKIQWSNHAEEEPTWEREDEMKAAHPNLFASSSESRGRDSV

SEQ ID NO: 19195 - protein, 1777 aa, Oryza sativa
  Clone ID: TF_OSC5888j.C1.p4.fg
MDEVGGRWTFSRANEGYTSCGPMAGSVTRRGLDMTGFVLELRGMCVVLGYPHGVDYQARPLPEQEGEDAEPHAGWEVTAVILSGSPERTSLAVTAGGDSFPAACQNAALLAIGTLHQRYPDELQHSPYRYHPRRGGARDYATFRDASSEDDATVVHLARMVEAYDAARIDFHQMVRRGMVENNLKILELRQENLQLKKDLDALEAQLHQLKIAQGEISRPKRRRVCRSQKITARKSTSRPELVRQSLAWTCFVETPRAEPAPVVPQEGEASGVGSSEAPSLFAGSVWGFQMVTTRRNVNTGEGNQPEGSNPNHQGNPPPPPPPDTNAILTQILAQQANMMTAFLHHLQNPPQQNAPPPPPQHSKLAEFLRIRPPTFSSSNNPVDALDWLHAVGKKLDTVQCSDEEKVVFAAHQLQGPASLWWDHFQATQPEGQPITWARFTAAFRRTHVPAGVVALKKREFRELKQGNRSVMEYLHEFNNLARYAPEDVREDEEKQEKFLAGMDPELSVRLVSGDYPDFQRLVDKSIRLEAKHKELESHKRRLANFRNQQGANQRVRYTNPYPGGSSSQQQQQQQPRPAPRPQFVVRVPQPQQQQNQQGTRAPRPPTPAVQPVQGRRDAQGQQRLCFNCFEPGHFADKCPKPRRQQGQAPPRSNNGGKDVIRGRVNHVTAEDVLTTPDVIVGTFLVHSIPATILFDSGASHSFISVPFVGRNQLGVERLRNPLLITTPGGVMTAKYYSPAVPIEIQGIPFPSDLILLDTKNLDVILGMNWLAQFQGVVDCARRTVTLYRGPEQPVVFFAPSTSVRSSELHQIELSEIPIVREFGDVFPEELPGMPPKREIEFRIDLAPGTTPLYKRPYRMAANELAEVKKQLEELKEKGYIRPKKKDKTKRMCVDYRALNEVTIKNKYPLPRIDDLFDQLKGATVFSKIDLRSGYHQLRIREEDIPKTAFTTRYGLYEFTVMSFGLTNAPAFFMNLMNKVFMEYLDKFVVVFIDDILIYSQSEEDHQHHLRLVLGKLREHQLYAKLSKCEFWLSEVKFLGHVISAKGVAVDPETVTAVTDWKQPKTVTQIRSFLGLAGYYRRFIENFSKIARPMTQLLKKEEKFVWSPQCEKAFQTLKEKLVSSPVLILPDTRKDFMVYCDASRQGLGCVLMQDGHVVAYASRQLRPHEGNYPTHDLELAAVVHALKIWRHYLIGNRCEIYTDHKSLKYIFTQSDLNLRQRRWLELIKDYDVGIHYHPGKANVVADALSRKSHCNTLNVRSIPPELNQQMEALNLSIVGRGFLAALEAKPTLLDQIREAQKNDPDMHGLLKNMKQGKAAGFTEDEHGTLWNGKRVCVPDNRELKQLILQEAHESPYSIHPGSTKMYLDLKEKYWWVSMKREIAEFVALCDVCQRVKAEHQRPAGLLQPLQVPEWKWDEIGMDFITGLPKTQGGYDSIWVIVDRLTKVARFIPVKTTYGGNKLAELYFARIVSLHGIPKKIVSDRGSQFTSRFWKKLQEELGTRLNFSTAYHPQTDGQTERLNQILEDMLRACVLDFGKTWDKSLPYAEFSYNNSYQASIQMAPYEALYGRKCRTPLLWDQVGESQVFGTDILREAEAKVRIIRDNLKVAQSRQKSYADNRRRDLEFAVDDFVYLRVTPLRGVHRFQTKGKLAPRYVGPFRITARRGEVAYQLELPASLGNVHDVFHVSQLKKSLRVPSEQANSEQIEVREDLTYVERPVKILDTMERRTRNRVIRFCKVQWSNHAEEEATWEREDELKAAHPDLFASSSESRGRDSV

SEQ ID NO: 19196 - protein, 710 aa, Oryza sativa
  Clone ID: TF_OSC6120j.C1.p1.fg
MSWQRVGALLLGAQSCLPVPEMAGSVTRRGLDMTGFVLELRGMCVALGYPHGVDYQARPLPDQEGDDAEPHAGWEVTAVILSGSPERTSLAVTAGGDSFPAACQNAALLAIGTLHQRYPDELQHSPYRYHPRRGGAHDYATFRDASSEDDATIVHLARMVEVYDAARIDFHQMVRRGMVENNLKILELRQENLQLKKDLDAVEAQLHQLKIAQGEVCRPKRRRVCRSQKITARKSTSRPELVRQSLAWTCFVETPRAEPAPVVPQEGEASGIGSTEALSLFAGSVWGFQMVTTRRNAATGDGNQPEGSNHNHQGNPPPPPPPPPPPPPDTNAILTQILAQQANMMTAFLHHLQNPPQHNAPPPPPQHSKLAEFLRIRPPTFSSSNNPVDALDWFHAVGKKLDTVQCSDEEKVIFAAHQLQGPASLWWDHFQATQPEGQPITWARFTAAFRRTHVPAGVVALKKREFRELKQGNRSVMEYLHEFNNLARYAPEDVREDEEKQEKFLAGMDPELSVRLVSGDYPDFQRLVDKSIRLEAKHKELESHKRRLANFRNQQGANQRGRYTNPYPGGSSSQQQQQQQQPRPAPRPQFVVRFPQPQQQQNQQGTRAPRPPTPTVQPGQGRRDAQGQQRLCFNCFEPGHFADKCPKPRRQQGQAPPRSNNGGKDVIRGRVNHVTAEDVLTTPDVIVGSSEMCFRKNYPVCRPSERLSSG

SEQ ID NO: 19197 - protein, 652 aa, Oryza sativa
  Clone ID: TF_OSC6491j.C1.p1.fg
MSWHRAGVLLLGAQSCLPVPGVPAMAGSINRRGLDLTGFVLELRGMCVVLGYAHGVDYQGRQLPEQEGDDAEPHAAWEVTAVILTGSPERTSLAVTTGGDSFSAACQNAALLAIGTLHQRYPDELQHSPYRYHPRRGGARDYATFRDASSEDDATIMHLARMVEAYDAARIDFHQMLKKDLDAAEAQLHQLKIAQGEVCRPKRRRVCRSQKITARKSTSRPELVRQSLAWTCFVETPRAEPAPMAPQEGEASGVDGDDQEKCCYGEGSHPEGSNHNNQGSPPPPPPPPLPPPPDTNAILTQILAQQANMMTALLHHIQNPPQHNAPPPPPQHSKLAEFLRIRPPTFSSSNNPVDALDWLHAVGKKLDTVQCSDEEKVIFAAHQLQGPASLWWDHFQATQPEGQPITWARFTAAFRRTHVPAGVVALKKREFRELKQGNRSVMEYLHEFNNLARYAPEDVREDEEKQEKFLAGMDPELSVRLVSGDYPDFQRLVDKSIRLEAKHKELESHKCHLENFRNQQGANQRVRYTNPYPGGSSSQQQPQQQQPRSAPRPQFVVRVPQPQQQQNQQGTRAPRPPTPTVQPGQGRRDASGPQRLCFNCFEPGHFADKCPKPRRQQGQAPPRPNNGGKDVIQGRVNHVTAEDVLTTPDVIV

SEQ ID NO: 19198 - protein, 512 aa, Oryza sativa
  Clone ID: TF_OSC7321j.C1.p1.fg
MVEAYDAARIDFHQMVRRGMVENNMKILELRQENLQLKKDLDAVEAQLHQLKIAQGEVCRPKRRRVCRSQKITARKSTSRPELVRQSLAWTCFVETPRAEPTPVVPQKGEASGVDGETRRNAATSDGNQPEGSNHNNHGSPPPPPPPPPPPPPDTNAILTQILAQQANMMTAFLHHLQNPPQHNAPPPPPQHSKLAEFLRICPPTFSSSNNPVDALDWLHAVGKKLDTVQCSDEEKVIFAAHQLQGPASLWWDHFQATQPEGQPITWARFTAAFRRTHVPAGVVALKKREFRELKQGNRSVMEYLHEFNNLARYAPEDVREDEEKQEKFLAGMDPELSVCLVSGDYPDFQRLVDKSIRLEAKHKELESHKRRLANFHNQQGANQRVRYTNPYPGGSSSQQQQQQQQPRSARGPQFVVRVPQPQQEQNQQGTRAPRPPPPTVQPGQGRRDAQGPQRLCFNCFEPGHFADKCPKPRRQQGQAPPRPNNGGKDVIRGRVNHVTAEDVLTTPDVIV

SEQ ID NO: 19199 - protein, 659 aa, Oryza sativa
  Clone ID: TF_OSC7370j.C1.p1.fg
MTGFVLELRGMCVVLGYPHGVDYQARPLPEQEGEDAEPHAGWEVTAVILSGSPERISLAVTAGGDSFPAACQNAALLAIGTLHQRYPDELQHSPYRYHPRRGGARDYATFRDASSEDDATVVHLARMVEAYDAARIDFHQMVRRGMVENNLKILELRQENLQLKKDLDAVEAQLHQLKIAQGEDSRPKRRRVCRSQKITARKSTSRPELVRQSLAWTCFVETPRAEPAPVVPQEGEASGVGSSEVVWGMVTPMVTTRRNVNTGEGNQPEGSNPNHQGNPPPPPPPDTNAILTQILAQQANMMTAFLHHLQNLPQQNAPPPPPQHSKLAEFLRIRPPTFSSSNNPVDALDWLHAVGKKLDTVQCSDEEKVIFAAHQLQGPASLWWDHFQATQPEGQPITWARFTAAFRRTHVPAGVVALKKREFRELKQGNRSVMEYLHEFNNLARYAPEDVREDEEKQEKFLAGMDPELSVRLVSGDYPDFQRLVDKSIRLEAKHKELESHKRRLANFRNQQGANQRVRYTNPYPGGSSSQQQQQQQQPRSAPRPQSVVRVPQQQQQQNQQGTRAPRPPTPAGQPVQGRRDASGPQRLCFNCFEPGHFADKCPKPRRQQGQAPPRSNNGGKDVIRGRVNHVTAEDVLTTPDVIVGRSCGSLCLTPTTTS

SEQ ID NO: 19200 - protein, 661 aa, Oryza sativa
  Clone ID: TF_OSC7911j.C1.p1.fg
MAGSVTRRGLHMTGFVLELRGMCVVLGYPHGVDYQARPLPDQEGEDAEPHAGWEVTAVILSGSPERTSLAVTAGGDSFPAACQNAALLAIGTLHQRYPDELQHSPYRYHPRRGGASDHATFRDASSEDDATVVHLARMVEAYDAARIDFHQMVRRGMVENNLKILELRQENLQLKKDLDALEAQLHQLKIAQGEISRPKRRRVCRSQKITARKSTSRPELVRQSLAWTCFVETPRAEPAPVVPQEGEASGVGSSEVVWGMVTPMVTTRRNAATGDGNQPEGSNHNHQGNPPPPPPPPPPPPPDTNAILTQILAQQANMMTAFLHHLQNPPQQNAPPPPPQHSKLAEFLRIRPPTFSSSNNPVDALDWLHAVGKKLDTVQCSDEEKVIFAAHQLQGPASLWWDHFQATQPEGQPITWARFTAAFRRTHVPAGVVALKKREFRELKQGNRSVMEYLHEFNNLARYAPEDVRADEEKQEKFLAGMDPELSVRLVSGDYPDFQRLVDKSIRLEAKHKELESHKRRLANFRNQQGANQRVRYTNPYPGGSSSQQQQQQQQPRSAPRPQFVVRVPQPQQQQNQQGTRAPRPPTPAVQPAQGRRDAQGQQRLCFNCFEPGHFADKCPKPRRQQGQAPPRSNNGGKDVIRGRVNHVTAEDVLTTPDVIV

SEQ ID NO: 19201 - protein, 731 aa, Oryza sativa
  Clone ID: TF_OSC7912j.C1.p1.fg
MTGFVLELRGMCVVLGYPHGVDYQARPLPKQEGEDAEPHAGWEVTAVILSGSPERTSLAVTAGGDSFPAACQNAALLAIGTLHQRYPDELQHSPYRYHPRRGGARDYATFRDASSEDDATVVHLARMVEAYDAARIDFHQMVRRGMVENNLKILELRQENLQLKKDLDALEAQLHQLKIAQGEISRPKRRRVCRSQKITARKSTSRPELVRQSLAWTCFVETPRAEPAPVVPQEGEASGVGSSEGALLLTFRPGPSQRSSSLFAGSMWGFQMVTTRRNVNTGEGNQPEGSNPNHQGNPPPPPPPDTNAILTQILAQQANMMNAFLHHLQNPPQQNAPPPPPQHSKLAEFLRIRPPTFSSSNNPVDALDWLHAVGKKLDTVQCSDEEKVIFAAHQLQGPASLWWDHFQATQPEGQPITWARFTAAFRRTHVPAGVVALKKREFRELKQGNRSVMEYLHEFNNLARYAPEDVREDEEKQEKFLAGMDPELSVRLVSGDYPDFQRLVDKSIRLEAKHKELESHKRRLANFRNQQGANQRVRYTNPYPGGSSSQQQQQQQPRSAPRPQFVVRVPQPQQQQNQQGTRAPRPPTPTVQPVQGRRDAQGQQRLCFNCFEPGHFADKCPKPRRQQGQAPPRSNNGGKDVIRGRVNHVTAEDVLTTPDVIVEKKDKTKRMCVDYRALNEVTIKNNVSRQNTNDRPDFSNLSKCQNGSGMKLGWISSPDFQKPKVDMILYG

SEQ ID NO: 19202 - protein, 1974 aa, Oryza sativa
  unsure (1)..(1974): unsure at all Xaa locations
  Clone ID: TF_OSC8726j.C1.p1.np
LPSRRIRARDVALSLRRRRRALVRRRRRPGPPPTSAPPPLASPHPRRPRPPLRFGRQPPERRRPRRPDPRHRLPPLRPPPPSPPSPRDELWTVASFPFPSLSRPPLRRAGGRRLRPSERGRAASRRPRKHGRPRACRVATAWGLAVSRPRPWVRLTCGAHSADRCEPRGAWFXWXHLGHIWTGLRASVAKHYRFHMSSGANEANEGYTSCGPVVEMSWHRAGVLLLGAQSCLPVPGVPAVGGIGSMYTSDQSIIYSNSRALGYGQAEQCTQMAGSVSRRGLDMTGFVLELRGMCVVLGYPHGVDYQGRPLPEQEGDDAEPHAAWEVTAVILTGSPERTSLAVTAGGDSFSAACQSAALLAICTLHQRYPDELQHSPYRYHPRRGGARDYATFRDASSEDDATIMHLARMVEAYDAARIDFHQMVRRGMVENNLKILELRQENLQLKKDLDAVEAQLHQLKIAQGEVCRPKRRRVCRSQKITARKSTSRPELVRQSLAWTCFVENPRAEPAPVVPQEGEASGVGSTEDALLLTFHGETRRSASTGDGNQPEGSNHNHQGSPPPPPPPPPPPPPDTNAILTQILAQQANMMIAFLHHLQNPPQHNAPPPPPQHSKLAEFLRIRPPTFFSSNNPVDALDWLHAVGKKLDTVQCSDEEKVIFAAHQLQGPASLWWDHFQATQPEGQPITWARFTAAFRRTHVPAGVVALKKREFRELKQGNRSVMEYLHEFNNLARYAPEDVRDEEKQEKFLAGMDPELSVRLVSGDYPDFQRLVDKSIRLEAKHKELESHKRRLANFRNQQGANQRVRYTNPYPGGSSSQQQPRSAPRPQFVVRVPQPQQQQSQQGTRAPRPPTPTVQPGQGRRDAQGPQRLCFNCFEPGHFADKCPKPRRQQGQAPPRSNNGGKDVIRGRVNHVTAEDVLTTPDVIVGTFLIHSIPATILFDSGASHSFISVPFVGRNQLGVERLRNPLLITTPGGVMTAKYYSPAVPIEIQGIPFPSDLILLDTKNLDVILGMNWLAQFQGVVDCARRTVTLYRGPEQPVVFFAPPTSVRSSELHQIVLSEIPIVREFGDVFPEELPGMPPKREIEFRIDLAPGTTPLYKRPYRMAANELAEFKKQLEELKEKGYIRPSTSPWGAPVIFVEKKDKTKRMCVDYRALNEVTIKNKYPLPRIDDLFDXLKSATVFSKIDLRSGNHQLRIREEDIPKTAFTTRYGLYEFTVMSFGLTNAPAFFMNLMNKVFMEYLDKFVVVFIDDILIYSQSEEDHQHHLRLVLGKLREHQLYAKLSKCEFWLSEVKFLGHVISAKGVAMDPETVTAVTDWKQPKTVTQVRSFLGLAGYYRRFIENFSKIARPMTQLLKKEEKFVWSPQCEKAFQTLKEKLVSSLVLVLPDTRKDFMVYCDASRQGLGCVLMQDGHVVAYASRQLRPHEGNYPTHDLELAAVVHALKIWRHYLIGNRCEIYTDHKSLKYIFTQSDLNLRQRRWLELIKDYDVGIHYHPGKANVVADALSRKSHCNTLNVRGIPPELNQQMEALNLSIVGRGFLATLEAKPTLLDQIREAQKNDPDMRGLLKNMKQGKAAGFTEDEHGALWNGNRRVKAEHQRPAGLLQPLQVPEWKWDEIGMDFITGLPKTQGGYDSIWVVVDRLTKVARFIPVKTTYGGNKLAELYFARIVSLHGVPKKIVSDRGSQFTSHFWKKLQEELGTRLNFSTAYHPQTDGQTERLNQILEDMLRACVLDFGKTWDKSLPYAEFSYNNSYQASIQMAPYEALYGRKCRTPLLWDQVGESQVFGTDILREAEAKVRTIRDNLKVAQPRQKSYADNRRRNLEFAVDDFVYLRITPLRGVHRFRTKGKLAPRFVGPFRIIARRGEVAYQLELPASLGNVHDVFHVSQLKKCLRVPSEQADSEQIEVREDLTYVERPVKILDTMERRTRNRVIRFCKVQWSNHAEEEATWEREDELKAAHPDLFASSSESRGRDSV

SEQ ID NO: 19203 - protein, 1853 aa, Oryza sativa
  unsure (1)..(1853): unsure at all Xaa locations
  Clone ID: TF_OSC900012j.C1.p12.np
MDEVGGRWTFSRANEGYTSCGPVVEMSWQRVGALLLGAQSCLPVPEVPAVGGIGSMYTSDQSIIYSNSRALGYGQAEQCTQMAGSINRRGLDLTGFVLELRGMCVVLGYPHGVDXQGKQLPEQEGADAEPHAAWEVTAVILTGSPERTSLAVTAGGDSFSAACQNAALLAIGTLHQRYPDELQHSPYRYHPRRGGARDYATFRDASSEDDATIMHQARMVEAYDVARIDFHQMMHRGLVENNMKILELRQENLQLKKDLDAVEAQLRQLKIAQGEVCRPKRRRVCRSQKITARKSTSRTCFVETPRAERAPVVPQEDGASGVGHGGCADAHLPSWPIAAVGEQLVGLRMVTTRRSAATGEGSHPEGSNHTHGSPPPPPPPPPPPPPDTNAILTQILAQQANMMAAFLHHIQNPPPHNAPPPPPQHSKLAEFLRIRPPTFSSSNNPVDALDWLHAVGKKLDTVQCSDEEKVIFAAHQLQGPASLWWDHFQATQPEGQPITWARFTAAFWRTHVPAGVMALKKREFRELKQGNRSVMEYLHEFNNLARYAPEDVREDEEKQEKFLAGMDPELSVRLVSGDYPDFQRLVDKSIRLEAKHKELESHKRRLASFRNQQGANQRVRYTNPYPGGSSSQQQQQQQQPRSAPRPQFVVRVPQPQQQQSQQGTRAPRPPTPAVQPGQGRRDVQGPQRLCFNCFEPGHFADKCPKPRRQQGQAPPRSNNGGKDVIRGRVNHVTAEDVLTTPDVIVGTFLIHSIPATILFDSGASHSFISVPFVGRNQLGVERLRNPLLITTPGGVMTAKYYSPAVPIEIXGIPFLSDLILLDTKNLDVILGMNWLAQFQGVVDCARRTVTLYRGPEQPVVFFAPPTSVGSSELHQIRLSEIPIVREFGDVFXEELPGMPPKREIEFRIDLAPGTTPLYKRPYRMAANELAEVKKQLEELKGKGYIRPSTSPWGAPVIFVEKKDKTKRMCVDYRALNEVTIKNKYPLPRIDDLFDQLKGATVFSKIDLRSGYHQLRIREEDIPKTAFTTQYGLYEFTVMSFGLTNAPAFFMNLMNKVFMEYLDKFVVVFIDDILVYSQSEEDHQHHLRLVLGKLREHQLYAKLSKCEFWLSEVKFLGHVISAKGVAVDPETVTAVTDWRQPKTVTQIRSFLGLAGYYRRFIENFSKIARPMTQLLKKEEKFVWSPQCEKAFQTLKEKLVSSPVLILPDTRKDFMVYCDASRQGLGCVLMQEGHVVAYASRQLRPHEGNYPTHDLELAAVVHALKIWRHYLIGNRCEVYTDHKSLKYIFTQSDLNLRQRRWLELIKDYDVGIHYHPGKANMVADALSRKSHCNTLDVRGIPPELNQQMEALNLSIVGRGFLATLEAKPTLLDQIREAQKNDPDMRGLLKNMKQGKAAGFTEDEHRTLWNGNRVCVPDDRELKQLILQEAHESPYSIHPGSTKMYLDLKGKYWWVSMKREIAEFVALCDVCQRVKAEHQRPAGLLQPLQVPEWKWDEIGMDFITGLPKTQGGYDSIWVVVDRLTKVARFILVKTTYGGNKLAELYFARIVSLHGVPKKIVSDRGSQFTSHIWKKLQEELGTRLNFSTAYHPQTDGQTERLNQILEDMLRACVLDFGKTWDKSLPYAEFSYNNSYQASIQMAPYEALYGRKCQTPLLWDQVGESXVFGTDILREAEAKVRTIRDNLKVAQSRQKSYADNRRRNLEFAVDNFVYLWVTPLRGVHRFQMKGKLAPRFVGPFRIIARRGEVAYQLELPASLGNVHDVFHVSQLEKCLRVPSEXADSEQIEVREDLTYVERPVKILDTMERRTRNRVIRFCKVQWRNHAEEEATWEREDELKAAHPDLFARSSESRGRDSV

SEQ ID NO: 19204 - protein, 439 aa, Oryza sativa
  unsure (1)..(439): unsure at all Xaa locations
  Clone ID: TF_OSC900012j.C1.p15.np
RPKVLIXETDTVLVKVSILXPCPPTYITRRSAAIGEGSHPEGSNQILAQQANMMAAFLHHIQNLPQNNAPPPPPPPQHSKLAEFLRIRPPTFSSSHNPIDALDWLHAVGKKLDTVQCNDEEKVIFAAHQLQGPASLWWDHFQATQPEGQPITWARFTAAFRRTHVPAGVMALKKREFRELKQGNRSVMEYLHEFNNLARYAPEDVREDEEKQEKFLAGMNPELSVRLVSGDYPDFQRLVDKSIRLEAKQKELESHKRRLANFRNQGANQRIRYTNPYPRGSSSQQQQQQPRSAPLPQFVPGQGHPGQGHRDAQGQQRLCFNCFEPGHFADKCPKPRRQQGQAPPRPNNGGKDVIRGRVNHVTAEDVLTTPDVIVGTFLIHSIPATILFDSRASHSFISVPFVGRNQLGVERLMNPLLITTPGGVMTTKYYSPAVPIEIQ

SEQ ID NO: 19205 - protein, 1790 aa, Oryza sativa
  Clone ID: TF_OSC900028j.C1.p18.fg
MDEVGGRWTFSKANEGYTSCGPMAGSVTRRGVDMTGFVLELRGMCVVLGYPHGVDYQARPLPEQEGEDAEPHAGWEVTAVILSGSPERTSLAVTAGGDSFPAACQNAALLAIGTLHQRYPDELQHSPYRYHPRRGGARDYATFRDASSEDDATVVHLARMVEAYDAARIDFHQMVRRGMVENNLKILELRQENLQLKKDLDALEAQLHQLKIAQGEDSRPKRRRVCRSQKITARKSTSRPELVRQSLAWTCFVETPRAEPAPVVPQEGEASGVGSSEAPSLFAGAVWGFQMVTTRRNVNTGEGNQPEGSNPNHQGNPPPPPPPDTNAILTQILAQQANMMTAFLHHLQNPPQQNAPPPPPQHSKLAEFLRIRPPTFSSSNNPVDALDWLHAVGKKLDTVQCSDEEKVIFAAHQLQGPASLWWDHFQATQPAGQPITWAHFTAAFRRTHVPAGVVALKKREFRELKQGNRSVMEYLHEFNNLARYAPEDVREDEEKQEKFLAGMDPELSVRLVSGDYPDFQRLVDKSIRLEAKHKELESHKRRLANFRNQQGANQRVRYTNPYPGGSSSQQQQQQQQPRPAPRPQFVVRVPQPQQQQNQQGTRAPRPPTPAGQPVQGRRDASGPQRLCFNCFEPGHFADKCPKPRRQQGQAPPRSNNGGKDVIRGRVNHVTAEDVLTTPDVIVGTFLVHSIPATILFDSRASHSFISVPFVGRNQLGVERLRNPLLITTPGGVMTAKYYSPAVPIEIQGIPFPSDLILLDTKNLDVILGMNWLAQFQGVVDCARRTVTLYRGPEQPVVFFAPPTSVRSSELHQIGLSEIPIVREFGDVFPEELPGMPPKREIEFRIDLAPGTTPLYKRPYRMAANELAEVKKQLEELKEKGYIRPSTSPWGAPVIFVEKKDKTKRMCVDYRALNEVTIKNKYPLPRIDDLFDQLKGATVFSKIDLRSGYHQLRIREEDIPKTAFTTRYGLYEFTVMSFGLTNAPAFFMNLMNKVFMEYLDKFVVVFIDDILIYSQSEEDHQHHLRLVLGKLRKHQLYAKLSKCEFWLSEVKFLGHVISAKGVAVDPETVTAVTDWKQPKTVTQIRSFLGLAGYYRRFIENFSKIARPMTQLLKKEEKFVWSPQCEKAFQTLKEKLVSSPVLILPDTRKDFMVYCDASRQGLGCVLMQDGHVVAYASRQLRPHEGNYPTHDLKLAAVVHALKIWRHYLIGNRCEIYTDHKSLKYIFTQSDLNLRQRRWLELIKDYDVGIHYHPGKANVVADALSRKSHCNTLNVRGIPPELNQQMEALNLSIVGRGFLAALEAKPTLLDQIREAQKNDPDMHGLLKNMKQGKAAGFTEDEHGTLWNGKRVCVPDSRELKQLILQEAHESPYSIHPGSTKMYLDLKENYWWVSMKREIAEFVALCDVCQRVKAEHQRPAGLLQPLQVPEWKWDEIGMDFITGLPKTQGGYDSIWVIVDRLTKVARFIPVKTTYGGNKLAELYFARIVSLHGVPKKIVSDRGSQFTSHFWKKLQEELGTRLNFSTAYHPQTDGQTERLNQILEDMLRACVLDFGKTWDKSLPYAEFSYNNSYQASIQMAPYEALYGRKCRTPLLWDQVGESQVFGTDILREAEAKVRIIRDNLKVAQSRQKSYADNRRRDLEFAVDDFVYLRVTPLRGVHRFQTKGKLAPRYVGPFRIIARRGEVAYQLELPASLGNVHDVFHVSQLKKCLRVPSEQADSEQIEVREDLTYVEKPVKILDTMERRTRNRVIRFCKVQWSNHAEEEATWEREDELKAAHPDLFASSSESRGRDSV

SEQ ID NO: 19206 - protein, 2018 aa, Oryza sativa
  unsure (1)..(2018): unsure at all Xaa locations
  Clone ID: TF_OSC900039j.C1.p3.np
MEPEIAAPVSFPSGRPLSLPTLYKHSPCLPPPFPPLAALSPRRIRARAVALSLRHRRRAPVRRRRRPGPPPASASPSFGSPRPRRPRPLLRFARRPPERRRPRRPEPRRRLPPLRSPFPSSPSTRGEPWTRFTSPFPPLSRAPLRRAGGRRRRPSGRGCAASRRLCRRGRLRVRPAAAMWGPAVSRPRPQVRLTRGTHGADRRKPRAPGPPWTHLGHVRTGLRASVAKHYRFHMSSGANEGANEGYTSCGPVVEMSWHRAGVLLLGAQSCLPVPGVPAVGGIGSMYTSDQSIIYSNSRALGYGQAEQCTQMAGSVTRRGLSMTGFVLELRGMCVVLGYPHGVDYQARPLPEQEGDDAEPHAGWEVTAVILSGSPERTSLAVTAGGDSFPAACQNAALLAIGTLHQRYPDELQHSPYRYHPRHEGARDYATFRDASSEDDATIVHLARMVEAYDVARIDFHQMVRRGMVENNMKILELRQENLQLKKDLDAVEAQLHQLKIAQGEVCRPKRRRVCRSQKITARKSTSRPELVRQSLAWTCFMETPRAEPAPVVPQEGEASGVGSTEDALLLTFHETRRNAATGDGNQPEGSNHNHQGNPPPPPPPPPPPPPDTNAILTQILAQQANMMTAFLHHLQNPPQHNAPPPPPEHSKLAEFLRIRPPTFSSSNNPVDALDWLHAVGKKLDTVQCSDEEKVIFAAHQLQGPASLWWDHFQATQPEGQPITWARFTAAFRRTHVPAGVVALKKREFRELKQGNRSVMEYLHEFNNLARYAPEDVREDEEKQEKFLAGMDPELSVRLVSGDYPDFQRLVDKSIRLEAKHKELESHKRRLANFRNQHGANQRVRYTNPYPGGSSSQQQQXQQQPRSAPRPQFVVRVPQPQQQQNQQGTRAPRPPTPTVQPGQGRRDAQGQQRLCFNCFEPGHFADKCPKPRRQQGQAPPRSSNGGKDVIRGRVNHVTAEDVLTTPDVIVGTFLIHSIPATILFDSGASHSFISVPFVGRNQLGVERLRNPLLITTPGGVMTAKYYSSAVPIEIQGIPFPSDLILLDTKNLDVILGMNWLAQFQGVMDCARRTVTLYRGPEQPVVFFAPPTSVKSSELHQIGLSEIPIVREFGDVFPEELPGMPPKREIEFRIDLAPGTTPLYKRPYRMAANELAEVKKQLEELKEKGYIRPSTSLWGAPVIFVEKKDKTKRMCVDYRALNEVTLKNKYPLPRIDDLFDQLKGATVFSKIDLRSGYHQLRIREEDIPKTAFTTRYGLYEFTVMSFGLTNAPAFFMNLMNKVFMEYLDKFVVVFIDDILIYSRSEEDHQHHPRLVLGKLREHQLYAKLSKCEFWLSEVKFLGHVISAKGVAVDPETVTAVTDWKQPKTVTQVRSFLGLAGYYRRFIENFSKIARPMTQLLKKEEKFVWSPQCEKAFQTLKEKLVSSPVLILPDTRKDFMVYCDASRQGLGCVLMQDGHVVAYASRQLRPHEGNYPTHDLELAAVVHALKIWRHYLIGNRCEIYTDHKSLKYIFTQSDLNLRQRRWLELIKDYDVGIHYHPGKANVVADALSRKSHCNTLNVRGIPPELNQQMEALNLSIVGRGFLAALEAKPTLLDQIREAQKNDPDMHGLLKNMKQGKAAGFTEDEHGTLWNGKRRVKAEHQRPAGLLQPLQVPEWKWDEIGMDFITGLPKTQGGYDSIWVVVDRLTKVARFIPVKTTYGGNKLAELYFARIVSLHGVPKKIVSDRGSQFTSHFWKKLQEELGTRLNFSTAYHPQTDGQTERLNQILEDMLRACVLDFGKTWDKSLPYAEFSYNNSYQASIQMAPYEALYGRKCRTPLLWDQVGESQVFGTDILREAESKVRIIRDNLKVAQSRQKSYADNRRRDLEFAVGDFVYLRVTPLRGVHRFQTKGKLAPRYVGPFRIIARRGEVAYQLELPASLGNVHDVFHVSQLKKCLRVPSEQADSEQIEVREDLTYVERPVKILDTMERRTRNRVIRFCKVQWSNHAEEEATWEREDELKAAHPDLFVSPSESRGQDSV

SEQ ID NO: 19207 - protein, 1757 aa, Oryza sativa
  Clone ID: TF_OSC900042j.C1.p11.fg
MSWHRAGVLLLGAQSCLPVPGVPAVGGIGSVLLSMARMGWKLCHVFRLYTVVMAGSVSRRGLDMTGFVLELRGMCVVLGYPHGVDYQRRPLPEQEGDDAEPLAAWEVTAVILAGSPERTSLAVTAGGDSFPAACQSAALLAIGTLHQRYPDELQHSPYRYHPRRGGARDFATFRDASSEDDATIMHLARMVEAYDAARIDFHQMVRRGMVENNMKILELRQENLQLKKDLDAVEAQLHQLKIAQGEVCCPKRRRVCRSQKITARKSTSRPELIRQSLAWTCFMETPRAEPTLVVPQEGEASGVGSTEDALLLTFRPGPSQRRSANTGDGNQPEGSNHNHQGSPPPPPPPPPPPPPDTNAILTQILAQQANMMTAFLHHLQNPPQHNAPPPPPQHSKLAEFLRIRPPTFSSSNNPVDALDWLHAVGKKLDTVQCSDEEKVIFAAHQLQGPASLWWDHFQATQPEGQPITWARFTAAFRRTHVPAGVVALKKREFRELKQGNRSVMEYLHEFNNLARYAPEDVREDEEKQEKFLAGIDPELSVRLVSGDYPDFQRLVDKSLRLEAKHKELESHKRRLANFRNQQGANQRQQQQQPQPRSAPRPQFVVRVPQPQQQQSQQGTRVPRPPMPDGQPSQGHRDAQGPQRLCFNCFEPGHFADKCPKPRRQQGQAPPRSNNGGKDVIRGRVNHVTAEDVLTTPDVIVGTFLIHSIPATILFDSGASHSFISVPFVGRNQLGVERLRNPLLITTPGGVMTAKYYSPAVPIEIQGIPFPSDLILLDTKNLDVILGMNWLAQFQGVVDCARRTVTLYRGPEQPVVFFAPPTSVSSSELYQIGLSEIPIVREFGDVFPEELPGMPPKREIEFRIDLAPGTTPLYKRPYRMAANELAEVKKQLEELKEKGYIHPSTSPWGAPVIFVEKKDKTKRMCVDYRALNEVTIKNKYPLPRIDDLFDQLKGATVFSKIDLRSGYHQLRIHEEDILKTAFTTRYGLYEFTVMSFGLTNAPAFFMNLMNKVFMEYLDKFVVVFIDDILIYSQSEEDHQHHLRLVLGKLREHQLYAKLSKCEFWLSEVKFLGHVISAKGVAVDPETVTAVTDWKQPKTVTQVRSFLGLAGYYRRFIENFSKIARPMTQLLKKEEKFVWSPQCEKAFQTLKEKLVSSPVLVLPDTRKDFMVYCDFAPRIGLRPHDGNYPTHDLELAAVVHALKIWRHYLIGNRCEIYTDHKSLKYIFTQSDLNLRQRRWLELVKDYDVGIHYHPGKANVVADTLSRKSHCNTLNVRGIPPELNKQMEALNLSIVGRGFLAALEAKPTLLDQIREAQRNDPDMHGLLKNMKQGKVAGFTEDEHGTLWNGNRVCVPDNRELKQLILQEAHKSPYSIHPGSTKMYLDLKEKYCVSRQSTNDRPDFSNLSKYQNGNEMKLGWISSPDFQKPKVARFIPVKTTYGGNKLAELYFARIVSLHGVPKKIVSDRGSQFTSHFWKKLQEELGTRLNFSTAYHPQTDGQTERLNQILEDMLRACVLDFGKTWDKSFPYAEFSYNNSYQASIQMAPYEALYGRKCRTPLLWDQVGESQVFGIDILREAEAKVRAIRDNLKVAQSRQKSYADNRRRDLEFAVDDFVYLRVTPLRGVQRFRTKGKLAPRFVDPFRIIARRGEVAYQLELPASLGNVHDVFHVSQLKKCLRVPSEQADSEQIEVREDLTYVERPVKILDTMERRTRNRVIRFCKVQWSNHAEEEATWEREDELKAAHPDLFASSSESRGRDSV

SEQ ID NO: 19208 - protein, 827 aa, Oryza sativa
  unsure (1)..(827): unsure at all Xaa locations
  Clone ID: TF_OSC900055j.C1.p18.np
MSWHRAGVLLLGAQSCLPVPGVPAVGGIGSVLLSMARMGWKLCHVFRLYTVVMAGSISRRGLDLTGFVLELRGMCVVLGYPHGVDYQGRPLPEQEGDDAEPHAAWERTSLAVTAGGDSFSARTSLAVTAGGDSFSAACQNAALLAIGTLHQRYPDELQHSPYRYHPRRGGARDYATFRDASSEDDATIMHLARMVEAYDAARIDFHHMVRRGMVENNMKILELRQENLQLKKDLDAVEAQLHQLKIAQGEVCRPKRRRVCRSQKITSRKSTSRPELVRQSLAWTCFVETPRAEPAPVVPQEGEASGVGSTEDALLLTFRPGPSQRRSAATGDGNQPEGSNHNNHGSPPPPPPPPPPPPPDTNAILTQILAQQANMMAAFLHHIQNPPQHNAPPPPRQHSKLAEFLRIRPPTFSSSNNPVDALDWLHAVGKKLDTVQCSDEEKVIFAAHQLQGPASQWWDHFQATQPEGQPITWARFTAAFRRTHVPAGVMALKKREFRELKQGNRSMMEYLHEFNNLARYAPEDVREDEEKKEKFLAGMDPELSVRLVSGDYSDFQRLVDKSIHLEAKHKELESHKRRLANFRNQQGANQRVRYTNPYPGGSSSQQQQPRSAPRPQFVVRVPQPQQXQSQQGTRAPRPPTPAAQSGQGRRDVQGPQRLCFNCFEPGHFADKCPKPRRQQGQAPPRSNNGGKDVIRGRVNHVTAEDVLTTPDVIVGTFLIHSIPATILFDSGASHSFISVPFVGRNQLGVERLRNPLLITTPGGVMTAKYYSPAVPIEIQGIPFPSDLILLDTKNLDVILGMNWLAQFQGVVDCARRTVTLYRGPKQP

SEQ ID NO: 19209 - protein, 759 aa, Oryza sativa
  Clone ID: TF_OSC900056j.C1.p22.gm
NFPGRDKRLCFNCFEPGHFADKCPKPRRQQGQAPPRSNNGGKDVIRGRVNHVTAEDVLTTPDVIVGTFLIHSIPATILFDSGASHSFISVPFVGRNQLGVERLRNPLLITTPGGVMTAKYYSPAVPIEIQGIPFPSDLILLDTKNLDVILGMNWLAQFQGIGLSEIPIVREFGDVFPEELPGMPPKREIEFRIDLAPGTTPLYKRPYRMAANELAEVKKQLEELKEKGYIRPSTSPWGAPVIFVEKKDKTKRMCVDYRALNEVTIKNKYPLPRIDDLFDQLKGATVFSKIDLRSGYHQLRIREEDIPKTAFTTRYGLYEFTVMSFGLTNAPAFFMNLMNKVFMEYLDKFVVPRRAAVAAAVVSRRRHHRVRKVAAVPVHRFAAAEDRRSTVAAVDPIFSAAFSSTPPPSVGLPPTFWSSVSSPRRDLRLGALRLCRRAAVRRRACAVRAVRAAEPPPVLTSSLTPFPRYRGGTEAHGDMMWGCVLWVQWYTSGQRYYRRFIENFSKIARPMTQLLKKEEKFVWSPQCEKAFQTLKEKLVSSPVLILPDTRKDFMVYCDASRQGLGLSVHGGPGARGWRRPAPWVPRVSRTRGRGRLTAGPHLAAAGRARRRPRRHGRRENGAPAPRWSPPATNGAAEWHPRERREGGSERSGPRLTPVDGDDGNGGRKRRKAAARFGTTRTTAFRRSASEAEGRTRSTTTRRSRRRRRREGRKSGATAAANRSSAATAERRCDGASTIPTGRASGERRKRRRRARGTFK

SEQ ID NO: 19210 - protein, 1806 aa, Oryza sativa
  Clone ID: TF_OSC900082j.C1.p6.fg
MSWHRASVLLLGAQSCLPVPGVPAVGGIGSVLLSMARMGWKLCHVFRLYTVVMAGSINRRGLDLTGFVLELRGMCVVLGYPHGVDYQGRQLPEQEGDDAEPHAAWEVTAVILTGSPERTSLAVTAGGDSFSAACQNAALLAIGTLHQRYPDELQHSPYRYHPRRGGARDYATFRDASSEDDATIMHLACMVEAYDAARIDFHQMVRHGLVENNMKILELRQENLQLKKDLDAVEAQLHQLKIAQGEVCRPKRRRVCRSQKITARKSTSRPELVRQSLAWTCFVETPRAEPMPVVPQEGEASGVGSTEDALLLTFRPGPSQRRSANTGDGNQPEGSNHHNHGSPPPPPPPPPPPPPDTNAILTQILAQQANMMAAFLHHIQNPPQHNAPPPPPQHSKLAEFLRIHPPTFSSSNNPVDALDWLHAMGKKLDIVQCSDEEKVVFAAHQLQGPASLWWDYFQATQPEGQPITWARFTAAFRRTHVPAGVMALKKREFRELKQGNRSVMEYLHEFNNLARYAPEDVREDEEKQEKFLAGMDPELSVRLVSGDYPDFQRLVDKSIRLEAKHKELESHKRRLANFRNQQGANQRIRYTNPYPGGSSSQQQQQQQPRSAPRPQFVVRVPQPQQQQSQQGTRAPRPPTPAAQSGQGRRDVQGPQRLCFNCFEPGHFADKCPKPRRQQGQAPPRSNNGGKDVIRGRVNHVTAEDVLTTPDVIVGTFLIHSIPATILFDSGASHSFISVPFVGRNQLGVERLRNPLLITTPGGVMTAKYYSPAVPIEIQGIPFPSDLILLDTKNLDVILGMNWLAQFQGVVDCARRTVTLYRGPEQPVVFFAPPTSVSSSELHQIGLSEIPIIREFGDVFPEELPGMPPKREIEFRIDLAPGTTPLYKRPYRMAANELAEVKKQLEELKEKGYIRPSTSPWGAPVIFVEKKDKTKRMCVDYRALNEVTIKNKYPLPRIDDLFDQLKGATVFSKIDLRFGYHQLRIREEDIPKTAFTTRYGLYEFTVMSFGLTNAPAFFMNLMNKVFMEYLDKFVVVFIDDILVYSQSEEDHQHHLRLVLGKLREHQLYAKLSKCEFWLSEVKFLGHVISAKGVAVDPETVTAVTDWKQPKTVTQIRSFLGLAGYYRRFIENFSKIARPMTQLLKKEEKFVWSPQCEKAFQTLKEKLVSSPVLILPDTRKDFMVYCDASRQGLGCVLMQEGHVVAYASRQLRPHEGNYPTHDLELAAVVHALKIWRHYLIGNRCEIYTDHKSLKYIFTQSDLNLRQRRWLELIKDYDVGIHYHPGKANVVADALSRKSHCNTLNVRGIPPELNQQMEALNLSIVGRGFLAALEAKPTLLDQIREAQKNDPDMRGLLKNMKQGKAAGFTEDEHGTLWNGNREAHESPYSIHPGSTKMYLDLKEKYWWVSMKREIAEFVALCDVCQRVKAEHQRPAGLLQPLQVPEWKWDEIGMDFITGLPKTQGGYDSIWVVVDRLTKVARFIPVKTTYGGNKLAELYFARIVSLHGVPKKIVSDRGSQFTSHFWKKLQEELGTRLNFSTAYHPQTDGQTERLNQILEDMLRACVLDFGKTWDKSLPYAEFSYNNSYQASIQMAPYEALYGRKCRTPLLWDQVGESQVFGTDILREAEAKVRTIRDNLKVAQSRQKSYADNRRRNLEFAVDDFVYLRVTPLRGVHRFQTKGKLAPRFVGPFRIIARRGEVAYQLELPASLGNVHDVFHVSQLKKCLRVPSEQADSEQIEVREDLTYVERPVKILDTMEHRTRNRVIRFCKVQWSNHAEEEATWEREDELKAAHPDLFASSSESRGRDSV

SEQ ID NO: 19211 - protein, 1795 aa, Oryza sativa
  Clone ID: TF_OSC900086j.C1.p17.fg
MDEVGGRWTFSRANEGYTSCGPMAGSVTRRGLDMTGFVLELRGMCVVLGYPHGVDYQARPLPEQEGEDAEPHAGWEVTAVILSGSPERISLAVTAGGDSFPAACQNAALLAIGTLHQRYPDELQHSPYRYHPRRGGARDYATFRDASSEDDATVVHLARMVEAYDAARIDFHQMVRRGMVENNLKILELRQENLQLKKDLDAVEAQLHQLKIAQGEDSRPKRRRVCRSQKITARKSTSRPELVRQSLAWTCFVETPRAEPAPVVPQEGEASGVGSSEVLIVSSLSLLAGSVWGFQMVTTRRNVNTGEGNQPEGSNPNHQGNPPPPPPPDTNAILTQILAQQANMMTAFLHHLQNLPQQNAPPPPPQHSKLAEFLRIRPPTFSSSNNPVDALDWLHAVGKKLDTVQCSDEEKVIFAAHQLQGPASLWWDHFQATQPEGQPITWARFTAAFRRTHVPAGVVALKKREFRELKQGNRSVMEYLHEFNNLARYAPEDVREDEEKQEKFLAGMDPELSVRLVSGDYPDFQRLVDKSIRLEAKHKELESHKRRLANFRNQQGANQRVRYTNPYPGGSSSQQQQQQQQPRSAPRPQSVVRVPQQQQQQNQQGTRAPRPPTPAGQPVQGRRDASGPQRLCFNCFEPGHFADKCPKPRRQQGQAPPRSNNGGKDVIRGRVNHVTAEDVLTTPDVIVGTFLVHSIPATILFDSGASHSFISVPFVGRNQLGVERLRNPLLITTPGGVMTAKYYSPAVPIEIQGIPFPSDLILLDTKNLDVILGMNWLAQFQGVVDCARRTVTMYRGPEQPVVFFAPPTSVRSSELHQIGLSEIPIVREFGDVFPEELPGMPPKREIEFRIDLAPGTTPLHKRPYRMAANELAEVKKQLEELKEKGYIRPSTSPWGAPVIFVEKKDKTKRMCVDYRALNEVTIKNKYPLPRIDDLFDQLKGATVFSKIDLRSGYHQLRIREEDIPKTAFTTRYGLYEFTVMSFGLTNAPAFFMNLMNKVFMEYLDKFVVVFIDDILIYSQSEEDHQHHLRLVLGKLREHQLYAKLSKCEFWLSEVKFLGHVISAKGVAVDPETVTAVTDWKQPKTVTQIRSFLGLAGYYRRFIENFSKIARPMTQLLKKEEKFVWSPQCEKAFQTLKEKLVSSPVLILPDTRKDFMVYCDASRQGLGCVLMQDGHVVAYASRQLRPHEGNYPTHDLELAAVVHALKIWRHYLIGNRCEIYTDHKSLKYIFTQSDLNLRQRRWLELIKDYDVGIHYHPGKANVVADALSRKSHCNTLNVRSIPPELSQQMEALNLSIVGRGFLAALEAKPTLLDQIREAQKNDPDMHGLLKNMKQGKAAGFTEDEHGTLWNGKRVCVPDSRELKQLILQEAHESPYSIHPGSTKMYLDLKEKYWWVSMKREIAEFVALCDVCQRVKVEHQRPAGLLQPLQVPEWKWDEIGMDFITGLPKTQGGYDSIWVIVDRLTKVARFIPVKTTYGGNKLAELYFARIVSLHGIPKKIVSDRGSQFTSHFWKKLQEELGTRLNFSTAYHPQTDGQTERLNQILEDMLRACVLDFGKTWDKSLPYAEFSYNNSYQSSIQMAPYEALYGRKCRTPLLWDQVGESQVFGTDILREAEAKVRIIRDNLKVAQSRQKSYADNRRRDLEFAVDDFVYLRVTPLRGVHRIQTKGKLAPRYVGPFRIIARRGEVAYQLELPASLGNVHDVFHVSQLKKCLRVPSEQADSEQIEVREDLTYVERPVKILDTMERRTRNRVIRFCKVQWSNHAEEEATWEREDELKAAHPGLFASSSESRGRDSV

SEQ ID NO: 19212 - protein, 1332 aa, Oryza sativa
  Clone ID: TF_OSC900091j.C1.p28.gm
MKITARKSTSRPELVRQSLAWTCFVETPRAEPAPSMVTTRRSAATGEGSHPEGSNHNNHGSPPPPPPPPPPPPPPDTNSILTQILAQQANMMAAFLHHIQNPPQHNVPPPSPPPQHSKLAEFLRIRPPTFSSSNNPVDALDWLHAVGKKLDTVQCNDEEKVIFAAHQLQGPASLWWDNFQAMQPEGQPITWARFTAAFRRTHVPAGVMALKKREFRELKQGNRSVMEYLHEFNDLARYAPEDVREDEEKQEKFLAGMDPELSVRLVSGDYPDFQRLVDKSIRLEAKHKELESHKRRLANFRNQQGANQRIRYTNPYPGGSSSQQQQQQQPRSAPRPQFVVRVPQPQQQQSQQGTRAPRPHVPAVQPGQGRRDAQGQQRLCFNCFEPGHFADKCPKPRRQQGQAPPRPNNGGKDVIRGRVNHVTAEDVLTTPDVIVGTFLIHSIPATILFDSGASHSFISVPFMGRNQLGVERLRNPLLITTPGGVMTAKYYSPAVPIEIQGIPFPSDLILLDTKNLDVILGMNWLAQFQGVVDCARRTVTLYRGPDQPVVFFAPPTSVDNSELHQIGLSKIPIVREFGDVFLEELPGMTPKREIEFRIDLAPGTTPLYKRPYRMAANELAEVKRQLEELKEKGALNEVTIKNKYPLPRIDDLFDQLKGATVFSKIDLRSGYHQLRIREEDIPKTAFTTRYGLYEFTVMSFGLTNAPAFFMNLMNKVFMEYLDKFVVVFIDDILVYSQSEEDHQQHLCLVLGKLREHHLYAKLSKCEFWLSEVKFLGHVISAKGVAVDPETVTAVTDWKQPKTVTQVRSFLGLAGYYRRFIENFSKIARPMTQLLKKEEKFVWSPQCEKAFQTLKEKLEGHVVAYASRQLRPHEGNYPTHDLDLAAVVHALKIWRHYLIGNRCEIYTDHKSLKYIFTQSDLNLRQRRWLELIKDYDVGIHYHPGKANVVADSLSRKSRCNTLGVRGIPLELNQQMEALNLSIVGRGFLATLEAKPTLLDQIREAHKNDPDMHGLLKNMKQGKAAGFTEDEHGTLWNGNRSSWPFVMCASVSRESTNDRPDFSNLSKYQNGNGMKLGWISSPDFQKPRATWDKSLPYTEFSYNNSYQASIQMAPYEALYGCKCRTPLLWDQVGESQVFGTDILREAEDKVRTIRDNLKVAQSRQKSYADNRRRNLEFAVDDFVYLWVTPLRGVHRFQTKGKLAPRFVGPFRIIARRGEVAYQLELPASFGNMHDVFHVSQLKKCLRVPSEQADSEQIEVREDLTYVERTVKILDTMERRTRNWVIRFCKVQWSNHAEEEATWEREDELKAAHPDLFANAAASEDPLFVEVEADV

SEQ ID NO: 19213 - protein, 1270 aa, Oryza sativa
  Clone ID: TF_OSC900113j.C1.p14.gm
MVTTRRNANTGDGNQPEGSNHNHQGNPPPPPPPPPPPPPDTNAILTQILAQQANMMTAFLHHLQNPPQHNAPPPPPQHSKLAEFLRIRPPTFSSSNNPVDALDWLHAVGKKLDTVQCSDEEKVIFAAHQLQGPASLWWDHFQATQPAGQPITWARFTAAFRRTHVPAGVVALKKREFRELKQGNRSVMEYLHEFNNLARYAPEDVREDEEKQEKFLAGMDPELSVCLVSRDYPDFQRLVDKSIRLEAKHKELESHKRRLANFRNQQGANQRVRYTNPYPGGSSSQQQQQQQQPRSAPRPQFVVRVPQPQQQQNQQGTRAPRPPTPTVQPGQGRRDTQGNFPGRDKRLCFNCFEPGHFADKCPKPRRQQGQAPPRSNNGGKDVIRGRVNHVTAEDVLTTPDVIVGTFLIHSIPATILFDSGASHSFISVPFVGRNQLGVERLRNPLLITTPGGVMTAKYYSPAVPIEIQGIPFPSDLILLDTKNLDVILGMNWLAQFQGIGLSEIPIVREFGDVFPEELPGMPPKREIEFRIDLAPGTTPLYKRPYRMAANELAEVKKQLEELKEKGYIRPSTSPWGAPVIFVEKKDKTKRMCVDYRALNEVTIKNKYPLPRIDDLFDQLKGATVFSKIDLRSGYHQLRIREEDIPKTAFTTRYGLYEFTVMSFGLTNAPAFFMNLMNKVFMEYLDKFVVPRRAAVAAAVVSRRRHHRVRKVAAVPVHRFAAAEDRRSTVAAVDPIFSAAFSSTPPPSVGLPPTFWSSVSSPRRDLRLGALRLCRRAAVRRRACAVRAVRAAEPPPVLTSSLTPFPRYRGGTEAHGDMMWGCVLWVQWYTSGQRYYRRFIENFSKIARPMTQLLKKEEKFVWSPQCEKAFQTLKEKLVSSPVLILPDTRKDFMVYCDASRQGLGCVLMQDGHVVAYASRQLRPHEGNYPTHDLELAAVTTGNNPTGIPHVRALILVPGGKTEPQTKPYPLDMWKYGSALQQRPEDRRGRGRADRVHGSGAHASASRSTADREHAAGGGRRRGSHASAVPAGAVGLRPAPYWEAWGPPLRLAPPFVGPLTVCVAGAGWGSGYCVGGLNVPSWESGVGRAGVAGGSGGWRGRGGVGGVWDDGGAWLRVGFAGALRSVRLRSAHVPMAAFINYRLALFDVLGLLGGCVAVVGCLCDGFWGSPGWRATTGTAAETEEAGGAFGTTRTTAFRRSASEAEGRTRSTTTRRSRRRRRREGRKSGATAAANRSSAATAERRCDGASTIPTGRASGERRKRRRRARGTFK

SEQ ID NO: 19214 - protein, 1559 aa, Oryza sativa
  Clone ID: TF_OSC900113j.C1.p30.fg
MAGVIGDGGLSGGEPRHASAYLVPAQFYGYDEAAVFEIGSALHLDTAGYDALVLVLAAHMMVTTRRNVNTGEGNQPEGSNPNPQGNPPPPPPPDTNAILTQILAQQANMMNAFLHHLQNPPQQNAPPPPPQHSKLAEFLRIRPPTFSSSNNPVDALDWLHAVGKKLDTVRCSDEEKVVFAAHQLQGPASLWWDHFQATQPEGQPITWARFTAAFRRTHVPAGVVALKKREFRELKQGNRSVMEYLHEFNNLARYAPEDVREDEEKQEKFLAGMDPELSVRLVSGDYPDFQRLVDKSIRLEAKHKELESHKRRLANFRNQQGANQRVRYTNPYPGGTSSQQQQQQQPRPAPRPQFVVRVPQPQQQQNQQGTRAPRPPTPTVQPVQGRRDAQGPQRLCFNCFEPGHFADKCPKPRRQQGQAPPRSNNGGKDVIRGRVNHVTAEDVLTTPDVIVGTFLVHSIPATILFDSGASHSFISVPFVGRNQLGVERLRNPLLITTPGGVMTAKYYSPAVPIEIQGIPFPSDLILLDTKNLDVILGMNWLAQFQGVVDCARRTVTLYRGPEQPVVFFAPPTSVRSSELHQIGLSEIPIVREFGDVFPEELPGMPPKREIEFRIDLAPGTTPLHKRPYRMAANELAEVKKQLEELKEKGYIRPSTSPWGAPVIFVEKKDKTKRMCVDYRALNEVTIKNKYPLPRIDDLFDQLKGATVFSKIDLRSGYHQLRIREEDIPKTAFTTRYGLYEFTVMSFGLTNAPAFFMNLMNKVFMEYLDKFVVVFIDDILIYSQSEEDHQHHLRLVLGKLREHQLYAKLSKCEFWLSEVKFLGHVISAKGVAVDPETVTAVTDWKQPKTVTQIRSFLGLAGYYRRFIENFSKIARPMTQLLKKEEKFVWSPQCEKAFQTLKEKLVSSPVLILPNTRKDFMVYCDASRQGLGCVLMQDGHVVAYASRQLRPHEGNYPTHDLELAAVVHALKIWRHYLIGNRCEIYTDHKSLKYIFTQSDLNLRQRRWLELIKDYDVGIHYHPGKANVVADALSRKSHCNTLNVRGIPPELNQQMEALNLSIVGRGFLAALEAKPTLLDQIREAQKNDPDMHGLLKNMKQGKAAGFTEDEHGTLWNGKRVCVPDSRELKQLILQEAHESPYSIHPGSTKMYLDLKEKYWWVSMKREIAEFVALCDVCQRVKAEHQRPAGLLQPLQVPEWKWDEIGMDFITGLPKTQGGYDSIWVIVDRLTKVARFIPVKTTYGGNKLAELYFARIVSLHGIPKKIVSDRGSQFTSHFWKKLQEELGTRLNFSTAYHPQTDGQTERLNQILEDMLRACVLDFGKTWDKSLPYAEFSYNNSYQASIQMAPYEALYGRKCRTPLLWDQVGESQVFGTDILREAEAKVRIIRDNLKVAQSRQKSYADNRRRDLEFAVDDFVYLRVTPLRGVHRFQTKGKLAPRYVGPFRIIARRGEVAYQLELPASLGNVHDVFHVSQLKKCLRVPSEQADSEQIEVREDLTYVERPVKILDTMERRTRNRVIRFCKVQWSNHAEEEATWEREDELKAAHPGLFASSSESRGRDSV

SEQ ID NO: 19215 - protein, 1672 aa, Oryza sativa
  Clone ID: TF_OSC900144j.C1.p3.fg
MSWHRAGVLLLGAQSCLPVPGVPAVGGIESVLLSMARMGWKLCHVFRLYTVVMAGSVSRRGLDMTGFVLELRGMCVVLGYPHGVDYQGRPLPEQEGDDAEPHAAWEVTAVILTGSPERTSLAVTAGGDSFPAACQNAALLAIGTLHQRYPDELQHSPYRYHPRRGGARDYAIFRDASSEDDATIMHLARMVEAYDAARIDFHQMVRRGMVGNNMKILELRQENLQLKKDLDAVEAQLHQLKIAQGEMVKTRRNAATGDGNQPEGSNHNHQGSPPPPPPPPPPPPPDTNAILTQILAQQANMMTAFLHHLQNPPQQNAPPPPPQHSKLAEFLRIRPPTFSSSNNPVDALDWLHAVGKKLDTVQCSDEEKVIFAAHQLQGPASLWTHVPAGVVALKKREFRELKQGNRSVMEYLHELNNLARYAPEDVREDEEKQEKFLAGMDPELSVRLVSGDYPDFQRLMDKSIRLEAKHKELESHKRRLANFRNQQGANQRVRYTNPYPGGSSSQQQQQQQQPRSAPRPQFVPGQGRRDAQGPQRLCFNCFEPGHFADKCPKPRRQQGQAPPRSNNGGKDVIRGRVNHVTAEDVLTTPDVIVGTFLIHSIPATILFDSGASHSFISVPFVGRKQLGVERLRNPLLITTPGGVMTAKYYSPAVPIEIQGIPFPSDLILLDTKNLDVILRMNWLAQFQGVVDCARRTVTLYRGPEQPVVFFAPPTSVSSSELHQIGLSEIPIVREFGDVFPEELPGMPPKREIEFRIDLAPGTTPLYKRPYRMAANELAEKKDKMKRMCVDYRALNEVTIKNKYPLPRIDDMFDQLKGATVFSKIDLRSGYHQLRIREEDIPKTAFTTRYGLYEFTVMSFGLTNAPAFFMNLMNKVFMEYLDKFVVVFIDDILIYSQSEEDHQHHLRLVLGKLREHQLYAKLSKCEFWLSEVKFLGHVISAKGVAVDPETVTAVTDWKQPKTVTQVRSFLGLAGYYRRFIENFSKIARPMTQLLKKEEKFVWSPQCEKAFQTLKEKLVSSPVLILPDTRKDFMVYCDASRQGLGCVLMQDGHVVAYASRQLRPHEGNYPTHDLELAAVVHALKIWRHYLIGNRCEIYTDHKSLKYIFTQSDLNLRQRRWLELIKDYDVGIHYHPGKANVVADALSRKSHCNTLDVRGIPPELNQQMEALNLSIVGRGFLATLEAKPTLLDQIREAQKNDPDMRGLLKNMKQGKAAGFTEDEHGTLWNGNRVCVPDDRELKQLILQEAHESPYSIHPGSTKMYLDLKEKYWWVSMKREIAEFVALCDVCQRVKAEHQRPAGLLQPLQVPEWKWDEIGMDFITGLPKTQGGYDSIWVVVDRLTKVARFIPVKTTYGGNKLAELYFARIVSLHGVPKKIVSDRGSQFTSHFWKKLQEELGTRLNFSTAYHPQTDGQTERLNQILEDMLRACVLDFGKTWDKSLPYAEFSYNNSYQPSIQMAPYEALYGRKCRTPLLWDRVGESQVFGTDILREAEAKVRTIRDNLKVAQSRQKSYADNRRRNLEFAVDDFVYLRVTPLRGVHRFQTKGKLAPRYVGPFRIIARCGEVAYQLELPASLGNVHDVFHVSQLKKCLRVPSEQADSEQIEVREDLTYVERPVKILDTMERRTRNRVIHFCKVQWSNHAEEEATWEREDELKAAHPDLFASSSESRGRDSV

SEQ ID NO: 19216 - protein, 1803 aa, Oryza sativa
  Clone ID: TF_OSC900175j.C1.p10.fg
MGWKLCHVFRPYTVVMAGSVTRRGLSMTGFVLELRGMCVVLGYPHGVDYQARPLPEQEGEDAEPHAGWEVTAVILSGSPERTSLAVTAGGDSFPAACQNAALLAIGTLHQRYPDELQHSPYRYHPRRGGARDYATFRDASSEDDATVVHLARMVEAYDAARIDFHQMVRRGMVENNLKILELRQENLQLKKDLDALEAQLHQLKIAQGEDSRPKRRRVCRSQKITARKSTSRPELVRQSLAWTCFVETPRAEPAPVVPQEGEASGVGSSEGALLLTFRPGPSQRSLSLFAGSVWGFQMVTTRRNVNTGEGNQPEGSNHNHQGNPPPPPPPPPPPPPDTNAILTQILAQQANMMTAFLHHLQNPPQQNAPPPPPQHSKLAEFLRIRPPTFSSSNNPVDALDWLHAVGKKLDTVQCSDEEKVVFAAHQLQGPASLWWDHFQATQPEGQPITWARFTAAFRRTHVPAGVVALKKREFRELKQGNRSVMEYLHEFNNLARYAPQDVREDEEKQEKFLAGMDPELSVRLVSGDYPDFQRLVDKSIRLEAKHKELESHKRRLANFRNQQGANQRVRYTNPYPGGSSSQQQQQQQQPRSAPRPQFVVRIPQPQQQQNQQGTRAPRPPTPTVQPVQGRRDAQGQQRLCFNCFEPGHFADKCPKPRRQQGQAPPRSNNGGKDVIRGRVNHVTAEDVLTTPDVIVGTFLVHSIPATILFDSGASHSFISVSFVGRNQLGVERLRNPLLITTPGGVMTAKYYSPAVPIEIQGIPFPSDLILLDTKNLDVILGMNWLAQFQGVVDCARRTVTLYRGPEQPVVFFAPPTSVRSSELHQIGLSEIPIVREFGDVFPEELPGMPPKREIEFRIDLAPGTTPLHKRPYRMAANELAEVKKQLEELKEKGYIRPSTSPWGAPMIFVEKKDKTKRMCVDYRALNEVTIKNKYPLPRIDDLFDQLKGATVFSKIDLRSGYHQLRIREEDIPKTAFTTRYGLYEFTVMSFGLTNAPAFFMNLMNKVFMEYLDKFVVVFIDDILIYSQSEEDHQHHLRLVLGKLREHQLYAKLSKCEFWLSEVKFLGHVISAKGVAVDPETVTAVTEWKQPKTVTQVRSFLGLAGYYRRFIENFSKIARPMTQLLKKEEKFVWSPQCEKAFQTLKEKLVSSPVLILPDTRKDFMVYCDASRQGLGCVLMQDGHVVAYASRQLRPHEGNYPTHDLELAAVVHALKIWRHYLIGNRCEIYTDHKSLKYIFTQSDLNLRQRRWLELIKDYDVGIHYHPGKANVVADALSRKSHCNTLNVRSIPPELNQQMEALNLSIVGRGFLAALEAKPTLLDQIREAQKNDPDMHGLLKNMKQGKAAGFTEDEHGTLWNGKRVCVPDNRELKQLILQEAHESPYSIHPGSTKMYLDLKEKYWWVSMKREIAEFVALCDVCQRVKAEHQRPAGLLQPLQVPEWKWDEIGMDFITGLPKTQGGYDSIWVIVDRLTKVARFIPVKTTYGGNKLAELYFARIVSLHGIPKKIVSDRGSQFTSHFWKKLQEELGTRLNFSTAYHPQTDGQTERLNQILEDMLRACVLDFGKTWDKSLPYAEFSYNNSYQASIQMAPYEALYGRKCRTPLLWDQVGESQVFGTDILREAEAKVRIIRDNLKVAQSRQKSYADNRRRDLEFAVDDFVYLRVTPLRGVHRFQTKGKLAPRYVGPFRIIARRGEVAYQLELPASLGNVHDVFHVSQLKKCLRVPSEQADSEQIEIREDLTYVERPVKILDTMERRTRNRVIRFCKVQWSNHAEEEATWEREDELKAAHPDLFASSSESRGRDSV

SEQ ID NO: 19217 - protein, 1786 aa, Oryza sativa
  Clone ID: TF_OSC900176j.C1.p13.fg
MDEVGGRWTFSRANEGYTSCGPMAGSVTRRGLDMTGFVLELRGMCVVLGYPHGVDYQARPLPEQEGEDAEPHAGWEVTAVILSGSPERTSLAVTAGGDSSPAACQNAALLAIGTLHQRYPDELQHSPYRYHPRRGGARDFATFRDASLEDDATVVHLARMVEAYDAARIDFHQMVRRGMVENNLKILELRQENLQLKKDLDALEAQLHQLKIAQGEDSRPKRRRVCRSQKITARKSTSRPELVRQSLAWTCFVETPRAEPAPVVPQEGEASGVGSTEDALLLTFRPGPSQRRNVSTGEGNQPEGSNPNPQGNPPPPPPPDTNAILTQILAQQANMMTAFLHHLQNPPQQNAPPPPPQHSKLAEFLRIRPPTFSSSNNPVDALDWLHAVGKKLDTVQCSDEEKVIFAAHQLQGPASLWWDHFQATQPEGQPITWARFTAAFRRTHVPAGVVALKKREFRELKQGNRSVMEYLHEFNSLARYAPEDVREDEEKQEKFLAGMDPELSVRLVSGDYPDFQRLVDKSIRLEAKHKELETHKRRLANFRNQQGANQRVRYTNPYPGGSSSQQQQQQQQPRSAPRPQFVVRVPQPQQQQSQQGTRVARPPTPVVQPVQGRRDAQGQQRLCFNCFEPGHFADKCPKPRRQQGQAPPRSNNGGKDVIRGRVNHVTAEDVLTTPDVIVGTFLVHSIPATILFDSGASHSFISVPFVGKNQLGVERLRNPLLITTPGGVMTAKYYSPAVPIEIQGIPFPSDLILLDTKNLDVILGMNWLAQFQGVVDCARRTVTLYRGPEQPVVFFAPPTSVRSSKLHQIELSEIPIVREFGDVFPEELPGMPPKREIEFRIDLAPGTTPLHKRPYRMAANELAEVKKQLEELKEKGYIRPSTSPWGAPVIFVEKKDKTKRMCVDYRALNEVTIKNKYPLPRIDDLFDQLKGATVFSKIDLRSGYHQLRIREEDIPKTAFTTRYGLYEFTVMSFGLTNAPAFFMNLMNKVFMEYLDKFVVVFIDDILIYSQSEEDHQHHLRLVLGKLREHQLYAKLSKCEFWLSEVKFLGHVISAKGVAVDPETVTAVTEWKQPKTVTQIRSFLGLAGYYRRFIENFSKIARPMTQLLKKEEKFVWSPQCEKAFQTLKEKLVSSPVLILPDTRKDFMVYCDASRQGLGCVLMQDGHVVAYASRQLRPHEGNYPTHDLELAAVVHALKIWRHYLIGNRCEIYTDHKSLKYIFTQSDLNLRQRRWLELIKDYDVGIHYHPGKANVVADALSRKSHCNTLNVRGIPPELNQQMEALNLSIVGRGFLAALEAKPTLLDQIREAQKNDPDMHGLLKNMRQGKAAGFTEDEHGTLWNGKRVCVPDSRELKQLILQEAHESPYSIHPGSTKMYLDLKEKYWWVSMKREIAEFVALCDVCQRVKAEHQRPAGLLQPLQVPEWKWDEIGMDFITGLPKTQGGYDSIWVIVDRLTKVARFIPVKTTYGGNKLAELYFARIVSLHGIPKKIVSDRGSQFTSHFWKKLQEELGTRLNFSTAYHPQTDGQTERLNQILEDMLRACVLDFGKTWDKSLPYAEFSYNNSYQASIQMAPYEALYGRKCRTPLLWDQVGESQVFGTDILREAEAKVRIIRDNLKVAQSRQKSYADNRRRDLEFAVDDFVYLRVTPLRGVHRFQTKGKLAPRYVGPFRIIARRGEVAYQLELPASLGNVHDVFHVSQLKRCLRVPSEQADSEQIEVREDLTYVERPVKILDTRERRTRNRVIRFCKVQWSNHAEEEATWEREDELKAAHPDLFASSSESRGRDSV

SEQ ID NO: 19218 - protein, 1802 aa, Oryza sativa
  Clone ID: TF_OSC900179j.C1.p13.fg
MDEVGRRWTFSRANEGYTSCGPMAGSVTRRGLDMTGFVLELRGMCVVLGYPHGVDYQARPLPEQEGEDAEPHAGWEVTAVILSGSPERTSLAVTAGGDSFPAACQNAALLAIGTLHQRYPDELQHSPYRYHPRRGGARDHATFRDASSEDDATVVHLARMVEAYDAARIDFHQMVRRGMVENNMKILELRQENLQLKKDLDALEAQLHQLKIAQGEGSRPKRRRVCRSQKITARKSTSRPELVRQSLAWTCFVETPRAEPAPVVPQEGEASGVGSSEGALLLTFRPGPSQRSPSLFAGSVWGFQMVTTRRNVNTGEGNQPEGSNPNPQGNPPPPPPPDTNAILTQILAQQANMMNAFLHHLQNPPQQNAPPPPPQHSKLAEFLRIRPPTFSSSNNPVDALDWLHAVGKKLDTVQCSDEEKVVFAAHQLQGPASLWWDHFQATQPEGQPITWTRFTAAFRRTHVPAGVVALKKREFRELKQGNRSVMEYLHEFNNLARYAPEDVREDEEKQEKFLAGMDPELSVRLVSGDYPDFQRLVDKSIRLEAKHKELESHKRRLANFRNQQGANQRVRYTNPYPGGSSSQQQQQQPRPAPRPQFVVRVPQQQQQQNQQGTRAPRPPTPAVQPVQGRRDASGPQRLCFNCFEPGHFADKCPKPRRQQGQAPPRSNNGGKDVIRGRVNHVTAEDVLTTPDVIVGTFLVHSIPATILFDSGASHSFISVPFVGKNQLGVERLRNPLLITTPGGVMTAKYYSPAVPIEIQGIPFPSDLILLDTKNLDVILGMNWLAQFQGVVDCARRTVTLYRGPEQPVVFFAPPTSVRSSELHQISLSEIPIVREFGDVFPEELPGMPPKREIEFRIDLAPGTTPLHKRPYRMAANELAEVKKQLEELKEKGYIRPSTSPWGAPVIFVEKKDKTKRMCVDYRALNEVTIKNKYPLPRIDDLFDQLKGATVFSKIDLRSGYHQLRIREEDIPKTAFTTRYGLYEFTVMSFGLTNAPAFFMNLMNKVFMEYLDKFVVVFIDDILIYSQTEEDHQHHLRLVLGKLREHQLYAKLSKCEFWLSEVKFLGHVISAKGVAVDPETVTAVTEWKQPKTVTQIRSFLGLAGYYRRFIENFSKIARPMTQLLKKEEKFVWSPQCEKAFQTLKEKLVSSPVLILPDTRKDFMVYCDASRQGLGCVLMQDGHVVAYASRQLRPHEGNYPTHDLELAAVVHALKIWRHYLIGNRCEIYTDHKSLKYIFTQSDLNLRQRRWLELIKDYDVGIHYHPGKANVVADALSRKSHCNTLNVRGIPPELNQQMEALNLSIVGRGFLAALEAKPTLLDQIREAQKNDPDMHGLLKNMKQGKAAGFTEDEHGTLWNGKRVCVPESRELKQLILQEAHESPYSIHPGSTKMYLDLKEKYWWVSMKREIAEFVALCDVCQRVKAEHQRPAGLLQPLQVPEWKWDEIGMDFITGLPKTQGGYDSIWVVVDRLTKVARFIPVKTTYGGNKLAELYFARIVSLHGIPKKIVSDRGSQFTSHFWKKLQEELGTRLNFSTAYHPQTDGQTERLNQILEDLLRACVLDFGKTWDKSLPYAEFSYNNSYQASIQMAPYEALYGRKCRTPLLWDQVGESQVFGTDILREAEAKVRIIRDNLKVAQSRQKSYADNRRRDLEFAVDDFVYLRVTPLRGVHRFQTKGKLAPRYVGPFRIIARRGEVAYQLELPASLGNVHDVFHVSQLKKCLRVPSEQADSEQIEVREDLTYVERPVKILDTMERRTRNRVIRFCKVQWSNHAEEEATWEREDELKAAHPDLFASSSESRGRDSV

SEQ ID NO: 19219 - protein, 2242 aa, Oryza sativa
  Clone ID: TF_OSC900186j.C1.p18.gm
MAEQAKVHDLSPSVSGDDGEPNPRRRARTPPPPLQSPKQGEALERVDKSAASPIAGDAGERRDGERRLLVYGDGSTPQGALQAAGALLRHPPVVHDPESPAQRWLDDVANLVMMAQQRLGAGGRSATTKTSGAATTGSVSSRRRARRAAAAARHSAATPSSTPSTREDQHGEPDARLNIERRRNSRRTPRATEGASSSRVSPRHGREDQPSVPPVGGVGCRAFVASLRNVRWPPRFRPTITEKYDGSVNPTEFLQIYTTGIEAAGGDDRVMANFFPMALKGQARGWLMNLPPASRFCQVRNTIPCIPAHAVIYAFRGGVRHNRMLEKIASKEPQTTAELFQLADRVARKEEAWTWNPSGSGVAASAAPGSAAQTGRRDRRRKKRSAHSGDEGHVLAVEGAPRATRKGRPASDKKKEAGTPSRERPASKWCSVHNTSLHDLADCRAVKNLAERTRKWEEDRRQERREGKSAAVPSGKRRSEARQKAPAVGIDDGDDDLGFQEPGATIATVDGGACAHVSRRSFKAMRRELLAAAPTHEATRRARWSEVALTFDQTDHPPCVARGGQVAMVVSPTICNVKLGRVLIDGGAALNILSPAAFDAIKAPGMVLQPSQPIIGVTPGHTWPLGHIDLPVTFGGSANFRTERVNFDVADLSLPYNAVLGRPALVKFMAAVHYAYLQMKMPGPSGPISVRGDLKVALACMEQRADHLAAATKPEGGDERLGTSAPTAPRQRIATCDEVPEDALVSFLRANADVFAWRPADMPGVPREVIEHRLAVRPGARPVRQKVRRQAPERQAFIREEVARLLEAGFIREVIHPEWLANPVVVPKANGKLRMCIDYTDLNKACPKDPYPLPRIDQIVDSTAGCDLLCFLDAYSGYHQIRMAREDEEKTAFITPVGTYCYTSMPFGLKNAGPTFQRTTRISLGSQIGRNVEAYVDDLVVKTRNQETLLLDLAETFENLRSACIKLNPDKRARPPLSLTGGAHLSSSSSCRARRRARALAPPPPRIAPHPAVPARIKERGIIPRDSLSRFPRFPLSLSLGFVRIVAAFVAGAINGGRDLRGRFPSSPAALSPSRCYIFVARAPLFRFRRSPLALAVGIVLAPCSSLSAVAVDLRFAAAAAPDFLLTRRPLRPLRRVVADPVRRSASPADRRSTVALVIPSRAAVFLRSVRRFTAFAVSGANEDYTSCGPMAGSITRRGLSMTGFVLELRGMCVVLGYPHGVDYQARPLPEQEGEDAEPHAGWEVTAVILSGSPERTSLAVTAGGDSFPAACQNAALLAIGTLHQRYPDELQHSPYRYHPRRGGARDYATFRDASSEDDATVVHLARMVEAYDAARIDFHQMVRRGMVENNMKILELRQENLQLKKDLDALEAQLHQLKIAQGEDSRPKRRRVCRSQKITARKSTSRPELVRQSLAWTCFVETPRAEPAPVVPQEGEASGVGSSEGALLLTFRPGPSQRSPSLFAGSVWGFQMVTTRRNVSTGEGNQPEGSNPNPQGNPPPPPPPDTNAILTQILAQQANMMNAFLHHLQNPPQQNAPPPPPQHSKLAEFLRIRPPTFSSSNNPVDALDWLHAVGKKLDTVQCSDEEKVIFAAHQLQGPASLWWDHFQATQPEGQPITWTRFTAAFRKTHVPAGVVALKKREFRELKQGNRSVMEYLHEFNNLARYAPEDVREDEEKQEKFLAGMDPELSVRLVSGDYPDFQRLVDKSIRLEAKHKELESHKRRLANFRNQQGANQRVRYTNPYPGGSSSQQQQQQQQPRPAPRPQFVVRVPQPQQQQNQQGTRAPRPPTPAVQPVQGRRDAQGQQRLCFNCFEPGHFADKCPKPRRQQGQAPPRSNNGGKDVIRGRVNHVTAEDVLTTPDVIVGTFLVHSIPATILFDSGASHSFISVPFVGRNQLGVERLRNPLLITTPGGVMTAKYYSPAVPIEIQGIPFPSDLILLDTKNLDIGLSEIPIVREFGDVFPEELPGMPPKREIEFRIDLAPGTTPLYKRPYRMAANELAEVKKQLEELKEKGYIRPSTSPWGAPVIFVEKKDKTKRMCVDYRALNEVTIKNKYPLPRIDDLFDQLKDATVFSKIDLRSGYHQLRIREEDIPKTAFTTRYGLYEFTVMSFGLTNAPAFFMNLMNKVFMEYLDKFVVVFIDDILIYSQSEEDHQHHLRLVLGKLREHQLYAKLSKCEFWLSEVKFLGHVISAKGVAVDPETVTAVTDWKQPKTAGPPATLADGWDPPVIPLLSPRPPPTPVP

SEQ ID NO: 19220 - protein, 1737 aa, Oryza sativa
  Clone ID: TF_OSC900186j.C1.p7.fg
MDEVGRRWTFSRANEGYTSCGPMAGSVTRRGLDMTGFVLELRGMCVVLGYPHGVDYQARPLPDQEGDDAEPHAAWEVTAVILSGSPERTSLAVTAGGDSFPAACQNAALLAIGTLHQRYPDELQHSPYRYHPRRGGARDHATFRDASSEDDATVVHLARMVEAYDAARIDFHQMVRRGMVENNLKILELRQENLQLKKDLDALEAQLHQLKIAQGEDSRPKRRRVCRSQKITARKSTSRPELVRQSLAWTCFVETPRAAPAPVVPQEGEASGMVTTRRNVNTGEGNQPEGSNPNPQGNPPPPPPPDTNAILTQILAQQANLMTAFLHHLQNPPQQNAPPPPPQHSKLAEFLRIRPPTFSSSNNPVDALDWLHAVGKKLDTVQCSDEEKVIFAAHQLQGPASLWWDHFQATQPEGQPITWARFTAAFRRTHVPAGVVALKKREFRELKQGNRSVMEYLHEFNNLARYAPEDVREDEEKQEKFLAGMDPELSVRLVSGDYPDFQRLVDKSIRLEAKHKELESHKRRLANFRNQQGANQRVRYTNPYPGGSSSQQQQQQQQPRPAPRPQFVVRVPQPQQQNQQGTRASRPPTPAVQPVQGRRDASGPQRLCFNCFEPGHFADKCPKPRRQQGQAPPRSNNGGKDVIRGRVNHVTAEDVLTTPDVTVGTFLVHSIPATILFDSGASHSFISVPFVGKNQLGVERLRNPLLITTPGGVMTAKYYSPAVPIEIQGIPFPSDLILLDTKNLDVILGMNWLAQFQGVVDCARRTVTLYRGPEQPVVFFAPPTSVRSSELHQIELSEIPIVREFGDVFPEELPGMPPKREIEFRIDLAPGTTPLYKRPYRMAANELAEVKKQLEELKEKGYIRPSTSPWGAPVIFVEKKDKTKRMCVDYRALNEVTIKNKYPLPRIDDLFDQLKGATVFSKIDLRSGYHQLRIREEDIPKTAFTTRYGLYEFTVMSFGLTNAPAFFMNLMNKAFMEYLDKFVVVFIDDILIYSQSEEDHQHHLRLVLGKLREHQLYAKLSKCEFWLSEVKFLGHVISAKGVAVDPETVTAVTDWKQPKTVTQIRSFLGLAGYYRRFIENFSKIARPMTQLLKKEEKFVWSPQCEKAFQTLKEKLVSSPVLILPDTRKDFMVYCDASRQGLGCVLMQDGHVVAYASRQLRPHEGNYPTHDLELAAVVHALKIWRHYLIGNRCEIYTDHKSLKYIFTQSDLNLRQRRWLELIKDYDVGIHYHPGKANVVADALSRKSHCNTLNVRGIPPELNQQMEALNLNIVGRGFLAALEAKPTLLDQIREAQKNDPDMHGLLKNMKQGKAAGFTEDEHGTLWNGKRVCVPDSRELKQLILQEAHESPYSIHPGSTKMYLDLKEKYCVSRQSTSDRLDFSNLSKYQNGNGMKLGWISSPDFQKPKVARFIPVKTTYGGHKLAELYFARIVSLHGVPKKIVSDRGSQFTSHFWKKLQEELGTRLNFSTAYHPQTDGQTERLNQILEDMLRACVLDFGKTWDKSLPYAEFSYNNSYQASIQMAPYEALYGRKCRTPLLWDQVGESQVFGTDILREAEAKVRIIRDNLKVAQSRQKSYADNRRRDLEFAVDDFVYLRVTPLRGVHRFQTKGKLAPRYVGPFRITARRGEVAYQLELPASLGNVHDVFHVSQLKKCLRVPSEQADSEQIEVREDLTYVEKPVKILDTMERRTRNRVIRFCKVQWSNHAEEEATWEREDELKAAHPDLFASSSESRGRDSV

SEQ ID NO: 19221 - protein, 1826 aa, Oryza sativa
  Clone ID: TF_OSC900190j.C1.p21.fg
MEVDEVGGRWTFSRANEGYTSCGPVVEMSWHRAGVLLLGAQSCLPVPGVPAVGGIGSVLLSMARMGWKLCHSFRLYTVVMAGSVTRRGLDMTGFVLELRGMCVVLGYPHGVDYQARPLPEQEGEDAEPHAGWEVTAVILSGSPERTSLAVTAGGDSFPAACQNAALLAIGTLHQRYPDELQHSPYRYHPRRGGARDYATFRDASSEDDATIVHLARMVEAYDAARIDFHQMVRRGMVENNMKILELRQENLQLKKDLDAVEAQLQQLKIAQGEDCRPKRRRVCRSQKITARKSTSRPELVRQSLAWTCFVETPRAEPAPVVPQEGEASGVGSTEDALLLTFRPGPSQRRNANTGDGNQPEGSNHNRQGNPPPPPPPPPPPPPDTNAILTQILAQQANMMTAFLHHLQNPPQHNAPPPPPQHSKLAEFLRIRPPTFSSSNNPVDALDWLHAVGKKLDTVQCSDEEKVVFAAHQLQGPASLWWDHFQATQPEGQPITWARFTAAFRRTHVPAGVVALKKREFRELKQGNRSVMEYLHEFNNLARYAPEDVREDEEKQEKFLAGLDPELSVRLVSGDYPDFQRLVDKSIRLEAKHKELESHKRRLANFRNQQGANQRVRYTNPYPGGSSSQQQQQQQQPRSAPRPQFVVRVPQPQQQQNQQGTRAPRPPTPTVQPGQGRRDAQGQQRLCFNCFEPGHFADKCPKPRRQQGQAPPRSNNGGKDVIRGRVNHVTAEDVLTTPDVIVGTFLVHSIPATILFDSGASHSFISVPFVGRNQLGVERLRNPLLITTPGGVMTAKYYSPAVPIEIQGIPFPSDLILLDTKNLDVILGMNWLAQFQGVVDCARRTVTLYRGPEQPVVFFAPPTSVSSSELHQIGLSEIPIVREFIDVFPEELPGMPPKREIEFRIDLAPGTTPLHKRPYRMAANELAEVKKQLEELKEKGYIRPSTSPWGAPVIFVEKKDKTKRMCVDYRALNEVTIKNKYPLPRIDDLFDQLKGATVFSKIDLRSGYHQLRIREEDIPKTAFTTRYGLYEFTVMSFGLTNAPAFFMNLMNKVFMEYLDKFVVVFIDDILIYSQSEEDHQHHLRLVLGKLREHQLYAKLSKCEFWLSEVKFLGHVISAKGVAVDPETVTAVADWKQPKTVTQVRSFLGLAGYYRRFIENFSKIARPMTQLLKKEEKFVWSPQCEKAFQTLKEKLVSSPVLILPDTRKDFMVYCDASRQGLGCVLMQDGHVVAYASRQLRPHEGNYPTHDLELAAVVHALKIWRHYLIGNRCEIYTDHKSLKYIFTQSDLNLRQRRWLELIKDYDVGIHYHPGKANVVADALSRKGHCNTLNVLGIPPELNQQMEALNLSVVGRGFLAALEAKPTLLDQIREAQKNDPDMHGLLKNMKQDNRELKQLILQEAHESPYSIHPGSTKMYLDLKEKYWWVSMKREIAEFVALCDVCQRVKAEHQRPAGLLQPLQVPEWKWDEIGMDFITGLPKTQGGYDSIWVVVDRLTKVARFIPMKTTYGGNKLAELYFARIVSLHGVPKKIVSDRGSQFTSHFWKKLQEELGTRLNFSTAYHPQTDGQTERLNQILEDMLRACVLDFGKTWDKSLPYAEFSYNNSYQASIQMAPYEALYGRKCRTPLLWDQVGESQVFGTDILREAEAKVRIIRDNLKVAQSRQKSYADNRRRDLEFVVDDFVYLRVTPLRGVHRFQTKGKLAPRYVGPFRIVARRGEVAYQLELPASLGNVHDVFHVSQLKKCLRVPSEQADSEQIEVREDLTYVERPVKILDTMERRTRNRVIRFCKVQWSNHAEEEATWEREDELKAAHPDLFTSSSESRGRDSV

SEQ ID NO: 19222 - protein, 917 aa, Oryza sativa
  Clone ID: TF_OSC900190j.C1.p22.fg
MDISRTNEGYTSYGPVVEMSWHRAGVLLLGAQSCLPVPGVPAMAGSINCRGLDLTGFVLELRGMCVVLGYPHGVDYQGKQLPEQEGDDAEPHAAWEVTAVILTGSPERTSLAVTAGARDYATFRDAGSEDDSTIMHLARMVEAYDAARIDFHQMVRRGLVENNMKILELRQENLQLKKDLDAVEAQLRQLKVAQGEVCRPKRRRVCRSQKITARKSTSRPELVRQSLAWTCFVETPRAEPVLVMVTTRRSAATGEGSHPEGSNHNNHGSLPPPPPPPPPPPPDTNAILTQILAQQANMMAAFLHHIQNPPQHNAPPPPPQHSKLAEFLRIRPPTFSSSNNPVDALDWLHAVGKKLDTVQCSDEEKVIFTAHQLQGPASLWWDHFQATQPEGQPTTWARFTAAFWRTHVPAGVMALKKREFRELKQGNCSVMEYLHEFNNLARYAPEDVREDEEKQEKFLAGMDPELSVRLVSGDYPDFQHLVDKSIRLEAKHKERESHKRRLANFRNQQGANQRQQQQQQPRSAPRPQFVVRVPQPQQQQSQQGTRAPRPPTPAVQPSQGRRDVQGQQRLCFNCFEPGHFADKCPKPRRQQGQAPPHSNNGGKDVIRGRVNHVTAEDVLTTPDVIVGTFLIHSIPATILFDSGASHSFIYVPFVGRNQLGVERLRNPLLITTPGGVMTAKYYSPVVPIEIQGIPFPSDLILLDTKNLDVILGMNWLAQFQGVVDCARRTVTLYRGPEQPVVFFAPPTSVGSSELHQIGLSEIPIVRGFGDVFPEELPGMPPKREIEFRIDLAPGTTPQYKRPYRMAANELAKVKKQLEELKEKGYIRPSTSPWGAPVIFVEKKDKTKRMCIDYRALNEVTIKNKYPLPRIDDLFDQLKGAIVFSKIDLRSGYHNYVFVKKISLRPHSPRDTDCMNSR

SEQ ID NO: 19223 - protein, 1786 aa, Oryza sativa
  Clone ID: TF_OSC900190j.C1.p6.fg
MDEVGGRWTFSRANEGYTSCGPMAGSVTRRGLDMSGFVLELRGMCVVLGYPHGVDYQARPLPEQEGEDAEPHAGWEVTAVILSGSPKRTSLAVTAGGDSFPAACQNAALLAIGTLHQRYPDELQHSPYRYHPRRGGARDFATFRDASSEDDATVVHLARMVEAYDAARIDFHQMVRRGMVENNMKILELRQENLQLKKDLDALEAQLHQLKIAQGEDSRPKRRRVCRSQKITARKSTSRPELVRQSLAWTCFVETPRAEPAPVVPQEGEASGVGSSEGALLLTFRPGPSQRRNVNTGEGNQPEGSNPNPQGNPPPPPPPDTNAILTQILAQQANMMNAFLHHLQNPPQQNAPPPPPQHSKLTEFLRIRPPTFSSSNNPVDALDWLHAVGKKLDTVQCSDEEKVVFAAHQLQGPASLWWDHFQATQPEGQPITWARFTAAFRRTHVPAGVVALKKREFRELKQGNRSVMEYLHEFNNLARYAPEDVREDEEKQEKFLAGMDPELSVRLVSGDYPDFQRLVDKSIRLEAKHKELESHKRRLANFRNQQGANQRVRYTNPYPGGSSSQQQQQQQQPRPAPRPQFVVRVPQQQQQQNQQGTRAPRPPTPAGQPVQGRRDASGPQRLCFNCFEPGHFADKCPKPRRQQGQAPPRPNNGGKDVIRGRVNHVTAEDVLTTPDVIVGTFLVHSIPATILFDSGASHSFISVPFVGKNQLGVERLRNPLLITTPGGVMTAKYYSPAVPIEIQGIPFPSDLILLDTKNLDVILGMNWLAQFQGVVDCARRTVTLYRGPEQPVVFFAPPTSVRSSELHQIELSEIPIVREFGDVFPEELPGMPPKREIEFRIDLAPGTTPLHKRPYRMAANELAEVKKQLEELKEKGYIRPSTSPWGAPVIFVEKKDKTKRMCVDYRALNEVTIKNKYPLPRIDDLFDQLKGATVFSKIDLRSGYHQLRIREEDIPKTAFTTRYGLYEFTVMSFGLTNAPAFFMNLMNKVFMEYLDKFVVVFIDDILIYSQSEEDHQHHLRLVLGKLREHQLYAKLSKCEFWLSEVKFLGHVISAKGVAVDPETVTAVTDWKQPKTVTQIRSFLGLAGYYRRFIENFSKIARPMTQLLKKEEKFVWSPQCEKAFQTLKEKLVSSPVLILPDTRKDFMVYCDASRQGLGCVLMQDGHVVAYASRQLRPHEGNYPTHDLELAAVVHALKIWRHYLIGNRCEIYTDHKSLKYIFTQSDLNLRQRRWLELIKDYDVGIHYHPGKANVVADALSRKSHCNTLNVRGIPPELNQQMEALNLSMVGRGFLAALEAKPTLLDQIREAQKNDPDMHGLLKNMKQGKAAGFTEDEHGTLWNGKRVCVPDSRELKQLILQEAHESPYSIHPGSTKMYLDLKEKYWWVSMKREIAEFVALCDVCQRVKAEHQRPAGLLQPLQVPEWKWDEIGMDFITGLPKTQGGYDSIWVIVDRLTKVARFIPVKTTYGGNKLAELYFARIVSLHGIPKKIVSDRGSQFTSHFWKKLQEELGTRLNFSTAYHPQTDGQTERLNQILEDMLRACVLDFGKTWDKSLPYAEFSYNNSYQASIQMAPYEALYGRKCRTPLLWDQVGESQVFGTDILREAEAKVRIIRDNLKVAQSRQKSYADNRRRDLEFAVDDFVYLRVTPLRGVHRFRTKGKLAPRYVGPFRIVARRGEVAYQLELPASLGNVHDVFHVSQLKKCLRVPSEQANSEQIEVREDLTYVEKPVKILDTMERRTRNRVIRFCKVQWSNHAEEEATWEREDELKAAHPDLFASSSESRGRDSV

SEQ ID NO: 19224 - protein, 1943 aa, Oryza sativa
  Clone ID: TF_OSC900219j.C1.p9.fg
MDEVGGRWTFSRANEGYTSCGPMAGSVTRRGLDMTGFVLELRGMCVVLGYPHGVDYQARPLPEQEGEDAEPHAGWEVTAVILSGSPERTSLAVTAGGDSFPAACQNAALLAIGTLHQRYPDELQHSPYRYHPRRGGARDFATFRDASSEDDATVVHLARMVEAYDAARIDFHQMVRRGMVENNMKILELRQENLQLKKDLDALEAQLHQLKIAQGEDSRPKRRRVCRSQKITARKSTSRPELVRQSLAWTCFVETPRAEPAPVVPQEGEASGVGSSEAPSRFAGSVWGFQMVTTRRNVNTGEGNQPEGSNPNPQGNPPPPPPPDTNAILTQILAQQANMMNAFLHHLQNPPQQNAPPPPPQHSKLAEFLRIRPPTFSSSNNPVDALDWLHAVGKKLDTVQCSDEEKVIFAAHQLQGPASLWWDHFQATQPEGQPITWARFTAAFRRTHVPAGVVALKKREFRELKQGNRSVMEYLHEFNNLARYAPEDVREDEEKQEKFLAGMDPELSVRLVSGDYPDFQRLVDKSIRLEAKHKELESHKRRLANFRNQQGANQRVRYTNPYPGGSSSQQQQQQQQPRPAPRPQFVVRVPQQQQQQNQQGTRAPRPPTPAGQPVQGRRDASGPQRLCFNCFEPGHFADKCPKPRRQKGQAPPRSNNGGKDVIRGRVNHVTAEDVLTTPDVIVGTFLVHSIPATILFDSGASHSFISVPFVGKNQLGVERLRNPLLITTPGGVMTAKYYSPAVPIEIQGIPFPSDLILLDTKNLDVILGMNWLAQFQGVVDCARRTVTLYRGPEQPVVFFAPPTSVRSSELHQIELSEIPIVREFGDVFPEELPGMPPKREIEFRIDLAPGTTPLYKRPYRMAANELAEVKKQLEELKEKGYIRPSTSPWGAPVIFVEKKDKTKRMCVDYRALNEVTIKNKYPLPRIDDLFDQLKGATVFSKIDLRSGYHQLRIREEDIPKTAFTTRYGLYEFTVMSFGLTNAPAFFMNLMNKVFMEYLDKFVVVFIDDILIYSQSEEDHQHHLRQVLGKLREHQLYAKLSKCEFWLSEVKFLGHVISAKGVAVDPETVTAVTEWKQPKTVTQVRSFLGLAGYYRRFIENFSKIARPMTQLLKKEEKFVWSPQCEKAFQTLKEKLVSSPVLILPDTRKDFMVYCDASRQGLGCVLMQDGHVVAYASRQLRPHEGNYPTHDLELAAVVHALKIWRHYLIGNRCEIYTDHKSLKYIFTQSDLNLRQRRWLELIKDYDVGIHYHPGKANVVADALSRKSHCNTLNVRGIPPELNQQMEALNLNIVGRGFLAALEAKPTLLDQIREAQKNDPDMHGLLKNMKQGKAAGFTEDEHGTLWNGKRVCVPDSRELKQLILQEAHESPYSIHPGSTKMYLDLKEKYWWVSMKREIAEFVALCDVCQRVKAEHQRPAGLLQPLQVPEWKWDEIGMDFITGLPKTQGGYDSIWVIVDRLTKVARFIPVKTTYGGNKLAELYFARIVSLHGIPKKIVSDRGSQFTSHFWKKLQEELGTRLNFSTAYHPQTDGQTERLNQILEDMLRACVLDFGKTWDKSLPYAEFSYNNSYQASIQMAPYEALYGRKCRTPLLWDQVGESQVFGTDILREAEAKVRIIRDNLKVAQSRQKSYADNRRRDLEFAVDDFVYLRVTPLRGVHRFRTKGKLAPRYVGPFRIVARRGEVAYQLELPASLGNVHDVFHVSQLKKCLRVPSEQANSEQIEVREDLTYVEKPVKILDTMDGLLGSLLGFSEADVGALQIAAEGEDPLGDEGCLHGAEIQHPLDHHPEVLRVPVLFAPLVGPHDVLGPGVLPGAPGAPLERRDPATKVVAEHHGPCEPLGSQARQAVKNGVVAVSQIYRRPPAGGLRRGLARKSEARFVDEGGVEPVALPVVPLFAEDAGNVAVQHLPPRLEVAATDYRRRRHRLNGEEPPEQPERWPTSLSRWG

SEQ ID NO: 19225 - protein, 2614 aa, Oryza sativa
  Clone ID: TF_OSC900232j.C1.p8.gm
MAMTIGLTSARRGCGAGKRGPLVSGSGESGSPWTGTTRVVHRRSTEPTAQIALGADRTGGDRGGDVGAAAVAGAVARREVGEGPDRLGRRTSGCDTRPRAEGGHDASGHDAASLTVTAARPEARFRRRVSFCGIPPEEEGPSIGHGLEAVHGSNIVGGLGKPEASRRSLRGAGRSNQYRATPGRAPSCPHGEGASSSGVPRSSPRDGPPPTLSPGGTGCRAFVASLRNVRWPPKFRPNLTEKYDGSINPSEFLQIYTTIIVAAGGDDRVMANYFQMALKGQARGWLMTQPPDFIHSWEDLCQQFVTNFQGTYPRPGEEADLHAVRWKDDESLRSYIQRFCQVRNTIPCIPAHAVVYAFWNGMRHNRMLEKIASKEPKTTAELFELADKVAWKEAWAWNSPGTADGPSWAPCKGKATGDKPSSTAPSGEGRSADKWCLGRREGKAPATPADDRRGEAKKKAPTDDGDNSEDLEFQIPQGTVATLDLGGGGACAHTSRRGFKAIRRELLATVPTHEAARKAHWSEVKLTFDQSDHLTVLARGGKLALVVSPTIHNVRMKRVLVDGGASLSIISPAAFNALKAPGMKLQPSLPIIGVTPGHTWPLGHVELPITFGDSTNFRTERIDFDVADLNLPYNAVLGRPALVKFMAATHYAYLQMKIPGPSGPITVFGDVKVTLACAEQRADNLAVATEPQAPEASASHASKKRLTSADEESALVSFLRANSDVFEWKPSDMPGVPREVIEHRLAMRLDARPVRQKVRCQAPERQAFIREEVARLLEADFIREVIHPEWLANPVVVPKANGKLRMCIDYTDLNKACPKDPFPLPRIDQIVDSTAGFTLPKSSPAHQWSPRSPRRFPSPPAALSHSQPYLNAPRASLLRFRRPPLALPVGFELAPSSSLSAVAAELRFAAVVAPDLLPLRRRLLRLRRVLVDLVHSSVSPADRRSTIVLVDPSRAAASLRFGRRSRRRRQPGMAGSVTRRGLDMTGFVLELRGMCVVLGYPHGVDYQARPLPEQEGDDAEPHAAWEVTAVILAGSPERTSLTVTAGGDSFPAACQSAALLAIGTLHQRYPDELQHSPYRYHPRRGGARDHATFRDASSEDDATIVHLARMVEAYDAARIDFHQMVRRGMVENNLKILELRQENLQLKKDLDAVEAQLHQLKIAQGEICRPKRRRVCRSQKITARKSTSRPELMVMTRRNANTGDGNQPEGSNHNHQGNPPPPPPPPPPPPPDTNAILTQILAQQANMMTAFLHHLQNPPQLNPPPPPPQHSKLAEFLRIRPPTFSSSNNPVDALDWLHAVGKKLDTVQCSDEEKVIFAAHQLHGPASLWWDHFQAMQPEGQPVTWARFTAAFRRTHVPAGVVALKKREFRELKQGNRSVMEYLHEFNNLARYTPEDVRKDEEKQEKFLAGMDPELSVRLVSGDYPDFQRLVDKSIRLEAKHKELESHKRRLANFRNQQGANQRVRYTNPYPGGSSSQQQQQQQQPRSAPRPQFVVRVPQPQQQQNQQGTRAPRPPTPTVQPGQGRRDASGPQRLCFNCFEPGHFADKCPKPRRQQGQAPPRPNNGGKDVSRGRVNHVTAEDVLTTPDVIVGTFLIHSIPATILFDSGASHSFISVPFVGRNQLGVERLRNPLLITTPGGVMTAKYYSPAVPIEIQGIPFPSDLILLDTKNLDIGLSEIPIVREFGDVFPEELPGMPPKREIEFRIDLAPGTTPLYKRPYRMAANELAEVKKQLEELKEKGYIRPSTSPWGAPVIFVEKKDKTKRMCVDYRALNEVTIKNKYPLPRIDDLFDQLKGATVFSKIDLRSGYHQLRIREEDIPKTAFTTRYGLFEFTVMSFGLTNAPAFFMNLMNKVFMEYLDKFVVVFIDDILIYSQSEEDHQHHLRLVLGKLREHQLYAKLSKCEFWLSEVKFLGHVISAKGVAVDPETVTAVTDWKQPKTVTQVRSFLGLAGYYRRFIENFSKIARPMTQLLKKEEKFVWSPQCEKAFQTLKEKLVSSPVLILPDTRKDFMVYCDASRQGLGCVLMQDGHVVAYASRQLRPHEGNYPTHDLELAAVVHALKIWRHYLIGNRCEIYTDHKSLKYIFTQSDLNLRQRRWLELIKDYDVGIHYHPGKANVVADALSRKSHCNTLNVRGIPLELNQQMEALNLSIVGRGFLTTLEAKPTLLDQIREAQKNDPDMHGLLKNMKQGKAAGFTEDEHGTLWNGNRVCVPDNRELKQLILQEAHESPYSIHPGSTKMYLDLKEKYWWVSMKREIAEFVALCDVCQRVKAEHQRPAGLLQPLQVPEWKWDEIGMDFITGLPKTQGGYDSIWVVVDRLTKVARFIPVKTTYGGNKLAELYFARITDGQTERLNQILEDMLRACVLDFGKTWDKSLPYAEFSYNNSYQASIQMAPYEALYGRKCRTPLLWDQVGESQVFGTDILREAEAKVRTIRDNLKVAQSQQKSYADNRRRDLEFAVDDFVYLRVTPLRGVHRFQTKGKLAPRYVGPFRIVARRGEVAYQLELPASLGNVHDVFHVSQLKKCLRVPSEQADSEQIEVREDLTYVERPVKILDTMERRTRNRVIRFCKVQWSNHAEEEATWEREDELKAAHPDLFARPTRHPLPRAAPAASPVP

SEQ ID NO: 19226 - protein, 1867 aa, Oryza sativa
  Clone ID: TF_OSC900247j.C1.p14.gm
MDEVGGRWTFSRANEGYTSCGPVVEMSWQRVGALLLGAQSCLPVPEVPAVGGIGSMAGSVTRRGLDMTGFVLELRGMCVALGYPHGVDYQARPLPDQEGDDAEPHAGWEVTAVILSGSPERTSLAVTAGGDSFPAACQNAALLAIGTLHQRYPDELQHSPYRYHPRRGGAHDYATFRDASSEDDATIVHLARMVEVYDAARIDFHQMVRRGMVENNLKILELRQENLQLKKDLDAVEAQLHQLKIAQGEVCRPKRRRVCRSQKITARKSTSRPELVRQSLAWTCFVETPRAEPAPVVPQEGEASGIGSTEALSLFAGSVWGFQMVTTRRNAATGDGNQPEGSNHNHQGNPPPPPPPPPPPPPDTNAILTQILAQQANMMTAFLHHLQNPPQHNAPPPPPQHSKLAEFLRIRPPTFSSSNNPVDALDWFHAVGKKLDTVQCSDEEKVIFAAHQLQGPASLWWDHFQATQPEGQPITWARFTAAFRRTHVPAGVVALKKREFRELKQGNRSVMEYLHEFNNLARYAPEDVREDEEKQEKFLAGMDPELSVRLVSGDYPDFQRLVDKSIRLEAKHKELESHKRRLANFRNQQGANQRGRYTNPYPGGSSSQQQQQQQQPRPAPRPQFVVRFPQPQQQQNQQGTRAPRPPTPTVQPGQGRRDAQGQQRLCFNCFEPGHFADKCPKPRRQQGQAPPRSNNGGKDVIRGRVNHVTAEDVLTTPDVIVGLSEIPIVREFGDVFPEELPGMPPKREIEFRIDLAPGTTPLHKRPYRMAANELAEVKKQLEELKEKGYIRPSTSPWGAPVIFVEKKDKTKRMCVDYRALNEVTIKNKYPLPRIDDLFDQLKGATVFSKIDLRSGYHQLRIREEDIPKTAFTTRYGLYEFTVMSFGLTNALAFFMNLMNKVFMEYLDKFVVVFIDDILIYSQSEEDHQHHLRLVLGKLREHQLYAKLSKFIENFSKIARPMTQLLKKEEKFVWSPQCEKAFQTLKEKLVSSPVLILPDTRKDFMVYCDASRQGLGCVLMQDGHVVAYASRQLRPHEGNYPTHDLELAAVVHALKIWRHYLIGNRCEIYTDHRSLKYIFTQSDLNLRQRRWLELIKDYDVGIHYHPGKANVVADALSRKSHCNTLNVRGIPPELSQQMEALNLSIVSRGFLAALEAKPTLLDQIREAQKNDPDMHGLLKNMKQGKAAGFTEDEHRTLWNGKRVCVPDNRELKQLILQEAHESPYSIHPGSTKMYLDLKEKYWWVSMKREIAEFVALCDVCQRVKAEHQRPAGLLQPLQVPEWKWDEIGMDFITGLPKTQGGYDSIWVVVDRLTKVARFIPVKTTYGGNKLAELYFARIVSLHGVPKKIVSDRGSQFTSHFWKKLQEELGTRLNFSTAYHPQKDGQTERLNQILEDMLRACVLDFGKTWDKSLPYAEFSYNNSYQASIQLAPYEALYGRKCRTPLLWDQVGESQVFGTDILREAEAKVRIIRDNLKVAQSRQKSYADNRRRDLEFAVGDFVYLRVTPLRGVHRFQTKGKLAPRYVGPFRIVARRGEVAYQLELPASLGNVHDVFHVSQLNKCLRVPSEQADSEQIEVREDLTYVERPVKILDTMERRTRNRVIRFCKLQWSNHAEEEATWEREDELKAAHPDLLATARARGCGDAWDPRRRPASAACARSTVDREGDAWAPLPWTRPTVHGGPGARGWRRSAPWVPRVSRTRGRGRLTAGPTWQPRGRARGRPRRRGRRERRARAPMVTAGDHRRGGAAPEREEGRGKANGGPRLTPGQRRRRERRPERRKTAARLGMTMATALRRSASETEARTRSTAMRRCRGRWRRVRRKSGAAAAAERSSAAMAERAEHGASTNPTARASGERRKRKSGARATFK

SEQ ID NO: 19227 - protein, 1760 aa, Oryza sativa
  Clone ID: TF_OSC900255j.C1.p19.fg
MEVDEVGGRWTFSRANEGYTSCGPVVEMSWHRAGVLLLGAQSCLPVPGVPAVGGIGSVLLSMARMGWKLCHVFRLYIVVMAGSVTRRGLDMTGFVLELRGMCVALGYPHGVDYQARPLPEQEGDDAEPHAAWEVTAVILAGSPERTSLTVTAGGDSFPAACQSAALLAIGTLHQRYPDELQHSPYRYHPRRGGARDHATFRDASSEDDATIMHLARMVEAYDKARIDFHQMVRRGMVENNLKILELRQENLQLKKDLDAVEAQLHQLKIAQGEICRPKRRRVCRSQKITARKSTSRPELVRQSLAWTCFVETPRAEPAPVVPQEGEASGVGSTEDMVMTRRSANTGDGNQPEGSNHNHQGNPPPPPPPPPPPPPDTNAILTQILAQQANMMTAFLHHLQNPPQLNAPPPPPQHSKLAEFLRIRPPTFSSSNNPVDALDWLHAVGKKLDTVQCSDEEKVIFAAHQLQGPASLWWDHFQATQPEGQPITWARFTAAFRRTHVPAGVVALKKREFRELKQGNRSVMEYLHEFNNLARYAPEDVREDEEKQEKFLAGMDPELSVRLVSRDYPDFQHLVDKSIRLEAKHKELESHKRRLANFRNQQGANQRVRYTNPYPGGSSSQQQQQQQQPRSAPRPQFVVRVPQPQQQQNQQGTRAPRPPPPIVQPGQGRRDAQGPQRLCFNCFEPGHFADKCPKPRRQKGQAPPRPNNGGKDVIRGRVNHVTAEDVLTTPDVIVGTFLIHSIPATILFDSGASHSFISVPFVGRNQLGVERLRNPLLITTPGGVMTAKYYSPAVPIEIQGIPFPSDLILLDTKNLDVILGMNWLAQFQGVVDCARRTVTLYRGPEQPVVFFAPPTSVRSSELHQIELSEIPIVREFGDVFPEELPGMPPKREIEFRIDLASGTAPLYKRPYRMAANELAEVKKQLEELKEKGYIRPSTSPWGAPVIFVEKKDKMKRMCVDYRALNEVTIKNKYPLPRIDDLFDQLKEEDHQHHLHLVLGKLREHQLYAKLSKCEFWLSEVKFLGHVISAKGVAVDPETVTAVTDWKQPKTVTQVRSFLGLAGYYRRFIENFSKIARPMTQLLKKEEKFVWSPQCEKAFQTLKEKLVSSPVLILPDTHKDFMVYCDASRQGLGCVLMQDGHVVAYASRQLRPHEGNYPTHDLELAAVVHALKIWRHYLIENRCEIYTDHKSLKYIFTQSDLNLRQRRWLELIKDYDVGIHYHPGKANVVADALSQKSHCNTLNVRGIPPELNQQMEALNLSIVSRGFLAALEAKPTLLDQIREAQKNDPDMHGLLKNMKQGKAAGFTEDEHGTLWNGNRVCVPDNRELKQLILQEAHESPYSIHPGSTKMYLDLREKYWWVSMKREIAEFVALCDVCQRVKAEHQRPAGLLQPLQVPEWKWDEIGMDFITGLPKTQGGYDSIWVVVDRLTKVARFIPVKTTYGGNKLAELYFARIVSLHGVPKKIVSDRGSQFTSHFWKKLQKELGTRLNFSTAYHPQTDGQTERLNQILEDMLRACVLDFGKTWDKSLPYAEFSYNNSYQASIQMAPYEALYGRKCRTPLMWDQVGESQVFETDILREAEAKVRTIRDNLKVAQSRQKSYADNRRRDLEFAVDDFVYLRVTPLRGVHRFRTKGKLAPRYVGPFRIVARRGEVAYQLELPASLGNVHDVFHVSQLKKCLRVPSEQADSEQIEVREDLTYVERPMKILDTMERRTRNRVIRFCKVQWSNHAEEEATWEREDELKAAHPDLFASSSESRGRDSV

SEQ ID NO: 19228 - protein, 1805 aa, Oryza sativa
  Clone ID: TF_OSC900260j.C1.p1.fg
MDEVGGRWTFSRTNEGYTSCGPMAGSVTRRGLHMTGFVLELRGLCVVLGYPHGVDYQARPLPEQEGEDAEPHAGWEVTAVILSGSPERTSLAVTAGGDSFPAACQNAALLAIGTLHQRYPDELQHSPYRYHPRRGGASDHATFRDASSEDDATVVHLARMVEAYDVARIDFHQMVRRGMVENNMKILELRQENLQLKKDLDALEAQLHQLKVAQGEICRPKRRRVCRSQKITARKSTSRPELVRQSLAWTCFVETPRAEPAPVVPQEGEASGVGSSEGALLLTFRPGPSQRSPSLFAGSVWSLQMVSTRRNVNTGEGNQPEGSNPNPQGNPPPPPPPDTNAILTQILAQQANMMNAFLHHLQNPPQQNAPPPPPQHSKLAEFLRIRPPTFSSSNNPVDALDWLHAVGKKLDTVQCSDEEKVIFAAHQLQGPASLWWDHFQATQPEGQPITWARFTAAFRRTHVPAGVVALKKKEFRELKQGNRSVMEYLHEFNNLARYAPEDVREDEEKQEKFLAGMDPELSVRLVSGDYPDFQRLVDKSIRLEAKHKELESHKRRLANFRNQQGANQRVRYTNPYPGGSSSQQQQQQQQQSRSAPRPQFVVRVPQPQQQQNQQGTRAPRPPTPAGQPVQGRRDASGPQRLCFNCFEPGHFADKCPKPRRQQGQAPPRSNNSGKDVLRGRVNHVTAEDVLTTPDVIVGTFLVHSIPATILFDSGASHSFISVPFVGKNQLGVERLRNPLLITTPGGVMTAKYYSPAVPIEIQGIPFPSDLILLDTKNLDVILGMNWLAQFQGVVDCTRRTVTLYRGPEQPVVFFAPPTSVRSSELHQIGPSEIPIVREFEDVFPEELPGMPPKREIEFRIDLVPGTTPLHKRPYRMAANELAEVKKQLEELKEKGYIRPSTSPWGAPVIFVEKKDKTKRMCVDYRALNEVTIKNKYPLPRIDDLFDQLKGATVFSKIDLRSGYHQLRIREEDIPKTAFTTRYGLYEFTVMSFGLTNAPAFFMNLMNKVFMEYLDKFVVVFIDDILIYSQSEEDHQHHLRLVLGKLREHQLYAKLSKCEFWLSEVKFLGHVISAKGVAVDPETVTAVTDWKQPKTVTQIRSFLGLAGYYRRFIENFSKIARPMTQLLKKEEKFVWSPQCEKAFQTLKEKLVSSPVLILPDTRKDFMVYCDASRQGLGCVLMQDGHVVAYASRQLRPHEGNYPTHDLELAAVVHALKIWRHYLIGNRCEIYTDHKSLKYIFTQSDLNLRQRRWLELIKDYDVGIHYHPGKANVVADALSRKSHCNTLNVRGIPPELNQQMEALNLSIVGRGFLAALEAKPTLLDQIREAQKNDPDMHGLLKNMKQGKAAGFTEDEHGTLWNGKRVCVPDNREPKQLILQEAHESPYSIHPGSTKMYLDLKEKYWWVSMKREIAEFVALCDVCQRVKAEHQRPAGLLQPLQVPEWKWDEIGMDFITGLPKTQGGYDSIWVIVDRLTKVARFIPVKTTYGGNKLAELYFARIVSLHGVPKKIVSDRGSQFISHFWKKLQEELGTRLNFSTAYHPQTDGQTERLNQILEDMLRACVLDFGKTWDKSLPYAEFSYNNSYQASIQMAPYEALYGRKCRTPLLWDQVGESQVFGTDILREAEAKVRIIRDNLKVAQSRQKSYADNRRRDLEFAVDDFVYLRVTPLRGVHRFQTKGKLAPRYVGPFRIIARRGEVAYQLELPASLGNVHDVFHVSQLKKCLRVPSEQADSEQIEVREDLTYVERPVKILDTMERRTRNRVIRFCKVQWSNHAEEEATWEREDELKAAHPDLFASSSESRGRDSV

SEQ ID NO: 19229 - protein, 1778 aa, Oryza sativa
  Clone ID: TF_OSC900286j.C1.p20.fg
MSWHRAGVLLLGAQSCLPVPGVPAVGGIGSVLLSMARMGWKLCHVFRLYTVVMAGSVTRRGLDMTGFVLELRGMCVVLGYPHGVDYQARPLPEQEGDDAEPHAAWEVTAVILAGSPERTSLTVTAGGDSFPAACQSAALLAIGTLHQRYPDELQHSPYRYHPRRGGARDHATFRDASSEDDATIVHLARMVEAYDAARIDFHQMVRRGMVENNLKILELRQENLQLKKDLDAVEAQLHQLKIAQGEICRPKRRRVCRSQKITARKSTSRPELMVMTRRNANTGDGNQPEGSNHNHQGNPPPPPPPPPPPPPDTNAILTQILAQQANMMTAFLHHLQNPPQLNPPPPPPQHSKLAEFLRIRPPTFSSSNNPVDALDWLHAVGKKLDTVQCSDEEKVIFAAHQLHGPASLWWDHFQAMQPEGQPVTWARFTAAFRRTHVPAGVVALKKREFRELKQGNRSVMEYLHEFNNLARYTPEDVRKDEEKQEKFLAGMDPELSVRLVSGDYPDFQRLVDKSIRLEAKHKELESHKRRLANFRNQQGANQRVRYTNPYPGGSSSQQQQQQQQPRSAPRPQFVVRVPQPQQQQNQQGTRAPRPPTPTVQPGQGRRDASGPQRLCFNCFEPGHFADKCPKPRRQQGQAPPRPNNGGKDVSRGRVNHVTAEDVLTTPDVIVGTFLIHSIPATILFDSGASHSFISVPFVGRNQLGVERLRNPLLITTPGGVMTAKYYSPAVPIEIQGIPFPSDLILLDTKNLDVILGMNWLAQFQGVVDCARRTVTLYRGPEQPVVFFAPPTSVRSSELHQIGLSEIPIVREFGDVFPEELPGMPPKREIEFRIDLAPGTTPLYKRPYRMAANELAEVKKQLEELKEKGYIRPSTSPWGAPVIFVEKKDKTKRMCVDYRALNEVTIKNKYPLPRIDDLFDQLKGATVFSKIDLRSGYHQLRIREEDIPKTAFTTRYGLFEFTVMSFGLTNAPAFFMNLMNKVFMEYLDKFVVVFIDDILIYSQSEEDHQHHLRLVLGKLREHQLYAKLSKCEFWLSEVKFLGHVISAKGVAVDPETVTAVTDWKQPKTVTQVRSFLGLAGYYRRFIENFSKIARPMTQLLKKEEKFVWSPQCEKAFQTLKEKLVSSPVLILPDTRKDFMVYCDASRQGLGCVLMQDGHVVAYASRQLRPHEGNYPTHDLELAAVVHALKIWRHYLIGNRCEIYTDHKSLKYIFTQSDLNLRQRRWLELIKDYDVGIHYHPGKANVVADALSRKSHCNTLNVRGIPLELNQQMEALNLSIVGRGFLTTLEAKPTLLDQIREAQKNDPDMHGLLKNMKQGKAAGFTEDEHGTLWNGNRVCVPDNRELKQLILQEAHESPYSIHPGSTKMYLDLKEKYWWVSMKREIAEFVALCDVCQRVKAEHQRPAGLLQPLQVPEWKWDEIGMDFITGLPKTQGGYDSIWVVVDRLTKVARFIPVKTTYGGNKLAELYFARIVSLHGVPKKIVSDRGSQFTSHFWKKLQEELGTRLNFSTAYHPQTDGQTERLNQILEDMLRACVLDFGKTWDKSLPYAEFSYNNSYQASIQMAPYEALYGRKCRTPLLWDQVGESQVFGTDILREAEAKVRTIRDNLKVAQSQQKSYADNRRRDLEFAVDDFVYLRVTPLRGVHRFQTKGKLAPRYVGPFRIVARRGEVAYQLELPASLGNVHDVFHVSQLKKCLRVPSEQADSEQIEVREDLTYVERPVKILDTMERRTRNRVIRFCKVQWSNHAEEEATWEREDELKAAHPDLFASSSESRGRDSV

SEQ ID NO: 19230 - protein, 1792 aa, Oryza sativa
  Clone ID: TF_OSC900290j.C1.p5.fg
MSWHRAGVLLLGAQSCLPVPGVPAVGGVGSVLLSMARMGWKLCHVFRLYTVVMAGSVTRRGLDMTGFVLELRGMCVVLGYPHGVDYQARPLPEQEGDDAEPHAAWEVTAVILAGSPERTSLTVTAGGDSFPAACQSAALLAIGTLHQRYPDELQHSPYRYHPRRGGARDHATFRDASSEDDATIVHLARMVEAYDAARIDFHQMVRRGMVENNLKILELRQENLQLKKDLDAVEAQLHQLKIAQGEVCRPKRRRVCRSLKITARKSTSRPELVRQSLAWTCFVETPRAEPAPVVPQEGEASGIGSTEDALLLTFRPGPSQRRNANTGDGNQPEGSNHNHQGNPPPPPPPPPPPPPDTNAILTQILAQQANMMTAFLHHLQNPPQLNAPPPPPQHSKLAEFLRIRPPTFSSSNNPVDALDWLHAVGKKLDTVQCSDEEKVIFTAHQLQGPASLWWDHFQATQPEGQPITWARFTAAFRRTHVPAGVVALKKREFRELKQGNRSVMEYLHEFNNLARYAPEDVREDEEKQEKFLAGMDPELSVRLVSGDYPDFQRLVDKSIRLEAKHKELESHKRRLANFRNQQGANQRVRYTNPYPGGSSSQQQQPRSAPRPQFVPGQGRRDAQGPQRLCFNCFEPGHFADKCPKPRRQQGQAPPRPNNGGKDVVRGRVNHVTAEDVLTTPDVIVGTFPIHSIPATILFDSGASHSFISVPFVGRNQLGVERLRNPLLITTPGGVMTAKYYSPAVPIEIQGIPFPSDLILLDTKNLDVILGMNWLAQFQGVVDCARRTVTLYRGPERPVVFFAPPTSVRSSELHQIELSEIPIVREFGDVFPEELPGMPPKREIEFRIDLAPGTAPLYKRPYRMAANELAEVKKQLEELKEKGYIRPSTSPWGAPVIFVEKKDKTMRMCVDYRALNEVTIKNKYPLPRIDDLFDQLKGATVFSKIDLRSGYHQLRIREEDIPKTAFTTRYGLYEFTVMSFGLTNAPAFFMNLMNKVFMEYLDKFVVVFIDDILIYSQSEEDHQHHLRLVLGKLREHQLYAKLSKCEFWLSEVKFLGHVISAKGVAVDPETVTAVTDWKQPKTVTQVRSFLGLAGYYRRFIENFSKIARPMTQLLKKEEKFMWSPQCEKAFQTLKEKLVSSPVLILPDTRKDFMVYCDASRQGLGCVLMQDGHVVAYASRQLRPHEGNYPTHDLELAAVVHALKIWRHYLIGNHCEIYTDHKSLKYIFTQSDLNLRQRRWLELIKDYDVGIHYHPGKANVVADALSRKSHCNTLNVRGIPPELNQQMEALNLSIVSRGFLAALEAKPTLLDQIREAQKNDPDMHGLLKNMKQGKAAGFTEDEHGTLWNGNRVCVPDVRELKQLILQEAHESRYSIHPGSTKMYLDLKEKYWWVSMKREIAEFVALCDVCQRVKAEHQRPAGLLQPLQVPEWKWDEIGMDFITGLPKTQGGYDSIWVVVDRLTKVARFIPVKTTYGGNKLAELYFARIVSLHGVPKKIVSDRGSQFTSHFWKKLQEELGTRLNFSTAYHPQTDGQTERLNQILEDMLRACVLDFGKTWDKSLPYAEFSYNNSYQASIQMAPYEALYGRKCRTPLMWDQVGESQVFGTDILREAEAKVRTIRDNLKVAQSRQKSYADNRRRDLEFAVDDFVYLRVTPLRGVHRFRTKGKLAPRYVGPFRIVARRGEVAYQLELPASLGNVHDVFHVSQLKKCLRVPSEQADSEQIEVREDLTYVERPVKILDTMERRTRNRVIRFCKVQWSNHAEEEATWEREDELKAAHPDLFASSSESRGRDSV

SEQ ID NO: 19231 - protein, 1564 aa, Oryza sativa
  Clone ID: TF_OSC900319j.C1.p26.fg
MDTTSLPCHELIEGTPSHPLHMCSYLLDATGWGEGQQGRRRSSASQNMTGERLTHRVESVMRVSEFSSLPASCAGSSDHVVWLWGWTQLEHGVRSGLGGLATRSLGKFLTIGIRARFRKWTRDRALEGVFMPRRRSSSPIVRTPHDSGGRATGSGGGDRGLVIHRVVKEGGGSVNYPLLTKTNYNDWALLMKIKLQARCLWAAIEPDGVDVPLHEDRMALDAICSAVPPEMIGTLATKASAREAWECIKTMRVGNDRIRKASAQKVRSEYESLAFRGDETVEDFALRLTTIVNQLATLGDPEPADKVVEKYLRVARPRFNQLILSIETLLDISTLSMEEVTGRLKAAEDSGQSSSHTADGKLYLTEEEWAERQKKKDQEAKRGDSGGSGGRGKRRGGRGRTGGGGTASPESTNSGSARKGDKFRNCGKLGHWAKDCRSKSKREEQAHVAQEDEEEHTLMLLTGGCVDTVDAAAPEGDTPTPPHQAVVELVEMKVFAALDDAADHDPGRWIMDSGASNHMTGSRMAFADLDTNITGNVRLGDGSVVRIAGRGTILFACKNGEHRTLSNTYYLPRLAANIISIGQLDETGFKVLAEDGIMRVWDEQRRLLARIPRTPGRLYMLDINLARPVCLAAHADEDAWRWHARLGHINFRALCKMGKEELVRGLPCLSQVDQVCEACLARKHRRSPFPRQALCRSDEPLALLHGDLCGPITPATPSGNRYFLLLVDDYSRYMWVALLSTKDAAPAAIKRIQAVAERKSGRKLRALRTDRGGEFTSTQFAEYCAELGMRRELTAPYSPQQNGVVERRNQSVVGTARSMLKVKGLPGMFWGEAINTAVYLLNRSSSKGIGGKTPYALWNGVPPAVHHLRTFGCVAHVKTTTPNLKKLDDRSRPMIFVGYEPGSKAYRAYDPATRRVHISRDIVFDEAAQWDWDAEAAADLDTDFVVEYTTVYHPGSLSGTRQDAGEPPARSSSSPQTPSDSPTAGRTPSVHGDAPAVEFVSPPTGAAANLDADHDDAPLRFRTMDNVLGPAMLPGLANREVQEELMMVSGEEPATFAQAERDEDWRRAMLDEISSIEENKTWRLVDLPSGHRPIGLKWVYKLKKDAQGVVVKHKARLVAKGYVQRAGIDFDEVFAPVARLDSVRLLLALAAQEGWMVHHMDVKSAFLNGELIEEVYVVQPPGFEIDGQENKVYRLDKALYGLRQAPRAWNTKLDCTLKKLGFKQSPLEHGLYARGDGSGRLLVGVYVDDLVIVGGDSGMIKGFKEQMKAEFKMSDLGPLSFYLGIEVHQEAGIITLKQAAYASRIVEKAGLTGCNPCATPMEPRLKLSKESAGSLVDATEYRSLVGSLRYLVNTRPDLAYSVGYVSRFMEKPTDEHLAAVKRIIRYVAGTIHLGCRYVKEVEGGLQGYSDSDMAGDIDTRKSTTGVIFFLGKNPVSWQSQKQRVVALSSCESEYIAAATAACQGIWLARLLGDLRNAATEVVDLRVDNQSALALMKNPVFHDRSKHIQTKFHFIREAVENGEITPSYIGTEGQLADILTKPLSRIKFQELREKRRNYIHTCVFS

SEQ ID NO: 19232 - protein, 1385 aa, Oryza sativa
  Clone ID: TF_OSC900321j.C1.p10.fg
MSWHRAGVLLLGAQSCLPVQGVPAVGGIGSVLLSMARMGWKLCHVFRLYTVVATQPEGQPITWARFTAAFRRTHVPAGVMALKKREFRELKQGNRSVMEYLHEFNNLARYAPEDVREDEEKQEKFLAGMDPELSVRLVSGDYPDFQRLVDKSIRLEAKHKELESHKRRLANFRNQQGANQRIRYTNPYPGGSSSQQQQPRSAPRPQFVVRVPQPQQQQSQQGTHAPRPPTPAAQSGQGRRDVQGPQRLCFNCFEPGHFADKCPKSRRQQGQAPPCSNNGGKDVIRGRVNHVTAEDVLTTPDVIVGTFLIHSIPATILFDSGASHSFISVPFVGRNQLGVERLRNPLLITTPGGVMTAKYYSPAVPIEIQGIPFPSDLILLDTKNLDVILGMNWLAQFQGVVDCARRTVTLYRGPEQPVVFFAPPTSVSSSELHQIGLSEIPIVREFGDVFPEELPGMPPKREIEFRIDLAPGTTPLYKRPYRMAANELAEVKKQLEELKEKGYIHPRTSPWGAPVIFVEKKDKTKRMCVDYRALNEVTIKNKYPLPRIDDLFDQLKGATVFSKIDLRSGYHQLRIREEDIPKTAFTTRYGLYEFTVMSFGLTNAPAFFMNLMNKVFMEYLDKFVVVFIDDILVYSQSEEDHQHHLRLVLGKLREHQLYAKLSKCEFWLSEVKFLGHVISAKGVAVDPETVTAVTDWKQPKTVTQIRSFLGLAGYYRRFIENFSKIARPMTQLLKKEEKFVWSPQCEKAFKTLKEKLVSSLVLILPDTRKDFMLRPHEGNYPTHDLELPAVVHALKIWRHYLIGNRCEIYTDHKSLKYIFTQSDLNLRQRRWLELIKDYDVGIHYHPGKANVVADALSRKSHCNTLNVRGIPPELNQQMEALNLSIVGRGFLAALEAKPTLLDQIREAQKNDPDMHGLLKNMKQGKAAGFTEDEHGTLWNGNRVCVPDNRELKQLILQEAHESPYSIHPGSTKMYLDLKEKYWWVSMKREIAEFVALCDVCQRVKAEHQRPAGLLQPLQVPEWKWNEIGMDFITGLPKTQGGYDSIWVVVDRLTKVARFIHVKTTYGGNKLAELYFARIVSLHGVPKKIVSDRGSQFTSHFWKKLQEELGTRLNFSTAYHPQTDGQTERLNQILEDMLRACVLDFGNTWDKSLPYAEFSYNNSYQASIQMAPYEALYGRKCRTPLLWDQVGESQVFGTDILREAEAKVRTIRDNLKVAQSRQKSYADNRRRDLEFAVDDFVYLRVTPLRGVHRFQTKGKLAPRFVGPFRIIARRGEVAYQLELPASLGNVHDVFHVSQLKKCLRVPSEQADSEQIEVREDLTYVERPVKILDTMERKTRNRVIRFCKVQWSNHAEEEATWEREDELKAAHPDLFVSSSESRGRDSV

SEQ ID NO: 19233 - protein, 1829 aa, Oryza sativa
  Clone ID: TF_OSC900321j.C1.p18.gm
MAAGSSAPFPPRPAALSPSRPYINPPRASLHRFRHSPLSLPAGIELAPSPSLSVVAAELRSAAVVAPDHLSPRRRLLRLRRIPGDLVHPSVSLADRRSTVDPIHPSRATAFLRSGRRFRRRRRPGVSRGPPLLFPLPFPSLGRRSAVPMAAAGDHRGAGVLPPAAAPAWPPSGAPCGCRVGPGYQPPAPSAPRPYKDRSSGLCCKALPYFHMSSGTNEGYTSCGPVVEMSWHRAGVLLLGAQSCLPVPEVPAVGGIGSMAGSVSRRGLDMTGFVLELRGMCVVLGYPHGLDYQGRPLPEQEVTAGGDSFSAACQSAALLAISTLHQRYPDELQHSPYRYHPRRGGARDYATFRDASSEDDATIMHLARMVEAYDAARIDFHQMVRRGMVENNLKILELRQENLQLKKDLDAVEAQLHQLKIAQGEVCHPKRRRVCRSQKITARKSTSRPELVRQSLAWTCFVETPRAEPAPVVPQEGEASGVGSTEDALLLTFRPGPSQRSNNPVDVLDWLHAVGKKLDTVQCSDEEKVVFAAHQLQGPASLWWDHFQATQPEGQPITWARFTAAFRRTHVPAGVMALKKREFRELKQGNRSVMEYLHEFNNLARYAPEDVREDEEKQEKFLAGMDPELSVRLVSGDYPDFQRLVDKSIRLEAKHKELESHKRRLANFRNQQGANQRIRYTNPYPGGSSSQQQQPRSAPRPQFVVRVPQPQQQQSQQGTHAPRPPTPAAQSGQGRRDVQGPQRLCFNCFEPGHFADKCPKSRRQQGQAPPDVIVGTFLIHSIPATILFDSGASHSFISVPFVGRNQLGVERLRNPLLITTPGGVMTAKYYSPAVPIEIQGIPFPSDLILLDTKNLDIGLSEIPIVREFGDVFPEELPGMPPKREIEFRIDLAPGTTPLYKRPYRMAANELAEVKKQLEELKEKGYIRPSTSPWGAPVIFVEKKDKTKRMCVDYRALNEVTIKNKYPLPRIDDLFDQLKGATVFSKIDLRSGYHQLRIREEDIPKTAFTTRYGLYEFTVMSFGLTNAPAFFMNLMNKVFMKYLDKFVVVFIDDILVYSQSEEDHQHHLRLVLGKLRKHQLYAKLSKYEFWLSEVKFLGHVISAKGVAVDPETVTAVTDWKQPKTVTQIRSFLGLAGYYRRFIENFSKIARPMTQLLKKEEKFVWSPQCEKAFKTLKEKLVSSPVLILPDTRKDFMVYCDASRQGLGCVLMQDGHVVAYASRQLQPHEGNYPTHDLELAAVVHALKIWRHYLIGNRCEIYTDHKSLKYIFTQSDLNLRQRRWLELIKDYDVGIHYHPGKANVVADAQSRKSHCNTLNVRGIPPELNQQMEALNLSIVGRGFLAALEAKPTLLDQIREAQKNDPDMHGLLKNMKQGKAAGFTEDEHGTLWNGNRSSWPFVMCASVSRQSTNDRPDFSNLSKYQNGNGMKLGWISSPDFQKPKVDMILYGTAYHPQTDGQTERLNQILEDMLRACVLDFGKTWDKSLPYAEFSYNNSYQASIQMAPYEALYGRKCRTPLLWDQVGESQVFGTDILREAEAKVRTIRDNLKVAQSRQKSYADNRRRDLEFAVDDFVYLRVTPLRGVHRFQTKGKLAPRFVGPFRMIARRGEVAYQLELPASLGNVHDVFHVSQLKKCLRVPSQQADSEQIEVREDLTYVERPVKILDTMERRTRNRSTAVVAPDLLPLRRRLLRFRRNLADLVHPSVSLADRRNAAVPVYPSRAAAFLRSGRRSRCRRRPGVSCGPPIRFPLPFPLSGAAPPRRWSPAATIVARVRRLPSAVPAWPPSGAPRGCHVGPGRQPPAPSDAAASEDPLFVEVEADVWESEQGKSHHL

SEQ ID NO: 19234 - protein, 1753 aa, Oryza sativa
  Clone ID: TF_OSC900325j.C1.p13.fg
MSWHRAGVLLLGAQSCLPVPGVPAVGGVGSVLLSMARMGWKLCHVFRPYTVVMAGSINRRGLDLTGFALELRGMCVVLGYPHGVDYQGKQLPEQEGDDAEPHATWEVTVVILTGSPERTSLAVTADGASWVGREQQADPGAALGESAAEEGPRRSGGAAASAQDRPGRGLSPQASPRLPQPEDHRPQEYLQARACSSVPGVDLLRRDPSCRARAHGSSGGWSLRRWQHGGCAAAHLPPWPVAAVDEQLVGLRMVTTRRSAVTGEGSHPEGSNHNNHGSPHPPPPPPPPPPPDTNAILTQILAQQANMMAAFLHHIQNLPQHNAPPPPPQHSKLAEFLRIRPPTFASSNNPVDALDWLHAVGKKLDTVQCSDEEKVIFAAHQLQGPASLWWDHFQATQPEGQPITWARFTAAFRRTHVPAGVMALKKREFRELKQGNRSVMEYLHEFNNLARYAPEDVREDEEKQEKFLAGMDPELSVRLVFGDYSDFQRLVDKSIRLEVKHKELESHKRRLATFRNQQGANQRVRYTNPYPGGSSLQQQPRSAPRPQFVVRVPQPQQQQSQQGTRAPRPPTPAMQPGQGRGDVQGQQRLCFNCFEPGHFADKCPKPRRQQGQAPPRPNNGGKDVIRGRVNHVTAEDVLTTPDIIVGTFLIHSIPATILFDSGASHSFISVPFVGRNQLGVERLRNPLLITTPGGVMTAKYYSPAVPIEVQGIPFPSDLILLDTKNLDVILGMNWLAQFQGVVDCARRTVTLYRGPEQPVVFFAPPTSVGSSELHQIRLSKIPIVREFGDVFPEELPGMPPKREIEFRIDLAPGTTPQYKRPYRMASNELAEVKKQLEELKEKGYIRPSTSPWGAPVIFVEKKDKTKRMCVDYRALNEVTIKNKYPLPRIDDLFDQLKGATVFSKIDLHSGYHQLRIREEDIPKTAFTTRYGLYEFTVMSFGLTNAPAFFMNLMNKVFMEYLDKFVVVFIDDILVYSQSEEDHQHHLRLVLGKLREHQLYDKLSKCEFWLSEVKFLGHMISAKGVAVDPETVTAVTDWKQPKTVTQIRSFLGLAGYYRRFIENFSKIARPMTQLLKKEEKFVWSPQCEKAFQTLKEKLVSSPVLILPDTRKDFIVYCDASRQGLGCVLMQEGQVVAYASRQLRPHEGNYPTHDLELAAVVHALKIWQHYLIGNRCEIYTDHKSLKYIFTQSDLNLRQRRWLELIKDYDVGIHYHPGKANVVADALIRKSHYNTLDVRGIPPELNQQMEALNLSIVGRGFLATLEAKLTLLDQIREAQKNDPDMRGLLKNMKQGKAAGFTEDEHGTLWNGNRVCVPDDRELKQLILQEAHESPYSIHPGSTKMYLDLKEKYWWVSMKREIAEFVALCDVCQRVKAEHQRPAGLLQPLQVPEWKWDEIGMDFITGLPKTQGGYDSIWVVVDRLTKVARLIPVKTTYGGNKLAELYFARIVSLHGVPKKIVSDRGSQFTSHFWKKLQEELGTRLNFSTAYHPQTDGQTERLNQILEDMLRACVLDFGKTWDKSLPYAEFSYNNSYQASIQMAPYEALYGRKCRTPLLWDQVGESQVFRTDILREAEAKVRTIRDNLKVAQFRQKSYADNRRRNLKFAVDDFVYLRVTPLRGVHRFQTKGKLTPRFVGPFRIIARRGEVAYQLELPTSLGNVHDVFHVSQLKKCLRVPSEQADSEQIEVREDLTYVERPVKILDTMERRTRNRVIPFCKVQWSNHAEEEATWEREDEMKAAHPDLFASSSESRGRDSV

SEQ ID NO: 19235 - protein, 1048 aa, Oryza sativa
  Clone ID: TF_OSC9333j.C1.p2.gm
MVMPMVTTRRNAATGDGNQPEGSNHNHQGNPPPPPPPPPPPPPDTNAILTQILAQQANMMTAFLHHLQNPPQHNAPPPPQHSKLAEFLRIRPPTFSSSNNPVDALDWLHAVGKKLDTVQCSDEEKVIFAAHQLQGPASLWWDHFQATQPEGQPITWARFTAAFRRTHFNNLARYAPEDVREDEEKQEKFLAGMDPELSVRLVSGDYPDFQRLVDKSIRLEAKHKELESHKCRLANFRNQQGANQRVRYTNPYPGGSSSQQQQQQQQQPRSAPRPQFVVRIPQPQQQQNQQGTRAPRPPTPTVQPGQGRRDAQGQQRLCFNCFEPGHFADKCPKPRRQQGQAPPRSNNGGKDVIRGRVNHVTAEDVLTTPDVIVELHQIGLSEIPIVREFGDVFPEELPGMPPKREIEFRIDLAPGTTPLHKRPYRMAANELAEVKKQLEELKEKGYIRPSTSPWGAPVIFVEKKDKTKRMCVDYRALNEVTIKNKYPLPRIDDLFDQLKGATVFSKIDLRSGYHQLRIREEDIPKTAFTTRYGLYEFTVMSFGLTNAPAFFMNLMNKVFMEYLDKFVVVFIDDILIYSQSEEDHQHHLRLVLGKLREHQLYAKLSKCEFWLSEVKFLGHVISAKGVAVDPETVTAVTDWKQPKTVTQVRSFLGLAGYYRRFIENFSKIARPMTQLLKKEEKFVWSPQCEKAFQTLKEKLVSSPVLILPDTRKDFMVYCDASRQGLGCVLMQDGHVVAYASRQLRPHEGNYPTHDLELAAVVHALKIWRHYLIGNRCEIYTDHKSLKYIFTQSDLNLRQRRWLELIKDYDVGIHYHPGKANVVADALSRKSHCNTLNVRGIPPELNQQMEALNLSIVSRGFLAALEAKPTLLDQIREAQKNDPDMHGLLKNMKQGKAAGFTEDEHGTLWNGKRVCVPDNRELKQLILQEAHESPYSIHPGSTKMYLDLKEKYWWVSMKREIAEFVALRDVCQRVKAEHQRPAGLLQPLQVPEWKWDEIGMDFITGLPKTQGGYDSIWVVVDRLTKVARFIPVKTTYGGNKLAELYFARI

SEQ ID NO: 19236 - protein, 1808 aa, Oryza sativa
  unsure (1)..(1808): unsure at all Xaa locations
  Clone ID: TF_OSC9352j.C1.p1.np
LLHLSPKSDFKCCFSFCFCLXMAGSISRRGLDLTGFVLELRGMCVVLGYPHGVDYQGRLLLEQEGDDAEPHAAWEVTAVILTGSPERTSLAVTAGGDSFSAACQNAALLAIGTLHQRYPDELQHSPYRYHPRRGGARDYATFRDASSEDDATIMHLARMVEAYDAARIDFHQMVRRGMVENNMKILELRQENLQLKKDLDAVEAQLHQLKIAQGEVCRPKRRRVCRSQKITARKSTSRPELVRQSLAWTCFVETPRAEPAPVVPQEGEASGVGSTEDALLLTFRPGPSQRQLSLFAGSVWGFQMVTTRRSAATGDGNQPEGSNHNNHGSPPPPPPPPPPPPPDTNAILTQILAQQANMMTAFLHHLQNPPQQNAPPPPPQHSKLAEFLRIRPPTFSSSNNPVDALDWLHAVGKKLDTVQCSDEEKVVFAAHQLQGPASLWWDHFQATQPEGQPITWARFTAAFRRTHVPAGVMALKKREFRELKQGNRSVMEYLHEFNNLARYAPEDVREDEEKQEKFLAGMDPELSVRLVSGDYADFQRLVDKSIRLEAKHKELESHKRRLANFRNHQGANQRVRYTNPYPGGSSSQQQQQQQPRSAPRPQFMVRVPQPQQQQSQQGTRAPRPPMPAVQPGQGRRDVQGPQRLCFNCFEPGHFADKCPKPRRQQGQAPPRSNNGGKDVIRGRVNHVTAEDVLTTPDVIVGTFLIHSIPATILFDSGASHSFISVPFVGRNQLGVERLRNPLLITTPGGVMTAKYYSPAVPIEIQGIPFPSDLILLDSKNLDVILGMNWLAQFQGVVDCARRTVTLYRGPEQPVVFFAPPTSVSSSELHQIGLSEIPIVREFGDVFPEELPGMPPKREIEFWIDLAPGTTPLYKRPYRMAANELAEVKKQLEELKEKGYIRPSTSPWGAPVIFVEKKDKMKRMCVDYRALNEVTIKNKYPLPRIDDLFDQLKGATVFSKIDLRSGYHQLRIREEDIPKTAFTTRYGLYEFTVMSFGLTNAPAFFMNLMNKVFMEYLDKFVVVFIDDILVYSQSEEDHQHHLRLVLGKLREHQLYAKLSKCEFWLSEVKFLGHVISAKGVAVDPETVTAVTDWKXPKTVTQIRSFLGLAGYYRRFIENFSKIARPMTXLLKKEEKFVWSPQCEKAFQTLKEKLVSSPVLILPDTRKDFMVYCDASRQGLGCVLMQDGHVVAYASRQLRPHESNYPTHDLELATVVHALKIWRHYLNGNRCEIYTDHKSLKYIFTQSDLNLRQRRWLELIKDYDVGIHYHPGKANVVTDALSQKSHCNTLNVRGIPPELNQQMEALNLSIVGRGFLAALEAKPTLLDQIREAQKNDPDMHGLLNNMKQGKAAGFTEDEHGTLWNGNRVCVPDNRELKQLILQEAHESPYSIHPSSTKMYLDLKEKYWWVSMKREIAEFVALCDVCQRVKAEHQRPAGLLQPLQVPEWKWDEIGMDFITGLPKTQGGYDSIWVVVDRLTKVARFILVKTTYGGNKLAELYFARIVSLHGVPKKIVSDRGSQFTSHFWKKLQEELDTRLNFSTAYHPQTDGQTECLNQILEDMLRACVLDFGKTWDKSLPYAEFSYNNSYQASIQMAPYEALYGRKCRTPLLWDQVGESQVFGTDILREAEAKVRTIRDNLKVAQSRQKSYADNRRRNLEFAVDDFVYLRVTPLRGVHRFQTKGKLAPRFVGPFRIIARRGEVAYQLELPASLGNVHDVFHVSQLKKCLRVPSEQTDSEQIEVREDLTYVERPVKILDTMERRTRNRVIRFCKVQWSNHAEEEATWEREDELKAAHPDLFASSSESRGRDSV

SEQ ID NO: 19237 - protein, 1212 aa, Oryza sativa
  Clone ID: TF_OSC9451j.C1.p1.fg
MSGPALAPPVPSCPICPSADHGRPSVARMAGRVVTTGNNPTGVPDVRALILVPGGKAQHTQRQTRNSGRLGRRPQAQQQQNQQGTRAPRPPTPTVQPGQGRRDAQGQQRLCFNCFEPGHFADKCPKPRRQQGQAPPRPNNGGKDVIRGRVNHVTAEDVLTTPDVIVGTFLIHSIPATILFDSGASHSFISVPFVGKNQLGVERLRNPLLITTPGGVMIAKYYSPAVPIEIQGIPFPSDLILLDTKNLDVILGMNWEFGEVFPEELPGMPPKREIEFRIDLAPGTTPLHKRPYRMAANELAEVKKQLEELKEKGYIRPSTSPWGAPVIFVEKKDKTKRMCVDYRALNEVTIKNKYPLPRIDDLFDQLKGATVFSKIDLRSGYHQLRIREEDIPKTAFTTRYGLYEFTVMSFGLTNAPAFFMNLMNKVFMEYLDKFVVVFIDDILIYSQSEEDHQHHLRLVLGKLREHQLYAKLSKCEFWLSEVKFLGHVISAKGVAVDPETVTAVTDWKPPKTVTQVRSFLGLEGYYRRFIENFSKIARPMTQLLKKEEKFVWSPQCENAFQTLKEKLVSSPVLILPDTRKTSWCIVTLHAKDWAYASRQLRPHEGNYPTHDLELAAVVHALKIWRHYLIGNRCEIYTDHKSLKYIFTQSDLNLRQRRWLELIKDYDVGIHYHPGKANVVADALSRKSHCNTLNVRGIPPELNQQMEALNLSIVGRGFVAALEAKPILLDQIREAQKNDPDMHGLLKNMKQGKAAGFTEDEHGTLWNGNRVCVPDSRELKQLILLEAHESPYSIHPGSTKMYLDLKEKYWWVSMKREIAEFVALCDVCQRVKAEHQRPAGLLQPLQVPEWKWDEIGMDFITGLPKTQGGYDSIWVVVDRLTKVARFIPVKTTYGGNKLAELYFARIVSLHGVPKKIVSDRGSQFTSHFWKKLQEELGTRLNFSTAYHPQTDGQTERLNQILEDMLRACVLDFGKTWDKSLPYAEFSYNNSYQASIQMAPYEALYGRKCRTPLLWDQVGESQVFGTDILREAEAKVRIIRDNLKVAQSRQKSYADNRRRDLEFAVGDFVYLRVTPLRGVHRFQTKGKLAPRYVGPFRINARRGEVAYQLELPASLGNVHDVFHVSQLKKCLRVPSEQADSEQIEVREDLTYVERPVKILDTMERRTRNRVIRFCKVQWSNHAEEEATWEREDELKAAHPDLFASSSESRGRDSV

SEQ ID NO: 19238 - protein, 307 aa, Oryza sativa
  Clone ID: TF_OSC101197j.C1.p7.hg
MQEESDLRKHVDVFNQLVVDLSKLDVKLDDEDKAIILLCSLPPSYEHVVTTLMHGKDTIKTEEIISSLLARDLRRSKKNEAMEASQAESLLVKAKHDHEAGVLKSKEKGARCYKCHEFGHIRRNCPLLKKRKDGIASLAARGDDSDSSSHEILTVSNEKSGEAWMLDSASSYHVDSDRKTMNIMKDGKTVMIGERTSSCLYKLQGSAVAGGVMEDGYAGVAVHDPEGGEPGHSERERLPAATGRKIGFSMPSTPFPLSLHIQSIAGMLPALPPGVAALFGRSQPHGAPPLQGALALAVATLGLLSPH

SEQ ID NO: 19239 - protein, 556 aa, Oryza sativa
  Clone ID: TF_OSC21248j.C1.p6.fg
MAAFNREMTRRGAQVDGGGSDWRSNRWVGHFGRVARTFRCCQRYEEAQEVRVAAVCASCVEAEQRARFVPDFHRGGGGLGGEVTGGWRRILAGGAWRRGTRRRPSELEQELAAAAAAVLGEEPVQVFSGGAPRRCGSLLRGQRLPKVRRRDGSSQMRLKDLLAQQGISKALEETMPEKMDVGKWVEMKAQATAIIRLSLSDFVMYQVMDEKTPKEIWDKLASLYMSKSLTSKLYLKQQLYGLQMQEESDLRKHVDVFNQLVVDLSKLDVKLDDEDKAIILLCSLPPSFEHVVTTLTHGKDTVKTEEIISSLLARDLRRSKKNEAMEASQAESLLVKAKHDHEAGVSKSKEKGARCYKCHEFGHIRRNCPLLKKRKGGIASLAARGDNSDSSSHEILTVSNEKSGEAWMLDSASSYHVTSKWEWFSSYKSGDFGVVYLGNDTSYRVIGVGDIKFKMYDGNEVLLSDVRHVPGLRKSLISLGSLHETGWLYQVDSDRKTMNIMKDGKTVMTGERTSSCLYKLQGSAVAGGVMEDGHAGVAVHDPEGGKPGVGSSGGSA

SEQ ID NO: 19240 - protein, 408 aa, Oryza sativa
  Clone ID: TF_OSC400049j.C1.p5.fg
MAATAVSKFEVVKFDGTGNFVLWQMRLKDLLAQQGISKALQETMPEKIDADKWNEMKAQAAATIRLSLSDSVMYQVMDEKSPKEIWDKLASLHMSKSLTSKLYLKQQLYGLQVQEESDLRKHVDVFNQLVVDLSKLDVKLDDEDKAIILLCSLPLSYEHVVTTLTHGKDTVKTEEIISSLLARDLRRSKKNEATKASQGKSLLVKDKHDHEAGVSKSKEKGARCYKCHEFGHIRRNCPLLKKRKGGIASLAARGDDSDSGSHEILTVSDEMSGEAWMLDSASSYHVTSKREWFSSYKSGDFGVVYLGDGTSYRVVGVGDVNFKMYDGNEVLLSDVRHVPGLRKSLFRLGAYMRQDGKTVMTGERTSSCLYKLQGSAVTGGVMEDGYVGVAVHDPEGGEPGVGSSGGSA

SEQ ID NO: 19241 - protein, 425 aa, Oryza sativa
  Clone ID: TF_OSC400601j.C1.p65.fg
MAATVVSKFEVVKFDGTGNFVLWQMRLKDLLAQQGISKVLDETMPEMMDADKWDEMKAQVAATIRLSLSDSVMYQVMDEKSPKEIWDKLASLYMSKSLTSKLYLKQQLYGLQMQEESDLRKHVDVFNQFVVDLSKLDVKLDDEDKAIILLCSLPPSYEHVVTTLTHGKDTVKTEEIISSLLARDLRRSKKNEATEASQGESLLVKAKHDHETGVSKSKEKGARCYKCHEFGHIRRNCPLLKKRKGGIASLAARGDDSDSSSHEILTVSDEKSGEAWMLDSASSYHVTSKREWFSSYKSGDFGVVYLGDDTSYCVVGVGDVKFKMYDGNEMLLSDVRHVPGLRKSLISLGSLHETGWLYQVDSDRKTMNIMKDGKTVMTGERTSSCLYKLQGSAVAGGVMENGYAGVAVHDPEGGEPGIGSSGGSA

SEQ ID NO: 19242 - protein, 425 aa, Oryza sativa
  Clone ID: TF_OSC400934j.C1.p66.fg
MAVTVVSKFEMVKFDGTGNFVLWQMRLKDLLAQQGISKALEETMPEKMDAGKWEEMKAQAAATIRLSLSDSVMYQVMDEKTPKEIWDKLASLYMSKSLTSKLYLKQQLYGLQMQEESDLRKHVDVFNQLVVDLSKLDVNLYDEDKAIILLCSLPPSYEHVVTTLTHGKDTIKTEEIISSLLARDLRRSKKNEAMEASQAESLLVKAKHDHEAGVSKSNEKGARCYKCHEFGHIRRNCPLLKKRKDGIASLAARGDDSDSSSHEILTVSNEKSGEAWMLDSASSYHVTSKREWFFSYKSGDFGVVYLGDDTSYHVVGVDDVKFKMYDGNEVLLSDVRHVPGLRKSLISLGSLHETGWLYQVDFDRKTMNIMKDGKTVMTGERTSSCLYKLQGNAVAGGVMEDGYAGVAVHDPEGGEPGVSSTGGSA

SEQ ID NO: 19243 - protein, 371 aa, Oryza sativa
  Clone ID: TF_OSC401810j.C1.p11.fg
MPPIGTLRLPWGRLRSIGPDVEPLVVKPDKTQTKGRSAAPGTLRLAAYNVVFLKSSRRRQIYAAKGNCDIYRGAGKERKWRDRTYIAVKMNNAYVVEAYGRDENRSNTDFEADADSKPMTTSGFPNSTVNSHMQEESDLRKHVDVFNQLVVDLSKLDVKLDDEDKAIILLCSLPPSYEHVVTTLMHGKDTIKTEEIISSLLARDLRRSKKNEAMEASQAESLLVKAKHDHEAGVLKSKEKGARCYKCHEFGHIRRNCPLLKKRKDGIASLAARGDDSDSSSHEILTVSNEKSGEAWMLDSASSYHVDSDRKTMNIMKDGKTVMIGERTSSCLYKLQGSAVAGGVMEDGYAGVAVHDPEGGEPGVGSSGGSA

SEQ ID NO: 19244 - protein, 481 aa, Oryza sativa
  Clone ID: TF_OSC402366j.C1.p6.gm
MAAMVVSKFEVVKFDGTGNFILWQMRLKDLLAQQGISKALEETMPEKMDAGKWEEMKAQAAATIRLSLSDSVMYPVMDEKTPKEIWDKLASLYMSKSLTSKLYLKQQLYGLQMQEESDLRKHVDVFNQLVVDLSKLDVKLDDEDMAIILLCSLPPSYEHVVTTLMHGKDTVKTEEKISSLLARDLRRSNKNEAMEASQAESLLVKAKHDHEAGVSKSKDKGARCYKCHEFGHIRRNCPLLKKRKGGIASLAARGDDSDSSSHETLTVSNEKSGEAWMLDSASSYHVTSKREWFSSYKSGDFGVVYLGDDTSYRVVGVGDVKFEMYDGNEVDFDRKTMNIMKDGKTVMTGERTSSCLYKLQGSAVAGGVMEDRHAGVAVHDPEGGPRREARHQCHMEPVSAGRTQSEGLGSQLSPKRAVRSQEFGVNRKARGIPKPSQGPLKALELVQGIWRPMSRLKGSRALAMAPKPKPTEDTGNNYGAL

SEQ ID NO: 19245 - protein, 424 aa, Oryza sativa
  Clone ID: TF_OSC406022j.C1.p7.fg
MATTVVSKFEVVKFDGTGNFVLWQMRLKDLLAQQGISKALEETMPEKMDAGKWEEMKAQAAATIRLSLSDSVMYQVMDEKTSKEIWVKLTSLYMSKSLTSKLYLKQQLYGLQMQEESDLRKHVDVFNQLVVDLSKLDVKLDDEDKAIILLCSLPPSYEHVVTILTHGKDTIKTEIISSLLARDLRRSKKNEAMEASQAESLLVKAKHDHEAGVSKSKEKGARCYKCHEFGHIRRNCPLLKKRKDGIASLAARGDDSDSSSHEILTVSNEKSGEAWMLDSASSYHVTSKREWFSSYKSGDFGVVYLGDDTSYRVVGVGDVKFKMYDGNEVLLSDVRHVPGLRKSLISLGSLHEIGWLYQVDSDRKTMNIMKDGKTVMTGERTSSCLYKLQGSAVAGGVMEDGHAGVAVHDLEGGEPGEGSSGGSA

SEQ ID NO: 19246 - protein, 406 aa, Oryza sativa
  Clone ID: TF_OSC4861j.C1.p1.fg
MAATVVSKFEVVKFDGTGNFVLWQMRLKDLLAQQRISKALEETMLEKMDAGKWEEMKTQAAATICLSLSDSVMYQVMDEKTPKEIWDKLASLYMSKSLTSKLYLKQQLYGLQMQEESDLRKHVDVFNQLVVDLSKLDVKLDDEDKAIILLCSLPPSYEHVVTTLTHGKDTVKTEIISSLLARDLRRSKKNEAMEASQAESLLVKAKHDHEAGVSKSKEKGARCYKCHEFGHIRRNCPLLKKRKGGIASLAAHGDDSDSSSHEILTVSNEKSGEAWMLDSASSYHVTSKREWFSSYKSVGDVKFKMYDGNEVLLSDVRHVPGLRKSLISLGSLHETGWLYQVDSNRKTMNIMKDGKTVMTGERTSSCLYKLQGTAVVGGVMEDGHAGVAVHDPEGGESSVGSSGGLA

SEQ ID NO: 19247 - protein, 1486 aa, Oryza sativa
  unsure (1)..(1486): unsure at all Xaa locations
  Clone ID: TF_OSC900064j.C1.p39.np
DYVGDSEDDADQRRLRFNRGMARRRPRREVRNNDDSFGKIKFTIPTFDGKYDHDAYLSGELAVDQKFACHDVPVDKRVRAAGSEFTDFASVWWSKYHRTHINALPLTWDGLKXIMHARFVPSYYARDMLNKLQQLKQGDTSVEEYYQALQMGMLCYGLVEDEEAAMARFLVGLDREIYDILSYKEYNNMTQLFHYACKAEREVQGXRAQTRAIIPAGRTPWTARCGAAPAGHASASTSTSAPSNSNKARPTPSAASRHAAEAAAKPAKSASSVVSTGRTRDVXCHRCKGFGHMQRDCPSKRVLVVKDDGEYSFASDFDEDTLGLLATNNKGSEEEEHVGADVADQYERLIVQRVLSAQMGKVEQNQWHNLFQTKCVVNKRSCCTIIDGGSCRNLVSTEMVTKLALQTKPHPHPYYIQLFNNSGRIKVTQLVRLNFAIGSYYDFVDCDVVPMHACSLLLGRPWQYDKDTLHHDRTNQYSFMHNGKKIVLHPMTPEVVFENDVARANKEKNHNKKGSKSNHSKDHNKKGSKSNHSKDTVIKLNGPCLHATKSDIVNLDTSDTVCYALICKDALFSFENMPVSFPPAITNLLQEYEDVIPKDIPLGLPVRGIEHQIDLIPGASLPNRAPYRTNPEETKEIQRQVQDLLDKGYVRESLSPCAVPVIGSWRMCVDCRAINNITIRYCHPRLDDMLDELSGSTVFSKVDLRSGYHQIGIKLGDEWKTTFKTKFGLYEWLVMPFGLTNAPSTFMRLMNEVLLPFIEKFVVVYFDDILTYSKSLEDHLDHLRVVFKALRDARLFDNLEKCNFCTDRASFLGYVVTPQEIEVDQAKVQAIQSWSTPKTVSQVRSFLGLVGFYRHFVRDFSTIAAPLNELTKKGVPFTWGTSQENAHMLKDKLTHASLLQLPDFNKTFELEYDASGIGLGGVLVQEGKHVAYFSEKLSGPVLNYSTYDKELYALVRTLKTWQHYLWPKEFVIHSDHESLKHIHSQGKLNRRHAKWVEFIESFPYVIKHKKGKENVIADTLSRRYTLLTQLDNKFFGLEMIKDQYVHDDDFKDVLLHCKDGKTWNKFFLNDGFVFRAKKLCIPASSVRLLLLXEAHGSDLMGHFGAKKTVDILAGHFFWPKMRRDVDRFVARCATCQKAKSRFNPHGLYIPLPVPTIPWDISMDFVLGLPRTNRGCDSIFVVVDRFSKMSHFIPCNKTDDASHIADLFFREIVRLHGVPNTIVSDRDTKFLSYFWRTLWAKLGTKLLFTTTCHPQTDGQTEVVNRTLSTMLRAVSKKNIKMWEECLPHIEFAYNCSLHSTTKMCPFQFVYGLLPRAPIDLIALPSPEKLNFDAKQRAKLMLKLHETTKENIERMNAKYKFAGDKGRRELNFEPGDLVWLHLRKERFPDLQKSKLMPRADGPFKVLAKINENAYKLDLPADYGVSPTFNVADLKPYLGEEDELESRMTQMQEREYDEDINTNDITSTPPQVQLHGPITHAHARQLNYQ

SEQ ID NO: 19248 - protein, 1138 aa, Oryza sativa
  Clone ID: TF_OSC400483j.C1.p14.gm
MASRRRASTSNDETQTPDLTTLAGVMATQTQLLQAIANNQGNHEGSSFGEFMSTKPPTFTTTDEPMEAEDWLRIIEKKLTLIRVREADKVIFAVNQLEGPAGDWWDTYKEAREEDAGEPTWEEFTAAFRENFVPAAVMRMKKNEFRRLRQGNTTVQEYLNRFTQLARYAIGDLANEEEKIDKFIEGLNDELRGPMIGQDHESFQSLINKVVRLENDQRTVEHNRKRRLAMNRPPQGVPQRLKGATSSGWKPPIVATNRPAAPSNFNRPVAIQNRTPTPTLAAPGAKKNVDCFNCEEYGHYANNCPHPRKTPVRTSANAMTVRGTTIPIAGRGLFKTPQTNRTATRFGRGQVNHVRAEEAQEDQGILMDYRSLNEVTIKNKYPLPRIDDLFDQLKGAKVFSKIDLRSGYHQLKIRTGDIPKTTFSTRYGLYEFTVMSFGLTNAPAYFMNLMNKVFMDYLDKFVVVFIDDILIYSKDEEEHVEHLRLVLEKLRKHKLYAKFSKCEFWLKEVAFLGHVISAGGVAVDPAKVEAVTKWKAPKSVTEIRSFLGLAGYYRRFIEGFSKIARPMTQLLKKEKKFVWSEQCQESFEQLKEKLTSAPILVLPDIRKDFVIYCDASRQGLGGVLMQDRKVVAYASRQLRPHEENYPTHDLELAAVVHALKIWRHYLIGNHCDIYTDHKSLKYIFTQSDLNLRLRRWLELIKDYDLEVHYHPGKANVVADALSRKSHCHHLRTEGMDVQRNFQPMKKVFYGTKRGSMYPNRDLKEGYWWPNMKRDVTEYVALCDVCQMVKAEHQRPAGERAVFGPDIIKEAEEKLPENIADVHPVFHVSQLKKCLRVPEEQAPLEEIHISNDLTYPEHPVRILDEVEKRTRAKVWHMYKVQLSNHTEDKATWESEEFLKTEYPHLFEDRPNPPPTLPRAWPPRAPRCRSIASSPAPPSRRRPSPRVIAVAVAVALSRAPCRRCCAVAVGRPIAARPSGHRLAPRAPRAARPSRRRLAPRTLPRRSPVIVASPSPSRRAPRRAARPSPSPPATPRTACRVAMRPPTPPPRPYRTRPLPFSTPHPSSPFPPPLLLLHAPPPSCRRAAAFVRRAVASKPPRRARCGAERCRLAPPPPTGTDGKIGWYLGKASTVPGQLKTEP

SEQ ID NO: 19249 - protein, 287 aa, Oryza sativa
  unsure (1)..(287): unsure at all Xaa locations
  Clone ID: TF_OSC8260j.C1.p3.np
LVSMRDNFNGSGSHQFHGSTQLNSNSIPRQPLEDQPQPQVMANQTQIVEELLQQMRRRYQIYQMQQMQRQCQESRQCHPPQVRDQMPARNPNQSQSQEFPISAPKTPVKMQSRSPKITTAKSTSDQRTVSATCYDCGEQGHYVRNCPWKVFARSPEKDEKXCPGSNQAPSQSTDKKDEFTPEDAARIPKRQRGRNTFRGARQLTRHLIKYGPPRPEDDESGERFSADDNDDNDDDNDDNDDATLDCFRERVKFKACARCGIVGHTASYCLPTCRCGEYTHYSDACLQ

SEQ ID NO: 19250 - protein, 1636 aa, Oryza sativa
  Clone ID: TF_OSC13851j.C1.p2.fg
MPRYKPEYLFGFEGFVQELRTIGFGTAPLYAQIPHDRHEEKCRVKVTLNSNSEDIPSVMFEAGGGNYIHACQEVARIAIGELRDRYSDQLADTEYRYHPRQPQGSDRGSYLETEGIENDATTRHLVEMLWAMDETRAEVVLAAQDREDRNRGKICRLEDKVDRLKKELAALKGEAPPQKARIHLTARKRALFVPRYQLAPKVRVVEKEVTPALADPPVVNNKLAEFIRVRPPTFSSTTNPVEAGDWLHAIEKKLDLLQCTDQEKVSFASHQLHGPASKWWDHFRLNRTTAEPITWLEFTAAFRKTHIPSGAVSLKKKEFRSLTQGSRTVTEYLHEFNRLARYAPEDVRTDEERQERFLEGLNDELSYPLMTGDYHDFQKLVDKAIRQEDKYNRMEQKKRRIAHFKAQQGNSQRPRLTLGPQSMPQGGSSSVVRPQCQFFNNNAGNNIRNQAPRPVAAPTQQQPAKREQGSKPGVCFNCGDPGHYSDKCSKPRRVKVVPAQSNSTAPASKARVNHVAATEAQGAPDVILGTFLVNSVPTTVLFDSGATHSFLSMSFAGNHGMEVEDLIRPLMVSTPSNQALSLQRSPSVRIEIQEVPFLANLILLESKDLDVILGMDWLARYKGVIDCANRKVTLTSNDGRVVTVHALSSESLRSRLNQMTLEEIPIVREYPDVFPDDLPGMPPKRDIEFRIDLVPGTTPIHKRPYRMAANELAEVKRQVDDLLQKGYIRPSSSPWGAPVIFVEKKDHTQRMCVDYRALNDVTIKNKYPLPRIDDLFDQLKGATVFSKIDLRSGYHQLRIKEEDIPKTAFITRYGLFECTVMSFGLTNAPAFFMNLMNKVFMEYLDKFVVVFIDDILIYSRTKEEHEEHLRLALEKLREHQLYAKFSKCEFWLFEVKFLGHVISAGGVAVDPSNVESVTNWKQPKTVSEIRSFLGLAGYYRRFIENFSKIAKPMTRLLQKDVKYKWSEECEQSFQELKNRLISAPILILPDPKKGFQVYCDASKLGLGCVLMQDGKVVAYASRQLRPHEKNNPTHDLELAAVVHALKIWRHYLFGTRTEVYTDHKSLKYIFTQPDLNMRQRRWLELIKDYDMGIHYHPGKANVVANALSRKGYCNATEGRQLPLELCKEFERLNLGIVSRGFVAALEAKPTLIDQVREAQINDPDIQEIKKNMRRGKAISFLEDEQGTVWLGKRICVPDNKDLKDAILKEAHDTLYSIHPGSTKMYQDLKERFWWASMKREIAEYVAVCDVCQRVKAEHQKPAGLLQPLKIPEWKWEEIGMDFITGLPRTSLGHDSIWVIVDRLTKVAHFIPVKTTYSGSRLAELYMARIVCLHGVPKKIVSDRGSQFTSNFWKKLQEEMGSKLNFSTAYHPQTDGQTERVNQILEDMLRACALDFGGSWDKNLPYAEFSYNNSYQASLQMAPYEALYGRKCRTPLLWDQTGERQVFGTDILREAEEKVKIIQERLRVAQSRQKSYADNRRRDLAFEEGDYVYLRVTPLRGVHRFQTKGKLAPRFVGPFKIVSRRGEVAYQLELPPSMAGIHDVFHVSQLKKCLRVPTEEADPDRIELQEDLTYVEKPVRILEVSERNTRNRVIRFCKVQWSNHSEEEATWEREDELKSAHPHLFASSSESRGRDSV

SEQ ID NO: 19251 - protein, 1739 aa, Oryza sativa
  unsure (1)..(1739): unsure at all Xaa locations
  Clone ID: TF_OSC33758j.C1.p1.np
MADCPLTHQGQTMGGFVAELSRIAFVIGFPREPQYTSIHPLSGEFPHQVRLEIHIPTYLPNMEVTACGGTFEHACEEAALRMMAHLRELHDGVLNTTAYRFHPCRGSSSNSSTFKSAWGENDVTFGHMSDVMRSYDKLHAMLHKATKSLNDQKLVRIADLQDENARLKKEVPRLXGRPPPGGARIRTTPRKSTTAPVRIQLAPRNPPQPPPLAPPAAPAPAPVLAPAPSTAASSAPVLEFGFTFVPASAYRGLAGGSGGCFLXMVNTRNGSRAAGEGNNSEERTDGGYPNSASGNGPPPLPENPTLAXVMAHQTQMMAAMMXQMQQQHQQMHQRMQQQAEQQQQQFGPPPPXSKLLEFLRVRPPTFSSTTNPMEANDWLHAIEKKLNLLQCSDKEKVAFATHQLQGPASAWWDNHMATRPPGTEVTWAEFCRSFRKAQVLDEDVAQKKRVFRALHQGNRTVTEYLHEFNRLARYAPEDVRTDAEKXEKFLASLDDELTNQLISGDYANFEKLVDKAIRQEDQRNKMDRKRKATQFRSNQGSHQRPCFTSGXQGGPTTMIVRQHHPYNPSNFHPGSSGSHLGGQHNRGAAPRPPMAPVQQTAPVPPKKDTGGKPGACFNYGESGHFANKCPKPRRAGPKFVQARVNHASTEEAQAAPEVVLGTFPVNSIPATVLFDSDATHSFISKKFVGVHGLRKEELSTPMRVHTPGNSSTSVSYSPSVLIEIQISRFLPNLILLESKDLDVILGMDWLTKFKGVIDCANRTVTLTNEKGETMVYKSPVSPNQGISLNQIEVENPVVTEEKGSRKLEGIPIVCEYPEVFPEDLTTMPPKREIEFRIDLAPGTAPIYKRPYRMTANVLAEVKKQVDEQLQKGYIRPSTSPWGAPVIFVEKKDKTKRMCVDYCALNEVTIKNKYPLPRIDDLFDQLKGAKVFSKIDIRSGYHQLRIREEDNPKTAFTTQYELYECTVMSFELTNAPAFFMNLMNKVFMEFLDKFVMVFIDDILIYSKSEEEHEQHLRLVLEKLKEHXLYAKFSKCDFWLSEVKFLGHVITAQGVAVDPSNVEXVTXWTPPKTVSQIWSFLGLAGYFRRFIENFSRIARPMTQLLKKEEKFKWTAECDKSFEELKNKLVSAPVLILPDKTKDFQVFCDASRQGLGCVLMQEGQVVAYASRLLRPHESNYPTHDLELAAVVHALKIWRHYLVGNRCEVYTDHKSLKYIFTQPDLNLRQRRWLELIKDYDMGIHYHPGKANVVADALSRKSYCNALGIGDMSDKLLQELEPLNLGIVEHGYVAALEAQPMLVDQVRAAQVNDPEIAELKKNMRVGKAQDFHEDEHGTIWLGERLKDLILTEAHQTQYSIHPGSTKMYKDLKEKFWWASMRREIVEFVALCDVCQRVKAEHQRPAGLLQPLXIPEWKWEEIGMDFITGLPRTSSGHDCIYVMCLHGVPKKIVSDRGSQFTSKFWQKLQEELGTRLNFSTAYHPQTDGQTERVNQILEDMLRACALDFGGAWDKSLPYAEFSYNNSYEASLQMAPFEALYGRKCRTPLFWDQTGERQLFGTEVLTEAEEKVRTIRERLRIAQSRQKSYTDNRRRELTFEVGDYVYLRVTPLRGVHRFQIKGKLAPRFVGPYKILEQRGEVAYQLELPSNMAGIHDVFHVSQLKKCLRVLGEQANSEHIDIQEDLTYVEKPVRILETNERRTRNKVTRFYRVQWSHHSEEEATWEREDELKAAHPHLFASSSESRG

SEQ ID NO: 19252 - protein, 1636 aa, Oryza sativa
  Clone ID: TF_OSC900091j.C1.p16.fg
MPRYKPEYLFGFEGFVQELRTIGFGTAPLYAQIPHDRHEEKCRVKVTLNSNSEDIPSVMFEAGGGNYIHACQEVARIAIGELRDRYSDQLADTEYRYHPRQPQGSDRGSYLETEGIENDATTRHLVEMLWAMDETRAEVVLAAQDREDRNRGKICRLEDKVDRLKKELAALKGEAPPQKARIHLTARKRALFVPRYQLAPKVRVVEKEVTPALADPPVVNNKLAEFIRVRPPTFSSTTNPVEAGDWLHAIEKKLDLLQCTDQEKVSFASHQLHGPASKWWDHFRLNRTTAEPITWLEFTAAFRKTHIPSGAVSLKKKEFRSLTQGSRTVTEYLHEFNRLARYAPEDVRTDEERQERFLEGLNDELSYPLMTGDYHDFQKLVDKAIRQEDKYNRMEQKKRRIAHFKAQQGNSQRPRLTLGPQSMPQGGSSSVVRPQCQFFNNNAGNNIRNQAPRPVAAPTQQQPAKREQGSKPGVCFNCGDPGHYSDKCSKPRRVKVVPAQSNSTAPASKARVNHVAATEAQGAPDVILGTFLVNSVPTTVLFDSGATHSFLSMSFAGNHGMEVEDLIRPLMVSTPSNQALSLQRSPSVRIEIQEVPFLANLILLESKDLDVILGMDWLARYKGVIDCANRKVTLTSNDGRVVTVHALSSESLRSRLNQMTLEEIPIVREYPDVFPDDLPGMPPKRDIEFRIDLVPGTTPIHKRPYRMAANELAEVKRQVDDLLQKGYIRPSSSPWGAPVIFVEKKDHTQRMCVDYRALNDVTIKNKYPLPRIDDLFDQLKGATVFSKIDLRSGYHQLRIKEEDIPKTAFITRYGLFECTVMSFGLTNAPAFFMNLMNKVFMEYLDKFVVVFIDDILIYSRTKEEHEEHLRLALEKLREHQLYAKFSKCEFWLFEVKFLGHVISAGGVAVDPSNVESVTNWKQPKTVSEIRSFLGLAGYYRRFIENFSKIAKPMTRLLQKDVKYKWSEECEQSFQELKNRLISAPILILPDPKKGFQVYCDASKLGLGCVLMQDGKVVAYASRQLRPHEKNNPTHDLELAAVVHALKIWRHYLFGTRTEVYTDHKSLKYIFTQPDLNMRQRRWLELIKDYDMGIHYHPGKANVVANALSRKGYCNATEGRQLPLELCKEFERLNLGIVSRGFVAALEAKPTLIDQVREAQINDPDIQEIKKNMRRGKAISFLEDEQGTVWLGKRICVPDNKDLKDAILKEAHDTLYSIHPGSTKMYQDLKERFWWASMKREIAEYVAVCDVCQRVKAEHQKPAGLLQPLKIPEWKWEEIGMDFITGLPRTSLGHDSIWVIVDRLTKVAHFIPVKTTYSGSRLAELYMARIVCLHGVPKKIVSDRGSQFTSKFWKKLQEEMGSKLNFSTAYHPQTDGQTERVNQILEDMLRACALDFGGSWDKNLPYAEFSYNNSYQASLQMAPYEALYGRKCRTPLLWDQTGERQVFGTDILREAEEKVKIIQERLRVAQSRHKSYADNRRRDLSFDEGDYVYLRVTPLRGVHRFHTNGKLAPRFVGPYKIVSRRGEVAYQLELPQSLAGIHNVFHVSQLKKCLRVPTEEANLEQIEVQEDLTYVEKPIRILKIDERRTRNRVIHFCKVQWSNHSEEESTWEREDELKSAHPHLFASSSESRGRDSV

SEQ ID NO: 19253 - protein, 1451 aa, Oryza sativa
  Clone ID: TF_OSC900107j.C1.p19.fg
MTRRSANTGDGNQPEGINLNNHGSPPPPPPPPPPPPPDTNAILTQILAQQANMTAAFLHHIQNPPQHNAPPPPPPPQHSKLAEFLRIRPPTFSSSNNPVDALDWLHAVGKKLDTVQCNDEEKVIFATHQLQGPASLWWDHFQATQPEGQPITWARFTAAFRRTHVPAGVMALKKREFRELKQGNRSVMEYLHEFNNLARYAPEDVREDEEKQEKFLAGMDSELSVRLVSGDYPDFQRLVDKSILLEAKHKELESHKRRLANFRNQQGANQRVRYTNPYLGGSSSQQQQQQPRSAPRPQFVVRVPQPQQPQGQQGPRAPRPPAPAVQPGQGHRDVQGQQRLCFNCFEPGHFAEKCPKPRRQQGQAPPRPNNGGKDVARGHVNHVTAEDVLTTPDVIVGTLLIHSIPATILFDSGASHSFISVTFVGRNQLGVERLRNPMLITTPGGVMTAKYYSPAIPIEIQGIPFPSDLILLDTKNLDVILGMNWLAQFQGVVDCARRTVTLYRGPEQPVVFFAPPTSVSSSELHQIGLSEIPIVREFGDVFPEELPGMPPKREIEFRIDLAPGTTPLYKRPYRMAANELAEVKKQLEELKGKGYIRPSTSPWGAPVIFVEKKDKTKRMCVDYRALNEVTIKNKYPLPRIDDLFDQLKGATVFSKIDLRSGYHQLRIREEDIPKTAFTMRYGLYEFTVMSFGLTNAPAFFMNLMNKVFMEYLDKFVVVFIDDILVYSQSEEDHQQHLCLVLGKLREHQLYAKLSKCEFWLSEVKFLGHMISAKGVAVDPETVTAVTDWKQPKTVTQIRSFLGLAGYYRRFIENFSKIARPMTQLLKKEEKFVWSPQCEKAFKTLKEKLVSSPVLILPDTHKDFMVYCDASRQGLGCVLMQEGHVVAYASRQLRPHEGNYPTHDLELAAVRRWLELIKDYDVGIHYHPGKANVVADALSRKSHCNTLNVRGIPPELNQQMEALNLSIVGRGFLAALEAKPTLLDQIREAQKNDPDMRGLLKNMKHGKAAGFTEDEHGTLWNGNREAHESPYSIHPGSTRMYLDLKEKYWWVSMKREIAEFVALCDVCQRVKAEHQRPAGLLQPLQIPEWKWDEIGMDFITGLPKTQGGYDSIWVVVDRLTKVARFIPVKTTYGGNKLAELYFARIVSLRGVPKKIVSDRGSQFTSHFWKKLQEELGTRLNFSTAYHPQTDGQTERLNQILEDMLHACVLDFGKTWDKSLPYAEFSYNNSYQASIQMAPYEALYGRKCRTPLLWDQVGESQVFGTDILREAEATVRTIRENLKVAQSRQKSYADNRRHDLEFAVDDFVYLRVTPLRGVHRFQTKGKLAPRFVGPFRITARRGEVAYQLELPASLGNVHDVFHVSQLKKCLRVPSEQADSEQIEVREDLTYVERPVKILDTMERRTRNRVIRFCKVQWSNHAEEEATWEREEELKAAHPDLFASSSESRGRDSV

SEQ ID NO: 19254 - protein, 1810 aa, Oryza sativa
  unsure (1)..(1810): unsure at all Xaa locations
  Clone ID: TF_OSC900142j.C1.p3.np
LLHLLSKYNPXNVASLFCFCLXMAGSITRRGLDLTGFVLELRGMCIVLGYPHGVDYQGRPLPEQEGDEAEPVAAWEVTAVILFFSPERTSLAVTAGGDSFSAACQNAALLAIGTLHQRYPDELQHSPYRYHPRRGGARDYATFRDASSEDDATIMHLARMVEAYDAARIDFHQMVRRGLVENNLKILELRQENLQLKKDLDAVEAQLHQLKIAQGEVGRPKRRRVCRSQKITARKSTSRPELVRQSLAWTCFVETPRAEPAPVVPQEGETSGVGSTKDALLLTFCPGPSQRQLSLFAGSVWGFQMVMTRRSANTGDGNQPEGINLNNHGSPPPPPPPPPPPPPDTNAILTQILAQQANMTAAFLHHIQNPPQHNAPPPPPPPQHSKLAEFLRIRPPTFSSSNNPVDALDWLHAVGKKLDTVQCNDEEKVIFATHQLQGPASLWWDHFQATQPEGQPITWARFTAAFRRTHVPAGVMALKKREFRELKQGNRSVMEYLHEFNNLARYAPEDVREDEEKQEKFLAGMDSELSVRLVSGDYPDFQRLVDKSILLEAKHKELESHKRRLANFRNQQGANQRVRYTNPYLGGSSSQQQQQQPRSAPRPQFVVRVPQPQQPQGQQGPRAPRPPAPAVQPGQGHRDVQGQQRLCFNCFEPGHFAEKCPKPRRQQGQAPPRPNNGGKDVARGHVNHVTAEDVLTTPDVIVGTLLIHSIPATILFDSGASHSFISVTFVGRNQLGVERLRNPMLITTPGGVMTAKYYSPAIPIEIQGIPFPSDLILLDTKNLDVILGMNWLAQFQGVVDCARRTVTLYRGPEQPVVFFAPPTSVSSSELHQIGLSEIPIVREFGDVFPEELPGMPPKREIEFRIDLAPGTTPLYKRPYRMAANELAEVKKQLEELKGKGYIRPSTSPWGAPVIFVEKKDKTKRMCVDYRALNEVTIKNKYPLPRIDDLFDQLKGATVFSKIDLRSGYHQLRIREEDIPKTAFTMRYGLYEFTVMSFGLTNAPAFFMNLMNKVFMEYLDKFVVVFIDDILVYSQSEEDHQQHLCLVLGKLREHQLYAKLSKCEFWLSEVKFLGHMISAKGVAVDPETVTAVTDWKQPKTVTQIRSFLGLAGYYRRFIENFSKIARPMTQLLKKEEKFVWSPQCEKAFKTLKEKLVSSPVLILPDTHKDFMVYCDASRQGLGCVLMQEGHVVAYASRQLRPHEGNYPTHDLELAAVVHALKIWRHYLIGNRCEIYTDHKSLKYIFTXSDLNLRQRRWLELIKDYDVGIHYHPGKANVVADALSRKSHCNTLNVRGIPPELNQQMEALNLSIVGRGFLAALEAKPTLLDQIREAQKNDPDMRGLLKNMKHGKAAGFTEDEHGTLWNGNRVCVPDNRELKQLILXEAHESPYSIHPGSTRMYLDLKEKYWWVSMKREIAEFVALCDVCQRVKAEHQRPAGLLQPLQIPEWKWDEIGMDFITGLPKTQGGYDSIWVVVDRLTKVARFIPVKTTYGGNKLAELYFARIVSLRGVPKKIVSDRGSQFTSHFWKKLQEELGTRLNFSTAYHPQTDGQTERLNQILEDMLHACVLDFGKTWDKSLPYAEFSYNNSYQASIQMAPYEALYGRKCRTPLLWDQVGESQVFGTDILREAEATVRTIRENLKVAQSRQKSYADNRRHDLEFAVDDFVYLRVTPLRGVHRFQTKGKLAPRFVGPFRITARRGEVAYQLELPASLGNVHDVFHVSQLKKCLRVPSEQADSEQIEVREDLTYVERPVKILDTMERRTRNRVIRFCKVQWSNHAEEEATWEREEELKAAHPDLFASSSESRGRDSV

SEQ ID NO: 19255 - protein, 542 aa, Oryza sativa
  Clone ID: TF_OSC102322j.C1.p2.fg
MATKAALRSLWSAFDKQASSIIDKLVWPWLMPADDTEEGAKRRAEEITEELAQLEKTRMTTWARSVVESFDTAPPPFPPPLSATTPHPPPPSPATSSSRTATATATATPTSPTPTPPPSSVTMLWARSRPTKEDEGEGLQRRTDAVVVLVRMQRRARFAAWTNAALHNFWGVERLSPGWANVYRFWANKWYQSSGAMSGDGVYTPPPPPPIRRSSGGGGSSSGNGDGVYTPPPIRRGSGGGGSSSGNGGDGSLGGHELVVQQVKEAGVTLRYPMLGENNYGVWAVKMKIFMRAQGVWAAVEGNAADEKMDQMALAAIVQAVPEAMVMAISEKETAREAWDALKQMNMGEERVKKARVQTLKRVLHGMYMGNSEKINDFALKVTTIVNEIHSLGTKVEETTVVEKLLHSVPDKFQSLISTIEQWGDVSEMTVTETIRRLRAFEESSKGRRRENAGEEQLLIAGAEQRLTRTEWEAIVAKEKKSDEASGNGEKKFRGKFNKSKIECRRCGKFGHFADECDEPRKMAKAVTQLVIADADDEPTLL

SEQ ID NO: 19256 - protein, 641 aa, Oryza sativa
  Clone ID: TF_OSC23348j.C1.p2.gm
MGSGGNDRGLLIHRVVKEAGGPANNPVLMKTNYNVWSLLMKIKLQARCLWGAIDPGEVELHEDRMTLDAICSVVPAEMISTLATKETAKAAWDCIKTMRVVNDRIRKASAQKLRSEYEALAFRDGESVEDFAMRLNTVVTQLSTLGDPEPDDKVVEKYLCVARPRFSQLVLSIETLLDISTLTLEEVTGRLKAVEDSGQSSSSSSPGAGAKLYLTEEEWLERHKKKQQEAKKRNGGGNGRGKRRGGQGHTSGGGGGVGNADSTGVGPARKTDKCRNCGKLGHCAKDCRSKPKQEQAHVVQDEDEPTLMLMTGSCIDEVEETGAQCATPSPLAPQPRPDVIELVEQKVFTALDDATDHDNKCWILDTGASNHMTGSRAAFSDIDTNVAGNVWLGDSLLVRIGGRGTVLFACKNSEHRMLHNTYYLPRLAANIISVGQLDETGFKVVVEDGVMRVWDERRRLLACIARSPGRLYLLDINLARPVCLMARAGEDAWRWHARFGHINFAALRKMGRESLVRGLPVLSQVERVCEACLAGKHRRAPFAQEALHNATELLALIHGDLCGPITPATPSGNRYFLLLVDDYSRYMWLTLLATKDGAPAAIKRVQAAAERKSGRKLWALRTDRGGEFTVGHFTEYCAELG

SEQ ID NO: 19257 - protein, 620 aa, Oryza sativa
  Clone ID: TF_OSC25126j.C1.p1.fg
MATKAALRSLWSAFDKQASSIIDKLVWPWLMPADDTEEGAKRRAEEITEELAQLEKTRMTTWARSVVESFDTAPPPSPPPLSATTPHPPPPSPATSSSRTATATATATPTSPTPTPPPTSATLLWPRPRPTKEEEGEGLQRRTDAVLVKRLRRARFAAWTSAALHKFDFDDAAPTVPPPPPATMIPPPTVTATITPLWPPPPPTKKEEHEGLQRRTDAVVVLVRMQRRARFAAWTNAALHKFDFGAAPPTAPPPRQPLPVGNSPTLKWYQSSGAMSGDGVYTPPPPPPIRRSSGGGGSSSGNGDGVYTPPPIRRGSGGGGSSSGNGGDGSLGGHELVVQQVKEAGVTLRYPMLGENNYGVWAVKMKIFMRAQGVWAAVEGNAADEKMDQMALAAIVQAVPEAMVMAISEKETAREAWDALKQMNMGEERVKKARVQTLKRVLHGMYMGNSEKINDFALKVTTIVNEIHSLGTKVEETTVVEKLLHSVPDKFQSLISTIEQWGDVSEMTVTETIRRLRAFEESSKGRRRENAGEEQLLIAGAEQRLTRTEWEAIVAKEKKSDEASGNGEKKFRGKFNKSKIECRRCGKFGHFADECDEPRKMAKAVTQLVIADADDEPTLL

SEQ ID NO: 19258 - protein, 444 aa, Oryza sativa
  Clone ID: TF_OSC30021j.C1.p1.hg
MAALTDDANGEGASQPRTGPYSSGRAGGSRRAATAEQHDDEPSLAQLLANQNRLFERMVANSENMGAAMAQQANQAPSKLADVQRTHPPHFSSAADPLAADDWLRDIEIKLNLCRCDPVEKATFAAYYLQGAAAAWWETYKTLIPPDEPITWTVFREGFRSAHIPAGLMEIKKKEFLNLKQGNMPFMEFMERFNYLGRYAASDLNTETKKVELCRDRLAPELKHALAAHEITSMKTLVALRVESSEKEVVEDRKRKWAAKKFAGSSSSTRPRLAPSPAVRPMAPQPPRQMYVPPRPQTQLVRQVPRAVQAAGDASRNANVTCYNCGKKGHYSPSCPYPKTGTSGPYSQGAPQQPRGPPQVQPGQRGAPAVPKPAPTFGRGRLNHVTAEEATDAPGVVLGMPPDRDIEFVIDLIPGTAPIAKRPYRMTSENLMELKKKLNEQLAK

SEQ ID NO: 19259 - protein, 564 aa, Oryza sativa
  Clone ID: TF_OSC400011j.C1.p4.fg
MATKAALRSLWSAFDKQASSIIDKLVWPWLMPADDTEEGAKRRAEEITEELAQLEKTRMTTWARSVVESFDTAPPPSPPPLSATTPHPPPPSPATSSSRTATATATATPTSPTPTPPPTSATLLWPRPRPTKEEEGEGLQRRTDAVLVKRLRRARFAAWTSAALHKFDFDDAAPTVPPPPPATMIPPPTVTATITPLWPPPPPTKKEEHEGLQRRTDAVVVLVRMQRRARFAAWTNAALHKFDFGAAPPTAPPPPQPLPVGNSPTLKWYQSSGAMSGDGVYTPPPPPPIRRSSGGGGSSSGNGDGVYTPPPIRRGSGGGGSSSGNGGDGSLGGHELVVQQVKEAGVTLRYPMLGENNYGVWAVKMKIFMRAQGVWAAVEGNAADEKMDQMALAAIVQAVPEAMVTTIVNEIHSLGTKVEETTVVEKLLHSVPDKFQSLISTIEQWGDVSEMTVTETIRRLRAFEESSKGRRRENAGEEQLLIAGAEQRLTRTEWEAIVAKEKKSDEASGNGEKKFRGKFNKSKIECRRCGKFGHFADECDEPRKMAKAVTQLVIADADDEPTLL

SEQ ID NO: 19260 - protein, 1074 aa, Oryza sativa
  Clone ID: TF_OSC400258j.C1.p20.fg
MGVPAFYRWLAEKYPMVVVDVVEEEAVEIEGVKVPVDTSKPNPNGLEFDNLYLDMNGIIHPCFHPEDRPSPTTFAEVFQCMFDYIDRLFVMVRPRKLMYMAIDGVAPRAKMNQQRSRRFRAAKDAADAAAEEERLREEFEREGRKLPPKQQSQTCDSNVITPGTEFMAVLSIALQYYIHLRLNYDPGWKQVKVILSDANVPGEGEHKIMSYIRGQRNLPGFNPNTRHCLYGLDADLIMLALATHEVHFSILREVVYTPGQQDKCFLCGQVGHLAANCEGKVKRKAGEFDEKGEAIVPKKPYQFLNIWTLREYLEYEFRMQNPPFPIDFERIVDDFIFMCFFVGNDFLPHMPTLEIREGAINLLMAVYKKEFPSMGGYLTDACTPDLNKVEHFIQAVGSYEDKIFQKRARLHQRQAERIKREKAQAKRGDDLDPHVRDDLIVPVARFQGSRLASGPVPSPYEQNGSDKNNGGKNSRARKAARVSSSGSSIAAAIVEAENDLEAQERENKEDLKTMLKDALREKSDVFNSENPEEDKIKLGEPGWRERYYEEKFGARTPGQIEEIRRDVVLKYTEGLCWVMHYYYEGVCSWQWFYPYHYAPFASDLSGLGQLNITFELGSPFKPFDQLMGVFPAASSHALPVQYRQLMTDANSPIIDFYPTDFEVDMNGKRYSWQGIAKLPFIDEARLLAEIKKVEHTLTPEEARRNSIMFNMLFVNGSHPLSPYIYSLNSKFGHLPDRERNEIKEKIDPSSSCLVLCSGGMNGYISLCSGDPCPPVFRSPVDGLEDIMDNQVICTIYKLPDSHKHIARPPVGVIIPKKTVEATDLKPPPVLWHEDSGRRPHDNNNRRPYENSNRQNPAGAISGRQLGEAAHRLVVNSLNARSGGQYNTPSMPYQTIMNGMPYPNGIPPRMEQPAPGWHVPGDLPNGQVPPAYASSSGHYQNDRSGPSQYGRDNHGRYPYARDNHHDSRGRVPPYHQSGGNSYQSHSAPSAGPGRYAQPPPYAGGYGRSYQPAPYGGGQQWQQQQQQPYGSYAGSGPYGGGAPPARPNSRPQQSQNRYNTLDRNSNRRPPPGHGRH

SEQ ID NO: 19261 - protein, 1315 aa, Oryza sativa
  Clone ID: TF_OSC400562j.C1.p1.fg
MPFMEFMERFNYLGRYAASDLNTETKKVELCRDRLAPELKHALAAHEITSMKTLVALRVESSEKEVVEDRKRKWAAKKFAGSSSSTRPRLAPSPAVRPMAPQPPRQMYVPPRPQTQLVRQVPRAVQAAGDASRNANVTCYNCGKKGHYSPSCPYPKTGTSGPYSQGAPQQPRGPPQVQPGQRGAPAVPKPAPTFGRGRLNHVTAEEATDAPGVVLGTFLVHSIPLTVLFDSGATHSFMSTLKAKQLDLKTEFLSDAMRIQSPGSTMVTKLLCKGVELIIDGVKFKANLILLDTLGLDVILGMDWLTKHEGTIDCAHRTVTLRSTDGQFVRFTFEQTSTSNQPSIQSLSIPELKSVPIVNEYSDVFPDELPGMPPDRDIEFVIDLIPGTAPIAKRPYRMTSENLMELKKKLNEQLAKGFIRPSSSPWGCPVLFVPKKDGTMRMCVDYRPLNEVTIKNKYPLPRIDDLFDQLTGARVFSKIDLRLGYFQLKIRPEDIPKTAFTTRYGLFEYTVVSFGLTNAPASFMNMMNKIFMEYLDKFVVVFIDDILIYSKSEEEHAQHLRMVLDKLREHQLYAKFSKCEFWLKEVEFLGHVLSEGGIAVNPRNVQNVLNWKQPQNVPEIRSFLGLAGYYRRFIENFSKIARPLTQLLKKENKFIWSEACETSFHELKRRLTTAPVLVMPDVLKPFHVYCDASHHGLGCVLMQEGKVVAYASRQLRPHEINYPTHDLQLAAVVHALKIWRHYLVSNRCEIFTDHKSLKYFFTQPDLNLRQRRWLELIKDYDLGIHYHPGKANVVADTLSRKLHHLAVIETINQPSLSSEFQKLNLGLVEDGYVAALALQPTLYSQIKAAQSIDEEVAEIMKEINSKPQSIYTLNSDGMVMLGKRIFVPNNQHLRETILDEAHQTPLSIHPGCTKMYQDIRTQYWWPSLRRDIAAYVAICDVCQRVKAEHQRPAGLLQPLQVPEWKFDEVGMDFITGLPKTPNGHDSIWVIMDRLTKVAHFIPVHVTYGGAKLAELYLTHIVRLHGVPKVIVSDRGTQFTSRFWKNLHELLGTKLFLSTAFHPQTGGQVERTNQILEDMLRACVLEHNTNWEKCLSFAEFSYNNSFQSSIQMSPFEALYGRKCRTPLYWSEVGERQFFGPAIINEAEKNVTLIRDRLKEAQTRQKSYSDRRRRELSFDVGDHVYLKVSPMRGTQRFQIHGKLAPRYIGPYQIISKRGQVAYQLELPFQLSNIHDVFHVSQLKKCLRTPIEHTSLEDINLKPNLSYQEYPIRILEESERRTRKSSIKILRVQWSNHTADEATWEREDRLKAEFPSFF

SEQ ID NO: 19262 - protein, 1494 aa, Oryza sativa
  Clone ID: TF_OSC411214j.C1.p3.fg
MGWKLCHVFRPYTVVMAGSVTRRGLDMTGFVLELRGMCVVLGYPHGVDYQARPLPEQEGDDAEPRAGWEVTAVILSGSPERTSLAVTAGGDSFPAACQNAALLAIGTLHQRYPDELQHSPYRYHPRRGGARDHATFRDASSEDDATVVHLARMVEAYDAARIDFHQMVRRGMVENNLKILELRQENLQLKKDLDALEAQLHQLKIAQGEDSRPKRRRVCRSQKITARKSTSRPELVRQSLAWTCFVETPRAEPAPVVPQEGEASGVGSSEVLFVSSSSLFAGSVWGFQMVTTRRNVNTGEGNQPEGSNPNSQGNPPPPPPPDTNAILTQILAQQANMMNAFLHHLQNPPQQNAPPPPPQHSKLAEFLRIRPPTFSSSNNPVDALDWLHAVGKKLDTVQCSDEEKVIFAAHQLQGPASLWWDHFQATQPEGQPITWTRFTAAFRRTHVPAGVVALKKREFRELKQGNRSVMEYLHEFNNLARYAPEDVREDEEKQEKFLAGMDPELSVRLVSGDYPDFQRLVDKSIRLEAKHKELESHKRRLANFRNQQGANQRVRYTNPYPGGSSSQQQQQQQQPRPAPRPQFVLCFNCFEPGHFADKCPKPRRQQGQAPPRSNNGGKDVIRGRVNHVTAEDVLTTPDVIVGTFLVHSIPATILFDSGASHSFISVPFVGKSQLGVERLRNPLLITTPGGVMIAKYYSPAVPIEIQGIPFPSDLILLDTKNLDVILGMNWLAQFQGVVDCVRRTVTLYRGPEQPVVFFAPPTSVRSSELHQIGLSEIPIVREFGDVFPEELPGMPPKREIEFRIDLAPGTTPLYKRPYRMAANELAEVKKQLEELKEKGYIRPSTSPWGAPVIFVEKKDKTKRMCVDYRALNEVTIKNKYPLPRIDDLFDQLKGATVFSKIDLRSGYHQLRIREEDIPKTAFTTRYGLYEFTVMSFGLTNAPAFFMNLMNKVFMEYLDKFVVVFIDDILIYSQSEEDHQHHLRLVLGKLREHQLYAKLSKCEFWLSEVKFLGHVISAKGVAVDPETVTAVTDWKQPKTVTQIRSFLGLAGYYRRFIENFSKIARPMTQLLKKEEKFVWSPQCEKAFQTLKEKLVSSPVLILPDTRKDFMVYCDASRQGLGCVLMQDGHVVAYASRQLRPHEGNYPTHDLELAAVVHALKIWRHYLIGNRCEIYTDHKSLKYIFTQSDLNLRQRRWLELIKDYDVGIHYHPGKANVVADALSRKSHCNTLNVRGIPPELNQQMEALNLSIVGRGFLAAMEAKPTLLDQIREAQKNDPDMHGLLKNMKQGKAAGFTEDEHGTLWNGKRVCVPDSRELKQLILQEAHESPYSIHPGSTKMYLDLKEKYWWVSMKREIAEFVALCDVCQRVKAEHQRPAGLLQPLQVPEWKWDEIGMDFITGLPKTQGGYDSIWVVVDRLTKVARFIPVKTTYGGNKLAELYFARIVSLHGVPKKIVSDRGSQFTSHFWKKLQEELGTRLNFSTTYHPQTDGQTERLN

SEQ ID NO: 19263 - protein, 1397 aa, Oryza sativa
  Clone ID: TF_OSC900174j.C1.p17.fg
MGSGGNDRGLLIHRVVKEAGGPANNPVLMKTNYNVWSLLMKIKLQARCLWGAIDPGEVELHEDRMTLDAICSVVPAEMISTLATKETAKAAWDCIKTMRVVNDRIRKASAQKLRSEYEALAFRDGESVEDFAMRLNTVVTQLSTLGDPEPDDKVVEKYLCVARPRFSQLVLSIETLLDISTLTLEEVTGRLKAVEDSGQSSSSSSPGAGAKLYLTEEEWLERHKKKQQEAKKRNGGGNGRGKRRGGQGHTSGGGGGVGNADSTGVGPARKTDKCRNCGKLGHCAKDCRSKPKQEQAHVVQDEDEPTLMLMTGSCIDEVEETGAQCATPSPLAPQPRPDVIELVEQKVFTALDDATDHDNKCWILDTGASNHMTGSRAAFSDIDTNVAGNVWLGDSLLVRIGGRGTVLFACKNSEHRMLHNTYYLPRLAANIISVGQLDETGFKVVVEDGVMRVWDERRRLLACIARSPGRLYLLDINLARPVCLMARAGEDAWRWHARFGHINFAALRKMGRESLVRGLPVLSQVERVCEACLAGKHRRAPFAQEALHNATELLALIHGDLCGPITPATPSGNRYFLLLVDDYSRYMWLTLLATKDGAPAAIKRVQAAAERKSGRKLWALRTDRGGEFTVGHFTEYCAELGVQRELTAPYSPQQNGVVERRNQSVVGTARSMLKAKGLLGARPRALVARPHTSFGMESHWPCTTCAFRCVAHVKVTAPNMKKLDDRSRPMIFVGYEPGSKAYRVYDPATRRVHVSRDVVFDKEAQWNWDGEAAANVDSGFTIEYTTVYHLATAAPTQIGTEHGGAPASPRSPASGSTPPTPPLAEEPPVEFVSPPPDVEDDLDADHDDAPLRFHRIDDVLGPATPPGQAVRELSEELFAVTAEEPASFAEAEQHSYWRQSMIKEMRSIEANKTWRLVDPPARQHPIGLKWVYKAKKDAAGNITKYKACLVAKGYVQRQGIDFDEVFAPVARLKSVRLLLAHAACEGRAVHHMDVKSAFLNELLEEVYVAQPPGFVVDGQEHKVLHLDKALYGLRQAQRAWYAKLDASLLMLGFHRSDSEHAVYMRGMGVHRLVVGVYINDLIITGGHSGELMQFKEEMKGTFQMSDLGLLKYYLGLEVNQSEDGITVCQSAYAQKILEVAGMAGSNPSLTPMETRLKLSKSSTAPAVDATDYRRIVGSLRYLVNLRPDLAYYVGYVSRFMEKPTVEHLAAVKRVLRYIASTIGYGCHYMRKKEAASLVGFSDSDLAGDLDTRKSTSGVFFFLGDNPITWQSQKQKVVALSSCEAEYIAATTVACQGVWLARLLAELRGEEADAVTLKIDNQSAIMLSKNPIFHDRSKHIDTRYHYIRECIEEGRVKAEFIGTDGQLADILTKALGRDRFIELRSRIGLIEIKTPRKV

SEQ ID NO: 19264 - protein, 1306 aa, Oryza sativa
  unsure (1)..(1306): unsure at all Xaa locations
  Clone ID: TF_OSC9356j.C1.p1.np
MAGFANALRPDKFTGVHFKRWQIRVTLWLTAMKCFWVSTGKPEGVLTAEXQKQFEEATTLFVGCILSVLGDRLVEVYMHMTDAKELWDALNTKFGATDASNDLYIMEQFHDYKMADNRSIVEQAHEIQTMAKELELLKCVLPDKFVAGCIIAKLSPSWRSFGTALKHKRQEYSVEGLIASLDVEEKAQEKDAASKGDGGQSSANVVHKAQNKSKGKYKAQQTTNFKKQKKNNNNPNQDEWTCFVCGQLGHLASKCPQRKGMKTPAGQTSKSANVTIGNTRDGSGCGNLPTVFSVNQSTNWWVDTRANVHVCADISLFSSYQVARGSTVLMGNGSHASVHGVGTVDLKFTSGKIVQLKNVQHVSSIDRNLVSGSRLTRDGFKLFFESNKVVVSKHGYFIGKGYECGGLFRFLSDFCNKSVNHICGSVDDEANVXHSRLCHINFGLMSRLSSMCLIPKFSIVKGSKCHSCVQSKXPRKPHKAAEERNLAPLELLHSDLCEMNGVLTKGGKRYFMTLIDDATRFCYVYLLKTKDDALDYFKIYKAEVENQLDRKIKRLRSDRGGEFFSNEFDLFCEEHGIIHERMPPYSPESNGIAERKNRTLTDLVNAMLDTAGLPKAWWGEALLTLNHVLNRVPNRNKDKTPYEIWIGRKPSLSYLRTWCLAKVNVPITKKRKLGPKTMDCVILGYAYHSIAYRFLIVKSEEPDMHVGTIMESRDATFFESFFPMKDTHSSSSQSSEIIPSSITPPEQTEHTHEHVTEEDDSAAPRRSKRQRTAKSFGKDFTLYLVDDTPKSISEAYASPDADYWKETVRSEMDSIIANGTWEVTERPYGCKPMGCKWVFKKKLRPDGTIEKYKARLIAKGYTQKEGGDFFDTYSPVARLTTIRVLLSLAASHGLLVHQMDVKTTFLNGELDEEIYMDQPDGFVVEGQEGKVCKLLKSLYGLKQASKQWHEKFDKTLTSAGFAVNEADKCVYYRHGGGEGVILCLYVDDILIFETNLEVINEVKSFLSQNFDMKDLGVADIILNIKLIRGENGITLLQSHYVEKILNRFGYIDSKPSPTPDDPSLLLRKNKRIARNQLEYSQIIISLMYLASATRPDISFAVSKLNRFTSNPGDDHWRVLERVMRYLKGTVELGLHYTGYPAVLEGYSDSNWISDVDEIKATSGYVFTLGGGAVXWRSCKQTILTRSTMEAELMALDTATVEAEWLHDLLMDLPIVEKSTCEKTIEVCQEIKKLXSYNVGLHPNSXKPGRSFHEGTITKCDRQCIEGDGFETHSILQRTHLCELDCWSQSMEILGESSRKLTIDLGV

SEQ ID NO: 19265 - protein, 427 aa, Oryza sativa
  Clone ID: TF_OSC9356j.C1.p2.gm
MAKELELLKCVLPDKFVAGCIIAKLSPSWRSFGTALKHKRQEYSVEGLIASLDVEEKAQEKDAASKGDGGQSSANVVHKAQNKSKGKYKAQQTTNFKKQKKNNNNPNQDEWTCFVCGQLGHLASKCPQRKGMKTPAGQTSKSANVTIGNTRDGSGCGNLPTVARGSTVLMGNGSHASVHGVGTVDLKFTSGKIVQLKNVQHVSSIDRNLVSGSPSHGLLVHQMDVKTTFLNGELDEEIYMDQPDGFVVEGFAVNEADKCVYYRHGGGEGVILCLYVDDILIFETNLEVINESHYVEKILNRFGYIDSKPSPTPDDPSLLLRKNKRIARNQLEYSQIIISLMYLASATRPDISFAVSKLNRFTSNPGDDHWRVLERVMRYLKGTVELGLHYTGYPAVLEGYSDSNWISDVDEIKATSGYVFTLGGGAV

SEQ ID NO: 19266 - protein, 751 aa, Oryza sativa
  Clone ID: TF_OSC401845j.C1.p5.gm
MANQPASSDEEKHQGNAIPHQDYSFSLTPVPGQRNQNEKRKCRVRKDICCFNCQEMGHFADKCPKPRNIVASTSVHATPRNQKLAPQRIVIHASRSSPIARVAIAPTPLSALPQGVNAQFQPQPPVDKIETMKKDITPEIVHDQSVTRAINPDIMHEEDRTTISGTPKDLIAPEASSTPGVKSTWLRKVESAGHPPARVGTPPGRAVASPSPACPRFRRNAVARAGLTLRLAGVPSATPSAVPVRRGMFHAVLASVQLLPAALVASSPAPVVVVVHLLLSSFPVVMAFVPPSSRSRSPPVVRQVSCCSPIVVFILSSTSSSLVPAASRIRPRIAAEVVPSPFVSVVPGRLRRARSSLSFPRLVAWCRRRQQGYGKLLAEIRDDFISNFQGTFERPGTYFDLYNVIQKPSEYLQDYIRRFSEQRNKISDITDDVIIAAFTKGVHHELLVGKFGRKPPRTVKQMFENTNEYAKADDAVTASELSGSNWKPKKDAPAVGGSGSTNHKDCKRKPEDLVASTTPSSQQRSHINTFDKIMNAQCSHHPNSNHAAKDCFIYQQFAEQYAKKGRKPTDGEQSTSKKMDDEDDGPTGFQDSRKELNHIFGGPQAYESKRKQKLTDREINAVQPNTPQYLRWSETAIKFDRSDHPDRVVHLGRYPLVLDPVVRNVKLRRSLIDGGSALNILFAKTLDDMHIPHTELKLSSAPFHGVIPWLSSTPLGQITLPVTFGTWENFCTENICFQVADFEMAYHTTPT

SEQ ID NO: 19267 - protein, 1789 aa, Oryza sativa
  unsure (1)..(1789): unsure at all Xaa locations
  Clone ID: TF_OSC900110j.C1.p22.np
RRSSPVRGPDPPWTALPEPLTGELPHRVRLEVHGYVGTCLANMVVEASGGPADHACQEAAYLMMARLRERHNYIFHDTVYRFHPRRASSDDVSTFRPTAGENDTTFGHMCAVMRGLDRMHSDLDKATKALNDGKLMRIVALKDEIARLKRENAQLKGLPAPGGVRIRTTPRKTMTAPVRIQLAPRNPPPSAAPAAPPVPPAVPAAPAPAPASALSFAPASAARGPARGNGGWLSATPSGSHDRSSSGSESGSGETYLPGSGSRSEGPGMVYTRNGSRATGEGSNGEERTEGVHPNSNSGNGPPPLPENPTLAQVMAHQTQMMAAMMQQMQQQHQQMHQRMLQHAEQQHQQFGPPPPQSKLPEFLRVRPPTFSSTTNPMEANDWLHAIEKKLNLLQCNDQEKVAFATHQLQGPASAWWDNHMATRPPGTEVTWAEFCRSFRKAQVPDGVVAQKKREFRALHQGNRTVMEYLHEFNRLARYAPEDVRTDAEKQEKFMAGLDDELTNQLISGDYADFERLVDKAIRQEDQRNKMDRKRKAAQFRAPQGSHQRPRFAPGQQGGPTTMIVRQYRPFNPSNFPHGAGGSQTHHRGQSNRGAAPRPPMAPAQSGPPAQAKKETGAKPGSCFNCGELGHFADKCSKPRRAGPRFIRARVNHASAEEAQAAPEVVLGTFPVNSIPATVLFDSGATHSFISKKFVGMHGLIREELSTPMRVHTPRNSSTSVQFSPSITIEIQRSPFLANLILLESKDLDVILGMDWLTKFKGVIDCANRTVTLTNEKGETVVYKSLDSSKRGVFLNQIETEIPVDTVEKNLRKWEDIPIVCEYPEVFPEDLTTMPPKREIEFRIDLAPGTAPIYKRPYRMAANELAEVKKQVDEQLQKGYIRPSTSPWGAPVIFVEKKDKTKRMCVDYRALNEVTIKNKYPLPRIDDLFDQLKGAKVFSKIDLRSGYHQLRIREEDIPKTAFTTRYGLYECTVMSFGLTNAPAFFMNLMNKVFMEFLDKFVVVFIDDILIYSKSEEEHEQHLRLVLEKLKEHQLYAKFSKCDFWSTEVKFLGHVITAQGVAVDPSNVESVTKXTPPKTVSQIRSFLGLAGYYHQFIENFSRIARPMTQLLKKDEKFKWTAECDKSFEELKKKLVSAPVLILPDQMKDFQVYCDASRHGLGCVLMQEGRVVAYASRQLRPHEGNYPTHDLELAAVVHALKIWRHYLIGNRCEVYTDHKSLKYIFTQPDLNLRQXRWLELIKDYDMGIHYHPGKANVVADALSRKSYCTALCIEGMCEELRQEFEHLNVGIVEHGFVAALEARPTLVDQVRAAQVNDSEIAELKKNMRVGKARDFHEDEHGTIWLGERLCVPDDKELKDLILTEAHQTQYSIHPGSTKMYQDLKEKFWWVSMRREIAEFVALCDVCQRVKAEHQRPAGLLQPLQIPEWKWEEIGMDFITGLPRTSSGHDSIXVVVDRLTKVSHFIPVHTTYTGKRLAELYLSRIMCLHGVPKKIVSDQGSQFTSKFWQKLQEELGTRLNFSTAYHPQTDGQTERVNQILEDMLRACALDFGGAWDKSLPYAEFSYNNSYQASLQMAPFEALYGRKCRTPLFWDQTGERQLFGTEVLAEAEEKVRIIRERLRIAQSRQKSYADNRRRELTFEAGDYVYLRVTPLRGVHRFQTKGKLAPRFVGPYKILERRGEVAYQLELPSNMIGIHDVFHVSQLKKCIRVPEEQADSEHIDIQEDLTYVEKPVRILDTSERRTRNKITRFCRVQWSHHSEEEATWEREDELKAAHPHLFTSSSESRGRDSV

SEQ ID NO: 19268 - protein, 1110 aa, Oryza sativa
  unsure (1)..(1110): unsure at all Xaa locations
  Clone ID: TF_OSC25042j.C1.p1.np
MALVPARRTRXSAFLYRXLTSTNYTSWMIRVQAMMEDQGVXETIEPAAGAAVDPKKDKKAKTHLLQSLPEDLLMQVAKKWTAKEVWDCLKTRFVGADWVRNARLQTLKGTSMVVEAEETLNQYAGRITTMGVRNSALGATTSMVKKLFDIVPEKFISLVAVIEQFYDIDEIPFEEAVGYLKAYDERVCKKKAAVGGVIAYGXVLHTQVEWACFKKNGRETSPQKNKPYGEGANRGQDGCGRGRGRRAGRRGGAQNNNSGGGSGGGGHDKSHIKCFNCDEFGHYSTXCPHPKKKNTETHLAXTKDAGPALLLAMTEAVPRRVNCGLVVHEDHVWPRLMLAGNGAAAGDVWYLYNGASNHMNGDRRKFRELDKTVTGQVRFGDASSVQIIEKGSILFSFKNGDQWLLDDVYYIASLCCNMVSLGQLTETSHRVMMDGDDLEVFDKHCRLVIRVRRTVNRLYRIELKLASPVCLLASLDSRDLVWLWHARLGHVNFXALKHLVDKEMATGVPAVHHPNQLCQACFVAKPIRQPFPAIANYRAETPLELLHMDLCGPITPSTLAGNRYFMLIVDDFSRWMWVFVIKSKDQALTAFEKFKPLPENMAGRTIKTLRTDRGGEFLSSEFTSVCTEAGIECHLTAPYSPPQAFKLKKNTTGEVIKHKARLVAKGYVQRQGVDFDEVFAPVAWLDTVQAILAVAANRRWEVHHLDVKSAFLNGDLEEEVFVDQSEGFVKQGKEHLVYKLSKALYGLRQALRGWNTCLDWSMKELGFSRCAQKQAVYTRGTGNAGLIVGVYVDDLIVTGENSSEITTFKQQMVGEFDMSDLGLLTYYLGIEVIQCKVNGIAIKQAAYARKILTQFGMLHCNSTSIPIEHRSQLHKDAKGSPVDATQFRRVIGCLRYLLHTRPDLSYAVGVVSRLMERPTVMHFKVVKQILKYLKGTINCGFTFADGNGAVEITRFTDSDQAGNTDDCQSTSGMAFYLNNSLISWSSQKHKTVALSSCEAKFMAATAAACHALWLRGLLIEIIGAEPRPVKLYTNQLAIALMKNPVFYGRSKYIDTRYHFIRECVESGKIQIEFVRTKEQRADALTKGLPAARLETARHLLGVRDFGPXQN

SEQ ID NO: 19269 - protein, 401 aa, Oryza sativa
  unsure (1)..(401): unsure at all Xaa locations
  Clone ID: TF_OSC28312j.C1.p4.np
MKFDLVKFDGFGNFGLWQTRVKDLLAQQEVSKALKGVKPAKMEDDDCEEMQLQAAATIRRCLSDQIMYHVMEETSPKIIWEKLEAQFMSKTLTNKRYLKQKLYGLKMQEGADLTAHVNVFNQLVTDLVKMDVEVDDEDKAIVLLCSLPESYEHVVTTLTYGKETIKTKDITSALLARDXMRKNKEGETSSRGFASQRRAGHKVKKNKKKKMVKCFRCDEWGHIRRECPTLKGKAKANVATSSNDSDSDGCDLLTMSSAQSKDAEAWILDSASSFHVTPRKEWFSSYKSGEFGFVYLGDDTSYPAVGVGEVKIKLEDGGEHVLQGVRHVPGLKRNLISLGTLHEEGLIFRGNRNRKTIEIMKGKMTMMTGEKVESHLYKLRGCTVAGVVQEEALLSGDCSKM

SEQ ID NO: 19270 - protein, 478 aa, Oryza sativa
  Clone ID: TF_OSC28312j.C1.p5.fg
MTMRSWTVNTRVATAVRTVYGQRVWRRRKLHEFLGRRRTGAGGPSQADTIGSQDEIVKTNTDGTEKGEYSGGDRPVRSRVGKLAPTCMKFDLVKFDGFGNFGLWQTRVKDLLAQQEVSKALKGVKPAKMEDDDCEEMQLQAAATIRRCLSDQIMYHVMEETSPKIIWEKLEAQFMSKTLTNKRYLKQKLYGLKMQEGADLTAHVNVFNQLVTDLVKMDVEVDDEDKAIVLLCSLPESYEHVMRKNKEGETSQAEGLLVKEDHAGHKVKKNKKKKMVKCFRCDEWGHIRRECPTLKGKAKANVATSSNDSDSDGCDLLTMSSAQSKDAEAWILDSASSFHVTPRKEWFSSYKSGEFGFVYLGDDTSYPAVGVGEVKIKLEDGGEHVLQGVRHVPGLKRNLISLGTLHEEGLIFRGNRNRKTIEIMKGKMTMMTGEKVESHLYKLRGCTVAGVVQEEAVAGIAIAFGGGGSGADSSGGLR

SEQ ID NO: 19271 - protein, 1117 aa, Oryza sativa
  unsure (1)..(1117): unsure at all Xaa locations
  Clone ID: TF_OSC412101j.C1.p1.np
MGVPRSEGYVIELHRLMRRLRYSRFPIYRVRQCGSVWEARVEVHTXVPSESDYSFPTRYRRDLPETAMQDAAREAFLRLSSIHRAELASTEFAHHPFREESNSVYTVQDTPCCYNPIVTRLSRWAEAVDDFYEEALLEIDDQQRRVGELETEVTDLTVQQLQLEEEHQAWGSEIDSLKAQLQLGSSLETPIQVDSETEGTDTEPEIEPDITDPSEDETPVPHITFIGGPRTLSTARKSTRPPGKKPKPDPEATTSEPWGLRIIEKKLTLVRVREADKVIFAVHQLEGPAGDWWDTYKEAWEEDAGEPTWEEFTTVFRENFVPAAVMRMKKNEFRRLRQGNATVQEYLNQFTQLARYAIGDLADEEEKIDFIEGLNDELRGPMIGQDHESFQSLINKVVRLENDQRTVEHRXRRLAMNRPPQGVPQRLKGATLSGWKPPIVATNRPTVPSNFNRPVVIQNRTPTPTLAAPVAKRMWCFNCGEYGHYANNCPHPRKTPVRTGANAMTVRGTTTPTTGRGLFKTPQTNRTATGFGRGQVNHVRAEEAQEDQGILMGMFSINSTPVKVLFDSGASHSFISLKASQKHNLALVGLRKPMIVHSPRGEITVSHACIDVPIRLRNVVPSNLMVLIPKTLDVIGMNLTKNRGVIDCRRREVILTTPWGSDMRTTMDQDPRLAERAGGIFTMLPMKGMPVVQRFPDVFPEDLLGMPPDRDIEFIIDLIPRTAPISKRPYRMPVNELEELKKQIRXLQEKRFVRPSSSPWRAPVLFVKKKDGSMRMCVDYRSQKVTIKNKYPLPRIDDLFDQLKGAKVFSKIDLRSGYHQLKIRTGDIPKTAFSTRYGLYEFTVMSFGLTNTPAYFMNLMKKVFMDYLDKFVVVFIDDILIYSKDEEEHAKHLRLVLEKLRKHKLYAKFSKCEFWLKEVAFLGHVISAGGVAVDPAKVEAVTKCKAPKSMTEIRSFLGLAGYYRRFIEGFSRIARPMTQLLKKEKKFAWSEQCQESFEQLKEKLTSAPILVLPDIRKNFVIYCDASRQGLGGVLMQDGKVVAYASXQLRPHEENYPTHDLELAAVVHALKIWRHYLIGNHCDIYTDHKSLKYIFTQSDLNLRQRRWLELIKNYDLEV

SEQ ID NO: 19272 - protein, 538 aa, Oryza sativa
  Clone ID: TF_OSC13700j.C1.p1.fg
VLLTSLVRMVNTRTGSGSGSGHNEGDPTLAQQAQNQQANNNNQPPPPQNKLADFLRVRPPTFSSTTNPVEAGDWLHAVEKKLDLIQCTEQEKVSFASHQLHGPVAEWWDHFRLNRAAGEPITWREFTAAFKKTHIPSGVVALKKREFRAFNRGSRSVTEYLHDFNRLARYAPEDVRTDEERQEKFLEGLNDELSYALMAMEYRDFQQLVDKASRQEDKYNRMEQKKRRAAQFKAQQGSSQRPHIGMGPQAAPYPQGGSSSVVRPQRQFYNNNTGNRSNNNRNVVTRPVAAPTQNQSVRKEQGSKPGVCINCGDPGHYADKCPNPRRVKNAPVQNDSNAPAPKARVNHVVAAEAQNAPDVVLGTFPVNSIPATVLFDSGATVFSKIDLRSGYHQLQIREEDIPKTAFTTQYGLFECTVMSFGLTNAPSFFMNLMNKVFMEYLDKFVMVFIDDIHIYSKTKEKHEEHLRLALEKLREHQLYAKFSNCEFWLPEVKFLGHVISAGGVAVDPSNVESVLNWKQPVTSQNDPKIHPRNCAENN

SEQ ID NO: 19273 - protein, 1305 aa, Oryza sativa
  Clone ID: TF_OSC400795j.C1.p74.gm
MQRWILAGILGCLRAKVEEYEGELAGRDGGGSEVRLDKKKQQQLVVEEPLATPCSAVAPAVAAAREDRRRHRQVAAVLVRPFAAVETRRSFVAVDNPKVAAASFSSPSSSVPFPPPFWSPVCSPRCPLRAGALRWCRGAAVRRRVSAARAVFFVEPPPSSMPRYKPEYLFGVEGFVQELHTMSFVIGFGTAPFYAQIPHDRHEEKCRVKVTLNSNSEEVPSVMFEAGGRNYIHACQEVARIAIGELRDRYSDQLADTEYRYHPRQPQGSDRGSYLETEGIENDVTTKHLVEMLWAMDESRAETVLAAQDREDRNRGKICKLEDKVDRLEKELAALKGEAPPQKAKIRLTARKRALFVPRYQLAPKVRVVEKEVAPAQADPPVIIISSDEEEESKRNNSKIEWVATQDDEDEPSIDLRCLEELDTTNPVEASDWLHAIEKKLDLLQCTDQEKVSFASHQLHGPASEWWDHFRLNRTTAEPITWLEFTAAFRKTHIPSGVVSLKKKEFRSLSQGSRSVTEYLHEFNRLARYAPEDVRNDEERQEKFLGGLNDELSYPLMVGDYPDFQKLVDKAIRQEDKYNRMEQKKRRIAQFKTQQGNNQKPRLNLGPQSMPQGGSSSVVRPQRQFFNNNAGNNIRNQASRPVAAPAQQQPAKREQGSKPVVCFNCGDPGHYADKCGAHLSGPSPSSRRSRRAAAPATVAAPTSPPSPALVDHARACAASPAPTSLSLPLAPAPEMAGIRKSNPASLSSPTPHVGRRFPPLPATLAAVLRRRRRSIRVAEIHPVHPSSVEVLPEPVAVVLPSLIVAVRRRSSLAPAEPLGRLPPFPVNRRPVGPACQPRPSRLVPLPELKSFSVEDVSERLVSSLPSRSRLNQITLEEIPIVREYPDVFPDDLPANELAEVKRQVDDLLQKGYIRPSSSPWGAPVIFVEKKDHTQRMCVDYRALNDVTIKNKYPLPRIDDLFDQLKGATVFSKIDLRSGYHQLRIKEEDIPKTAFTTRYGLFECTVMSFGLTNAPAFFMNLMNKPSPSPLVVGRALAPCALALPSPPPLQPCSAVAPAVAAAREDRRRHRQVAAVLVRPFAAVETRRSFVAVDNPKVAAASFSSPSSSVPFPPPFWSPVCSPRCPLRAGALRWCRGAAVRRRVSAARAVFFVEPPPSSEGALQWIVLCEGYRHNSFPRYRGGIEAHGDMMWGCVLWVQWYTSGQSKTIRIAVPAVMGGGGSSSGSIRVLMLAVEDHAVGSHSAAFDSPTAGVIALHLAWIVSTAFFALSTIVSPRTPTESSLSSAAAAPGGDRDGAAPGCLPSKSR

SEQ ID NO: 19274 - protein, 665 aa, Oryza sativa
  Clone ID: TF_OSC401829j.C1.p21.gm
MVNTRTGSGSGSGHNEGDPTLAQEKVSFASHQLHGPVAEWWDHFRLNRAAGEPITWREFTAAFKKTHIPSGVVALKKREFRAFNRGSRSVTEYLHDFNRLARYAPEDVRTDEERQEKFLEGLNDELSYALMAMEYRDFQQLVDKASRQEDKYNRMEQKKRRAAQFKAQQGSSQRPHIAMGPQAAPYPQGGSSSVVRPQRQFYNNNTGNRSNNNRNVVTRPVAAPTQNQSVRKEQGSKPGVCINCGDPGHYADKCPNPRRVKNAPVQNDSNAPAPKARVNHVVAAEAQNAPDVVLDATASEDPLFVEVEADVWESEQGKLGSGCMVLMVAPRPYKDRSSGLCCKALPYFHMSSGANEGYTSCGPVVEMSWQRVGALLLGAQSCLPVPEVPAVGGIGSMAGSVTRRGLDMTGFVLELRGMCVVLGYPHGVDYQARPLPEQEGDDAEPHAGWEVTAVILSGSPERTSLAVTAGGDSFPTACQNAALLAIGTLHQRYPDELQHSPYRYHPRRGGARDYATFRDASSEDDATIVHLARMVEAYNAARIDFHQMVRRGMVENNMKILELRQENLQLKKDLDAVEAQLHQLKIAQGKVCRPKRRRVCRSQKITARKSTSRPELVRQSLAWTCFIETPRAEPAPVVPQEGEASGVGSTEDALLLTFRPGPSQQ

SEQ ID NO: 19275 - protein, 462 aa, Oryza sativa
  Clone ID: TF_OSC405043j.C1.p1.fg
MVKTRNDPRDSNDASGSEEQTDEAHTSGAPGSSSSPPPENPTVPQMMTMMMQQMQQHYHQMLQQAQQNQQFGPPPSHVSKLLDFLRIQPPTFSSTTNPMEANDWLRAIEKKLNLLQCNDQEKVAFATHQLQGPASVWKAQIPEGIMAQQKREFRALQQGTRTVTEYLHEFNRLARYAPKDVRTDAEKQEKFLFGLDDELTNQLISRVYEDFEKLVDKAIRQEEQRNKMDRKRKAAQISFPQGNKQKPRFMTGQLGGPSTLIVCQHRPYHPSNFNNDYNGGSHNNSKQHNHNSTPPPLMAPAQSDSPAVSAQSEQPKKGAVGKPGPCFNCGKHDHFASKCPKLNRTGPRFIQARANHVSAEEAQVAPKVVLGTFPVNSYPATVLFDSGASHSFISKRFAGTHGFYSTLTKAPCLYGSIPRSTKASTTNVDKAPSQILRLLDHSRTVGGSRQGIRNEEMVYPPR

SEQ ID NO: 19276 - protein, 2112 aa, Oryza sativa
  Clone ID: TF_OSC900110j.C1.p18.fg
MATTDTTIAHIMDEQDDIKIKSSKCWNPIRPPATLLTSNGYRICIRPPFSAHEYLMESSRSPLSNRSGLISRLHLVWPQIQKQGAASPVMGQWACNFVWDPGPSGAHVGNRVDLHRQDQQPTESYHNSPKDRANNSLECREELRVHQVVSELSFLGLRKGIREHRLLHLRRDMTTSSCDAYEEVQKSLQNEKNDMFEMSLPSLANEEMADAATLSEEGIKGKLNGAEITQGIGLICTGKINNPRRGVSIAKAQHNVSLAPILQEMVSTNQSAFIRKRAIHDNFMYVQNPVKRLHRRKTPTLLLKLDISKAFDSLLLDFLGAVQGFPTSYLAYLFTLENYGRGMDSPATPMNFSPLLSLAPRNEPCYTKEENQDVTISSLSLKKLAPEFQDECPRGRVDAHHKFAATIGDGPENKDEEGASHSPRTKGTIQYFTRKVKQHTERLETDLQVTNEKIGQLESTQIFTNTKLTGLETAVARIDTSLAALVRHFDALNAGGNGGGNDDDIDGEYVEDNLEDEYIADTEQDDRDARDHRRLHNNRREETEDAAMARFLGGLNREIYDIVDYKDYTNMTRLFHLACKTSSWQTRTTPPAGRTASPSSTPATSRAAPPPSSDKSATKAAQPALSASSVASTGRTRDVQCHRCKGFGHVQRDCPSKRVLVVKNDGRPWQFDRDSMHHGRSNQYSFLYHDKKIVLHPMSPEDILRDDVAKAAKSKCESDKKAQSNGKKPETINLKPKCLLATKSDINELIASPSVVYALEYSDVFPKEVPPGLPPVRGIEHQIDLIPGASLPNRAPYRTNPEETKEIQRQVHELLDKRLDDMLDELSGSIVFSKVDLRSGYHQIRMKLGDEWKTAFKTKFGLYEWLVMPFGLTNAPSTFMRLMNEVLRPFIGKFVVVYFDDILIYSKSMGEHFNHLRAVFNALRDARLFGNLEKCTFCTDRVSFLGYVVTLQGIEVDQAKVEAIQSWPTPKTVSQVRSFLGLAGFYRRFVQDFSTIATPLNALTKKGVPFTWGTSQENAFHMLKDKLTHAPLLQLPDFNKTFELECDASGIGLGGILLQEGKPVAYFSEKLSGPVLNYSTYDKELYALVRTLETWQHYLWPKEFVIHSDHESLKHIRSQGKLNCRHAKWVEFIESFPYVIKHKKGKENIIADALSRRYTLLTQLDYKIFGLETIKDQYAHDADFNDVLLHCKDGRIWNKFVINGGFVFRANKLCIPASSVRLLLLQEAHGGGLMAHFGAKKTHDILASHFFWPQMRRDVGRAVLKKNIKMWEECLPHIEFAYNRSLHSTTKMCPFQIVYGLLPRPPIDLMPLPSSEKLNFDAKQHAELMLKLHETTKENIERMNAKYKFAGDKDFRVSPTFNIADLKLYLGEEDELESRTTQMQEGEDDEDINTIDTSTFPPCTPSIHPRRLHVQHDGPITRARARQLNYQDECPRGRVDAHHKFAATIGDAFGQIRLIKPLDGSNYAKWKADVLLNLGILDYDYAIREDRPEEPFSVEHDYEEKLNLYHEKTNEWEKSNRISLMYIKSAISNVIIGGIVDSDDVKTYLENIDRNFRSSSKSYASSIIKRLMSMCYNYKDGNNQRDKWSIEEIISHSVEEEDRQKADKQKHKDQLNLLHGAKGGKKKFYRGESSNSQNKKKKPNTPSTQASNGAHKGKAQVLAGQNSAGKFLCKFCKAEGHAQTDCEGFRAWLAKKGTNVDIVSNVDELLYVEFSHKSWWIDSGATVHVANSLQGFRSVRTLRKGEWILRVADGAEIKVMAIGELHHRLPSDDFSRYGYVFPIKDRSKSLDKFKIFKAEVENQHDAKIKIHGIIAQYSMPGEPQQNGVAERRNRTLMDMRHLKQLHTYSVEFQTVVAPDENSGDTDYVENNNELNNDTQQTSGAQNEEILEEPSQPLVIESEPLTILQRERRSAILNYYEVYLGEDIGNVDDPTSFKEAIMSEHLSKWLEAMKDELKSMSHNGVWDLVEIPKGAKTAGCKWVYKTKLDSKGKIKRFKARLVAKGFSQREEIDYNEIFSPVSKKDSFRIVMALVAHYDLELHQMDVKTAFLNGDLHEDVYMAQPEGFVMEGKDHLACKLKKSIYGLKQASRQWYLKFDEIIKRFGFKENEVDN

SEQ ID NO: 19277 - protein, 260 aa, Oryza sativa
  Clone ID: TF_OSC6294j.C1.p1.gm
MRSRSPKITTAKSTSDQRKVSATCYDCGEQGHYVRNCPWKVFARSPEKDEKQCPGSNQAPSQSTDKKDGTLQRNSGANRTVIWKMDNGRTIIITSSEFTPEDAARIPKRERFSADDDDDNDDDNDDNDDATLDSFRERELKFKACARCGIVGHTASLCLPTCRCGEYTHYSDACPLRKLQWKPTMEEATSPRMFISLCLFPFQLPKCIIRSLHPKTKQVDYVATVVSQDIVSVIVLFQEQQRQFVVIHKLPALPTTPNDT

SEQ ID NO: 19278 - protein, 325 aa, Oryza sativa
  Clone ID: TF_OSC10584j.C1.p3.fg
MDRTLAELYGMLKTAEESIKKNSNHVMVMHKRKPNNKKTGQKRKLNSDEITSTGNSKTKVQKTGPAKDTECFFCKETGHWKRNCRKYLEHLKQMQQDGKSSTLGINVIEINLATSSTDSWVFDSSFSMKDLGEAVYILGIRIYRDRSNRLIGLSQSTYIDKVLKRLNIRTKVMFLVYGGQEELVVNGYTDASFQTDKDDFRSQSGFVFCLNGGAVSWKSSKQDIVADSTTKPEYIAASEAAKEAVWINKFVSQLGVMASASSPMDLYCDNSGAIAQAKEPRSHQKSKHILRRYHLIHEIVGRGDVKICKIHMDLNVADPLTKPLP

SEQ ID NO: 19279 - protein, 802 aa, Oryza sativa
  Clone ID: TF_OSC401685j.C1.p102.fg
MPVPCLPDQSAALLRLKRSFTITNDSQCTLASWRAGTDCCRWEGVRCGGANGDGRVRSLDLARCFLESAAIDPALFDLTSLRYLNLARNDFNGSELPATGFEPGAGPLCIHGYSDVYPRFLRKNRHLVCRIVELSSRTNLKSLAELSMMLIKTERVRRCMNIFFTPSYFEYPSLKSWARHWFERLKHLTHLNLSDASIQGKIPVGIRHLTNLVSLDLSTTFYLIDQDDYYLSFGTWSDPSWWVVEPNIGSLVANLSSLRELYLGRVDLSDNGEDWCTALTNSSTPQLQVLSLRHCRLFGPICTSLSSIHSLTEINLQYNDLYGPVPDSFADLHFLRVLDLADNDLEGLFPKRILQNRNLTTVHISYNTNIYGSLPNFSPDSSLTTLIVSSTNFSGPIPSSIGNLKSLNELGVASNDFRQELPSSIGQLTSLKLLEATGAGIVGTIPSWIANLTSLVLLRFSNCGLSGPIPSSIVRKREVCVRVSVWADKWYQNLVREMPKIGDGSKAVAGDDDNSKLVVQQVKEAGVTLRYPMLGENNYGIWAVKMKIFMHAQGVWAAVEGDAADEKIDQMALAAIVQAVPEAVVMAISEKETAKEAWDALKQMNMGEERVKKARVQTLKRELDGMYMSNSEKINDFALKVTTIVNEIRSLGTKVEETTVVEKLLHSVPDKFQPLISTIEQWGDVSEMTVTETIGRLRAFEESSKGQRRDKEGEQQLLAACAEPRLTRAEWEAKVAEESSGGSGSNGVGEKKFRGKFDKSKIECHRCGKFGHFADECDEPRKMTKAVVQLAIADADDEPTLL

SEQ ID NO: 19280 - protein, 943 aa, Oryza sativa
  Clone ID: TF_OSC413099j.C1.p1.fg
MSWHRAGVLLLGAQSCLPVPGVPAMAGSVSRRGLDLTGFVLELRGMCVVLGYSHGVDYQGRTLPEQEGDDAEPHAAWEVTVVILTGSPERTSLAVTAGGDSFSAACQSAALLAIGTLHQRYPDELQHSPYRYHPRRGGARDYATFRDASSEDDTTIMHLARMVEAYDTARIDFHQMVRRGMVEDNLKILELRQENLQLKKDLDAVEAQLHQLKIAQEEVCRPKRRCVCRSQKITARKSTSRPELVRQSLAWTCFVETPRAEPAPVVPQEGEASGVSSTEDALLLTFRPGPSQRRNAATSDGNQPEGSNHNNHGSPPPPPPPPPPPPPDTNAILTQILAQQANMMAAFLHHIQNPPQHNAPPPPPQHSKLAEFLRIRPPTFSSSNNPVDALDWLHAVGKKLDTVQCSDEEKVIFAAHQLQGPASLWWDHFQATQPVGQPITWARFTAAFRRTHVPAGVMALKKREFRELKQGNRSVMEYLHEFNNLAQYAPEDVREDEEKQEKFLAGMDPELSVCLVSGDYPDFQRLVDKSIRLEAKHKELESHKRRLANFRNQQGANQRIRYTNPYPGGSSSQQQQPRSAPRPQFVVRVPQPQQQQSQQGTRAPRPPTPAAQSGQGRRDVQGPQPLCFNCFEPGHFADKCPKPRRQQGQVPPRSNNGGKDVIWGRVNHVTAEDVLTTPDVIVGTFLIHSIPATILFDSGASHSFISVPFMGRNQLGVERLRNPLLITTPGGVMTANVSRQSTNDRPDFSNLSKYQNGNGMKLGWISSPDFQKPKVARFIPVKATYGGNKLAELYFARILRSAAVVAPDHLSPRRHLLRLRRIPGDLVHPSVSLADRRSTVDPVHPSRAAAFLRSGRRFRLRRRPGVSRGPPLLFPLPFPSLGRRSAVPMDAAGDHRGAGAPPPAAAPVWPSSGAPCGCRVGPGCQPPAPSGAADAWDPRRRPV

SEQ ID NO: 19281 - protein, 1951 aa, Oryza sativa
  Clone ID: TF_OSC419041j.C1.p8.fg
MSGQAGDGNNGDKGAKIPYDYPSTSTSYVSTYSGKAPYFNGTDYAAWKHKMKMHLKSINPSIWRIVEKGYVLQNPEDPTKEDDENEHKNAQAANAILSALSGSEFNRVDGIESAKVIWYTLRNLHEGTYSVRESKVEILKGQFERFVMLDGESPSDMYDRLSKIVNEIKGLDSKDMTDEVVVKKMVRAITPRNSTLVTIIRERPDYKTLTPHDLLGCILTHDMLVQESKDVIQYINQSSTASIKNEDLALKAKEEEEENRKSKSKAEINDEEMALFVKKFGKFMRRSGFFKGGSSKHYSNKSSGRHSAKVCYVCKAPGHFIVDCPHLKDGSHIKEDKKKSEKKDEKKEKHKHSKREHYGQAHLGMIFGSDSESSSSDEEGVATFAVKPSSPPRLFDYSSDEDAPVCLMAKEPKVPSPHKSFNVDLVSDEEDEVMDDELFKSITKESLPHLSELLGRIKDQYGTLERQESLLIRKKERSHELKSELAKEREKNEALVRLYKQTKESHANLEVANAQLQERVDGLDKAYLTLEEKFETLKNSVSLPSEPSCSKIVPSNEPCVRCKDIDIEACATNSISLSALQKQNEKLMGLLHNGLLKCHMGSKALKEYLDYQRDNFNHEGLGYVPPPKGKVDKSVMIKRPQGLSNFVKAKSIIPNDYASHCSFDASYVLRKNASGRIVAKYVGPRGKNISIKRVLWVPKALVTNMRGPKQEYVSGGRSWVIDSGCTNHMTGEESMFSTLDPNGTSQDNIVFGDNGKGKVMGLGNIAISNDLSIANVLLVKSLNYNLLSVSQLCSMGYNCLFTDVDVTVYRRNDSSVVFKGVLKGKLYLVDFSSSKAKHETCFVAKSNTGWLWHRRLAHVGMRNLHKLLKHDHILGLTNIQFEKDRVCSTCQAGKQIGAHHPVKNVMTTTRLLELLHMDLFGPIAYLSIGGNKYGLVIVDDFSRFTWVFFLHDKSETQAIFKKFARRAQNEFDLKINKARSSKFAPKVDEGFLLGYGSNEYAYRVFNKTSGIVEIARDVTFDETNGSQVEQVDSHVLGEEEDPSEAIKRLALGDVRPREPQQGASSSTQVEPPTSTQADDPSISSLDQGEEGEQVPPSPINLARPRIHQSIQRDHPTNNILGDINKGVSTRSRIANFCEYYSFVSSLEPLRVEEALNDPDWVMAMQEELNNFTRNEVWTLVERPRQNVIGTKWIFRNKQDEAGVVIRNKARLVAQGFTQIEGLDFGETFAPRLPQRAYQRVGIRGATTGLRHVYKLHKALYGLKQAPRAWYECLRNFLVKNGFEIGKADSTLFTKRHDNDIFVCQIYVDDIIFGSTNKSFSEEFSRMMTKRFEMSMMGELKFFLGLQIKQLKEGTFICQTKYLKDMLKKFGMENAKPIHTPMPSNGHLDLNKQGKDVDQKVYRSIIGSLLYLCASRPDIMLSVSMCARFQAAPKECHLVAVKRILRYLVHTPNLGLWYPKGARFDLIGYADADYAGCKVDRKSTSGTCQFLGRMPPRKQTSHKSKRPRDRSPTPSSHDDSDSDWSGGEDAVPQVARVARRSTQAHGGGGDGEGSSRQPQTPPHQPNVPIGPLRIHTPERDLAVIRQVYDWRRKSEVVAPRRDEDPRSLRRTATDPRFWTLFQQDFYESVIKSKAHPTVPMQWINWEELQAHNDPVIDSVIANCDLMGIRSFMTLHQNWCNELNLDDLHNLQIPANTEFLPLYTPNDPNVVLGKVDGLKPYFAYLNRMFRRSFVPKDGDASSINHLSRTVLLRFDPPPHRFHVYHFVWEEIRMASIQYKKGLVYAPHIMRMIETVTQLQFRHDVTHSQLHLRLLKAPRSSAARDIPSSSTQPPPAPERPASVARREPSPLFRILRSLFGLCSAKAKKNRRLRNSAKKTARDVKFLKARYYEDHHIDIPPSPPGFEAEPDEPEDEAIEDPFAGLPSDFDFFGYGHGYGYPPPPPPEDPPQAPFA

SEQ ID NO: 19282 - protein, 130 aa, Oryza sativa
  Clone ID: TF_OSC9385j.C1.p1.fg
MTGQKRKLNSDEITSTGNSKTKVQKTGPAKDTECFFCKETGHWKRNCRKYLEHLKQMQQDGKSSTLGINVIEINLATSSTDSWVFDSSFSMKDLGEAVYILGIRIYRDRSNRLIGLSQSTYIDKVLKRLN

SEQ ID NO: 19283 - protein, 787 aa, Oryza sativa
  Clone ID: TF_OSC401185j.C1.p9.gm
MGIVSVLMGLGNEWAVQALVLFSFTLQVTLLSLAWIRRHSIATMPKLVLWVAYQLADSTALFTLGHMAISSRSREEQPLMAFWAPFLILHLGGQDNITAYSFEDNRLWLRHLQTLVVQVMGASYVLYKYMPGKETLVMAAAVLIFVVGILKYGERIWALREATFDNIARCLDQQEDYASAREREGDDLLQHVLQGRSSMDEENVLIGAHGLLDICRGLFIGSRGGRRGYLRHVLLSFQMYVRLDKLMELELSLMYDILYTKATVIHTWIGCCIRVIALAATVTATFLFLLSSKHGHSRKDLAVTYVLLAGALLLEMISMVRAVFSTWTVVFLYKLKWYWLYGEVLSIRRVFRRLARTRPAIGSQPGVRAFKALGLDGSLGWRTIQDIGFEDSIMAWHLASDICLFSDRSNKLDLHEGVAVLSNYMMFLLVHRRYMLPGPVRRTRYEQVRDDLNKFMHRKGRARSPQDLFVWALRRGLHDHLNSDDPPAQYDTGVRLAAVLYHRLDRLDIIFGELCLFLTAPRTVHCMQEPCRLRRHTSRIRRIVNPARLLRAVVAVGLAPLGTWEDRMVLEAVLKAVPADLLPVLAVKEMTKDAWDAIKTMRVGVNRVRKSKAQELRKQFDAIEFKEGESVEEFSIRLSWLVNNFAYSGSSLRNQDTLSLEQLTGVKNSGPLVPRNRQSGEGSSGKKQASTTAAAVGKKKTEGAANGERCARDQLRDKCKNCGRLGHWEKDCRQPKKQAEAHAVQGEEEDDEPVLLMAHAVELAQPPPSPPPTEPFDLVEPKVFTLL

SEQ ID NO: 19284 - protein, 1511 aa, Oryza sativa
  Clone ID: TF_OSC401709j.C1.p24.fg
MVKTRNDPRDSSDARGSEEQTDGAHVSGASDSSSSPPLGNPTVTQMMTMMMQQMQQHHHQVLQQVQQNQRFAPPPSHLSKLLDFLRIQPPTFSSTTNPMEANDWLRVVEKKLNLLQCNDREKVAFATHQLQGPASAWWDNYVVTRPDATKVTWVEFCQNFRKAQIPEGIMAQQKREFRALQQGTRTVTEYLHEFNRLAHYAPEDVRTDAEKQEKFLFGLDDELTNQLISGVYEDFEKLVDKAIHQEEQRNKMDRKRKAAQISFPQGNNQKPRFMTGQLGGPSTLIVCQHRPYHPSNFNNDYNGGSHNNSKQHNHNSTPPPLMAPAQSDPPAVSAQSEQPKKGAVGKPGPCFNCGKHGHFASKCSKLNRTRPRFIQARANHVSAEEAQAASDVVLGTFPVNSYPATVLFDSGASHSFISKRFAGTHGLSVMELKIPMQVHTSGNDMKTSHYCPSVTIEIKRSQFLSNLILLESKDLDVILGMDWLTRHKGVIDCAGRTITLTNDKGEKITFRSPVSQKSVASLNQAAIEGQTETVEKSPRKLEDIPIVQEYPEVFPEDLTTMPPKREIEFRIDLAPGTAPIYKRPYRMAANELAEVKKQVDEQLQKGYIRPSTSPWGAPVIFVEKKDKTKRMCVDYRALNEVTIKNKYPLPRIDDLFDQLKGAKVFSKIDLRLGYHQLRIREEDIPKTAFITRYGLFECTVMSFGLTNAPAFFMNLMNKVFMEFLDKFVVVFIDDILVYSKSEEEHEHHLRLVLEKLKEHQLYAKFSKCDFWLSEVKFLGHVISAQGVAVDPSNVESVTKWTPPKTVSQIRSFLGLAGYYRRFIENFSKIARPMTQLLKKDEKFKWSAECNQSFEELKKRLVSAPVLILPDQTKDFQVYCDASRQGLGCVLMQEGRVVAYASRQLRPQETNYPTHDLELAAVVHALKIWRHYLIGNRCEVYTDHKSLKYIFTQPDLNLRQRRWLELIKDYDMGIHYHPGKANVVADALSRKSYCNALCTEDMCGKLQQDLEHLNLGIVEHGYVAALEARPTLVDQVRAAQVNDPEIAELKKNMRVGKARDFHEDEHGTIWLGERLCVPDDKELKDLILTEAHQTQYSIHPGSTKMYQDLKEKFWWVSMRREIAEFVALCDVCQRVKAEHQRPAGLLQPLQIPEWKWEEIGMDFITGLPRTSSGHDSIWVVVDRLTKVAHFIPVHTTYTGKRLAELYLSRIMCLHGVPKKIVSDRGSQFTSKFWQKLQEELGTRLNFSTAYHPQTDGQTERVNQILEDMLRACALDFGGAWDKSLPYAEFSYNNSYQSSLQMAPFEALYGRKCCTPLFWDQTGERQLFGTEVLTEAEEKVRTVRERLRIAQSRQKSYADNRRRELTFEAGDYVYLRVTPLRGVHRFQTKGKLAPRFVGPYRILERRGEVAYQLELPSNMVGIHDVFHVSQLKKCLRVPKEQASSEHIDIQEDLTYVEKPIRILETSERRTRNKVIRFCKVQWSHHSEEEATWERAAHPHLFANSSESRGRDSV

SEQ ID NO: 19285 - protein, 2382 aa, Oryza sativa
  Clone ID: TF_OSC900175j.C1.p19.gm
MEYKAGPPATLADGWGPPVIAYLAPRPPPARALGPPPPPPNPPHPAVPARHKEGEITPRDSLSLFPRFSLSLSLGFVWNLSRNPRRRNQWRPDPPRRFPSPPAALSHSRRYIIAPRASLLRFRHSPHTLPVGFVPAPSSSLSAVAAELRFAAVVAPDLLPTRRHLLRLRRVPVDLVHPFVSPADCRSAAVLVDPNRAAAFLRSGCRFRRPRRPGVSHGPPPSLPPSLPSLGRRSAAPLVAGGDHRGAGAPPPVGRAGEAAFGRAPRLPGGPGRQPPAPAGAADAWDPRRRSASAACTRSTVDREADAWAPLPWTRLGSGCMVLMVAPRPYKDRSSGLCCKALPYFHMSSGANEGYTSCGPVVEMSWHRAGVLLLGAQSCLPVPGVPAVGGIGSMAGSVTRRGLGMTGFVLELRGMCVALGYPHGVDYQARPLPEQEGDDAEPRAAWEVTAVILAGSSERTSLTVTAGGDSFPAACQSAALLAIGTLHQRYPDELQHSPYRYHPRRGGARDYATFRDASSEDDATIVHLARMVEAYDAARIDFHQMVRRGMVENNMKILELRQENLQLKKDLDAVEAQLHQLKIAQGEVCRPKRRRVCRSQKITARKSTSRPELVRQSLAWTCFVETPRAEPAPVVPQEGEASGVGSTEALSVAGSVWGFQMVTTRRNAVTGDGNQPEGSNHNHQGNPPPPPPPPPPPPPDTNAILTQILAQQANMMTAFLHHLQNPPQHNAPPPPPQHSKLAEFLRIRPPTFSSSNNPVDALDWLHAVGKKLDTVQCSDEEKVIFAAHQLQGPASLWWDHFQATQPEGQPITWARFTAAFRRTHVPAGVVALKKREFRELKQGNRSVMEYLHEFNNLARYAPEDVREDEEKQEKFLAGMDPELSVRLVSGDYPDFQRLVDKSIRLEAKHKELESHKRRLANFRNQQGANQRVRYTNPYPGGSSSQQQQQQQQPRSAPRPQFVVRVPQPQQQQGQQGTRAPRPPTPTVQPGQGRRDAQGQQRLCFNCFEPGHYADKCPKPRRQQGQAPPRSNNGGKDVIRGRVNHVTAKDVLTTPDVIVGTFLVHSIPATILFDSGASHSFISVPFVGRNQLGVERLRNPLLITTPGGVMTAKYYSPAVPIEIQGIPFPSDLILLDTKNLDIGLSEIPIVREFGDVFPEELPEKKDKTKRMCVDYRALNEVTIKNKYPLPRIDDLFDQLKGATVFSKIDLHSGYHQLRIREEDIPKTAFTTRYGLYEFTVMSFGLTNAPAFFMNLMNKVFMEYLDKFVVVFIDDILIYSQSEEDHQHHLRLVLGKLREHQLYAKLSKREFWLSEVKFLGHVISAKGVAVDPETVTAVTDWKQPKTVTQVRSFLGLAGYYRRFIENFSKIARPMTQLLKKEEKFVWSPQCEKAFQTLKEKLVSSPVLILPDTRKDFMVYCDASRQGLGCVLMQDGHVVAYASRQLRPHEGNYPTHDLELAAVIHDLKIWRHYLIGNRCEIYTDHKSLKYIFTQSDLNLRQRRWLELIKDYDVGIHYHPGKANVVADALSRKSHCNTLNVRGIPPELNQQMEALNLSIVSRGFLAALEAKPTLLDQIREAQKNDPDMHGLLKNMKQGKAAGFTEEEHGTLWNGNREKYWWVSMKREIAEFVALCDVCQRVKAEHQRPAGLLQPLQVPEWKWDEIGMDFITGLPKTQGGYDSIWVVVDRLTKVARFIPVKTTYGGNKLAELYFARIVSLHGVPKKIVSDRGSQFTSHFWKKLQEELGTRLNFSTAYHPQTDGQTERLNQILEDMLRACVLDFGKTWDKSLPYAEFSYNNSYQASIQMAPYEALYGRKCRTPLLWDQVGESQVFGTDILREAEAKVRIIRENLKVAQSRQKSYADNRRRDLEFAVDDFVYLRVTPLRGVHRFQTKGKLAPRYVGPFRIIARRGEVAYQLELPASLGNVHDVFHVSQLKKCLRVPSEQADSEQIEVREDLTYVERPVKILDTMERRTRNRAGPPATLADGWGPPVIAYLAPRPPPARALAPPPPPPNPPHPAVPVRHKEGEITPRDSLSLFPRFSLSLSLGFVWNLSRNPRRRNQWRPDPPRRFPSPPAALSHSRRYIIAPRASLLRFRHSPHTLPVGFVPAPSSSLSAVAAELRFAAVVAPDLLPTRRHLLRLRRVPVDLVHPFVSPADCRSAAVLVDPNRAAAFLRSGCRFRRPRRPGVSHGPPPSLPPSLPSLGRRSAAPLVAGGDHRGAGAPPPVGRAGEAAFGRAPRLPGGPGRQPPAPAGAADAWDPRRRSASAACTRSTVDREADAWAPLPWTRLGSGCMVLMVAPRPYKDRSSGLCCKALPYFHMSSGANEGYTSCGPVVEMSWHRAGVLLLGAQSCLPVPGVPAVGGIGLAQFFPSPEEELLEDEGFGV

SEQ ID NO: 19286 - protein, 734 aa, Oryza sativa
  Clone ID: TF_OSC15176j.C1.p1.np
MPRYKPEYLFGVEGFVQELRTMSFVIGFGTAPFYAQIPHDRHEEKCRVKVTLNSNSEDVPSVMFEAGGRNYIHACQEVARIAIGELRDRYSDRLADTEYRYHPRQPQGSDRGSYLETEGIENDATTRHLVEMLWAMDESRAETVLAAQDREDWNRGKICKLEDKVDRLEKELAALKGEAPPQKARIRLTARKRALFVPRYQLAPKVRVVEKEVAPADPPVIIISDDEEEESKRTHSKIEWVATQDDEDEPNEPTIDLRCSEELDNGNGPNSNNNNNNGENPTLAQVLAQQTQLMNMMMQQLQNQQNQGNNHAPPQNKLAEFLRVRPPIFSSTTNPVEAGDWLHAIEKKMDLLQCTDQEKVSFASHQLLGPASEWWDHFRLNRITAEPITWLEFTAAFRKTHIPSGVVSLKKKEFRSLTQGSRSVTEYLHEFNRLARYAPEDLRNDEERQEKFLGGLNDELSYPLMVGDYPDFQKLVDKAIRQEDKYNRMEQKKRRIAHFKAQQGSNQKPRLTLGPQSVPQGGSSSIVRPQRQFFNNNAGNNIRNQVPRPVAASTQQQPAKRKQGSKPVVCFNYGDPGHYADKCPKPRRVKVVPAQNNSAVPASKARVNHVAAAEAQDAPDVILGTFPVNSVPATVLFDSSATHSFLSMSFAGNHGMEVEDLRRPLMVSTPSNQALSLQRSPSVRIEIQGVPFLANLILLESKDLDVILGMDWLAKHKGVIDCANRKVTLISNDG

SEQ ID NO: 19287 - protein, 1393 aa, Oryza sativa
  Clone ID: TF_OSC16841j.C1.p2.fg
MVLTRSNGNGPNSNNNNNNGENPTLAQVLALQTQLMNMMMHQLQNQQNQGNNHAPPQNKLAEFLRVRPPIFSSTTNPVEAGDWLHAIEKKMDLLQCTDQEKVSFASHQLLGPASEWWDHFRLNRITAEPITWLEFTAAFRKTHIPSGVVSLKKKEFRSLTQGSRSVTEYLHEFNRLARYAPEDLRNDEERQEKFLGGLNDELSYPLMVGDYPDFQKLVDKAIRQEDKYNRMEQKKRRIAHFKAQQGSNQKPRLTLGPQSVPQGGSSSIVRPQRQFFNNNAGNNIRNQVPRPVAASTQQQPAKRKQGSKPVVCFNYGDPGHYADKCPKPRRVKVVPAQNNSAVPASKARVNHVAAAEAQDAPDVILGTFPVNSVPATVLFDSSATHSFLSMSFAGNHGMEVEDLRRPLMVSTPSNQALSLQRSPSVRIEIQGVPFLANLILLESKDLDVILGMDWLAKHKGVIDCANRKVTLISNDGRVVTVHALSSEFLRSRLNQITLGEIPIVREYPDVFPDDLPGMPPKRDIEFRIDLVPGTTPIHKRPYRMAANELAEVKRQVDDLLQKGYIRPSSSPWGAPVIFVEKKDHTQRMCVDYRALNDVTIKNKYPLPRIDDLFNQLKGATVFSKIDLRSGYHQLRIKEYGLFECTVMSFGLTNAPAFFMNLMNKVFMEYLDKFVVVFIDDILIYSRTKEEHEEHLRLALEKLREHQLYAKFSKCEFWLSEVKFLGHVISAGGVAVDPSNVESVTNWKQPKTVSEIHSFLGLAGYYRRFIENFSKIAKPMTRLLQKYVKYKWSEECEQSFQELKSRLISAPILILPDPKKGFQVYCDASKLGLGCVLMQDGKVVAYASRQLRPHEKNYPTHDLELAAVVHALKIWHHYLFGTRTEEFERLNLGIVSRGFVAALEAKPTLIDQVREAQISDPDIQEIKKNMRRGKAIGFLEDEQGTVWLGERICVPDNKDLKDAILKEAHDTLYSIHPGSTKMYQDLKERFWWASMKREIAEYVAVCDICQRVKAEHQKPAGLLQPLKIPEWKWEEIGMDFITGLPRTSSGHDSIWVIVDRLTKVAHFIPVKTTYSGSRLAELYMARIVCLHGVPKKIVSDRGSQFTSNFWKKLQEEMGSKLNFSTAYHPQTDGQTERVNQILEDMLRACALDFGGSWDKNLPYAEFSYNNSYQASLQMAPYEALYGRKCRTPLLWDQTGERQVFGTDILREAEEKVKIIQERLRVAQSRHKSYADNRRRDLSFEEGDYVYLRVTPLRGVHRFHTKGKLAPRFVGPYKIVSRRGEVAYQLELPQSLAGVYNVFHVSQLKKCLRVPTEEANIEQIEVQEDLTYVEKPIRILETNERRTRNRVIRFCKVQWSNHSEEESTWEREDELKSAHPHLFASSSESRGRDSV

SEQ ID NO: 19288 - protein, 596 aa, Oryza sativa
  Clone ID: TF_OSC32899j.C1.p2.gm
MVLTRSNGNGPNSNNNNNNGENPTLAQVLAQQTQLMNMMMQQLQNQQNQGNNHAPPQNKLAEFLRVRPPIFSSTTNPVEAGDWLHAIEKKMDLLQCTDQEKVSFASHQLLGPASEWWDHFRLNRITAEPITWLEFTAAFRKTHIPSGVVSLKKKEFRSLTQGSRSVTEYLHEFNRLARYAPEDLRNDEERQEKFLGGLNDELSYPLMVGDYPDFQKLVDKAIRQEDKYNRMEQKKRRIAHFKAQQGSNQKPRLTLGPQSVPQGGSSSIVRPQRQFFNNNAGNNIRNQVPRPVAASTQQQPAKRKQGSKPVVCFNYGDPGHYADKCPKPRRVKVVPAQNNSAVPASKARVNHVAAAEAQDAPDVILDLDVILGMDWSRLNQITLGEIPIVREYPDVFPDDLPGYYRRFIENFSKIAKPMTRLLQKYVKYKWSEESLEAKPTLIDQVREAQISDPDIQEIKKNMRRGKAIGFLEDEQGTVWLGERICVPDNKDLKDAILKEAHDTLYSIHPGSTKMYQDLKERFWWASMKREIAEYVAPSPSLGKTTVVLAKSSPSSSASSLSPEITGAASPSSTRRFPPLPPRRRHRPLVFRHRLGH

SEQ ID NO: 19289 - protein, 1333 aa, Oryza sativa
  Clone ID: TF_OSC400415j.C1.p9.fg
MSNEVNHVGKAPMFNGTNYSTWKIKMSTHLKAMSFHIWSIVDVGFAITGTPLTEIDHHNLQLNAQAMNALFNSLSQEEFDRVSNLETAYEIWNKLAEIHEGTSEYKDAKLHFLKIQYETFSMLPHESVNDMYGRLNVIVNDLKRLGANYTDLEVAQKMLRALPEKYETLVTMLINSDMSRMTPASLLGKINTNDMYKLKKKEMEEASPSKKCIALQAEVEDKSKSKVNEVNEDLEEEMVLLARRFNDLLGRRKERGRGSNSNRRRNRRPNKTLSNLRCFECGEKGHFASKCPSKDDDGDKSSKKKSGGYKLMKKLKKEGKKIEAFIGEWDSNEESSASSGSKEEGGDDASSKKKKMAVVAIKEAPSLFAPLCLMAKGSSKVTSLSDSESDDDCDDVSYDELVSMFEELHAYSEKEIVKFKALKKDHASLEVLYEELKTSHERLTISHEKLKEAHDNLLSTTQHGAHIDVGISCDLLDDSATCHIAHVASSSISTSCDDLMDMPSPSSSSSSCVSICDASLIVENNELKEQLAKLNKSLERCFKGKNTLDKILSEQRCILNKEGLGFIPKKGKKPSHHATRFVKSNGKYCSKCREVGHLVNYRTGGSHWMLDSGCTQHMTGDRAMFTTFEVGGNEQEKVTFGDNSKGKSIVAELFKKFAKRAQNEFSCTLVKIRNDNGSEFKNTNIEDYCDDLGIKHELSATYSPQQNGVVERKNRTLIEMARTMLDEYGVSDSFWAEAINTACHATNRLYLHRLLKKTSYELIVGRKPNVAYFRVFGCKCYIYRKGVRLTKFESRCDEGFLLGYASNSKAYRVYNKNKGIVKETADVQFDETNGSQEEHENLDDVGDEGLMGAMKNMSIGDVKPIEMEDKPSTSTQDEPSTSASPNEALCDPDWMNAMHEELNNFARNKVWTLVERPRDHNVIGTKWIFRNKQDENGLVVRNKARLVAQGFTQVEDPKNPNHVYKLSKALYGLKQAPKAWYERLRDFLLSKDFKIEKVDTTLFTKIIGDDFFVCQIYVDDIIFGSTNEVFCKKFGDMMSREFEMSMIGELSFFLGLQIKQLKDGTFVSQTKYIKDLLKRFGLEDVKPIKTPMATNGHLDLDEGGKPVDLKLYRSMIGSLLYLTASRPDIMFSVCMCARFQAAPKECHLVAVKRILRYLKHSSTIGLWYPKGAKFKLVGYSDSDYAGCKVDRKSTSGSCQMLGRSLVSWSSKKQNSVDLSTVEAEYVSAGSCCAQLLWMKQTLLDYGISFTKTPLLCDNDSAIKIANNPVQHSRTKHIDIRHHFLRDHVTKCDIVISHIRTEDQLADIFTEPLDETRFCKLRNELNVIDFSNVA

SEQ ID NO: 19290 - protein, 1156 aa, Oryza sativa
  unsure (1)..(1156): unsure at all Xaa locations
  Clone ID: TF_OSC400979j.C1.p3.np
IPSFPESSFSPEKSLKSSKASKATPGLEWYIPGLEIELCSRDGCSEWLGLCNRMPRYKPEYLFGVEGFVQELRTMSFVIGFGTAPFYAQIPHDRHEERCRVKVTLNSNSEDILSVMFEAGGRNYIHACQEVARIAIGELRDRYSDQLADTEYRYHPRQPQGSDRGSYLETEGIENDATTRHLVEMLWAMDESHAETVLAAQDREDWNRGKICKLEDKVDRLEKELAALKGEAPPQKARIRLTARKRALFVPRYQLAPKMVNTRSNGNGPNLNNPNNNNNNEGNPTLAQVLAQQTQLMHMMMQQLQNQQNQGNNHAPPQNKLAEFLRVRPPIFSSTTNPVEAGDWLHAIEKKLDLLQCTDQEKVSFASHQLLGPASEWWDHFRLNRTTAEPITWLELTAAFRKTHIPSGVVSLKKKEFRSLTQGSRSVTEYLHEFNRLARYAPEDVRNDEERQEKFLEGLNDELSYPLMTGDYSNFQKLVDKAIRQEDKYNRMEQKKRRIAQFKIQQGNNQKPRLTFVPQSMPHGGSSSVVRPQRQFFNNNAGNNIRNQAPRPVAAPTQQPPAKREQGSKPVVCFNYGDPGHYADKCPKPRRVKVVPAXSNSTIPASKARVNHVAAAEAQDAPDVILGTFPVNSVHATVLFDSGATHSFLSMSFAGNHGMEVEDLRRPLMVSTPSNQALSLQRSPSVRIEIKGVPFLANLILLESKDLDVILGMDWLTRHKGVIDCANRKVTLTSSDGRVVTVHALSSESLRSRLNQITLEEIPIVREYPDVFPDDLPGMPPKRDIEFRIDLVPGTTPIHKRPYRMAANELAEVKRQVDDLLQKGYIRPSSSPWGAPVIFVEKKDHTQRMCVDYRALNDVTIKNKYPLPRIDDLFDQLKGATVFSKIDLRSGYHQLRIKEEDIPKTAFTTRYGLFECTVMSFGLTNAPAFFMNLMNKVFMEYLDKFVVVFIDDILIYSRTREEHEEHLRLALEKLREHQLYAKFSKCEFWLSEVKFLGHVISAGGVAVDPSNVESVTNCKQLKTVSEIRSFLGLAGYYRRFIENFSKITKPMTRLLQKDVKYKWSEECEQSFQELKNRLISAPILILPDPKKGFQVYCDASKLGLGCVLMQDGKVVTYASRQLRPHEKNYPTHDIELAAVVHALKIWRHYYLDTRSV

SEQ ID NO: 19291 - protein, 1092 aa, Oryza sativa
  Clone ID: TF_OSC401018j.C1.p32.gm
MARGLGPREWGPHGSLTPRGAPEGGLAGTADGRRRTRAPMVAGGDLRRDGAAPERGEGRGKRNGRSMAHPGSTATTGTATEAEEGGGAARVDEDGGVPAVGGRNEGVDEIGEDAANPKKATPKREEARGDDGGGPELGGDGGERGRRRELDSDGERERRVAETKEGGTGSVYMPRYKPEYLFGVEGFVQELRTMSFVIGFGTAPFYAQIPHDRHEEKCRVKVTLNSNSEDVPSVMFEAGGRNYIHACQEVARIAIGELRDRYSDRLADTEYRYHPRQPQGSDRGSYLETEGIENDATTRHLVEMLWAMDESRAETVLAAQDREDWNRGKICKLEDKVDRLEKELAALKGEAPPQKARIRLTARKRALFVPRYQLAPKVRVVEKEVAPADPPVIIISDDEEEESKRTHSKIEWVATQDDEDEPNEPTIDLRCSEELDNGNGPNSNNNNNNGENPTLAQVLAQQTQLMNMMMQQLQNQQNQGNNHAPPQNKLAEFLRVRPPIFSSTTNPVEAGDWLHAIEKKMDLLQCTDQEKVSFASHQLLGPASEWWDHFRLNRITAEPITWLEFTAAFRKTHIPSGVVSLKKKEFRSLTQGSRSVTEYLHEFNRLARYAPEDLRNDEERQEKFLGGLNDELSYPLMVGDYPDFQKLVDKAIRQEDKYNRMEQKKRRIAHFKAQQGSNQKPRLTLGPQSVPQGGSSSIVRPQRQFFNNNAGNNIRNQVPRPVAASTQQQPAKRKQGSKPVVCFNYGDPGHYADKCPKPRRVKVVPAQNNSAVPASKARVNHVAAAEAQDAPDVILDLDVILGMDWSRLNQITLGEIPIVREYPDVFPDDLPGYYRRFIENFSKIAKPMTRLLQKYVKYKWSEESLEAKPTLIDQVREAQISDPDIQEIKKNMRRGKAIGFLEDEQGTVWLGERICVPDNKDLKDAILKEAHDTLYSIHPGSTKMYQDLKERFWWATVAVAREDHRRARQVVAVLVRLFAVAGDHRSSIAVVNPKVPAASSSSPSPSVGLPPPFRSPVSSPRCPLRLGALRLRPSAAVRRRACAVRAVSSAEPPPLSVTSPLTSSGSSAVSRRGPDRSRPSVLDQVDLGRPFV

SEQ ID NO: 19292 - protein, 733 aa, Oryza sativa
  Clone ID: TF_OSC404369j.C1.p33.gm
MVNTRSNGNGPNNNNNNNNEGNPTLAQVLAQQTQLMNMMMQQLQNQQNQGNNHTPPQNKLAEFLRVRPPIFSSTTNPVEAGDWLHAIEKKLDLLQCTDQEKVSFASHQLHGPASEWWDHFRLNRITAEPITWLEFTAAFRKTHIPSGVVSLKKKEFRSLTQGSRSVTEYLHEFNRLARYAPEDVRNDEERQEKFLEGLNDELSYPLMTGDYSDFQKLVDKAIRQEDKYNRMEQKKRRIAQFKRQFFNNNAGNNIRNQAPRPVAAPTQQQPAKREQGSKPVVCFNYGDPGHYADKCPKPRRAKVVPTQSNSIAPASKARVNHVAAAEAQDAQDVILVREYPDVFPDDLPANELAEVKRQVDDLLQKGYIRPISSPWGAPVIFVEKKDHTQRMCVDYRALNDVTIKNKYPLPRIDDLFDQLKGATVFSKIDLRSGYHQLRIKEEDIPKTAFTTRYGLFECTVMSFGLTNAPAFFMNLMNKVFMEYLDKFVVVFIDDILIYSRTKEEHEEHLRLALEKLREHQLYAKFSKCEFWLSEVKFLGHVISAGGVAVDPSNVESVTNWKQPKTVSEIRSFLGLAGYYRRFIENFSKIAKPMTQLLQKDVKYKCRAPPPFRSSSSLGKIAIVVAKSSPSSSAPSPPPKTAGAPPPSSSRRSPPLLPRRRRRPLLLRRFFGHRWVRRAVRYPLVPFVRAEAPPFAGEFARPSRRAAAGGDVTADVIVAVCQEEFYNDADGVED

SEQ ID NO: 19293 - protein, 1441 aa, Oryza sativa
  Clone ID: TF_OSC411591j.C1.p1.fg
MSNEVNQVGKAPMFNGTNYSTWKIKMSTHLKAMSFHIWSIVDVGFTITGTPLTEIDHRNLQLNAQAMNALFNSLSQEEFDRVSNLETAYEIWNKLAEIHEGTSKYKDAKLHFLKIQYETFSMLPHESVNDMYGRLNVIVNDLKGLGANYTDLEVAQKMLRALPEKYETLVTMLINSDMSRMTPASLLGKINTNDMYKLKKKEMEEASPSKKCIALQAEVEDKSKSKVNEVNKDLEEEMVLLARRFNDLLGRRKERGRGSNSNRRRNRRPNKTLSNLRCFECGEKGHFASKCPSKDDDGDNMFEELHAYSEKEIVKFKALKKDHASLEVLYEKLKTSHERLTIPHEKLNATCHIAHVASSNISTSCDDLMDMPSPSSSSSSCVSICDASLVVENNELKEQVAKLNKSLERCFKGKNTLDKILSEQRCILNKEGLGFIPKKGKKPSHSATRFVKSNGKYCSKCREVGHLVNYRTGGSHWVLDSGCTQHMTGDRAMFTTFEVGGNEQEKVTFGDNSKGKVIGLVAKTSLGWLWHRRLAHVGMNQLSKLSKRDLVVGLKDVKFEKDKLCSAYQAGKQVACSHPTKSIMSTSRPLELLHMDLFGPTTYKSIGGNSHCLVIVDDYSRYTWVFFLHDKSIVAELFKKFAKRAQNEFSCTLVKIRSDNGSEFKNTNIEDYCDDLGIKHELSATYSPQQNGVVERKNRTLIEMARTMLDEYGVSDSFWAEAVNTACYATNRLYLHRLLKKTSYELIVGRKPNVAYFRVFGCKCYIYRKGVRLTKFESWCDEGFLLGYASNSKAYRVYNKNKGIVEETANVQFDETNGSQEGHENLDDVGDEGLMRAMKHMSIGDVKLIEVEDKPSTSTQNEPSTSASPSQAQVEVEEEKAQDPPMPPRIHTALSKDHPIDQVLGDISKGVQTRSRVASICEHYSFVSCLEPKHVDEALCDPDWMNAMHEELNNFARNKVWTLVERPRDHNVIGTKWVFRNKQDENGLVVRNKARLVAQGFTQVEGLDFGETFAPVTRLEAIRIFLAFASCFDIKLFQMDVKSAFLNGEIAELVFVEQPPGFEDPKYPNHVYKLSKAFYGLKQAPRAWYERLKDFLLSKDFKIGKVDTTLFTKIIGDDFFVCQIYVDDIIFGSTNEVFCKEFGDMMSREFEMSMIGELSFFLGLQIKQLKDGTFVSQTKYIKDLLKRFGLEDAKPTKTPMATNRHLDLDEGGKPVDLKLYCSMIGSLLYLTASRPDIMFSVYMCARFQATPKECHLVAVKRIPRYLKHSSTIGLWYPKCAKFKLVGYFDSDYAGCKVDRKSTSDSCQMLGRSLVSWSSKKQNSVALSTAEAEYVSAGSCCAQLLWMKQTLLDYGISFTKTPLLCDNDSAIKIANNPVQHSRTKHIDIRHHFLRDHVDKCDIVISHIRTENQLADIFTKPLDETRFCKLRNELNVIDFSNVA

SEQ ID NO: 19294 - protein, 1530 aa, Oryza sativa
  unsure (1)..(1530): unsure at all Xaa locations
  Clone ID: TF_OSC9403j.C1.p3.np
MPRYKPEYLFGVEGFVQELRTMSFAIGFGTAPFYAQITHDRHEEKCRVKVTLNSNSEDIPSVMFEAGGRNYIHACQEVARIAIGELRDRYSDQLADTEYRYHPPVVNVSDDEGEESKRTHSKIEWGATQADEDEPNEPSITPMLGRPRKPCRTVVLDRCVSLLVLSLVVCLACDLHQWWDVSACVCLLLSVRKLVSLVVXESSVCNNETHLRSIKVKVILCKXFPPVSLLVPCPYQMVNTRSNGNGPNNPNNNNNGENPTLAQVLAQQTQLMNMMMQQLQNQQNQGNNHAPPQNKLAEFLRVRPPTFSSTANPVEAGDWLHAIEKKLDLLQCTDQEKVSFASHQLHGPASEWWDHFRLNRTTAEPITWLEFTAAFRKTHIPSGVVSLKKKEFRSLTQGSRSVTEYLHEFNRLARYAPEDVRNDEERQEKFLEGLNDELSYPLMTGDYHDFQKLVDKAIRQEDKYNRMEQKKRRIAQFKTQQGNNQKPRLTLGPQSMPQGGSSSVVRPKRXFFNNNAGNNIRNQAPRPVAAPAQQQPAKREQSSKPVVCFNYGDPGHYADKCPKPRRVKVVPTQSNSTAPASKARVNHVAAAEAQDAPDVILGTFLVNSVPATVLYDSGATHSFLSMSFAGNHGMEVEDLRRPLMVSTPSSQALSLQRSPSVRIEIKGVPFLANLILLESKDLDVILGMDWLARHKGVIDCANRKVTLTSNDGRVVTVHALSSEFLRSRLNQIILEKIPIVREYPDVFPDDLPGMPPKRDIEFRIDLVPGTTPIHKRPYRMAANELAEVKRQKDKDHTQRMCVDYRALNDVTIKNKYPLPRIDDLFDQLKGATVFSKIDLRSGYHQLRIKEEDIPKTAFTTRYGLFECTVMSFGLTNAPAFFMNLMNKVFMEYLDKFVVVFIDDILIYSRTKEEHEEHLRLALEKLREHQLYAKFSKCEFWLSEVKFLGHVISARGVAVDPSNVESVTNWKQPKTVSEIRSFLGLAGYYRRFIENFSKIAKPMTRLFQKDVKYKWSEECEQSFQELKSRLISAPILILPDPKKGFQVYCDASKFGLGCVLMQDGKVVAYASRQLRPHEKNYPTHDLELAAVVHALKIWRHYLFGTRTEVYTDHKSLKYIFTQPDLNMRQRRWLELIKDYDMGIHYHLGKANVVVDALSRKGYCNATEGRQLSLELCKEERLNLGIVSRGFVAALEAKPTLIDQVREAQINDPDIQEIKKNMRRGKAIGFLEDEHGTVWLGERICVPDNKDLKDAILKEAHDTLYSIHPGSTKMYQDLKERFWWASMKREIAEYVAVCDVCQRVKAEHQKPAGLLQPLKIPEWKWEEIGMDFITGLPRTSSGHDSIWVIVDRLTKVAHFIPVKTTYSESRLAELYMARITDGQTERVNQILEDMLRACALDFGGSWDKNLPYAEFSYNNSYQASLQMAPYEALYGVHNVFHVSQLKKCLRVPTEEANLEQIKDQEDLTYVERPIRILEIDERRTRNRVIRFCKVQWSNHSEEESTWEREDELKSAHPHLFASSSESRGRDSV

SEQ ID NO: 19295 - protein, 1748 aa, Oryza sativa
  Clone ID: TF_OSC100051j.C1.p2.fg
MTSGGDSFVRMMSEDTDVEVLMPNEDLRTSTNGAKGSAKRSSNYTRKEDIQLCISWQSISSDPIIGNEQPGKAYWQRIAEHYHANRDFESDRNANSLEHHWGNIQKEVSKFQGCYNQIERHHPSGIPHQELVLEAEALYSSTAPKNRAFQFNHCWLKLRNSPKFQTLESHKRPRSRKSLTPIERAGEEDEGDDASKSTAPDLSQPSAKKRPIGRKQAKEKLKNGGEDGPYKEAMKDLLDAKEKEAKLKEERWKETKEIQERKLLFAERKLVWDQEQKIMFCDVSTLEPDVRTYVLAMRAQIAASKVAALNGGFDGSSGFGDIESPKYISSDEDINTIDTSMSPHIQHDGPITRARARQLNYQDECPRGRVDAHHKFAATIGDGPEDKDEEGASHSPRTKGIIQYFTRQVKQHTEGLDTDLQISTNTKLTGLETAVARIDTSLAALVRHFDALNAGGNGGGNDDDIDGEYIEDNLEDEYIADTEQDDRDAQDRRRLHNNRRGMGGRRRREVRNNDDAFSKIKFKIPPFDGKYDPDAFLSWEIAVDQKFAYHEFPENTRVRAATSEFTDFASVWWIEHGKKNPNNMPQTWDALKRVMRARFVPSYYARDLLNRLQQLRQGAKSVEEYYQELQMGLLRCNLEETEDTAMARFLGGLNREIYDIVDYKDYTNMTRLFHLACKAEREVQGRRASAKANFSAGKTSSWQTRTTPPAGRTASPSSTPTTSRAAPPPSSDKSVTKAAQPAPSASSMVSTGRMRDVQCHRCKGFGHVQRDCPSKRVLVVKNDGEYSSASDFDDDTLALLAADHADNEPPEEHIGAAFADHYESLIVQRVLSAQMEKAEQNQRHTLFQTKCVLKERCCRMIIDGGSCNNLASSEMVEKLALSTKPHPHPYYIQWLNNSGKVKVTKLVHINFAIGNYHDVVECDVVPMQACNILLGRPWQFDRDSMHHGRSNQYSFLYHDKKIVLHPMSSEDILRDDVAKAAKSKCESDKKAQSDGKKPETINLKPKCLLATKSDITELIASPSVAYALEYSDVFPKEVPPGLPPVRGIEHQIDLIPGASLPNRAPYRTNPEETKEIQRQVHELLDKGYVRESLSPCAVPVILVPKKDGSWRMCVDCRAINNITIRYRHPIPRLDDMLDELSGSIVFSKVDLRSGYHQIRMKLGDEWKTTFKTKFGLYEWLVMPFGLTNAPSTFMRLMNEVLRPFIGKFVVVYFDDILIYSKSMGEHFNHLRAVFNALRDARLFGNLEKCTFCTDRVSFLGYVVTPQGIEVDQAKVEAIQSWPTPKTVSQVRSFLGLAGFYRRFVQDFSTIAAPLNALTKKGVPFTWGTSQENAFHMLKDKLTHAPLLQLPDFNKTFELECDASGIGLGETWQHYLWPKEFVIHSDHESLKHIRIQGKLNRRHAKWVEFIESFPYVIKHKKGKENIIADALSRRYTLLTQLDYKIFGLETIKDQYAHDADFNDEAHGGSLMGHFGAKKTHDILASHFFWPQMRRDVGRAVLKKNIKMWEECLPHIEFAYNRSLHSTTKMCPFQIVYGLLPRAPIDLMPLPSSEKLNFDAKQRAELMLKLHETTKENIERMNAKYKFAGDKGRRELNFEPGDMVWLHLRKERFPDLRKSKLMPRADGPFKVLAKINENAYKIDLPADFRVSPTFNVADLKPYLGEEDELESRTTQMQEGEDDEDINTIDTSTSPHIQHDGPITRARTRQLNYQDECPCGRVDAHHKFAATIGDGVSVAKVQRLWTVVVGP

SEQ ID NO: 19296 - protein, 1641 aa, Oryza sativa
  unsure (1)..(1641): unsure at all Xaa locations
  Clone ID: TF_OSC100644j.C1.p3.np
MVGPEDKDEEGASHSPRTKGIIQYFTRQVKQHTEGLDTDLQVTNEKIGQLESMQISTNTKLTGLETAVACIDTSLAALVRHFDALNAGGNGGGNDDDIDGEYVEDNLEDEYIADTEQDDRDAQDRRRLHNNRRGMGGHRRREVRNNDDAFSKIKFKIPPFDGKYDPDAYLSWEIAVDQKFACHEFPENTRVRAATSEFTDFASVWWIEHGKKNPNNMPQTWDALKRVMRARFVPSYYARDLLNRLQQLRQGAKSVEEYYQELQMGLLRCNLEETEDAAMARFLGGLNREIYDIVDYKDYTNMTRLFHLACKAEREVQGRRASAKANFSAGKTSSWQTRTTPPAGRTASPSSTPTTSRAAPPPSSDKSATKAAQPAPSASSMASTGRMRDVQCHRCKGFGHVQRDCPSKRVLVVKNDGEYSSASDFDDDTLALLAADHADNEPPEEHIGAAFADHYESLIVQRVLSAQMEKAEQNQRHTLFQTKCVVKERCCRMIIDGGSCNNLASSEMVEKLALSTKPHPHPXYIQWLNNSGKAKVTKLVHINFAIGNYHDVVECDVVPMQACNILLGRPWQFDRDSMHHGRSNQYSFLYHDKKIVLHPMSPEDILRDDVAKAAKSKCESDKKAQSDGKKPETINLKPKFLLATKSDINELIASPSVAYALVCKDALISLHDMQHSLPPAVANILQQYSDVFPKEVPPGLPPVRGIEHQIDLIPGASLPNRAPYRTNPEETKEIQRQVHELLDKGYVRESLSPCAVPVILVPKKDGSWRMCVDCRAINNITIRYRHPIPRLNDMLDELSGSIVFSKVDLRSGYHQIRMKLGDEWKTAFKTKFGLYEWLVMPFGLTNAPSTFMRLMNEVLRPFIGKFVVVYFDDILIYSKSMGEHFNHLRAVFNALRDARLFGNLEKCTFCIDRVPFLGYVVTPQGIEVDQAKVEAIQSWPTPKTVSQVRSFLGLAGFYRRFVQDFSTIAAPLNALTKKGVPFTWGTSQENAFHMLKDKLTHAPLLQLPDFNKTFELECDASGIGLGGVLLQEGKPVAYFSEKLSGPVLNYSTYDKELYALVRTLETWQHYLWPKEFVIHSDHESLKHIRSQGKLNRRHAKWVEFIESFPYVIKHKKGKENIIADALSRRYTLLTQLDYKIFGLETIKDQYAHDADFNDVLLHYKDGRTWNKFVINDGFVFRANKLCIPASSVRLLLLQEALGGGLMGHFGAKKTHDILASHFFWPQMRRDVGRFVARCATCQKAKSRLHPHGLYMPLPVPTVPWEDISMDFVLGLPRTKRGRDSIFVVVDRFSKMAHFIPCHKTDDASHIADLFFREIVRLHGVPNTIVSDRDTKFLSHFWRTLWAKLGTKLLFSTTCYPQTDGQTEVVNRTLSTMLRAVLKKNIKMWEECLPHIEFAYNRSLHSTTKMCPFQIVYGLLPRAPIDLMPLPSSEKLNFDAKQRAELMLKLHETTKENIERMNAKYKFAGDKGRRELNFEPGDLVWLHLRKERFPDLRKYKLMPRADGPFKVLAKINENAYKIDLPADFGVSPTFNVADLKPYLGEEDELESRTTQMQEGEDDEDINTIDTSTSPHIQHDGPITRARARQLNYQDECPRGRVDAHHKFAATIGDDRATNPSGFASGWVGGFTTLDFGNIHITW

SEQ ID NO: 19297 - protein, 1218 aa, Oryza sativa
  Clone ID: TF_OSC10830j.C1.p4.fg
MRARFVPSYYARDLLNRLQQLRQGAKSVEEYYQELQMGLLRCNLEETEDAAMARFLGGLNREIYDIVDYKDYTNMTRLFHLACKAEREVQGRRASAKANFSAGKTSSWQTRTTPPAGRTASPSSTPTTSRAAPPPSSDKSAAKAAQPAPSASSMASTGRMRDVQCHRCKGFGHVQRDCPSKRVLVVKNDGEYSSASDFDDDTLALLAADHADNEPPEEHIGAAAFADHYESLIVQRVLSAQMEKAEQNQRHTLFQTKCVVKERCCRMIIDGGSCNNLASSEMVEKLALSTKPHPHPYYIQWLNNSGKAKVTKLVHINFAIGNYHDVVECDVVPMQACNILLGRPWQFDRDSMHHGRSNQYSFLYHDKKIVLHPMSPEDILRDDVAKAAKSKCESDKKEQSDGKKPETINLKPKCLLATKSDITELIASPSVAYALVCKDALISLHDMQHSLPPAVANILQEYSDVFPKEVPPGLPPVRGIEHQIDLIPGASLPNRAPYRTNPEETKEIQRQVHELLDKGYVRESLSPCAVTVILVPKKDGSWRMCVDCRAINNITIRYRHPIPRLDDMLDELSGSIVFSKVDLRSGYHQIRMKLGDEWKTAFKTKFGLYEWLVMPFGLTNAPSTFMRLMNEVLRPFIGKFVVVYFDDILIYSKSMGEHFNHLRAVFNALRDARLFGNLEKCTFCTDRVSFLGYVVTPHGIEVDQAKVEAIQSWPTPKTVSQVRSFLGLAGFYRRFVQDFSTIAAPLNALTKKGVPFTWGTSQENAFHMLKDKLTHAPLLQLPDFNKTFELECDASGIGLGGVLLQEGNPVAYFSEKLSGPVLNYSTYDKELYALVRTLETWQHYLWPKEFVIHSDHESLKHIRSQGKLNRRHAKWVEFIESFPYVIKHKKGKENIIADALSRRYTLLTQLDYKIFGLETIKDQYAHDADFNDEAHGGGLMGHFGAKKTHDILASHLFWPQMRRDVGRAVLKKNIKMWEECLPHIEFAYNRSLHSTTKMCPFQIVYGLLPRAPIDLMPLPSSEKLNFDAKQRAELMLKLHETTKENIERMNAKYKFAGDKGRRELNFEPGDLVWLHLRKERFPDLRKSKLMPRADGPFKVLAKINENAYKIDLPADFGVSPTFNVADLKPYLGEEDELESRTTLMQEGDDDEDINTIDTSTSPHIQHDGPITRARARQLNYQDECPRGRVDAHHKFAATIGDGVSVAKAQRLWTVVVGP

SEQ ID NO: 19298 - protein, 983 aa, Oryza sativa
  Clone ID: TF_OSC21171j.C1.p1.fg
MAGPEDKDEEGASHSPRTKGIIQYFTRQVKQHTEGLDTDLQVTNEKIGQLESTQISTNTKLTGLETAVARIDTSLAALVRHFDALNAGGNGGGNDDDIDGEYVEDNLEDEYIADTEQDDRDARDRRRLHNNRRGMGGRRRREVRNNDDAFSKIKFKIPPFDGKYDPDAYLSWEIAVDQKFACHEFPESTRVRAATSEFTDFASVWWIEHGKKNPNNMPQTWDALKRVMRARFVPSYYARDLLNRLQQLRQGAKSVEEYYQELQMGLLRCNLEETEDAAMARFLGGLNREIYDIVDYKDYTNMTRLFHLACKAEREVQGRRASAKANFSAGKTSSWQTRTTPPAGRTASPSSTPTTSRAAPPPSSDKSATKAAQPAPSASSMASTGRMRDVQCHRCKGFGHVQRDCPSKRVLVVKNDGEYSSASDFDDDTLALLAADHADNEPPEEHIGAAFADHYESLIVQRVLSAQMEKAEQNQRHTLFQTKCVVKERCCRMIMDGGSCNNLASSEMVEKLALSTKPHPHPYYIQWLNNSGKAKVTKLVHINFAIGNYHDVVECDVVPMQACNILLGRPWQFDRDSMHHGRSNQYSFLYHDKKIVLHSMSPEDILRDDVAKAAKSKCESDKKAQSDGKKPETINLKPKCLLATKSDINELIASPSVAYALEYSDVFPKEVPPGLPPVRGIEHQIDLIPGASLPNRAPYRTNPEETKEIQRQFMSCLIKGMYASLLVHVRFRAINNITIRYRHPIPRLDDMLDELSGSIVFSKVDLRSGYHQIRMKLGDEWKTAFKTKFGLYEWLVMPFGLTNAPSTFMRLMNEVLRPFIGKFVVVYFDDILIYSKSMGEHFNHLRAVFNALRDARLFGNLEKCTFCTDRVSFLGYVVTPQGIEVDQAKVEAIQSWPTPKTVSQVRSFLGLAGFYRRFVQDFSTIAAPLNVLTKKGVPFTWGTSQENAFHMLKDKLTHAPLLQLPDFNKTFELECDASGIGLG

SEQ ID NO: 19299 - protein, 1567 aa, Oryza sativa
  Clone ID: TF_OSC27261j.C1.p2.fg
MAGLEDKDEEGASHSPRTKGIIQYFTRQVKQHTEGLDTDLQVTNEKIGQLESTQISTNTKLTGLETAVARIDTSLAALVRHFDALNAGGNGGGNDDDIDGEYVEDNLEDEYIADTEQDDRDARDRRRLHNNRRGMGGRRRREVRNNDDAFSKIKFKIPPFDGKYDPDAYLSWEIAVDQKFACHEFPENTRVRAATSEFTDFASVWWIEHGKKNPNNMPQTWDALKRVMRARFVPSYYARDLLNRLQQLRQGAKSVEEYYQELQMGLLRCNLEETEDAAMARFLGGLNREIYDIVDYKDYTNMTRLFHLACKAKREVQGRRASAKANFSAGKTSSWQTRTTPPAGRTTSPSSTPTTSRAAPPPSGDKSAIKAAQPAPSASSMASTGRMRDVQCHRCKGFGHVQRDCPSKRVLVVKNDGEYSSASDFDDDTLALLAADHADNEPPEEHIGAAFADHYESLIVQRVLSAQMEKAEQNQRHTLFQTKCVVKERCCRMIIDGGSCNNLANSEMVEKLALSTKPHPHPYYIQWLNNSGKAKVTKLVHINFAIGNYHDVVECDVVPMQACNILLGRPWQFDRDSMHYGRSNQYSFLYHDKKIVLHPMSPEDILRDDVAKAAKSKCESDKKAQSDGKKPETINLKPRCLLATKSDINELIASPSVAYALVCKDALISLHDMQHSLAPAVANILQEYSDVFPKEVPPGLPPVRGIQHQIDLIPGASLPNRAPYRTNPEETKEIQRQVHELLDKGYVRESLSPCAVPVILVPKKDGSWRMCVDCRAINNITIRYRHPIPRLDDMLDELSGSIVFSKVDLRSGYHQIRMKLGDEWKTAFKTKFGLYEWLVMPFGLTNAPSTFMRLMNEVLRPFIGKFVVVYFDDILIYSKSMGEHFNHLRAVFNALRDARLFGFQHHCCTIECASKKGVPFTWGTSQENAFHMLKDKLTHAPLLQLPDFNKTFELECDASGIGLGGVLLQEGKPVAYFSEKLSGPVLNYSTYDKELYALVRTLETWQHYLWPKEFVIHSDHESLKHIRSQGKLNRRHAKWVEFIESFPYVIKHKKGKENIIADALSRRYTLLTQLDYKIFGLETIKDQYAHDADFNDVLLHCKDGRTWNKFVINDGFVFRANKLCIPASSVRLLLLQEAHGGGLMGHFGAKKTHDILASHFFWPQMRRDVGRFVARCATCQKAKSRLHPHGLYMPLPVPTVPWEDISMDFVLGLPRTKRGRDSIFVVVDRFSKMAHFIPCHKTDDASHIADLFFREIVRLHGVPNTIVSDRDTKFLSHFWRTLWAKLGTKLLFSTTCHPQTDGQTEVVNRTLSTMLRAVLKKNIKMWEECLPHIEFAYNRSLHSTTKMCPFQIVYGLLPRAPIDLMPLPSSEKLNFDAKQRAELMLKLHETTKENIERMNAKYKFAGDKGRRELNFEPGDLVWLHLRKERFPDLRKSKLMPRADGPFKVLAKINENAYKIDLPADFGVSSTFNVADLKPYLGEEDELESRTTQMQEGEDDEDINTIDTSTSPHVQHDGPITRARARQLNYQDECPRGRVDAHHKFAATIGDGVSVAKAQRLWTVVVGP

SEQ ID NO: 19300 - protein, 1431 aa, Oryza sativa
  Clone ID: TF_OSC28357j.C1.p1.fg
MATTDTTIAHIMDEQDDIKIKSSKCWNPIRPPATLLTSNGYRICIRPPFSAHEYLMESSRSPLSNRSGLISRLHLVWPQIQKQGAASPVMGQWACNFVWDPGPSGAHVGNRVDLHRQDQQPTESYHNSPKDRANNSLECREELRVHQVVSELSFLGLRKGIREHRLLHLRRDMTTSSCDAYEEVQKSLQNEKNDMFEMSLPSLANEEMADAATLSEEGIKGKLNGAEITQGIGLICTGKINNPRRGVSIAKAQHNVSLAPILQEMVSTNQSAFIRKRAIHDNFMYVQNPVKRLHRRKTPTLLLKLDISKAFDSLLLDFLGAVQGFPTSYLAYLFTLENYGRGMDSPATPMNFSPLLSLAPRNEPCYTKEENQDVTISSLSLKKLAPEFQDECPRGRVDAHHKFAATIGDGPENKDEEGASHSPRTKGTIQYFTRKVKQHTERLETDLQVTNEKIGQLESTQIFTNTKLTGLETAVARIDTSLAALVRHFDALNAGGNGGGNDDDIDGEYVEDNLEDEYIADTEQDDRDARDHRRLHNNRREETEDAAMARFLGGLNREIYDIVDYKDYTNMTRLFHLACKTSSWQTRTTPPAGRTASPSSTPATSRAAPPPSSDKSATKAAQPALSASSVASTGRTRDVQCHRCKGFGHVQRDCPSKRVLVVKNDGRPWQFDRDSMHHGRSNQYSFLYHDKKIVLHPMSPEDILRDDVAKAAKSKCESDKKAQSNGKKPETINLKPKCLLATKSDINELIASPSVVYALEYSDVFPKEVPPGLPPVRGIEHQIDLIPGASLPNRAPYRTNPEETKEIQRQVHELLDKRLDDMLDELSGSIVFSKVDLRSGYHQIRMKLGDEWKTAFKTKFGLYEWLVMPFGLTNAPSTFMRLMNEVLRPFIGKFVVVYFDDILIYSKSMGEHFNHLRAVFNALRDARLFGNLEKCTFCTDRVSFLGYVVTLQGIEVDQAKVEAIQSWPTPKTVSQVRSFLGLAGFYRRFVQDFSTIATPLNALTKKGVPFTWGTSQENAFHMLKDKLTHAPLLQLPDFNKTFELECDASGIGLGGILLQEGKPVAYFSEKLSGPVLNYSTYDKELYALVRTLETWQHYLWPKEFVIHSDHESLKHIRSQGKLNCRHAKWVEFIESFPYVIKHKKGKENIIADALSRRYTLLTQLDYKIFGLETIKDQYAHDADFNDVLLHCKDGRIWNKFVINGGFVFRANKLCIPASSVRLLLLQEAHGGGLMAHFGAKKTHDILASHFFWPQMRRDVGRAVLKKNIKMWEECLPHIEFAYNRSLHSTTKMCPFQIVYGLLPRPPIDLMPLPSSEKLNFDAKQHAELMLKLHETTKENIERMNAKYKFAGDKDFRVSPTFNIADLKLYLGEEDELESRTTQMQEGEDDEDINTIDTSTFPPCTPSIHPRRLHVQHDGPITRARARQLNYQ

SEQ ID NO: 19301 - protein, 471 aa, Oryza sativa
  Clone ID: TF_OSC29471j.C1.p1.fg
MAGPEDKDEEGASHSPRTKGIIQYFTRQVKQHTEGLDTDLQVTNEKIGQLESTQISTNTKLTGLETAVARIDTSLAALVRHFDALNAGGNGGGNDDDIDGEYVEDNLEDEYIADTEQDDRDAQDRRRLHNNRRDSSFDGKYDPDAYLSWEIAVDQKFACHEFLENTRVRAATSEFTDFASVWWIEHGKKNPNNMPQTWDALKRVMRARFVPSYDACDMLNRLQQLRQGAKSVEEYYQELQMGLLRCNLEETEDAAMARFLGGLNREIYDIVDYKDYTNMTRLFHLACKAEREVQGRRASAKANFSTGKTSSWQRTTPPAGRIASLSSTPTTSRAAPPPSSDKSATKAAQPAPSASSMASIGQMRDVQCHRCKGFGHVQRDCPSKRVLVVKNDGEYSSASDFDDDTLALLAADHADNEPPEEHIGAAFADHYESLIVQRVLSAQMEKAGAKSATHVVPNKVCRQRALLPHDH

SEQ ID NO: 19302 - protein, 339 aa, Oryza sativa
  Clone ID: TF_OSC400436j.C1.p27.gm
MERIQREEDSRGVDSDCRAAPTSDGRHDFMRTPIWDECPRGRVDAPHKFAATIGDAHQQLHHKPDYSLTGLVATAPIHLVPRLLTCGLLSPSCGQGPEDKDEEGASHSPRTKGIIQYFTRQVKQHTEGLDTDLQVTNEKIGQLESTQISTNTKLTGLETAVARIDTSLAALVRHFDALNAGGNGGGNDDDIDGEYVEDNLEDEYIADTEQDDRDARDRRRLHNNRRGRMRDVQCHRCKGFGHVQRDCPSKRVLVVKNDGEYSSAIDFDDDTLALLAADHADNEPPEEHIGAAFADHYESLIMQHVLSAQMEKAEQNQRHTLFQTKCVVKERCCRMIIDG

SEQ ID NO: 19303 - protein, 1394 aa, Oryza sativa
  Clone ID: TF_OSC400452j.C1.p7.fg
MGNLRGHEFKDWNGVVQYRGIHASKFVSFEGGIHASSGFKVWALQQLLAWKTQSLKGAISILGPTTNNSNGTHISPIVSKVLMWLKNTVGAGFSYFNTYSAVLCASFCRSEASSTVAAPLQCRSTRLQIFPGSYSLQAFGRMMRSLIELLRLFILYTCDLMPQDSIAGDGSGVDLVDECPCGQVDAHHKFAVTIGDGVSVAKAQRLWTVTNEKIGQLKSTQISTNTKLTVLETAVARIDTCLAALVRHFDALNAGGNGGGNDDDIDGKYVEDNLEDEYIADTEQDDRDARDRRRLHNNRREHGKKNPNNMPQTWDALKRVMRARFVPSYYTRDLLNRLQQLRQGAKSVEEYYQELQMGLLRCNLEETEDAAMARFLGGLNREIFDIVDYKDYTNMTRLFHLTCKAEREVQGRRASAKANFSAGKTSSWQTRTTPPAGRTASPSSTPTISRAAPPPSSDKSATKAAQPALSASSMASTGRTRDVQCHRCKGFGHVQRDCPSKRVLVVKKDGEYSSASDFDDDTLALLAADHADNEPPEEHIGAAFADHYESLIVQRVLGAQMEKAEQNQQHTLFQTKCVVKERCCRMIIDGGSCNNLASSEMVEKLALSTKPYPHPYYIQWLNNSGRPWQFDRDSMHHGRSNQYFFLYHDKKIVLHPMSPEDILRDDVAKATKSKCESDKKAQSDGKKPETINLKPKCLIATKSDINELIASPSVAYALEYSDVFPKEVPPGLPPVLPYPTVRHTGPTLRKPRRFSVKFMSCLIKGMYASLLVHVRFRFDDMLDELSGSIVFSKVDLRSGYHQIRMKLGDEWKIAFKTKFRLYEWLVMPFGLTNAPSTFMRLMNEVLRPFIGKFVVVYFDDILIYSKSMGEHFNHLRAVFNALRDARLFGNLEKCSFCTDRVSFLGYVVTPQGIEDFSTIAALLNALTKKGVPFTWGTSQENAFHMLKDKLTHTPLLQLPDFNKTFELECDASGIGLGGVLLQEGKPVAYFSEKLSGPVLNYSTYDKELYALVRTLETWQHYLWPKEFVIHSDHESLKHIRSQGKLNSRHAKWVEFIESFPYVIKHKKGKENIIADALSRRYTLLTQLDYKIFGLETIKDQYAHDADFNEAHGGGLMGHFGAKKTHDILASHFFWPQMRRDVGRAVLKKNIKMWEECLPHIEFAYNRSLHSTTKMCPFQIVYGLLPRAPIDLMPLPSSEKLNFDAKQCAELMLKLHETTKENIERMNAKYKFAGDKGRRELNFEPRDLVWLHLRKERFPDLRKSKLMPRADGPFKVLAKINENAYKLDLPADFGVSPTFNVADLKPYLGEEDEHESRTTQMQEGEDDEDINTIDTSTSPHVQHDGSITRARARQLNYQDECPRGRVDAHHKFASTIGDGVSVAKAQRLWTVVVGP

SEQ ID NO: 19304 - protein, 1163 aa, Oryza sativa
  Clone ID: TF_OSC400454j.C1.p10.fg
DECPCGQVDAHHKFAVTIGDGVSVAKAQRLWTVTNEKIGQLKSTQISTNTKLTVLETAVARIDTCLAALVRHFDALNAGGNGGGNDDDIDGKYVEDNLEDEYIADTEQDDRDARDRRRLHNNRREHGKKNPNNMPQTWDALKRVMRARFVPSYYTRDLLNRLQQLRQGAKSVEEYYQELQMGLLRCNLEETEDAAMARFLGGLNREIFDIVDYKDYTNMTRLFHLTCKAEREVQGPRANAKANFSAGRTRDVQCHRCKGFGHVQRDCPSKRVLVVKKDGEYSSASDFDDDTLALLAADHADNEPPEEHIGAAFADHYESLIVQRVLGAQMEKAEQNQQHTLFQTKCVVKERCCRMIIDGGSCNNLASSEMVEKLALSTKPYPHPYYIQWLNNSGRPWQFDRDSMHHGRSNQYFFLYHDKKIVLHPMSPEDILRDDVAKATKSKCESDKKAQSDGKKPETINLKPKCLIATKSDINELIASPSVAYALEYSDVFPKEVPPGLPPVLPYPTVRHTGPTLRKPRRFSVKFMSCLIKGMYASLLVHVRFRFDDMLDELSGSIVFSKVDLRSGYHQIRMKLGDEWKIAFKTKFRLYEWLVMPFGLTNAPSTFMRLMNEVLRPFIGKFVVVYFDDILIYSKSMGEHFNHLRAVFNALRDARLFGNLEKCSFCTDRVSFLGYVVTPQGIEDFSTIAALLNALTKKGVPFTWGTSQENAFHMLKDKLTHTPLLQLPDFNKTFELECDASGIGLGGVLLQEGKPVAYFSEKLSGPVLNYSTYDKELYALVRTLETWQHYLWPKEFVIHSDHESLKHIRSQGKLNSRHAKWVEFIESFPYVIKHKKGKENIIADALSRRYTLLTQLDYKIFGLETIKDQYAHDADFNEAHGGGLMGHFGAKKTHDILASHFFWPQMRRDVGRAVLKKNIKMWEECLPHIEFAYNRSLHSTTKMCPFQIVYGLLPRAPIDLMPLPSSEKLNFDAKQCAELMLKLHETTKENIERMNAKYKFAGDKGRRELNFEPRDLVWLHLRKERFPDLRKSKLMPRADGPFKVLAKINENAYKLDLPADFGVSPTFNVADLKPYLGEEDEHESRTTQMQEGEDDEDINTIDTSTSPHVQHDGSITRARARQLNYQDECPRGRVDAHHKFASTIGDGVSVAKAQRLWTVVVGP

SEQ ID NO: 19305 - protein, 1234 aa, Oryza sativa
  Clone ID: TF_OSC400675j.C1.p16.fg
MAGPEDKDEEAASHSPRTKGIIQYFTRQVKQHTEGLDTDLQVTNEKIGQLESTQISTNTKLTGLETAVARIDTSLAALVRHFDALNAGGNGGGNDDDIDGEYVEDNLEDEYIADTEQDDRDARDRRRLHNNRRGMGGRRRREVRNNDDAFSKIKFKIPPFDGKYDPDAYLSWEIAVDQKFACHEFPESTRVRAATSEFTDFASVWWIEHGKKNPNNMPQTWDALKRVMRARFVPSYYARDLLNRLQQLRQGAKSVEEYYQELQMGLLRCNLEETEDAAMARFLGGLNREIYDIVDYKDYTNMTRLFHLACKAEREVQGRRASAKANFSAGRMRDVQCHRCKGFGHVQRDCPSKRVLVVKNDGEYSSASDFDDDTLALLAADHADNEPPEEHIGAAFADHYESLIVQRVLSAQMEKAEQNQRHTLFQTKCVVKERCCRMIIDGGSCKNLASSEMVEKLALSTKPHPHPYYIQWLNNSGKAKVTKLVHINFAIGNYHDVVECDVVPMQACNILLGRPWQFDRDSMHHGRSNQYSFLYHDKKIVLHPMSPEDILRDDVAKAAKSKCESDKKAQSDGKKPETINLKPKCLLATKSDINELIASPSVAYALEYSDVFPKEVPPGLPPVRGIEHQIDLIPGASLPNRAPYRTNPEETKEIQRQVHELLDKGTFMRLMNEVLRPFIGKFVVVYFDDILIYSKSMGEHFNHLRAVFNALRDARLFGNLEKCTFCTDRVSFLGYVVTPQGIEVDQAKVEAIQSWPTPKTVSQVRSFLGLAGFYRRFVQDFSTIAAPLNALTKKGVPFTWGTSQENAFHMLKDKLTHAPLLQLPDFNKTFELECDASGIGLGGVLLQEGKPVAYFSEKLSGPVLNYSTYDKELYALVRTLETWQHYLWPKEFVIHSDHESLKHIRSQGKLNRRHAKWVEFIESFPYVIKHKKGKENIIADALSRRYTLLTQLDYKIFGLETIKDQYAHDADFNDVLLHCKDGRTWNKFVINDGCEEMLAGSLLAALHVKRLSHAYIHMIVYGLLPRAPIDLMPLPSSEKLNFDAKQRAELMLKLHETTKENIERMNAKYKFAGDKGRRELNFEPRDLVWLHLRKERFPDLRKSKLMPRADGPFKVLAKINENAYKIDLPADFGVSPTFNVADLKPYLGEEDELESRTTQMQEGEDDEDINTIDTSMSPHVQHDGPITRARARQLNYQDECPRGRVDAHHKFAATIGDGVSVAKAQRLWTVVVGP

SEQ ID NO: 19306 - protein, 1619 aa, Oryza sativa
  Clone ID: TF_OSC400675j.C1.p24.fg
MAGPEDKDEEGASHSPRTKGIIQYFTRQVKQHTEGLDTDLQVTNEKIGQLESTQISTNTKLTGLETAVARIDTSLAALVRHFDALNAGGNGGVNDDDIDGEYVEDNLEDEYIADTEQDDRDARDRRRLHNNRRGMGGRRRREVCNNDDAFSKIKFKIPPFDGKYDPDAYLSWEIAVDQKFACHEFPESTRVRAATSEFTDFASVWWIEHGKKNPNNMPQTWDALKRVMRARFVPSYYARDLLNRLQQLRQEETEDAAMARFLGGLNREIYDIVDYKDYTNMTRLFHLACKAEREVQGRRASAKANFSAGKTSSWQTRTTPLAGRTASPSSTPTTSRAAPPPSSDKSATKAAQPAPSASSMASTGRMRDVQCHRCKGFGHVQRDCPSKRVLVVKNDGEYSSASDFDDDTLALLAADHADNEPPEEHIGAAFADHYESLIVQRVLSAQMEKAEQNQRHTLFQTKCVVKERCCRMIIDGGSCNNLASSEMVEKLALSTKPHPHSYYIQWLNNSGKAKVTKLVHINFAIGNYHDVVECDVVPMQACNILLGRPWQFDRDSMHHGRSNQYSFLYHDKKIVLHPMSPEDILRDDVAKAAKSKCESDKKAQSDGKKPETINLKPKCLLATKSDINELIASPSVAYALVCKDALISLHDMQHSLPPAVANILQEYSDVFPKEVPPGLPPVRGIEHQIDLIPGASLPNRAPYRTNPEETKEIQRQVHELLDKGYVRESLSPCAVPVILVPKKDGSWRMCVDCRAINNITIRYRHPIPRLDDMLDELSGSIVFSKVELRSGYHQIHMKLGDEWKTAFKTKFGLYEWLVMPFGLTNAPSTFMRLMNEVLRPFIGKFVVVYFDDILIYSKSMGEHFNHLRAVFNALRDARLFGNLEKCTFCTDRVSFLGYVVTPQGIEVDQAKVEAIQSWPTPKTVSQVRSFLGLAGFYCRFVQDFSTIAAPLNALTKKGVPFTWGTSQENAFHMLKHKLTHAPLLQLPDFNKTFELECDASGIGLGGVLLQEGKLVAYFSEKLSGPVLNYSTYDKELYALVRTLETWQHYLWPKEFVIHSDHESLKHIRSQGKLNRRHAKWVEFIESFPYVIKHKKGKENIIANALSRRYTLLTQLDYKIFGLETIKDQYAHDADFNDVLLHCKDGRTWNKFVINDGFVFRANKLCIPASSVRLLLLQEAHGGGLMGHFGAKKTHDILASHFFWPQMRRDVGRFVARCATCQKAKSRLHPHGLYMPLPVPTVPWEDISMDFVLGLPRTKRGRDSIFVVVDRFSKMVHFIPCHKTDDASHIADLFFREIVRLHGVPNTIVSDRDTKFLSHFWRTLWAKLGTKLLFSTTCHPQTDGQIEVVNRTLSTMLRAVLKKNIKMWEECLPHIEFACNRSLHSTTKMCPFQIVYSLLPRAPIDLMPLPSSEKLNFDAKQRAELMLKLHETTKENIERMNAKYKFAGDKGRRELNFEPGDLVWLHLRKERFPDLRKSKLMPRADGPFKVLAKINENAYKIDLPADFGVSPTFNVADLKPYLGEEDELESRTTQMQEGEDDENINTIDTSTSPHVQHDGPITRARARQLNYQVSSFLSSYSSSLYPGDACTRVLLRNDGEDPKGRGFAWGGFGLQGSANF

SEQ ID NO: 19307 - protein, 2447 aa, Oryza sativa
  Clone ID: TF_OSC401054j.C1.p75.fg
MAGPEDKDEEGASHSPRTKGIIQYFTRQVKQHTEGLDTDLQVTNEKIGQLESTQISTNTKLTGLETAVARIDTSLAALVRHFDALNAGGNGGGNDDDIDGEYVEDNLEDEYIADTEQDDRDARDRRRLHNNRRGMGGRRRREVRNNDDAFSKIKFKIPPFDGKYDPDAYLSWEIAVDQKFACHEFPESTRVRAATSEFTDFASVWWIEHGKKNPNNMPQTWDALKRVMRARFVPSYYARDLLNRLQQLRQGAKSVEEYYQELQMGLLRCNLEETEDAAMARFLGGLNREIYDIVDYKDYTNMTRLFHLACKAEREVQGRRASAKANFSAGKTSSWQTRTTPPAGRTASPSSTPTTSRAAPPPSSDKSATKAAQPAPSASSMASTGRMRDVQCHRCKGFGHVQRDCPSKRVLVVKNDGEYSSASDFDDDTLALLAADHADNEPPEEHIGAAFADHYESLIVQRVLSAQMEKAEQNQRHTLFQTKCVVKERCCRMIIDGGSCNNLASSEMVEKLALSTKPHPHPYYIQWLNNSGKAKVTKLVHINFAIGNYHDVVECDVVPMQACNILLGRPWQFDRDSMHHGRSNQYSFLYHDKKIVLHSMSPEDILRDDVAKAAKSKCESDKKAQSDGKKPETINLKPKCLLATKSDINELIASPSVAYALVCKDALISLHDMQHSLPPAVANILQEYSDVFPKEVPPGLPPVRGIEHQIDLIPGASLPNRAPYRTNPEETKEIQRQVHELLDKGYVRESLSPCAVPVILVPKKDGSWRMCVDCRAINNITIRYRHPIPRLDDMLDELSGSIVFSKVDLRSGYHQIRMKLGDEWKTAFKTKFGLYEWLVMPFGLTNAPSTFMRLMNEVLRPFIGKFVVVYFDDILIYSKSMGEHFNHLRAVFNALRDARLFGNLEKCTFCTDRVSFLGYVVTPQGIEVDQAKVEAIQSWPTPKTVSQVRSFLGLAGFYRRFVQDFSTIAAPLNVLTKKGVPFTWGTSQENAFHMLKDKLTHAPLLQLPDFNKTFELECDASGIGLGGVLLQEGKPVAYFSEKLSGPVLNYSTYDKELYALVRTLETWQHYLWPKEFVIHSDHESLKHIRSQGKLNRRHAKWVEFIESFPYVIKHKKGKENIIADALSRRYTLLTQLDYKIFGLETIKDQYAHDADFNDVLLHCKDGRTWNKFVINDGFVFRANKLCIPASSVRLLLLQEAHGGGLMGHFGAKKTHDILASHFFWPQMRRDVGRFVARCATCQKAKSRLHPHGLYMPLPVPTVPWEDISMDFVLGLPRTKRGRDSIFVVVDRFSKMAHFIPCHKTDDASHIADLFFREIVRLHGVPNTIVSDRDTKFLSHFWRTLWAKLGTKLLFSTTCHPQTDGQTEVVNRTLSTMLRAVLKKNIKMWEECLPHIEFAYNRSLHSTTKMCPFQIVYGLLPRAPIDLMPLPSSEKLNFDAKQRAELMLKLHETTKENIERMNAKYKFAGDKGRRELTFEPGDLVWLHLRKERFPDLRKSKLMPRADGPFKVLAKINENAYKIDLPADFGVSPTFNVADLKPYLGEEDELESRTTQMQEGEDDEDINTIDTSTSPHIQHDGPITRARARQLNYQDECPRGRVDAHHKFAATIGDDRATNPSGFASYGLYEFTVMSFGLTNAPAFFMNLMNKVFMEYLDKFVVVFIDDILVYSQSEEDHQHHLRLVLGKLREHQLYAKLSKCEFWLSEVKFLGHVISAKGVAVDPETVTAVTDWKQPKTVTQIRSFLGLAGYYRRFIENFSKIARPMTQLLKKEEKFVWSPQCEKAFQTLKEKLVSSPVLILPDTRKDFMVYCDASPQGLGCVLMQEGHVVAYASRQLWPHEGNYPTHDLELAAVVHALKIWRHYLIGNRCEIYTDHKSLKYIFTQSDLNLRQRRWLELIKDYDVGIHYHPGKANVVADALSRKSHCNTLGVRGIPPELNQQMEALNLSIVSRGFLATLEAKPTLLDQIREAQKNDPDMRGLLKNMKQGKAAGFIEDEHGTLWNRNRVCVPDVRELKQLILQEAHESPYSIHPGSTKMYLDLKEKYWWVSMKREIAEFVALCDVCQRVKAEHQRPAGLLQPLQVPEWKWDEIGMDFITGLPKTQGGYDSIWVVVDRLTKVARFIPVKTTYGGNKLAELYFARIVSLHGVPKKIVSDRESQFTSHFWKKLQEELGTRLNFSTAYHPQTDGQTERLNQILEDMLHACVLDFGKTWDKSLPYAEFSYNNSYQASIQMAPYEALYGRKCRTPLLWDQVGESQVFGTDILREAEAKVRTIWDNLKVAQSRQKSYADNRRRNLEFAVDDFVYLRVTPLRGVHRFQTKGKLAPRFVGPFRIIARRGEVAYQLELPASLGNVHDVFHVSQLKKCLRVPSEQADSEQIEVREDLTYVERPVKILDTMERRTRNRVIRFCKVQWSNHAEEEATWERENELKAAHPDLFASSSESRGRDSV

SEQ ID NO: 19308 - protein, 1475 aa, Oryza sativa
  Clone ID: TF_OSC401286j.C1.p4.fg
MSNEVNHVGKAPMFNGTNYSTWKIKMSTHLKAMSFHIWSIVDVDFAITGTPLTEIDHRNLQLNAQAMNALFNSLSQEEFDRVSNLETAYEIWNKLAEIHEGTSEYKDAKLHFLKIQYETFSMLPHESVNDMYGRLNVIVNDLKGLGANYTDLEVAQKMLRALPEKYETLVTMLINSDMSRMTPASLLGKINTNDMYKLKKKEMEEASPSKKCIALQAEVEDKGKGKVNEVNEDLEEEIALLDRRFNDLLGRRKERGRGSNSNRRRNKRPNKTLSNLKCFECGEKGHFASKCSSKDDDGDKSSKKKSGGYKLMKKLKKEGKKIEAFIGEWDSNEESSASSGSEEEGGDDASSKKKKMAVVAIKEAPSLFAPICLMAKGSSKVTSLSDSESDDDCDDVSYDELVSMFEEFHAYSEKEIVNFKALKKDHASLEILYEELKTSHERLTISHEKLKKAHENLLFTTQHGALIDVGISCDLLDDSATCHIAHVASSSISTSCDDPVDMPSSSSSSCISIYDASLVVENNELKEQVAKLNKSLERCFKGRLIMVALLLDMWVPLYSVVNYRTGGSHWVLDSGCTQHMTGDRAMFTTFEEGGKEQEKVTFGDNSKGKGVRLTKFESRCDEGFLIGYASNSKAYRVYNKNKGDEGLMRAMKNMSIGDVKPIEVEDKPSTSTQDEPSTSATPSQAQVEVEEEKAQDPPMPPRIHTALSKDHPIDQVLGDISKGVQTRSRVASICEHYSFVSCLEPKHIDEALCDPDWMNAMHEELNNFARNKVWTLVERPRNHNVIGTKWVFRNKQDENGLVVRNKARLVAQGFTQVEGLDFGETFAPVARLEVIRILLAFASCFDIKLFQMDVKSAFLNGKIAELVFVEQPPGFEDPKNPNHVYKLSKALYGLKQAPWAWYERLRDFLLSKDFKIGKVDTTLFTKIIGDDFFVCQIYVDDIIFGSTNEVFCKEFGDMISREFEMSTIGELSFFLGLQIKQLKDGTFVSQTKYIKDLLKRSGLEDAKPIKTPMATNGHLDLNEGVMPPRTCHGRRAPTPDAVSEPEESSGDDYAQSDEEVEANVEGASEEASGDDNSGSGEDEDEGSDNMHIDPSIQFVVNMRNPSQYTILRHHDQFLRPRDTPDPRFHTAFQKSVYEQDLFKTVGIDWIVTLKQDYNEDLIRQFYVTVWVAGDYSEMKWMSDTLHCSISRRQFRRLLNIRLDFGDDLHEKHTHNLLSIDYLSQFYEDGVRYTHGKVAGLRTIPSVVNRIVRATILPRLGNNDDIRGVAWHVIDAIIQGRQFDIVSLMMQEIAISKGTFTQGIYYAPYIMRLIQDKLGAAGQNLKKHKQYKPRLQLGAPCAPRAAPSSHPGASSSSAPLPPPPPGYDPNTFFHPQYAYFGMQPNEYFNPVLGAINTLSESIQRLSTGHEALHEDVRGLRTDVGDLNASVGRLHTRVGTLDSRVQMLESSQAFVYHRSHDAPYPSTLVRPPSPPQE

SEQ ID NO: 19309 - protein, 1667 aa, Oryza sativa
  Clone ID: TF_OSC401345j.C1.p7.fg
MAGPEDKDEEGASHSPRTKGIIQYFTRQVKQHTEGLDTDLQVTNEKIGQLESTQISTNTKLTGLETAVARIDTSLAALVRHFDALNAGGNGGGNDDDIDGEYVEDNLEDEYIADTEQDDRDARDRRRLHNNRRGMGGRRRREVRNNDDAFSKIKFKIPPFDGKYDPDAYLSWEIAVDQKFACHEFPESTRVRAATSEFTDFASVWWIEHGKKNPNNMPQTWDALKRVMRARFVPSYYARDLLNRLQQLRQEETEDTAMARFLGGLNREIYDIVDYKDYTNMTRLFHLACKTSSWQTRTTPPAGRTVSPSSTPTTSRAAPPPSSDKSATKAAQPAPSASSMASTGRMRDVQCHRCKGFGHVQRDCPSKRVLVVKNDGEYSSAIDFDDDTLALLAADHADNEPPEEHIGAAFADHYESLIMQHVLSAQMEKAEQNQRHTLFQTKCVVKERCCRMIIDGGSCNNLASSEMVEKLALSTKPHPHPYYIQWLNNSGKAKVTKLVHINFAIGNYHDVVECDVVPMQACNILLGRPWQFDRDSMHHGKKIVLHPMSPEDILRDDVAKAAKSKCESDKKAQSDGKKPETINLKPKCLLATKSDINELIASPSVAYALEYSDVFPKEVPPGLPPVRGIEHQIDLIPGASLPNRAPYRTNPEETKEIQRQVHELLDKGYVRESLSPCAVLVILVPKKDGSWRMCVDCRAINNITIRYRHPIPRLDDMLDELSGSIVFSKVDLRSGYHQIRMNLGDEWKTAFKTKFGLYEWLVMPFGLTNAPTTFMRLMNEVLRPFIGKFVVVYFDDILIYSKSMGEHFNHLRAVFNALRDARLFGNLEKCTFCTDRVSFLGYVVTPQGIEVDQAKVEAIQSWPTPKTVSQVRSFLGLAGFYRRFVQDFSTIAAPLNALTKKGVPFTWGTSQENAFHMLKDKLTHAPLLQLPDFNKTFELECDASGIGLGGVLLQEGKPVAYFSEKLSGPVLNYSTYDKELYALVRTLETWQHYLWPKEFVIHSDHESLKHIHSQGKLNRRHAKWVEFIESFPYVIKHKKGKENIIADALSRRYTLLTQLDYKIFGLETIKDQYVHDADFNDEAHGGGLMGHFGAKKTHDILASHFFWPQMRRDVGRAVLKKNIKMWEECLPHIEFAYNRSLHSTTKMCPFQIVYGLLPRAPIDLMPLPSSEKLNFDAKQRAELMLKLHETTKENIERMNAKYKFAGDKGRRELNFEPGDLVWLHLRKERFPDLRKSKLMPRADGPFKVLAKINENAYKIDLPADFGVSLTFNVADLKPYLGEEDEFESRTTQMQEGEDDEDINTIDTSMSSHVQHDGPITRARERQLNYQWDKPDHSSDPHPLTGDGDFGDREDKGQICNYISQNQSAFVRKRAIHDNFLYVQNMVKLLHRTKKQSLFIKIDIAKAFDTVNWSYLLEILRQFGFGNRWLNWITNLFSTSSSQVLLNGSPGQKINHARGLRQGDPLSPMLFILAMKPFHRILKEAENVNVLAPLGVRNGRFRCSLYADDVAVFANPKQEELTALSHILACFAQASGLHTNINKTEIYPIRCEGIDLQNLLAGWPGQTKYFPCKYLGLPLHFRKLRKIDFLPLIDKIGSRLPGWKGRFFTSAGRQALVSSVLSAMPTHHLTVLQAPKWVFKRIDRFRRSFLWKGEDPDHSNPGDSLINW

SEQ ID NO: 19310 - protein, 1448 aa, Oryza sativa
  Clone ID: TF_OSC411423j.C1.p3.fg
MDCVVQGVLSQLLSEMPRYKPEYLFGVEGFVQELRTMSFVIGFGTAPFYAQIPHDRHEEKCRVKVTLNSNSEDIPSVMFEAGGRNYIHSCQEVARIAIGELRDRYSDQLADTEYRYHPRQPQGSDRGSYLETEGVENDVTTRHLVEMLWAMDETRAETVLAAQDREDRNRGKICKLEDKVDRLEKELAALKGEAPPQKARIRLTARKRALFVPRYQLAPKVRVVEKEVTPALADPPVIIISDDEEEESKRNHSKIEWVATQDDEDEPNEPSIDLRCSEELECHFPPVSLLVPCPCQMVNTRSNGNGPNNNNNNNNNNNEGNPTLAQVLAQQTQLMNMMMQQLQNQQNQGNNHAPPQNKLAEFLHVRPPIFSSTTNPVEAGDWLHAIEKKLDLLQCTDQEKTHIPSGVVSLKKKEFRSLTQGSHSVTEYLYEFNRLARYAPEDVRNDEERQEKFLEGLNDELSCPLMTGDYPDFQKLVDKAIRQEDKYNRMEQKKRRIAQFKTQQGNNQKPRLTLGPQSMPQGGSSSVVRPQRQFFNNNAGNNIRNQAPCPVAASTQQQPAKREQGSKPVVCFSCGDPGHYADKCSKPRRVKVVPAQSNTTAPAPKARVNHVAAAEAQDAPDVILSTFLVNSVPATVLFDSGATHSFLSMSFAGNHGMEVEDLRRPLMVSTPSNQALSLQRSPSVRIEIQGVPFLANLILLESKDLNVILGMDWLARHKGVIDCANRKVTLTSNDGRVVTVHALSSEFLRSRLNQITLEEIPIVREYPDVFPDDLPGMPPKRDIEFRIDLVPGTTPIHKRPYRMAANELAEVKRQVDDLLQKGYIRPSSSPWGAPLKGATVFSKIDLRSGYHQLRIKEEDILKTAFTTRYGLFECTVMSFGLTNAPAFFMNLMNKVFMEYLDKFVVVFIDDILIYSRTKEEHVEHLRLALEKLREHQLYAKFSKCEFWLSEVKFLGHVISAGGVAIDPSNVESVTNWKQPKTVSEIRSFLGLAGYYRRFIENFSKIAKPMTRLLQKDVKYKWSEECEQSFQELKNRLISAPILILPDPKKGFQVYCDASKLGLGCVLMQDGKVVAYASRQLRPHEKNYPTHDLELAAVVHALKIWRHYLFGTRTEVYTDHKSLKYIFTQPDLNMRQRRWLELIKDYDMGIHYHPGKANVVADALSRKGYCNATEGRPLPFELCKEFERLNLGIVRRGFLAALEAKPTLIDQVREAQINDPDIQEIKKNMRRGKAIGFLEDEQGTVWLGERIFVPDNKDLKDAILKEAHDTLYSIHPGSTKMYQYLKERFWWASMKREIAEYVAVCDVCQRVKAEHRKPAGLLQPLKIPEWKWEEIGMDFITGLPRTSSGHDSIWVIVDRLTKVAHFIPVKTTYSGSRLAELYMARIVCLHGVRKKIVSDRGSQFTSNFWKKLQEEMGSKLNFSTAYHPQTDGQTERVNQILEDMLRVCV

SEQ ID NO: 19311 - protein, 932 aa, Oryza sativa
  Clone ID: TF_OSC423400j.C1.p4.gm
MAAGWMGKVVTRVKCDSQVLRPSVYDHCRTGHPTATNKPEDPTNEDDENEHKNVQAANAILSALSGSEFNRVDDIESAKVIWDTLRNLHEGTDSVRESKVEILKGQFERFVILDGESPSDMYDRLNKIVNEIKGFGSKDMIDEVVVKKMIRAITPRNSILVTIIRERPDYKTLTPYDLLGHTLAHDMLKQESKEVIQFINQSSTTSIKKEDLALKGSSSKHYSNKSSGRHSARVCYMCKEPEHFIADCPHINEEKKKIEKKVEKKEKHKHSKHDHYGQSHLGMIFGSDSESSSSNEEGVATFAVKPSSAPRLFNYSSDEDAPICLMAKKPKVPSSLKSFNVDLVSDEEDDVQDEVMDEELFKSITKESLPHLSEFLGRIEDQYATLERQEALLIREKERSHELKGPQIGTTATFTELGKREKVASVNALCKLFDQPTAIQQWSTVTALISSYATARRRGHGSFPSAASHGCRSGGSRLSACGGAARRRRLWQRHLLPLLRRRQHPGGGPFYLVRQTTASEAVKAATAATADRSSSVVSDGEYYALAQCRADVPAGDCSRCLAACLGVIGGSGDDLCEKAAVRYDDRCLLRFAKGDDFTGFDVDEHTATVFDGGRSGLTVAEEVPTRLLATVAAAAPASRSRTAAGIASYGGGGSLYGLAQCTTQIPAPDCARCLRGALSRLSEDFNSTAAGMQLLRSSCMLRYGSSLFFNQSSPLLPVAHLAIAPAGGGAGPPAAAPPSPGHRPARARTIAISAGQPGYQTLVNSTGKFAERNKLGSGGCGTVYKGILHNNEEIAVKKLTRKDLREVEREVSLVAQLQHENIVKFLGHCFRHDKMFLVYEYLSNGTLSRYFKSDCQKLDWPKWLNIIRGIARGLSYLHRDSGKDIVHRDLKPSNVLLIPTSMQRLLTLILQDHTTGTKAMRALKREQAPSMF

SEQ ID NO: 19312 - protein, 1629 aa, Oryza sativa
  Clone ID: TF_OSC900333j.C1.p19.fg
MAGLEDKDEEGASHSPRTKGIIQYFTRQVKQHTEGLDTDLQVTNEKIGQLESTQISTNTKLTGLETAVARIDTSLAALVRHFDALNAGGNGGGNDDDIDGEYVEDNLEDEYIADTEQDDRDARDRRRLHNNRRGMGGRRRREVRNNDDAFSKIKFKIPPFDGKYDPDAYLSWEIAVDQKFACHEFPENTRVRAATSEFTDFASVWWIEHGKKNPNNMPQTWDALKRVMRARFVPSYYARDLLNRLQQLRQDAKSVEEYYQELQMGLLRCNLEETEDAAMARFLGGLNREIYDIVDYKDYTNMTRLFHLACKAEREVQGRRASAKANFSASKTSSWQTRTTPPAGRTTSPSSTPTTSRAAPPPSGDKSAIKAAQPAPSASSMASTGRMRDVQCHRCKGFGHVQRDCPSKRVLVVKNDGEYSSASDFDDDTLALLAADHADNEPPEEHIGAAFADHYESLIVQRVLSAQMEKAEQNQRHTLFQTKCVVKERCCRMIIDGGSCNNLASSEMVEKLALSTKPHPHPYYIQWLNNSGKAKVTKLVHINFAIGNYHDVVECDVVPMQACNILLGRPWQFDRDSMHHGRSNQYSFLYHDKKIVLHPMSPEDILRDDVAKAAKSKCESDKKAQSDGKKPETINLKPRCLLATKSDINELIASPSVAYALVCKDALISLHDMQHSLPPAVANILQEYSDVFPKEVPPGLPPVRGIEHQIDLIPGASLPNRAPYRTNPEETKEIQRQVHELLDKGYVRESLSPCAVPVILVPKKDGSWRMCVDCRAINNITIRYRHPIPRLDDMLDELSGSIVFSKVDLRSGYHQIRMKLGDEWKTAFKTKFGLYEWLVMPFGLTNAPSTFMRLMNEVLRPFIGKFVVVYFDDILIYSKSMGEHFNHLRAVFNALRDARLFGNLEKCTFCTDRVSFLGYVVTPQGIEVDQAKVEAIQSWPTPKTVSQVRSFLGLAGFYRRFVQDFSTIAAPLNALTKKGVPFTWGTSQENAFHMLKDKLTHAPLLQLPDFNKTFELECDASGIGLGGVLLQEGKPVAYFSEKLSGPVQNYSTYDKELYALVRTLETWQHYLWPKEFVIHSDHESLKHIRSQGKLNRRHAKWVEFIESFPYVIKHKKGKENIIADALSRRYTLLTQLDYKIFGLETIKDQYAHDADFNDVLLHCKDGRTWNKFVINDGFVFRANKLCIPASSVRLLLLQEAHGGGLMGHFGAKKTHDILASHFFWPQMRRDVGRFVARCATCQKAKSRLHPHGLYMPLPVPTVPWEDISMDFVLGLPRTKRGRDSIFVVVDRFSKMAHFIPCHKTDDASHIADLFFREIVRLHGVPNTIVSDRDTKFLSHFWRTLWAKLGTKLLFSTTCHPQTDGQTEVVNRTLSTMLRAVLKKNIKMWEECLPHIEFAYNRSLHSTTKMCPFQIVYGLLPRAPIDLMPLPSSEKLNFDAKQRAELMLKLHETTKENIERVNAKYKFAGDKGRRELNFEPGDLVWLHLRKERFPDLRKSKLMPRADGPFKVLAKINENAYKIDLPADFGVSSTFNVADLKPYLGEEDELESRTTQMQEGEDDEDINTIDTSTSPHVQHDGPITRARARQLNYQDECPRGRVDAHHKFAATIGDGVSVAKAQRLWTVVVEP

SEQ ID NO: 19313 - protein, 62 aa, Oryza sativa
  Clone ID: TF_OSC30329j.C1.p1.np
LSGLKRLCNNSKEPGHFSRDCPQPKRNLRHHSGHYARRRQVTRLVVTGANAVPVRPHVNSNP

SEQ ID NO: 19314 - protein, 1386 aa, Oryza sativa
  Clone ID: TF_OSC401329j.C1.p3.fg
MAGTSSSSNTSTGGYSLMGCIKDIPTLKGDNYAEWKRKLDLAFILGEVDWVLTTPCPIEPTELVRGENESDADWQKRQRDNAPLVMSYDIEQKKWSLANKKCLAVVKNTIEPTILGSIPECDAVSEYLERIKSQFTGSSKTYATQLIKQLVTERYHGGGVRDHILRMSNMASKLKPMDLGITDDFLVHLVMASLPKQFDNFIVNYNISPEKWNFEKLIANCVQEEERIKESNGGSINYVKDKKKNHKSPTSKGKQSQHLPQQQQFAVEKDQCLHCKKTGHYKRDCPDFLKMIMAKKGENIITFVNESHYVGYSRSTWWIDSGATIHACNCLKAFRSTRTTQRRESTIRVANGVEEKVEAVGDFPLELANGFILLLRDVFYVPSLQRNLISVSKLDFDGYDCRFGSGKCELWHNNACIGLAVLRDELYLLSLSENVNVVSSLTKENKKRKGRIERLVKNEILPPLEFSDLEQCIECIKGKFVKSIKKGAKRSAGILEIIHTDICGPFPVKSVDGYDSFITFTDDYSRYGYIYPIKERSEALDKFKIFKAEVENQHDIKIKVVRSDRGGEYYGRHTPYGQVPGPFARFLLENGIVAQYSTPGEPQQNGVAERRNRTLMDMVRSMMSYSTLPLGLWMEALKTAIHILNRVPSKSVPKTPYELWTGRVPSLTHLRVWGSPAEAKVFNPNIGKLDPKTVSCHFIGYPERSKGYRFYCPNSYTKFVETRHAVFLEDEMIRGSSVVREIDLEERRVSVPAPSTQEPFFSLPADVVPAMPVIEVPAPVVTLPVATMNESEEPVIQDSTEMVATPEEELQQSQIDNVPVQETHQEPQVQDVPNVQAPRRSERVRRSAIRDDYKVYNIEESHMEDDPTSYEEAMRSARSSEWLESMKDEMESMKLNDVWDLEEIPKGAKTVGCKWVYKTKYDSRGNIEKFKARLVAKGFTQREGIDYNETFSPVSCKDSFRIIMALVAHYDLELHQMDVKTAFLNGDLEEKVYMAQPKGFVMKGNENMGCRLKRSIYGLKQASRQWYLKFDGTIKKFGFQENVEDNCIYSKFKNGRFIFLILYVDDILLASSDVSLLQETKKFLSSNFDMKDLGEASYVLGIEIHRDRTKYALGLSQKTYIEKVLKKFNMYRCSATPAPIMKGEKYGASQCPRNQYELNEMKTKPYASAVGSLQYAQVCTRPDLAFVTGLLGRFQSNPGLEHWKLVKKVLRYLQGTKGLMLSYRRSESLQIVGYSDSDFAKDNTKSTSGYVFTLAGGAISWKSSKQTITAGSTMYAEFIACYEATGQVNWLKKFIPGLKVVDSIEKPLKLYCDNEPAVMYAHNNQSSGAAKHIDIKYYVVKDKVRDQTISLEHIKTERMLADPLTKGLPPNVFKEHVAGMGLREAL

SEQ ID NO: 19315 - protein, 1296 aa, Oryza sativa
  Clone ID: TF_OSC411956j.C1.p3.fg
MATPSTRSRGYSLMGCIKDIPTLKGDNYAEWKRKLDLAFILGEVDWVLTTPCPIELAELIRGENESDADWQKRQRDNAPLVMSYDIEQKKWSLANKKCLAVVKNTIEPTILGSIPECDAVSEYLERIKSQFTGSSKTYATQLIKQLVTERYHGGGVRDHILRISNMASKLKPMDLGITDDFLVHLVMASLPKQFDNFIVNYNISPEKWNFEKLIANCVQEEERINESNGGSINYVKDKKKNHKSPTSKGKQSQHLPQQQQFAVEKDQCLHCKKTGHYKRDCPDFLKMIMAKKGENIITFVNESHYVGYSRSTWWIDSGATIHACNCLKAFRSTRTTQRRESTIRVANGVEEKVEAVGDLPLELANGFILLLRDVFYVPSLQRNLISVSKLDFDGYDCRFGSGKCELWHNNACIGLAVLRDELYLLSLSENVNVVSSLTKENKKRKGRIERLVKNEILPPLGFSEQCIECIKGKFVKSIKKGAKRSAGILEIIHTDICGPFPVKSVDGYDSFITFTDDYSRYGYIYPIKERSEALDKFKIFKAEVENQHDIKIKVVRSNRGGEYYGRHTPYGQVPGPFARFLLENGIVAQYSTPGEPQQNGVAERRNRTLMDMVRSIMSYSTLPLGLWMEALKTAIHILNRVPSKSVPKTPYELWIGRVPSLTHLRVWGSPTEAKVFNPNIGKLDPKTVSCHFIGYPERSKGYRFYCPNSYTKFVETRHAVFLEDEMIRGSSVVREIDLEERRVSVPAPSTQEPFFSLPADVVPAMPVIEVPTPVVTPPVATMNESEEPVIQDSTEMVATPEEELQQPQIDNVPVQETHQEPQVQDVPNVQAPRRGNIEKFKARLVAKGFTQREGIDYNETFSPVSCKDSFRIIMALVAHYDLELHQLDVKTAFLNGDLEEKVYMAQPKGFVMKGNENMGCRLKRSIYGLKQASRQWYLKFDGTIKKFGFQENVEDNCIYSKFKNGRFIFLILYVDDILLASSDVSLLQETKKFLSSNFDMKDLGEASYVLGIEIHRDRTKYALGLSQKTYIEKVLKKFNMYRCSATPAPIMKGEKYGASQCPRNQYELNEMKTKPYASAVGSLQYAQVCTRPDLAFVTGLLGRFQSNPGLEHWKLVKKVLRYLQGTKGLMLSYKRSESLQIVGYSDSDFAKDNTKSTSGYVFTLAGGAISWKSSKQTITAGSTMYAEFIACYEATGQVNWLKKFIPGLKVVDSIEKPLKLYCDNEPAVMYAHNNQSSGAAKHIDIKYYVVKDKVRDQTISLEHIKTERMLADPLTKGLPPNVFKEHVAGMGLREAL

SEQ ID NO: 19316 - protein, 1693 aa, Oryza sativa
  Clone ID: TF_OSC414037j.C1.p3.fg
MAGTSSSSNTSTGGYSLMGCIKDIPTLKGDNYAEWKRKLDLAFILGEVDWVLTTPCPIEPTELVRGENESDADWQKRQRDNAPLVMSYDIEQKKWSLANKKCLAVVKNTIEPTILGSIPECDAVSEYLERIKSQFTGSSKTYATQLIKQLVTERYHGGGVRDHILRMSNMASKLKPMDLGITDDFLVHLVMASLPKQFDNFIVNYNISPEKWNFEKLIANCVQEEERIKESNGGSINYVKDKKKNHKSPTSKGKQSQHLPQQQQFAVEKDQCLHCKKTGHYKRDCPDFLKMIMAKKGENIITFVNESHYVGYSRSTWWIDSGATIHACNCLKAFRSTRTTQRRESTIRVANGVEEKVEAVGDFPLELANGFILLLRDVFYVPSLQRNLISVSKLDFDGYDCRFGSGKCELWHNNACIGLAVLRDELYLLSLSENVNVVSSLTKENKKRKGRIERLVKNEILPPLEFSDLEQCIECIKGKFVKSIKKGAKRSAGILEIIHTDICGPFPVKSVDGYDSFITFTDDYSRYGYIYPIKERSEALDKFKIFKAEVENQHDIKIKVVRSDRGGEYYGRHTPYGQVPGPFARFLLENGIVAQYSTPGEPQQNGVAERRNRTLMDMALKTAIHILNRVPSKSVPKTPYELWTGRVPSLTHLRVWGSPAEAKVFNPNIGKLDPKTVSCHFIGYPERSKGYRFYCPNSYTKFVETRHAVFLEDEMIRGSSVVREIDLEERRVSVPAPSTQEPFFSLPADVVPAMPVIEVPAPVVTLPVATMNESEEPVIQDSTEMVATPEEELQQSQIDNVPVQETHQEPQVQDVPNVQAPRRSERVRRSAIRDDYKVYNIEESHMEDDPTSYEEAMRSARSSEWLESMKDEMESMKLNDVWDLEEIPKGAKTVGCKWVYKTKYDSRGNIEKFKARLVAKGFTQREGIDYNETFSPVSCKDSFRIIMALVAHYDLELHQMDVKTAFLNGDLEEKVYMAQPKGFVMKGNENMGCRLKRSIYGLKQASRQWYLKFDGTIKKFGFQENVEDNCIYSKFKNGRFIFLILYVDDILLASSDVSLLQETKKFLSSNFDMKDLGEASYVLGIEIHRDRTKYALGLSQKTYIEKVLKKFNMYRCSATPAPIMKGEKYGASQCPRNQYELNEMKTKPYASAVGSLQYAQVCTRPDLAFVTGLLGRFQSNPGLEHWKLVKKVLRYLQGTKGLMLSYRRSESLQIVGYSDSDFAKDNTKSTSGYVFTLAGGAISWKSSKQTITAGSTMYAEFIACYEATGQVNWLKKFIPGLKVVDSIEKPLKLYCDNEPAVIIVLEKKTFLVERFDKYVKTLGSGIHVLAPLVDHIAYVHSLKEEAIPIPDQSAITKDNISIQIDGVLYVKNFWGNFKLHVLDEALLAFKKAVTTSDGIFLNWREQDVDPCNWKDVRCDSHTKRLKARRGSVSWESGVRCFSIGPSELVARGSKVWLSTRAGGHLEAGGVDDAEGGDGDPGGPAGRLPLAARGGEGDEQCAGGEEAKLGDEEGARLGYDPLHGHHGRAPEEEGRHQRRPLPPLPPHECRRGRDAILLLGDPREAFDEALDVRARADAVNRVRRGGRHRLAAEGFRTWAVVDVALNVGGPCRRSQPRHRVRRRVAGRGRRREPPRDVARHGHRAGRSRQWRAGGWSTAGRGKTEYGGAGVRRGGAALTEGGGGREWRQRREWTG

SEQ ID NO: 19317 - protein, 723 aa, Oryza sativa
  unsure (1)..(723): unsure at all Xaa locations
  Clone ID: TF_OSC100686j.C1.p4.np
VKTGNDPRASNDARGSEEQTDGAHISGASDSSSSPPPENPTVTQMMTMMIQQMQQHYHQMLQQAQQNQQQAQQNQQSGPPSSQSKLLDFHHIQPPTFSSTTNPMXANDWLRAIEKKLNLLQCNDQEKVAFATHQLQGPASAWWDNYVVTRPDSTEVTWAEFCQSFRKAQIPEGIMAQKKREFRALHQETRIVTEYLHEFNRLARYAPKDVRTDAEKQEKFLFGLDDKLTNQLISGVYDDFEKLVDKAIRQEEQRNKMDRNRKVAQISFPQGNNXKPRFMTGQLGEPSTLIIRQHHPYHPSNFNNDYNGGSHNNSKQHNHNSTSPPLMAPAQSDPPAMSAQSEQLKKESAGKPRPCFNCGKHGHFAGKCPKLKRVGPRFVQARVNHASAEKAQASPEVVLGTFPVNSYPATVLFDSGASHSFISKRFAGAHGLSVVELKILMQVHTPGNDMRTAHYCPSVTIEIKRSRFLSNLILLESKDLDVILGMDWLTRHKGVIDCASRTITLSNDKGEKITFRSPVSQKSVASLNQAVIEDQTEIAEKNPKKLEDIPIVQEYPEVFPEGLTTMPPKREIEFQIDLAPGTAPIYKRPYRMAANELAEVKKQVDEQLQKGYIRPSTSPWGAPVIFVEKKDKTKRMCVDYRALNEVTIKNKYPLPRIDDLFDQLKGAKVFSNIDLRSGYHQLRIREEDIPKTAFATRFALFSPTPEEFSDTNEKTNFITRLKT

SEQ ID NO: 19318 - protein, 1244 aa, Oryza sativa
  Clone ID: TF_OSC21389j.C1.p4.fg
MEANDWLRAIEKKLNLLQCNDQEKVAFATHQLQGPASAWWDNYVVTRPDATKVTWVEFCQNFRKAQIPEGIVAQQKREFRALQQGTRTVTEYLHEFNRLARYAPEDVRTDAEKQEKFLFGLDDELTNQLISGVYEDFEKLVDKAIRQEEQRNKMDRKRKAAQISFPQGNNQKPRFMTGQLGGPSTLIVCQHRPYHPSNFNNDYNGGSHNNSKQHNHNSTPPLLMAPAQSDLPAVSAQSEQPKKGAVGKPRPCFNCGKHGHFAGKCPKLNRTGPRFIQAHANHVSAEEAQAAPEVVLGTFPVNSYPATVLFDSGASHSFISKRFAGTHGLSVVELKIPMQVHTPGNDMRTAHYYPSVTIEIKRSPFLSNLILLESKDLDVILGMDWLTRNKGVIDCASRTITLTNDKGEKITFRSPASQKSVASLNQAAIEGQTETVEKSPRKLEDIPIVQEYPEVFPEDLTTMPPKREIEFRIDLAPGTAPIYKRPYRMTANELAEVKKQVDEQLQKGYIRPSTSPWGAPVIFVEKKDKTKRMCVDYRALNEVTIKNKYPLPRIDDLFDQLKGAKVFSKIDLRSGYHQLRIREEDIPKTAFTTRYGLFECTVMSFGLTNEPAFFMNLMNKVFMEFLDKFVVVFIDDILIYSKSEEEHEQHLRLVLEKLKEHQLYAKFSKCDFWLSEVKFLGHIISAQGVAVDPSNVESVTKWTPLKTVSQIRSFLGLAGYYRRFIENFSKIARPMTQLLKKDEKFKWSAECNQSFEELKKRLVSAPVLILPDQTKDFQVYYDASRQGLGCVLMQEGRVVAYASRQLRPHETNYPTHDLELAAVVHALKIWRHYLIGNRCEVYTDHKSLKYIFTQPDLNLRQRRWLELIKDYDMGIHYHPDKANVVADALSRKSYCNALCTEDMCGKLQQDLEHLNLGIVEHGTKMYQDLKEKFWWASMRREIAGFVALCDVCRRVKAEHQRPAGLLQPLQIPEWKWEEIGMDFITGLPRTSSGHDSIWVVVDRLTKVAHFIPVHTTYTGKSYQASLQMAPFKALYGRKCRTPIFWDQIGERQLFGTEVLTEAEEKVRTVRERLRIAQSRQKSYADNRRRELTFEAGDYVYLRVTPLRGVHRFQTKGKLAPRFVGPYRILERRGEVAYQLELPSNMVGIHDVFHVSQLKKCLRVPEEQASSEHIDIQEDLTYVEKPICILETSERWTRNKVIRFCKVQWSHHSEEEATWEREDELKAAHPHLFASSSESRGRDSV

SEQ ID NO: 19319 - protein, 1240 aa, Oryza sativa
  Clone ID: TF_OSC400910j.C1.p23.fg
MASGSGEGKGRRHQDNIPSVVLLELWGHVADDDHRPDATTATSTTSTGLPISVTLCAATPPSLSHLSVDCPGLVDLDPNPLDKFVAPTVISTDADLVLLRVPVDRFARFDHCFSDYFVYKVHSHSESAKLHRLPSPRGRGFADDNIAILSCGNDDDDSYAVAALQPLHHVHFRLHLCRSTPDGKPGSWTSHQLTVEEPLRGTVCPVPDSALRRIFHATTKVITLGGAKGTVGWVDLWRGILLCDVLDEIESPKLRDLPLPLPSTGNWPLFLNRCPYYCRDIVVNQSRDTIKYVEMEFTILNSSQDPRSSYHEWVASQEFRSSHLDILVDDGSLKINTWNMPIPIFSQLFASNLEEKGIPLPTTRGAAKMVFTLNMRARVLEELEKLHSMSHLGFMRCFLSTGISKHLKPTVGKQNGVGSCHAQKFPNRIPSRMCIKIPVQDQPGMQRYEPIEQLPQHLQFRPQFLQLQFQLPRSLSPSLQHQPPGVQPVAPEMVYTRTGSRATGEGSNGEERADGVHPNSDSGNGPPPLPENPTLAQVMAHQTQMMAAMMQQMQQQHQQMHQRMMQHAEQQHQQFGPPPPQSKLPEFLRVRPPTFSSTTNPMEANDWLHAIEKKLNLLQCNDQEKVAFATHQLQGPASAWTVTEYLHEFNRLARYAPEDVRTDAEKQEKFMAGLDDELTNQLISGDYADFERLVDKAIRQEDQRNKMDRKRKAAQFRAHQGSHQRPRFTPGQQGGPTTMIVRQHRPFNPSNFHQGTSGSQNHHGGQPNRGAAPRPSVAPAQSGQPAQAKKETGAKPGSCFNCDELGHFADKCPKPRRAGPRFIQARVNHASAEEAQAAPEVVLGTFPVNSIPATVLFDSSATHSFISKKFVGMHGLIREELSTPMRVHTPGNSSTSVQFSPSITIEIQRSPFLANLILLESKDLNVILGMDWLTKFKGVIDCASRTVTLTNEKGETVIETEIPVDTVEKNLRKLEDIPIVCEYPEVFPEDLTTMPPKREIEFRIDLAPGTAPIYKRPYRMAANELAEVKKQVDEQLQKGYIRPSTSPWGAPVIFVEKKDKTKRMCVDYRALNEVTIKNKYPLPRIDDLFDQLNGAKVFSKIDLRSGYHQLRIREEDIPKTAFTTRYGLYECTVMSFGLTNAPAFFMNLMNKVFMEFLDKFVVVFIDDILIYSKSEEEHEQHLRLVLEKLKEHQLYAKFSKCDFWLTEVKFLGVTGAPVASLVFCKVNVQPSSHMSRPEIH

SEQ ID NO: 19320 - protein, 645 aa, Oryza sativa
  Clone ID: TF_OSC5283j.C1.p1.fg
MSAQSKQLKKESAGKPRPCFNCGKHGHFAGKCPKLKRIGPRHKGVIDCASRTITLTNDKGEKITFRSPTKIAEKNPKKLEDIPIVQEYPEVFPEDLTTMPPKREIKFRIDLAPGTAPIYKRPYRMAANELAEVKKQVDEQLQKGYIRPSTSPWGAPVIFVEKKDKTKRMCVDYRALNEVTIKNKYPLPRIDDLFDQLKGAKLRIREEDIPKTAFTTRYGLFECTVMSFGLTNAPAFFMNLMNKVFMEFLDKFVVVFIDDILIYSKSEEEHEQHLCLVLEKLKENQLYAKFSKCDFWLSEVKFLGHVITAQGVVVDPSNMESVTKWTPPKTVSQIRSFLGLVGYYRRFIENFSKIARPMTQLLKKDEKLKWSAKCNQSFEELKKSNYPTHDLELAAVVHALKIWRHYLIGNRCEVYTDHKSLKYIFTQPDLNLRQRRWLELIKDYDMGIHYHPGKANVVADALSRKSYCNAVCTEGMCDKLQQDLEHLNLGIVEHGYVAALEARPTLVDQVRAAQVNDPEITELKKNMRVGKARDFHEDEHGTIWLGERLCVPDDKEFKDLILTEVHQTQYSIHPGSTKMYQDFKEKFWWVSMRREIAEFVALCDVCQTNVPSLGGNTLAPAGDERLEALVLTGWGEACVRLPVAT

SEQ ID NO: 19321 - protein, 749 aa, Oryza sativa
  Clone ID: TF_OSC5418j.C1.p1.fg
MWALRGCTGRWNPKKLEDIPIVQEYPEVFPEDLTTMPPKREIEFQIDLAPGTAPIYKRPYRMAANELAKVKKQVDEQLQKGYIRPSTSPWGAPVIFVEKKDKTKRMCVDYRALNEVTIKNKYPLPRIDDLFDQLKGAKMVKTGNDPRASNDARGSEEQTDGAHISGASDSSSSPPPENPTANDWLRAIEKKLNLLQCNDQEKVAFATHQLQGPASAWWDNYVVTRPDSTEVTWAEFCQSFRKAQIPEGIMAQKKREFRALHQETRIVTEYLHEFNRLARYAPKDVRTDAEKQEKFLFGLDDKLTNQLISGVYDDFEKLVDKAIRQEEQRNKMDRNRKLGEPSTLIIRQHHPYHPSNFNNDYNGGSHNNIRSASYVSSVRQLKKESAGKPRPCFNCGKHGHFAGKCPKLKRVGPRFVQARVNHASAEKAQASPEVVLGTFPVNSYPATVLFDSGASHSFISKRFAGAHGLSVVELKILMQVHTPGNDMRTAHYCPSVTIEIKRSRFLSNLILLESKDLDVILGMDWLTRHKGVIDCASRTITLSNDKGEKITFRSPVSQKSVASLNQAVIEDQTEIAEKNPKKLEDIPIVQEYPEVFPEGLTTMPPKREIEFQIDLAPGTAPIYKRPYRMAANELAEVKKQVDEQLQKGYIRPSTSPWGAPVIFVEKKDKTKRMCVDYRALNEVTIKNKYPLPRIDDLFDQLKGAKVFSNIDLRSGYHQLRIREEDIPKTAFATRSCSLFPHTRVEVLLS

SEQ ID NO: 19322 - protein, 767 aa, Oryza sativa
  Clone ID: TF_OSC5447j.C1.p2.fg
MWALRGCTGRWNPKKLEDIPIVQEYPEVFPEDLTTMPPKREIEFQIDLAPGTAPIYKRPYRMAANELAKVKKQVDEQLQKGYIRPSTSPWGAPVIFVEKKDKTKRMCVDYRALNEVTIKNKYPLPRIDDLFDQLKGAKMVKTGNDPRASNDARGSEEQTDGAHISGASDSSSSPPPENPTANDWLRAIEKKLNLLQCNDQEKVAFATHQLQGPASAWWDNYVVTRPDSTEVTWAEFCQSFRKAQIPEGIMAQKKREFRALHQETRIVTEYLHEFNRLARYAPKDVRTDAEKQEKFLFGLDDKLTNQLISGVYDDFEKLVDKAIRQEEQRNKMDRNRKLGEPSTLIIRQHHPYHPSNFNNDYNGGSHNNSKQHNHNSTSPPLMAPAQSDPPAMSAQSEQLKKESAGKPRPCFNCGKHGHFAGKCPKLKRVGPRFVQARVNHASAEKAQASPEVVLGTFPVNSYPATVLFDSGASHSFISKRFAGAHGLSVVELKILMQVHTPGNDMRTAHYCPSVTIEIKRSRFLSNLILLESKDLDVILGMDWLTRHKGVIDCASRTITLSNDKGEKITFRSPVSQKSVASLNQAVIEDQTEIAEKNPKKLEDIPIVQEYPEVFPEGLTTMPPKREIEFQIDLAPGTAPIYKRPYRMAANELAEVKKQVDEQLQKGYIRPSTSPWGAPVIFVEKKDKTKRMCVDYRALNEVTIKNKYPLPRIDDLFDQLKGAKVFSNIDLRSGYHQLRIREEDIPKTAFATRSCSLFPHTRVEVLLS

SEQ ID NO: 19323 - protein, 335 aa, Oryza sativa
  Clone ID: TF_OSC900148j.C1.p3.fg
MAASQPSVHGENHDEPDSPITRAEVQQIGNNLLQAMEHLLNARLPAAGGGAVQPPFGDPKDDIVDAQSADVADSELHGPPNGGGRGFVAAGARGGENDLEQQHARPCRGAVLGNGEHHRGHHDRDDSDNVARMFPYNTLQDLLDQAQCTERSIQQEWRNWFSSGRSNAAPWRRTQQATTFVGNHSQGASTRASPPAATAKPQPSSASSPAACTESRRPTAPTPTSSSRSRDIVCHKCQGHGHIAAECPSRRTMLVTETGEWESASETKDDSLREDEMVNKQADSDAIQVDNGDNNCFISRRVLSVQVAKEDNGQRHNIFHTRAATTLLVWSWWKD

SEQ ID NO: 19324 - protein, 1458 aa, Oryza sativa
  Clone ID: TF_OSC400150j.C1.p3.fg
MPKMVVEVADRYTARRDGRPNNSGEADGEVRGDVPAKPRAGRGGGRCGVAEGGDGDVGRRSGAATGAAGGDVDEEEGEAGAGDGVPAKFGRGGGDAGEEGDAAVSKEETAASIGAPAMNSSRLEGVQWHQCHWLPAGAPFRRVSGEETMPPHSPRNLIKVLGFVRELRLMAFEVGYEVAPEYRRISHDPNEEKCRVRVTLASDREDLPSIKFEAGGRSYSHACQEAALVAIGELRQRFEEELDSSAFYAMDAVSVERDKAAHDRENWNRGKICKLESKLASKIRVMGEVVPDRAEPVIDIMVNTRTGSGSGAANNGGDPTLAQILAQQTQLINLLVQQAQNQQANNQNQNPPPPPQNKLADFLRVRPPTFSSTTNPVEAGDWLHAVEKKLDLIQCTEQEKVSFASHQLHGPAAEWWDHFRQGRAEGEPITWQEFTAAFKKTHIPTGVVALKKREFRALNQGSRSVTEYLHDFNRLARYAPEDIRTDEERQEKFLEGLNDELSYALMSTDFRDFQQLVDKAIRQEDKYNRMEQKKRRAAQFKAQQGSNQRPRLVTGPQAPSYPQGGSSSVVRPQRQFYDNNTGNRGNDNRNMVARPAATPAQNQPVRKEQGSKPGVCFNYGDPGHYADKCPKPRRVKNAPAPNNSNAPAPKARVNHVAAAEAQNAPDVVLEIEEVPFPSSLILLESKDLDVILGMDWLSRHRGVIDCANRKVTLTSSNGETVSFFVSSPKYHGVFLNQVALQEIPIVQDYPDVFPEDLLGMPPKRDIEFRIDLVPGTNPIHKRPYRMAANELAEVKRQVDDLLQKGYIRPSTSPWGAPVIFVEKKDHTQRMCVDYRALNEVTIKNKYPLPRIDDLFDQLEGATVFSKIDLRSGYHQLRIREEDIPKTAFTTRYGLFECTVMSFGLTNAPAFFMNLMNKVFMEYLDKFVVVFIDDILIYSKTKEEHEEHLRLALEKLREHQLYAKFSKCEFWLSEVKFLGHVISSGGVAVDPSNVESVLSWKQPKTVQKFRSFLDLAGSEVQVDRDCEQSFQELKKRLVTAPVLFLPDSRKSFQVYCDASRLGLGCVLMQEGKVVAYASRQLRPHENNYPTHDLELAAVVHALKIWRHYLFGNRTEMYTDHKSLKYIFTQPDLNMRQRRWLELIKDYDMEIHYHPGKANVVADALSRKSYCNMSEGRHLPWELCQEFEKLNLDIVSKGFVATLEAQPTLFDQVREAQVNDPDIQEIKKNMRRGKAIGYVVDEQGTVWLGERICVPDNKELKDTIMKEAHETLYSIHPGSTKMYQDLKQQFWWASMRREIAEYVALCDVCQRVKAEHQKPAGLLQPLKIPEWKWEEIGMDFITGLPRTSAGHDSIWVVVDRLTKVAHFIPVKTTYTGNKLAELYMARVVCLHGVPKKIVSDRGSQFTSKFWQKLQVEMGTRLNFSTAYHPQTDCHARKFTSNFRTYLCIKSSSRNQPRYTN

SEQ ID NO: 19325 - protein, 153 aa, Oryza sativa
  Clone ID: TF_OSC405457j.C1.p1.gm
SKGGELQGVTNRMERKKRRIAHFKAQQGNSQRPRLTLGPQSMPQGGSSSVVRPQRQFFNNNAGNNIRNQAPRPVAASTQQQPAKKEQGIKPGVCFNYGDPGHYADKCPKPRRVKIVPAQSNSTAPASKARVNHVAAAEAQGMINGNLWETWNA

SEQ ID NO: 19326 - protein, 1867 aa, Oryza sativa
  Clone ID: TF_OSC102121j.C1.p13.fg
MATTGTATGAERGGGTARVDGDGGVPAVGDRNGEVDEVGEDAAKLKEAVPKREMVRGNDGGEPELGGDGGERGRRRELDSDGERERRVAETVERGTGSVYIEPGAREGGRGREETGAGENDFYFGMNLSGRDTHGVDYQGKPVPEQEGDDAEPVAAWEVTAVILSGSPERTSLAVTAGGDSFSAACQNAALLAIGTLHQRYPDELQHSPYRYHPRRGGARDYATFRDASSEDDATIMHLARMVEAYDAARIDFHQMVRRGMVDNNMKILELRQENLQLKKDLDVLEAQLCQLKVAQGEVCRPKRRRVCRSQKITARKSTSRPELVCQSLAWTCFVETPRAEPAPVVPQEGEASGVGSTEDALLLTFRPGPSQRVVWGMVMPMVTTRRSANTGDGHQPEGSNLNNHGSPPPPPPPPPPPPPDTNAILTQILAQQANMMAAFLHHIQNPPQHNAPPPPPPPQHSKLAEFLRIRPPTFSSSNNPVDALDWLHAVGKKLDTVQCNDEEKATQPEGQPITWARFTAAFRRTHVPAGVMALKKRAFRELKQGNRSVMEYLHEFNNLARYAPEDVREDEEKQEKFLAGMDPELSVRLISGDYPDFQRLVDKSIRLEAKHKELESHKRRLANFRNQQGANQRVRYTNPYPGGSSSQQQQQQPPSAPRPQFVVRVPQPQQPQGQQGTRAPRPPAPAVQPGQGHRDVQGQQSLCFNCFEPGHFADKCPKPRRQQGQAPPRSNNGGKDVIRGRVNHVTAEDVLTTPDVIVGTFLIHSTPATILFDSGASHSFISVPFVGRNQLGVERLRNPMLITTPGGVMTAKYYSPAVPIEIQGIPFPSDLILLDTKNLDVILGMNWLAQFQGVVDCARRTVTLHRGPEQPVVLFAPPTSVSSSELHQIGLLEIPIVREFGDVFPEELPGMPPKREIEFRIDLAPGTTPLYKRPYRMAANELAEIKKQLEELKEKGYIRPSTSPWGAPVIFVEKKDKTKRMCVDYRALNEVTIKNKYPLPRIDDLFDQLKGATVFSKIDLRSGYHQLRIREEDIPKTAFTTRYGLYEFTVMSFGLTNAPAFFMNLMNKVFMEYLDKFVVVFIDDILVYSQSEEDHQQHLRLVLGKLREHQLYAKLSKCEFWLSEVKFLGHVISAKGVAVDPETVTAVTDWKQPKTVTQIRSFLGLAGYYRRFIENFSKIARPMTQLLKKEEKFVWSPQCEKAFKTLKEKLVSSPVLILPDTRKDFLVYCDASRQGLGCVLMQEGHVVAYASRQLRPHEGNYPTHDLELAAVVHALKIWRHYLIGNRCEIYTDHKSLKYIFTQSDLNLRQRRWLELIKDYDVGIHYHPGKANVVADALSRKSRCNTLGVRGIPLELNQQLEALNLSIVSHGFLATLEAKPTLLDQIREAQKNDLDMHGILKNMKQGKAAGFTEDEHGTLWNGNRVCVPDVRELKQLILQEAHESPYSIHPGSTKMYLDLKEKYWWVSMKREIAEFVALCDVCQRVKAEHQRPAGLLQPLQVPEWKWDEIGMDFITGLPKTQGGYDSIWVVVDRLTKVARFIPVKTTYGGNKLAELYFARIVSLHGVPKKIVSDRGSQFISHFWKKLQEELGTRLNFSTAYHPQTDGQTERLNQILEDMLRACVLDFGKTWDNSLPYAEFSYNNSYQASIQMAPYEALYGRKCRTPLLWDQVGESQVFGTDILREAEAKVRTIWENLKVAQSRQKSYADNRRRDLEFAVDDFVYLRVTPLRGVHRFQTKGKLAPRFVGPFRITARRGEVAYQLELPASLGNVHDVFHVSQLKKCLRVPSEQADSEQIEVREDLTYVERPVKILDTMERRTRNRVIRFCKVQWSNHAEEEATWEREDELKAAHPDLFASSSESRGRDSV

SEQ ID NO: 19327 - protein, 1859 aa, Oryza sativa
  unsure (1)..(1859): unsure at all Xaa locations
  Clone ID: TF_OSC19731j.C1.p2.np
RPGPTWQPRGAPEGGLAGTADGRRRARAPMVAGGGHRHGGAAAERGEGRGKRNGRSMAHPGSMATTGTATGAERGGGAARVDGDGGVPAVGDRNGEVDEVGEDAAKPKEAVPKREMVRGNDGGEPELGGDGGERGRRRELDSDGERERRVAETVERGTGSVYIEPGARGMNLSGRDTHGVDYQGKPVPEQEGDDAEPVAAWEVTAVILSGSPERTSLAVTAGGDSFSAACQNAALLAIGTLHQRYPDELQHSPYRYHPRRGGARDYATFRDASSEDDATIMHLARMVEAYDAARIDFHQMVRRGMVDNNMKILELRQENLQLKKDLDVLEAQLCQLKVAQGEVCRPKRRRVCRSQKITARKSTSRPELVCQSLAWTCFVETPRAEPAPVVPQEGEASGVGSTEDALLLTFRPGPSQRRSANTGDGHQPEGSNLNNHGSPPPPPPPPPPPPPDTNAILTQILAQQANMMAAFLHHIQNPPQHNAPPPPPPPQHSKLAEFLRIRPPTFSSSNNPVDALDWLHAVGKKLDTVQCNDEEKVIFATHQLQGPASLWWDHFXATQPEGQPITWARFTAAFRRTHVPAGVMALKKRAFRELKQGNRSVMEYLHEFNNLARYAPEDVREDEEKQEKFLAGMDPELSVRLISGDYPDFQRLVDKSIRLEAKHKELESHKRRLANFRNQQGANQRVRYTNPYPGGSSSQQQQQQPPSAPRPQFVVRVPQPQQPQGQQGTRAPRPPAPAVQPGQGHRDVQGQQSLCFNCFEPGHFADKCPKPRRQQGQAPPRSNNGGKDVIRGRVNHVTAEDVLTTPDVIVGTFLIHSTPATILFDSGASHSFISVPFVGRNQLGVERLRNPMLITTPGGVMTAKYYSPAVPIEIQGIPFPSDLILLDTKNLDVILGMNWLAQFQGVVDCARRTVTLHRGPEQPVVLFAPPTSVSSSELHQIGLLEIPIVREFGDVFPEELPGMPPKREIEFRIDLAPGTTPLYKRPYRMAANELAEIKKQLEELKEKGYIRPSTSPWGAPVIFVEKKDKTKRMCVDYRALNEVTIKNKYPLPRIDDLFDQLKGATVFSKIDLRSGYHQLRIREEDIPKTAFTTRYGLYEFTVMSFGLTNAPAFFMNLMNKVFMEYLDKFVVVFIDDILVYSQSEEDHQQHLRLVLGKLREHQLYAKLSKCEFWLSEVKFLGHVISAKGVAVDPETVTAVTDWKQPKTVTQIRSFLGLAGYYRRFIENFSKIARPMTQLLKKEEKFVWSPQCEKAFKTLKEKLVSSPVLILPDTRKDFLVYCDASRQGLGCVLMQEGHVVAYASRQLRPHEGNYPTHDLELAAVVHALKIWRHYLIGNRCEIYTDHKSLKYIFTQSDLNLRQRRWLELIKDYDVGIHYHPGKANVVADALSRKSRCNTLGVRGIPLELNQQLEALNLSIVSHGFLATLEAKPTLLDQIREAQKNDLDMHGILKNMKQGKAAGFTEDEHGTLWNGNRRVKAEHQRPAGLLQPLQVPEWKWDEIGMDFITGLPKTQGGYDSIWVVVDRLTKVARFIPVKTTYGGNKLAELYFARIVSLHGVPKKIVSDRGSQFISHFWKKLQEELGTRLNFSTAYHPQTDGQTERLNQILEDMLRACVLDFGKTWDNSLPYAEFSYNNSYQASIQMAPYEALYGRKCRTPLLWDQVGESQVFGTDILREAEAKVRTIWENLKVAQSRQKSYADNRRRDLEFAVDDFVYLRVTPLRGVHRFQTKGKLAPRFVGPFRITARRGEVAYQLELPASLGNVHDVFHVSQLKKCLRVPSEQADSEQIEVREDLTYVERPVKILDTMERRTRNRVIRFCKVQWSNHAEEEATWEREDELKAAHPDLFASSSESRGRDSV

SEQ ID NO: 19328 - protein, 905 aa, Oryza sativa
  Clone ID: TF_OSC29055j.C1.p1.gm
MALKKRAFRELKQGNRSVMEYLHEFNNLARYAPEDVREDEEKQEKFLAGMDPELSVRLISGDYPDFQRLVDKSIRLEAKHKELESHKRRLANFRNQQGANQRVRYTNPYPGGSSSQQQQQQPPSAPRPQFVVRVPQPQQPQGQQGTRAPRPPAPAVHPGQGHRDVQGQQSLCFNCFEPGHFADKCPKPRRQQGQAPPRSNNGGKDVIRGRVNHVTAEDVLTTPDVIVGTFLIHSTPATILFDSGASHSFISVPFVGRNQLGVERLRNPMLITTPGGVMTAKYYSPAVPIEIQGIPFPSDLILLDTKNLDVILGMNWLAQFQGVVDCARRTVTLHRGPEQPVVLFAPPTSVSSSELHQIGLLEIPIVREFGDVFPEELPGMPPKREIEFRIDLAPGTTPLYKRPYRMAANELAEIKKQLEELKEKGYIRPSTSPWGAPVIFVEKKDKTKRMCVDYRALNEVTIKNKYPLPRIDDLFDQLKGATVFSKIDLRSGYHQLRIREEDIPKTAFTTRYGLYEFTVMSFGLTNAPAFFMNLMNKVFMEYLDKFVVVFIDDILVYSQSEEDHQQHLRLVLGKLREHQLYAKLSKCEFWLSEVKFLGHVISAKGVAVDPETVTAVPDWKQPKTVTQIRSFLGLAGYYRRFIENFSKIARPMTQLLKKEEKFVWSPQCEKAFKTLKEKLEGHVVAYASRQLRPHEGNYPTHDLELAAVVHALKIWRHYLIGNRCEIYTDHKSLKYIFTQSDLNLRQRRWLELIKDYDVGIHYHPGKANVVADALSRKSRCNTLGVRGIPLELNQQLEALNLSIVSHGFLATLEAKPTLLDQIREAQKNDLDMHGILKNMKQGKAAGFTEDEHGTLWNGNRPFVMCASVSRQSTNDRPDFSNLSKYQNGNGMKLGWILSLDFQKPK

SEQ ID NO: 19329 - protein, 461 aa, Oryza sativa
  Clone ID: TF_OSC400193j.C1.p3.fg
MARRSTRQIRAPNRFGFEEEPVQPEIPDQPVNQADEQEAESDHMAVSGSVNDVSRGNRPPPVDFHQHMAMQTHIIQGMVQNIIAMQQQHTQERQPHMVQDDGQSKLNDFLGSRPPEFSQTNEPIEADDWIKDMERKLNLVQCTPQEKTLYAAHQLRGPAADWWDNYCATHTDASTIVWTEFAGAFRSAHIPESIIDLKKEEFANIKQGSSCINEYLSRFNRLARYAPEDVDTDKKKIRKFLKGMDAKLQVKLLAHDFPTFQQMVDKSLLLEDAEEEMQEYKRRKVMSLEIQAKEGLCRKTNLPAQYYQRASQHSNGSGSTSRSTMSEPGQQATMINSNSHEGSNSVPCPTPSKRRGYKAGVECFICHEMGHYSWDCPQKAKIKCLHKVKTKPVQPTTILPNIPGSKGSKSPNSGSASLTSLPVGQGRLNHVQVETNEKVVNLEQVEGAGEEQVPQARAKPQ

SEQ ID NO: 19330 - protein, 377 aa, Oryza sativa
  Clone ID: TF_OSC400601j.C1.p74.fg
MPLSSQLPLVGSQDQNQYVFDRAFATQVDKLPMPEEDVPFCHDCRERGHCALNCPWVYAKEAPSFGLAGQTSLNQPPHTKSSLQPSVQSREPNGENPWNPGKCFPPSLSYHVGSRTKQAKRKKSKNQKRKAPMRTEEEVCKMTITSTEWPPAGITIPRRQRGNTFRGARQLTQHLLSHGGRVSDSEGSDQVSSDDEDESPRHLGEEEMESKACTRCGEIGHIASMCLTLCSYCEEDHPPGECPTRKVTCFLCEGTNHVPKDCQLSVLLTKTAEIQRTTLRLSHQLVSSNSNIDDIIHSTNAPPAAPDSAINHSNNTFSTNHSLHRQPQQRFVIDRRSCVSPRPTPGRAKGNQPQEDDTKQKTVIRFNQQSEGSFPCE

SEQ ID NO: 19331 - protein, 542 aa, Oryza sativa
  Clone ID: TF_OSC401916j.C1.p3.fg
MRYPWVGLGKALSRTSDTGQCLDWTLGVRENEKGSGSRLIKWNGSGKPRSNDLTRETVGSAAAVVVGVRLVRVVGCILGLSELQPKLSQISAALKQMARRSTRQTLAPNRFGVEEELVQSEIPDQPVNQTDEQEAESDHMAASGSVNDVSRGNRPPPVDLHQLMAMQTHILQGVIQNIIAMQQQHTQECQPHMVQDNGRSKLNDFLRSRPPEFSQTTEPIEADDWIKDVERRLNLLRGPAADWWDNYCATHTDASTIVWTEFAGAFRSAHIPESIIDLKKEEFANIKQGSSCINEYLSRFNRLARYAPEDVDTDKKKIRRFLKGMDAKLRVKLLAHDFPTFQQMVDKSLLLEDAEQEMQEYKRRKVMSLEIQAKEGLCRKTNSPAQYYQKASQHSNGSGSTSRSTMSEPGQQATMINSNSHEGSNSVPCPTPSKRRGHKAGVECFICHEMGHYSWDCPQKAKIKCLHKVKTKPVQPTTILPNIPGSKGSKSPNSGSVLLTSPPVGQGRLNHVQVETNGKVVNLEQVEGAGEEQVSQARAEPQ

SEQ ID NO: 19332 - protein, 1479 aa, Oryza sativa
  Clone ID: TF_OSC20908j.C1.p1.fg
MATRLRPKMTAAAAARKRSTAAAAARMRSVAAAAARIRPTAAAAVRMRSMAAVAAARLRPTAAAAARMRSVAAAAARMRPTTAAAARMRPVAAAAARMRPKVAAAARMRPAAVVAALMLPTAALLLSLAAMTALLWPTSASVAQGLWGAVEPEGDDLVDYRQDRQALAAILRAVPAEMLATLAVKETAQEAWEAIKTRRIGVQCVREANAQQLRREFGDILFEDGETVDNFSMRIGGLANNLRTLGDNITEAEVVQKLLQVVPEHLQQIAISIETLLDVNELSLEEVTGRLRSVEQRKQRKTAAASSRVDANGRLLFTEEEWLAKFRKAASLQDAAHSSGSNGDRRGRGHGKKDDGAPKEAQPKPANPGGRNPGNCKNCGKRGHWAKDYRSEPKAQQAYVAQEEDEEPALLLAKLDDGGEHDPAMWILDTSATNHMTGSRSAFAELDTAVTGTVRFGDGSVVRIEGRGTVLFSCRFGEHRGIAGVYYIPRLTANIVSLGQLDRSGSKVLIHHGVLRVWDPRGHLLVRLRCSDDCLYTIKLDIDRPVCLAARSAEPAWRWHARYGHLNFPALRKLVQQEMVRGLPLLQQVTQVCDGCLLGKQRRAAFPTQSKYRADEHLELVHGDLCGPIEPATPAGNRYFLLLVDDMSRYMWLTLIRSKDEAANAMKHFQARAEVESGRKLRALRTDRGGEFTSIEFGEYCANLGVGRQLTAPYSPQQNGVVERRNQTIVTTARSMMKAKGVPGRFWGEAMSTATPYEAWYGQQPAVHFLRTFGCVGHVKITKPGLKKLDDRSAPMVLLGYEQGSKAYRLYDPVSERVHVSRDVVFDEDAAWDWGPVTPDGAPQLEPFTVEQVVTTTIGTAPASSLTPPSPPSPAPSAPTTPAPPSPPSPEAVEFVTPPTQDSILDADTDDDVVPRYRLVDNLLGNASPPGHAPRVLEQLELHVVSADEPASLAEAEADPNWRGAMQDELNAIVDNDTWSLTDLPHGHCAIGLKWVYKLKRDEQGAIVRYKACLVAKRSSEHGVYTRTRGGRRLTVGVYVDDLIITGEHDDEIRSFKGEMMKLFKMSDLGALRYYLGIEVTQDSDGITLGQAAYAGKILEKAGLNDCNPCQTPMEVRLKLRKGSNFPLVDATLYRSLVGSLRYLVNTRPDLAFSVGYVSRFMESPREDHLAAVRRILRYVAGTRCWGIRFGPGARCALPMLVGYSDSDLAGDPDERKSTSGQIFFINGGPVTWQSSKQKVVALSSCEAEYIAAAAATCQGVWLARLLAEVLGDEITAPLLKVDNQSTISLIKNPVHHDRSKHIDVKYHYIRECAEKKLIEMMFVGTAEQLGDIFTKSLGRTRVAGSGTLLSLCLRAVASTLGVPFGLSSSSSDSMVNSVFLWRRPTGINGSSSGLHAKGDLRLTEEDGANSLHTAVQGSETHKRTWNCNARVKKRFYPSSPHHCEFVIIDNSNRVLAWGLGKKAAASMMIREICMEELV

SEQ ID NO: 19333 - protein, 686 aa, Oryza sativa
  Clone ID: TF_OSC33100j.C1.p2.gm
MELEPGELSPPATGHSGHGDLNSPPPAAPAGASSPAATSAQCSSGSSSGSQEKVDWDFSDDDEVVESPPSPARQMAGQASAAHEATPLAAPRQSVVSAPFTASTSRKEDSGEGGRKAISSAITPASARRTWSSFINLARGETEILVAPGQGTSSGHGVQAPNHRNCRDPPRCYICKRSGHISSGCPSKYKNKPSIFSCIYSTHPAPPSKQEIPNPLAFPPLTGHKAPVRERLGPKMDYIPGLPENHPACGYAVVVADAAMEHEAMRLYNHGAVIKARLPNYDVSAKEMAQALQQQVGTPNYDNPNLLPRVSVFTLFPAGVGQVLETGGMPTPSQEVASAPLGRVRHLLIHLDMVEDWRPLPARSSNSSGSTDSDDPPRRRVHRFDWHLGYEDGVSPPPLQPPQPPLPGGCRVPLAPRLEREEDDDENFGGGNGRALPHPPWRQSPLRRPSGGSLPSQAPIQAAFSPPALLPVALAKQGASCGLGESLSSRVRFPRWRRKRQRQDEQQARLSCLGQATQRRSANTTSALFCCPCSSSRRSRPLLLCPRPGGGGDTGGGGPDVSRAGGGGSVPRGEVSERIYPRSWGVGSYWVSGSSWAGGAYWASFSWAGGASWAGWVSCVPWLDSFSWAWASRAGDEAVAEYIKRFQDPLPTVVVQGIRALTGLDSGKPLPPDVTEEADGATPEWV

SEQ ID NO: 19334 - protein, 1334 aa, Oryza sativa
  unsure (1)..(1334): unsure at all Xaa locations
  Clone ID: TF_OSC414410j.C1.p1.np
MADFADALRPDKFTGVHFKRWQIMVTLWLTAMKCFWVSIGKPEGVLTAEQQKQFEEATTLFVGCILSVLGDRLVEVYMHMTDAKKLWDALNTKFGATDASNDLYIMEQHDYKMADNRSIVEKAHEIQTMAKELELLKCVLPDKFVAGCIIAKLPPSWRSFGTALKHKRQEYSVEGLIASLDVEEKAQEKDAAYKGDGGQSNANVVHKAQHKSKGKYKAQQTTNFKKQKKNNNNPNQDERIXFVCGQPGHLARKCPQRKGMKAPAGQTSKSANVTIGNTGDGRGYGNLSTVFSVNQSTNWWVDTGANVHVCADISLFSSYQVARGSTVLMGNGSHASVHGVGTVDLKFTSGKIVQLKNVQHVPSIDRNLVSGSRLTRDGFKLVFESNKVAVSKHGYFIGKGYECGGLFRFFLSDFCNKSVTHICGSVDDEANVWHSRLCHINFGLMSRLSSMCLIPKFSIVKGYTRHSCVQSKQPRKPHKAAEERNLAPLELLHSDICEMNGVLTKGGKRYFMTLIDDATRFCYVYLLKTKDEAVDYFKIYKAEVENQLDRKIKRLRSDRGGEFFSNEFDLFCEEYGIIHERTPPYSPESNGIAERKNRTLTDLVNAMLDTAGLPKAWWGEALLTSNHVLNRVNRNKDKTPYEIWIGRKPSLSYLCTWGCLAKVNVPITKKHKLGPKTVDYIFLGYAHHSIAYRFLIVKSEVPDMHVGTIMESRDATFFESFFPMKDTHSSSSQPSEIIPSSITPPEQTEYTHEHVTEEDDSEAPRRSKRQRTAKFFGDDFTVYLADDTPKSISEAYASPDADYXKEAVRSEMDSIITNGTWEVTERPYGCKPVGCKWVFKKKLRPDGTIEKYKAWLVAKGYTQKEGEDFFDTYSPVARLTTIRVLLSLAASHGLLVHQMNVKTAFLNGELDEEIYMDQPDGFVVEGQEDKVCKLLKSLYGLKQAPKQWHEKFDRTLTSAGFAVNEADKCVYYRHGGGEGVILCLYVDDILIFRTNLEVINEVKSFLSQKFDRKDLGVADVILNIKLIRGENKITLLQSHYVEKILNRFGYIDSKPSPTSYDPSLLLRKNKRIARNQLEYSQIIGSLMYLASATRPDISFAVSKLSRFTSNPGDDHWHALERVMRYLKGTMELGLHYFGYPAVLEGYSDSNWISDVDDIKATSGYVFTLGGGVVSWRSCKQTILMRSTMEAELTALDTATVEAEWLRDLLMDLPIVEKPVPAIFMNCDNQTTCEKTIEVCQEVEKLRTCEKTIEVCQEVEKLRSYNVGLHPNNXKPGRSLHEGTITKCDRQCIEGDGFETHSILERTHLCELDCWSQSMKILSESSRKLTKDLGV

SEQ ID NO: 19335 - protein, 2741 aa, Oryza sativa
  Clone ID: TF_OSC900086j.C1.p19.fg
MALWNGLGQVANIAQLAGVDAYGLIKMIVEAAQTAKRNRETCQKLARHVKMIGDLLQRLQSTELMQHQETRNPVEQLEETLRHTYMLILSCQDSSYLHSCFMGGKQAHQLREVQSDITFYLQLFPLVSFVDTTRTWERLLRRAQPSCTEDTADELQKVHHSDHRIRNHVQDYAHKYIKLIELHWQFIFRFNTEILNATEFGDQSVTQCPEVFEEKRSEQASIRSLNLDQLVVNDIGKGAVLTFSQILAATNNFSGRSLIGQGGFGPVYKGKLPNGLEIAVKRHDTSSHQGEEEFMAEIDVIPKLRRKNIIELIGFCVQGKEYETKRILLNWSKRLKIIEGISDGLLYLHNHSPKCIVHRDIKASNILLDYEMNAKISDFGLAIKLAPKATTEVLVRGTWGYADPEYVATGVISEKTDVYSFGIVLLEIISGKLETWRGGMRGRGERGDLAGDGPTTAAVTSGGRSSALTIDLPPLLPSPAGISKLRLPSPARALNLSQVRPGEAFQNLILHLFHCPVTPIATTLGPSKIIPTPIWLCAAPSKPLNSLYVKNALNFWFSSSFSSFSVSSLGFGLFLSHVANKDVATSLFLAGSSVLKSAGLSIHLTKDSAAKDIQENVTRFLVQFEGSSSVPSLVGEKVVPALQTVKPAFTATSRHIGCSQQSSKTSTPSVPTGPALKSVYCPVTNSFRDALLSQPKPKPPARSATSRLPSRGRKNLTMLNRCFRCLGSDHQVKDCRDPLICASCRRAGHRQDSCRSSMASNISPRRSSSSFHPSTANSTSRFTTRWVRRALNTPAPPPPRLPTAPYPRSNHSSPPPDNLAIVPYVPPLTHVDAQLEDVIAMLESSLCSSPVRSVTAGPLVPMEVSENAVTSSVASPLPDVRNALVCVQDSSISVAALVPVLACAVNDLETVSTEVVPATVSLVSVMPTRAAAVAEVAHATVESVVVPSSVSEDLSPAVNLSSMPPRLRCKNKGFLAWYGACPSSRQPSSVPPQEPRDIFVCSEQLSANPILSPPQDPDSTRSPPPTLSGPSAAEQIRRALAGLSPEGSIHSASLSPGRVPVITSNDTTAAQDFAFGEPDPVNISGDSDDDILDIFIPFVDMRVTAHYATAYVTPPCECPGRVIRKAMQDAHPRFQFTLISACRGAMTLRFIHSQDRDFAVDHQENLTAEGHLVRLERPEDSAARFIQHNTMLSELDCIDFPPEMLFPNKIRNAFENYGELMEVDDQCLYGDEQSSLRLVVLHYPGKRMSPRFRLRYNLGIVCTVYVRVLRTWELAMNVDEDGNYIKHYEQFLFPHQLDPPRSGPTVGPEAELDNLNQAPSNQISNNQGLQNRGRLLAILPAASTVFIEEISDTPEIFVPPSIHSAPSSIHDCLQDLVPSDTENEHELSARKRRRQKKRTIDSDVKRRYSERLAAKEGHLYISMESKAARAKKLKEQLAKCSSKLNDAVHKHNLLDLNFKTTPKALEDLAIACSLNDHDIAQLRKLFFSSLVSSLPSLCSLSVYLLHETKLQNIPPEKAKTILPPNLANYDFVGSYGSRGGMLTAWNADFTKTSFISRHFSLTISFTSTFTDLSFSLTNIYGPAELDQKQDFLHELLEIDPLIQGPRLLIGDFNLTRSPSDKNSQNFSTGLAAAFNQTINSLSLFELPLPDRLYTWSNKREVPVLARLDRAFFNNAWNNTLPNTSLSSCTRTTSDHVPLLLTASTSIPKSKTFRFENHLLLDRDFLPSVMHRWPQQLNMNDPAACLAAKLKQTRSIIKVWMKEHRKRSSLNEDCKFTIDLLDYIEELRPLNDGERCLRNLVQEKLFQAIQSKVAYWKQRGKVKRLKIGIDNSAFFKAHASKNYRNSRIRSIKHNGSEIADHNGKALLLHSFFQHFLGSDCQPLWDFDLSTLYSEDERDYNLLASQGLQFSTEEIITSIKGMNSNSAPGPDGFGPSFYNSAWNSIKEDIIKLAASFCSNSVQLERINRAHIVLIPKPGKENTVDGYRPISLQNCSVKILSKVLANRLQKVLTRMIHLDQTGFLKGRCISENLIYATELIQACHARKCKTLIIKLDFAKAFDSVLWTSLFQILAVRGFPNNWISWIKSLLQTSKSAVLLNGIPGKWINCKKGLRQGDPLSPYLFILVADVLQRLLEKNFQIRHPIYQDRPCATIQYADDTLVICRAEEDDVLALRSTLLQFSKATGLQINFAKSTMISLHIDRSKESSLSELLQCKLESLPMSYLGLPLSLHKLTNNDLQPIVVKVDSFLTGWEASLLSQAERLILVNAVLSSVPVYAMSAFKLPPKVIEAIDKRRRAFFWTGDDTCSGAKCLVAWDEVCTAKEKGGLGIKSLKTQNEALLLKRLFNLFSDNSSWTNWIWKEFDGRSLLKSLPLGQHWSVFQKLLPELFKITTVHIGDGSRTSFWHDRWTGNMTLAAQFESLFSHSTDDLATVEQILSFGIYDILTPRLSSAAQNDLQELQTILQNFSLTNESDTRLNNRLGNLTTKTIYDLRSPPGFPSPNWKFIWDCRMPLKIKLFAWLLVRDRLSTKLNLLKKKIVQTATCDICSTTDETADHLSFNCPFAISFWQALHIQPIINETKYLSQLKAPATIPTRHFQSFFMLCFWVLWNHRHDVVFRGRPPSIASCLQRGISESSLWAETFTPDDRFVIDVWKDISSSINAMTIQVGNLSPPALKNRKKLHKLIDPSLGAKKHERAQIMQCLRVAMLCVRDRAEHRPTMSEVVTMLPSIKTPKDRKAVVNVRF

SEQ ID NO: 19336 - protein, 470 aa, Oryza sativa
  Clone ID: TF_OSC15265j.C1.p3.fg
MECRGSRGFGSSMNIKSKSKVGIDQSKGAVFENGSTRDRESHLEVLSGTSWHQGEVEKFHKCCPEVPGTFTRKLLAGFQFKLDAHLIWNTLEERYDKSECDEAKLAIEEPLVECSNSSTICKEPQVILSNEQDSLATFTSSPTHVSIKGNEMVEVCGKKWPSEEFTSPRCSSSHLDEYSCIMEKSYLEKENLELKAQLVELTSKHVDLQEKYDELLCSHGNLVDSHAMLEVTHEVIIITVKSYVPHVQVDFTCANSCCSQANIFLRTTCDLDYVGKKDKYIDHGFVCNAQPSQDNRESMLKKLEKGSTVACTKFYQEDNKSNNKSKGQDQSKNKASITCFKCKKMGHHVRDCPWKKQKKLSKNEDLAHSSSNPPKRDTLPQVVLARLMMKPHFQERHQESTEGSATVALRRGMKLDFVRTRRMIIAIDQARGKPATSKSRSKIKAKLNFATIAGQRDILVKIVPLVITCV

SEQ ID NO: 19337 - protein, 420 aa, Oryza sativa
  Clone ID: TF_OSC402930j.C1.p2.np
MAPQPTCQTCVRNYLGSKEDPALSENPNQLAEQVTNQVAKTDNTVPGPNKEPKVNPDKSKNEAAEIQGTQSVEGTDTHKEKNKEFLNVMITGMKTPLRANNCPNLQNSINKSVSRENSMIKEGSCHKRKTLPSEVDMQDVPQCQTMQSCQNLPKSPTLKSKKIRHVPGFICFICHKIGHYMRHCPQKPYMDAPLQANMSTSRMPFYPQGSPNSPNVNAVRSTFPDDKRAKASCDMCQDIQEKKEMQEYKRRKVMSLEIQAKEDLCRKTNSPAQYYQKASQHSTSSGSTSRSTMSEPGQQATMINSNSHEGSNSVPCPTPSKRRGYKAGVECFICHEMGHYSWCPQKVKSKRVQPTTSLPNVSGPKSSKSPNSGSASLTSPPVGQGRLNHVQVETNGKVVNLEQVEGAGEEQVPQARAEPQ

SEQ ID NO: 19338 - protein, 2483 aa, Oryza sativa
  Clone ID: TF_OSC900058j.C1.p11.fg
MGDLALMSFLSGKRERQRQLCHRQIGRGRGSITSVAKTERKGLHYQLKENVYLPEDILRLIHAMMPLRDAARAACASHIFLQSWRCRPNLIFTGETLGLIINGTGKDDAKRDFINIVQRILLNHSGIGVKTLKLELLHFSDLDLGCLEAWLQIAVAPGIEELTLMFPCVRYKFPCSLLFERGGNSVRYLHLMVCTFRPTIGLGCLIKLTQLHLSFVWITGDELELLSKCVALEWLKLSYCPEIICLKVPCMLRQLGSLEVAECRYLKVIEICAPNLSNFYLTGFLVRTSFENPLLVKKLRIMCLRQGNFVSYARTKLPSLVPNVETLTVASNEATGQAIPTDRRPLRPRRPPPCAGSHPGADAHHPRLSCPIALPLEPARPPLDVAGQMRLASLPPSWPALQPAHPTLLRHHKPVIPSQPLSGPPLSPRSSTPRRNPQFWLESPPPPPSRSAVPFSADDVSHVSESPDPRSSPTPAMPRSFADAVRLDFNPAKGDGLPVFKSPHGQPPPRPKLKSAITIPAWSTFQRRAYRATPGEEMGVRRIHGTARPGRFNGEWKEVKPRHWWRRSPHSPESQRPASRRQDAHSRRSLAPAASASLRLFRERTAGKCFNCLARDHRAARCRDPVRCFRCFRSGHKANSCSRREPRPRQPRQSPQKALRRQASTPPPPQNTSHRQASTPSPSLPRATRPRQPRQSPQNTSCRQASTPPLQLPLPPKPSCNTRMALLGDPATRPDEDHCFVPTPFATEAERKEWESSAVVSWAMRAPASTTAQDVEAAFREEFRLRRGEVTVTRHHPEAFLIKFEHSSHCYEAMRKGFVKRNGIELHFIKWRSLSAALGIALMFRRLIARTCGLEEIETNLIHPVDTRTVDVWAWTGNPSSIPKRMWLTFTGSTRGAKPEQILVSDRPPAHWQHGAKFCVYIHLEEIHDYTTVAVDLDGNEACAPSKRRLPEWHLGVADGDPVPTRAFENFPHHPPPPRTRQGREPERIDDRDDRRRRAKDDRDRSRPRRSYNDDHPDHDRDQAWRRRDDDDDRDGRGGRGREAWRGRESRKVSGLDGQRVRERSPRRRDWAEDDRRGDRRHHVQAAVALPATIPPLKLAPKQAPRENLRETGERLVNRVNNFAAAVDDASQPGGEEAWSDRRPSRVHDVPIRQVFDRLKHCLFPAGIHSTPSHSGQVMPHDERASIGARGNTAAATAVASKTVTPPQLITAAPTTEQDEHQDAGNKNTLQVLESLFSTPPRAVLPRPTSPALTTTQATPAPAPAPPGGHGMERRRSARLAAKPPMPTMQRCTRVLLKRLGMLHDDKTLDEVLSDYIAMFNGPLPQHVIAALTSIFDIDADAIMEANHVDNTLLEVVGEGVADLVEECTALNELIAETSCNLVCIQETKLRAVDDQLARFLGAYRLDSYAFKPSRGTRGGILLLWNSTAISVHSTRIGRYSLTANITVLRCGTSFMLTTVYGPTRHREKDSFLRHIRSLKPSPGNKWLILGDFNLVYRARDKNNNNLNLGRMNRFRAALNRCELKEIHLQNRKFTWSNERRRPTLMRLDRFFCNEEWDLSFDRHILHALSTGPSDHCPLLLTDPSCPRKPRPFKFENFWIKLPGFKEVVEQAWGKPSNHTEPMHRLAYKLRDMAKELKRWARTTCSQTKLKYHMALDVILRLDVAQEQRTLSPEEGNLRAALKRRVLGLAVIERARKRQASRITNIRAGDANTKFFHLKVNSTRRKNHIHRLRKQNGWAVTHEEKSQAIFDHFSLFMGRPQERQLDLNWQSLGLETTDLNSLNEPFTVDEIKRAICHMPTDKAPGPDGFTGCFFKACWETIKNDVTTAFNAIYNHRCNHLNLLNSASVVLIPKKDGAEQVSDFRPISLIHGFAKIFSKLLALRLQPLMHKLVSTSQSAFIRGRSIHDNFLYVRTLFATSSSKILLNGIPGTKIIHGQGLRQGDPLSPLLFILAIDPLQRLLSKATELKLLSKLRGKSVTLCTSLYADDAAVFIKPGKSEVQNFTAILHRFGLATGLRANIEKTQVVAIRCENVDLDEVLQNTPATRASLPMKYLGLPLTTGRLRKADLQLLFDKSAGKMAAWRGRNLGLAGRTTLVKSVLSSQPVYLLIALKVSKESMETLDKQRKSFLWAGSEKLTRGKCKVNWKRTCSPTVYGGLGILNLENFARALRIRWLWQEWKAPERTWIGRDNPCDNTEKTLFAAATTITVGDGETASFWNSAWMQGRRPRDVMPLVYAISKRKNRSLKEGVTDNVWVQDLNFSSPDAITVELLDQIVTLWSIIQSVQLSPDVTDEITWKFTNHGEYTTSSAYKMQFLGSINANYDAIIWKPWAPNKCKIFAWLAIQNRVWTAGRLTTRGWPNNTFCPLCRHTRETVFHLLVDCRYSRRIWENLACWTSQEHIKPGNWAQPASLQDWWTAIATHPGTPRKGNRTLLLLVTWEIWKERNQRIFQRNELSILSLCTKIKEEAKTWTLAGAKRLSEIIP

SEQ ID NO: 19339 - protein, 1718 aa, Oryza sativa
  Clone ID: TF_OSC400601j.C1.p78.fg
MAQGAGDAVLPASHITADRHLSLPRKIMPEGAALRAGESRPRPRYSDRFVHLLSFAMVGLVPPFSRFFHEVLDFYEIHALHLAPNAVMTLAIFAHLCEMFVRVRQTMRLFQFFFVPQLLQAWLAASELGEQYDAVRDRLRGLRSQGLTGAMVFGDYFHCRIAPLQERSREAWKYIGPNDLMRTHVGERWDWGEEDAKTIPTFPESPFLQEKNLKSSKASKATPGLEWYIPGLEIELCSRDGCSEWLGLCNRMPRYKPEYLFGVEGFVQELRTMSFAIGFGTAPLYAQIPHDRDEEKCQVKVTLNSNSEDILSVMFEAGGGNYIHACQEVARIAIGELRDRYSDQLADTEYRYHPRQPQGSDRGSYLETEGIENDATTRHLVEMLWAMDETRAETVLAAQDREDRNRGKICKLEDKMVLTRSNGNGPNIKNNNNNRENPTLAQVLAQQAQLMNMMMQQLQNQQNQGNNHAPPQNKLAEFLCVRPPTFSSTTNPVKAGDWLHAIEKKLDLLQCTDQEKVSFASHQLHGPASEWWDHFRLNRTTAEPITWLEFTAAFRKTHIPSGVVSLKKKEFRSLTQGSRTVTEYLHEFNRLARYAPEDVRTDEERQERFLEGLNNELSYPLMTGDYHDFQRLVDKAIRQEDKYNRMEQKKRRIAHFKAQQGNSQRPRLTLGPQSMPQGGSSSVVRSQREFFNNNAGNNIRNQAPRPVAASTQQQPAKREQGSKPGVCFNCGDPGHYADKYPKPRRVKVVPAQSNSTAPASKARVNHVAAAEAQGAPDVILGTFLVNSVPATVLFDSGASHSFLSMSFAGNHGMEVEDLRRPLMVSTPSNQALSLQRNPSVRIEIQGVPFLANLILLEAKDLDVILGMDWLARYKGVIDCANRKVTLTNNDGRVVTVHALSSESLRSSLNQIALEEIPIVQEYPDVFPDDLPGMPPKRDIEFRIDLVPRTTPIHKRPYRMAANELAEVKRQVDDLLQKGYIRPSSSPWGAPVIFVEKKDHTQRMCVDYRALNDVTIKNKYPLPRIDDLFDQLKGATVFSKIDLRSGYHQLRIKEEDIPKTAFTTRYGLFKCTVMSFGLTNAPAFFMNLMNKVFMEYLDKFVVVFIDDILIYSRTKEEHEEHLRLALEKLREHQLYAKFSKCEFWLSEVKFLGHVISAGGVAIDPSNVESVTNWKQPKTVSEIRSFLGLAGYYRRFIEKFSKIAKPMTRLLQKDVKYKWSEECEQSFQELKSRLISAPILILPDPKKGFQVYCDASKLGLGCVLMQDGKVVAYASRQLRPHEKNYPTHDLELAVVVHALKIWRHYLFGTRTEVNTDHKSLKYIFTQPDLNMRQQRWLELIKDYDMGIHYHPGKANVVADALSRKGYCNATEGRQLPLELCKEFERLNLGIVSRGFVAALEAKPTLIDQVREAQINDPDIQEIKKNMRRGKAIGFLEDEQGTVWLGERICVPDNKDLKDAILKEAHDTLYSIHPGSTKMYQDLKERFWWASMKREIAEYVAPLKIPEWKWEEIGMDFITGLPRTSSGHDSIWVIVDRLTKVAHFVPVKTTYSESRLAELYMARIVCLHGVPKKIVSDRGSQFTSKFWKKLQEEMGSKLNFSTAYHPQTDGQTERVNQILEDMLRACALDFGGSWDKNLPYAEFSYNNSYQASLQMAPYEALYGRKCRSPLLWDQTGERQVFGTDILREAEEKVKIIQERLREAQSRHKSYADNRRRDLSFE

SEQ ID NO: 19340 - protein, 634 aa, Oryza sativa
  unsure (1)..(634): unsure at all Xaa locations
  Clone ID: TF_OSC900179j.C1.p14.np
KVRCSGLCCARGTVTAPFRAPGLEWYIPGLELELCSRDGCSEWLGLCNRMPRYKPEYLFGVEGFVQELRTMSYVIGFGTAPFYAXITHDRHEEKCRVKVTLNSNSEDIPSVMFEAGGRNYIHACQEVARIAIGELRDRYSDQLADTEYRYHPRQPQGSDCGSYLETEGIENDATTRHLVEMLWAMDETRAETVLAAQDREDRNRGKICKLEDKVDRLEKELAALKGEAPPQKARIRLTARKRALFVPRYQLAPKMVLTRSNGNGPNNNNNNNNGENPTLAQVLAQQAQLMNMMMQQLQNQQNQGNNHAPPQNKLAEFLRVRPPTFSSTTNPVEAGDWLHDLLQCTDQEKVSFASHQLHGPASEWWDHFRLNRTTAEPITWLEFTAAFRKTHIPSGVVSLKKKEFRSLTQGSRSVTEYLHEFNRLARYAPEDVRTDEERQERFLEGLNDELSYPLMTGDYHDFQKLVDKAIRQEDKYNRMEQKKRRIAHFKAQQGNSQRPRLTLGPQSMPQGGSSSVVRPQRQFFNNNAGNNIRNXAPRPVAAPTQQQPAKKEQGIKPGVCFNCGDPGHYADKYPKPQRVKVVPVQSNSTAQASTLRGGRAHVGSSEGGMLVQRNCXNREERLTSGSHTCFSPPL

SEQ ID NO: 19341 - protein, 1377 aa, Oryza sativa
  Clone ID: TF_OSC26838j.C1.p2.fg
MRAQVSTRMPSFTSSRSNMRHSPCCLMSVNDMYGRLNVIVDDLKGLGANYTDLEVAQKMLRALPEKYETLVTMLINSDMSRMTPASLLGKINTNDMYKLKKKEMEETSPSKKCIARQAEVEDKGNGKVNEANENLEEEIALLARRFNDLLGRRKERGRGSNSNRRRNRRPNKTLSNLRCFECGEKGHFALKCPSKDDDGDKSSKKKSGGYKLMKKLKNSASSGSEEEDGDDTSSKKKKMAVVAIKEAPSLFAPLCLMAKGSSKVTSLSDSESDDDCDDVSYDELVSMFEELYAYSEKEIVKFKALKKDHASLEVLYEELKTSHERLTISHEKLKEAQDNLISTTQHGALIDVGISCDLLGDSATCHIAHVASSSISTSCDDLVDMSSSSSTSCVSICDASLVVENNELKEQVAKLNKSLERCFKDKNTLDKILSEQRCILNKEGLGFIPKKGKKPSHCATRFVKSNGRLMMVALLLDMWVPLYSVVNYRTGGSHWVFDSGCTQHMTGDRAMFTTFEVGGNKQEKVTFGDNSKGKVIGLGKIAISNDLSIDNVSLVKSLNFNLLSVARICDLGLSCAFLPQEVIVSSLLDKSCVFKGFRYGNLYLVDFNSSEANLKTCLVAKTSLGWLWHRRLAHVGMNQLSKLSKRDLVVDLKDVKFEKDKLCSACQAGKQVACSHPTQSIMSTSRPLELLHMDLFGPTTYKSIGGNSHCLVIVDDYSRYTWVFFLHDKSIVAELFKKFAKRAQNEFSCTLVKIRSDNGSEFKNTNIEDYCDDLGYASNSKAYQVYNKNKGIVEETADVQFDETNGSQEGHENLDDVGDEGLMRAMKNMSIGDVKPIEVEDKPSTSTQDKSSTSATPSQAQVEVEEEKAQDPPIPPRIHTALSKDHPIDQVLGDISKGVQTRSRVASICEHYSFVSCLEPKHVDEALCDLDWMNAMHEELNNFARNKVWTLVERPRDHNVIGTKWVFRNKQDENGLVVRNKARLVAQGFTQVEGLDFGETFAPVARLKAILILLAFASCFDIKLFQMDVKSAFLNDFKIGKVDTTLFTKIIGDDFFVCQIYVDDIIFGSTNEVFCKEFGDMMSREFDMSMIGELSFFLGLQIKQLQDGTFVSQTKYIKDLLKRFGLEDAKPIKTHMATNGHLDLDEGGKPVDLKLYRSMIVSLLYLTASRPDIMFSVCMCARFQAAPKECHLVAVKRILRYLKHSSTIGLWYPKGAKFKLVGYSDSDYAGCKVDRKSTSCSFQMLGRSLVSWSSKKQNSVALSTAEAEYVSAGSCCAQLLWMKQILLDYGISFTKTPLLCDNDSAIKIANNPVQHSRTKHIDIRHHFLRDHVAKCDIVISHIRTKDQLADIFTKPLDETRFCKLRNELIVIDFSNVA

SEQ ID NO: 19342 - protein, 1379 aa, Oryza sativa
  Clone ID: TF_OSC31509j.C1.p2.fg
MASRRRATTSNDETQTPDLTTLAGVMATQTQLLQAIANNQGNRGGSSFGEFMRTKPPTFATAEEPMDAEDWLRIIEKKLTLVRVREANKVIFAANQLEGPAGDWWDTYKEAREEDAGEPNWEEFTTAFRDNFVPAAVMRMKKNEFRRLRKGNTTVQEYLNRFTQLARYATRDLADEEEKIDKFIEGLNDELRGPMIGQDHDSFQSLINKVVRLENDRKVVEHNRKRRLAMNRSPQTAPQRPKGTTSSAWRPTVVTTSRPAASSNFHRSVTIQNRAPAPNQAATGSVRTGSCFNCGEYEHFANKCPHPNKTPIRTGANATAIHGTATPAAGRGLFRTPQTNRTATGFGRGQVNHVRAEEAQEDQGVLMGMFSLNSTPVKVLFDSGASHSFISLKASQQHNLTRVKLRQPMLVHSPGVEIAVDTACIDVPIRLRDVVFLYNLMVLIPQTLDVILGMDWLAKHRGIIDCRHREVTLTTPWGSDMRATMDQDPRLTERAGGIFTMLPLKGMPVVQRFPDVFPEDLPGMPPDRDIEFIIDLIPGTASISKRPYQMPVNELEELKKQIRELQEKGFVRPSSSPWGAPVLFVKKKDGSMRMCVDYRSLNEVTIKNKYPLPRIDDLFDQLNGAKVFSKIDLRSGYHQLKIRTGDIPKTAFSTCYGLYEFTVMSFGLTNAPAYFMNLMNKVFMDYLDKFVVVFIDDILIYSKDEEEHAEHLRLVLEKLRKHKLYAKFSKCEFWLKEVAFLGHVISAGGVAVDPAKVEAVTEWKAPKSVTEIRSFLGLAGYYRRFIEGFSKIARPMTQLLKKEKKFVWSEQCQESFEQLKEKLTSAPILVLPDIRKDFVIYCDASRQGLGGRHYLIGNHCDIYTDHKSLKYIFTQSDLNLRQRRWLELIKDYDLEVHYHPGKANVVAEALSRKSHCNHLRMEGMVPELREEIAQLNLHIVPRGRINTLDIQPLLRTQIEEAQKDNEEVREVKERLAAGRAKEFSTDEKDVLWYKKRIYVPEQGGLRGLILKEAHESAYSLHPGSTKMYQDLKEGYWWPNMKRDVVEYVALCDVCQKVKAEHQRPAGLLQPLRIPEWKWDEIVCLHGVPKKIISDRGTQFTSHFWEKVHEALGSYLAVSTAYHPQTDGQTERTNQVLEDMLRACALDFSKDWERCLPYAEFSYNNSFQASLKMSTNEALFGRQCRTPLMWSETGERAVFGPDIIQEAEEKVRLIRDRLKVAQSRQKSYADTRRRNLEFKEGDYVYLKVSPMRETKRFKVKGKLAPRYVGPFQIIAKRGEVAYQLQLPENIADVHPVFHVSQLKKCLRVPEEQAPLEEIHISNDLTYPEHPIRILDEAEKRTRSKVWRMYKVQWSNHTEDEATWESEEFLRTEYPHIFENW

SEQ ID NO: 19343 - protein, 1430 aa, Oryza sativa
  Clone ID: TF_OSC400100j.C1.p2.fg
MASRRRATTSNDETQTPDLTTLAGVMATQTQLLQAIANNQGNRGGSSFGEFMRTKPPTFATAEEPMDAEDWLRIIEKKLTLVRVREANKVIFAANQLEGPAGDWWDTYKEAREEDAGEPNWEEFTTAFRDNFVPAAVMRMKKNEFRRLRKGNTTVQEYLNRFTQLARYATRDLADEEEKIDKFIEGLNDELRGPMIGQDHDSFQSLINKVVRLENDRKVVEHNRKRRLAMNRSPQTAPQRPKGTTSSAWRPTVVTTSRPAASSNFHRSVTIQNRAPAPNQAATGSVRTGSCFNCGEYEHFANKCPHPNKTPIRTGANATAIHGTATPAAGRGLFRTPQTNRTATGFGRGQVNHVRAEEAQEDQGVLMGMFSLNSTPVKVLFDSGASHSFISLKASQQHNLTRVKLRQPMLVHSPGVEIAVDTACIDVPIRLRDVVFLYNLMVLIPQTLDVILGMDWLAKHRGIIDCRHREVTLTTPWGSDMRATMDQDPRLTERAGGIFTMLPLKGMPVVQRFPDVFPEDLPGMPPDRDIEFIIDLIPGTASISKRPYQMPVNELEELKKQIRELQEKGFVRPSSSPWGAPVLFVKKKDGSMRMCVDYRSLNEVTIKNKYPLPRIDDLFDQLNGAKVFSKIDLRSGYHQLKIRTGDIPKTAFSTCYGLYEFTVMSFGLTNAPAYFMNLMNKVFMDYLDKFVVVFIDDILIYSKDEEEHAEHLRLVLEKLRKHKLYAKFSKCEFWLKEVAFLGHVISAGGVAVDPAKVEAVTEWKAPKSVTEIRSFLGLAGYYRRFIEGFSKIARPMTQLLKKEKKFVWSEQCQESFEQLKEKLTSAPILVLPDIRKDFVIYCDASRQGLGGRHYLIGNHCDIYTDHKSLKYIFTQSDLNLRQRRWLELIKDYDLEVHYHPGKANVVAEALSRKSHCNHLRMEGMVPELREEIAQLNLHIVPRGRINTLDIQPLLRTQIEEAQKDNEEVREVKERLAAGRAKEFSTDEKDVLWYKKRIYVPEQGGLRGLILKEAHESAYSLHPGSTKMYQDLKEGYWWPNMKRDVVEYVALCDVCQKVKAEHQRPAGLLQPLRIPEWKWDEIGMDFIVGLPKTATGYDSIWVIVDRLTKTARFIPVKTNYSSAKLAELYMTRIVCLHGVPKKIISDRGTQFTSHFWEKVHEALGSYLAVSTAYHPQTDGQTERTNQVLEDMLRACALDFSKDWERCLPYAEFSYNNSFQASLKMSTNEALFGRQCRTPLMWSETGERAVFGPDIIQEAEEKVRLIRDRLKVAQSRQKSYADTRRRNLEFKEGDYVYLKVSPMRETKRFKVKGKLAPRYVGPFQIIAKRGEVAYQLQLPENIADVHPVFHVSQLKKCLRVPEEQAPLEEIHISNDLTYPEHPIRILDEAEKRTRSKVWRMYKVQWSNHTEDEATWESEEFLRTEYPHIFENW

SEQ ID NO: 19344 - protein, 1534 aa, Oryza sativa
  Clone ID: TF_OSC9141j.C1.p1.fg
MSAHGNVSWGCVLWVQLYTSDQSKTIRIAVPAVMGGRPDSQWVVLSLALFSPTPELKFFSAGAVSERFAACGLAGGRYHVLVMVKTRNDPRDSNGASGSEEQINGAHTSGASSNIPSPPPENPMVIQMMTMMMQQMQQHYHEMLQQAQQNQQSGPPPLHLSKLLDFLYIKPLTFSSTTNLMEANDWLHAIEKKLNLLQCNDQEKVAFATHQLQGRHRFPRGSWHKRREFRALQQGTRTVTEYLHEFNRLVRYAPEDVRTDAKRQEKFLFGLDDELTNQLISGVYEDFKKLVDKAIHQEEQRNKMDRKRKAAQFRTPQGNSQKPRFMTGQLGEPSTLIVRQHRPYHSGNFNNDYNGGSHNSSEQHHHNSTPPPLMAPAESELPAMSAQSEQLKKESAGKPGPCFNYGKHGHFASKCPKLKRAGPKFVQARINHASAEEAQAAPEVVLGTFLVNSYPATVLFDSGATHSFISKKFAGTHGLSVVELKIPMRVHTPGNDMNTAHYCPSMTIEIKRSPFLSNLILLESKDLDVILGMDWLTRHKGVIDCASRTITLTNDKGEKITFRSPVSQKSVASLNQAAIKEQTEIVEKSPKELEDIPIVQEYPEVFPEDLTTMPPKREIEFWIDLAPGTAPIYKRPYRMAANELAEVKEQVDEQLRKGYIRLSTSPWGAPIIFVEKKDKTKRMCVNYRALNEVIIKNKYPLPRIDDLFDQLKGAKVFSKIDLRSGYHQLRIREEDIPKTAFTTRYGLFECTVMSFGLTNAPAFFMNLMNKVFMEFLDKFVVVFIDDILIYSKSEEEHEQHLRLVLEKLKEHQLYAKFSKCNFWLSEVKFLGHVITAQGVAVDPSNVESVTKWTPPKTIFQIRSFLGLAGYYRRFIENFSKIARPMTQLLKKDENFKWSVECNQSFEELKKKLVSAPVLILPDQMKDFQVYCDASRQGLGCVLMQEGRVVAYASRQLRPHETNYPTHDLELVAVVHALKMWRHYLIGNCCEVYTDHKSLKYIFTQPDLNLRQRRWLELIIDYDMSIHYHPGKANVVADALSRKSYCNALGTEGMCKELQQELEHLNLGIVEHGFVAALEARPTLMDQVRAAQINDPEIAELKKNMRVRKARDFLEDEHGTIWLGERLCVCVPDDKELKDLILTEAHQTQYSIHPGSTNMYQDLKEKFWWASMRREIAEFVALCDVCQRVKAEHQRPAGLLQPLQIPEWKWEEIGMDFFTGLPRTSSGHDSIWVAVDRLTKVAHFIRVHTTYTDKRLAELYLSRIMCLHGVPKKIVSDRGSQFTSKFWQRLQEELGTRLNFSTAYHPQTDGQTKRVNQILEDMLRACALDFGGAWDKSLPYAEFSYNNSYQASLQMAPFEALERLRIAQSRQKSYTDNRRRELTFEAGDYVYLRVTPLRGVHRFQTKGKLAPRFVGPYKILERRGEVAYQLELPSNMAGIHDVFDVSQLKKCLRVPEEQANSEHIDIQEDLTYVEKPVRILETSERRTRNKVTRFCRVQWSHHSEEEAIWEREDELKAAHPHLFASSSESRGRDSI

SEQ ID NO: 19345 - protein, 1405 aa, Oryza sativa
  unsure (1)..(1405): unsure at all Xaa locations
  Clone ID: TF_OSC30406j.C1.p2.np
LGVDRRRRRHGVAGTGSAKGKGGGAGSTYRGGQGGGRQLVVQRIVKEDGSVYYPILRRSNYSDWAVLMRVNLQAQGLWDAVDTGDVPYQEDCQALSAILRAVPAEMVRPLAEKDSAKDAWDALKSMRVGADRVKESRAQKLRQTFESMRFKNGEHLEDFSLRLQLGDDLSEEKVVXKLLRVVPRRYRQMALSIETLIDLTLLSIEDLTGRLLTVDDHPDSDGEDAGQVLFSEKEAPAHSNKEAGQNSAGGRASSSRQPHRSRRERDGNGSDGKSGSSQAANRNVSKDKCRYCGKLGHWAKDCCKAKRDREKLAQANLLITEPAQAADEGEPTLLMAQVCELAPATDPVITDEVTLKEERAHVSLQDEGPVDLDWILDTGASNHMTGYRDVFSELHTTVRGTVKFGDASRVWIEGRGMVLFACKNGDHCALTSVYYIPKLRSNMVSLGXLDEAHCKTVIEDGVLTLHDPQRQLLCRVRQGVGRLYVLHVELAQPVSLLAKGKDQAWVWHARYGHLNFDALRSLASRGMVRGIPTLERVTKVCDGCLISKQRRAPFPTAALHRATIHLDLVHGDICGPITSSTHGSKKYFLLLIDDLTRYMWLFLLTSKSEAPATIKRFKAGVEVETGCKLRVLHTDRGGEFTSVEFGLYCTNEGVARQLTTPYSPQQNSVIEHRNQTVVAMARCMMKAKNMPGEFXGEAVTTAVYILNRAPTKSVRDKTPFESWHGQTPVVHYFHTFGCVVYVKEVKPHIKLDDRSKVMVFLGYEPGSKAYRIYDPVAKRIVVSRDAVFDEAASWPWASPGEEASPQETFTVRYEVVAVDVPSRHSDSMSSPAHMGTPVPSISASPGVAVEFVSLPAETPDVDDEGPRRFWMVAKILDTTSPIELDSDELHVAAAEEPSNHAEAAQDALWMRAMQEXLKSIEENNTWTLADLPADKRPIGLKWVFKLKKDETGAIVKHKARLVAKGYVQRQGIDFDEVFAPVARMESVRLLLAIAAHLGSSVHHMNVKSAFLNGELEEEVYVAQPLGFIDDKHPHQVLRLNRALYGLRQAPRAWNAKLDVSLHELGFTRGITEHAVYTRGTGNARLIIGIYVDDLIITGAHSKTIQSFKEEMHSLFRMSDLGLLSYYLGIEVHQGNDGITINQSTYAQKLLKMGGLAASASVPMEPRLKLTKNSDRPSVDSTFYRGLVGSLRYLVHSRPDIAFAVGYVSRFMESPRNDHLTAVKHILRYVAGTMNYGCKFVNSGEEGIHLLGFSDSDLGGDAHDRKSTCGALFFLGSSPIVWQSQKQKVVALSSSKAEYIAATGAACLGIWLARLLAEVLGSDPGKALLKVDNKSAISLCKNPVFHDRSKHIDTRYHFIRQCIEEKVEVEFVPSDEXVADILTKPLGRIKFQEFRSQAGMDQAHQE

SEQ ID NO: 19346 - protein, 370 aa, Oryza sativa
  Clone ID: TF_OSC419957j.C1.p9.fg
MKAQAAATIRLSLSDSVMYQVMDEKSPKEIWDKLANLYMSKSLTSKLYLKQQLYGLQMQEESDLRMHVDVFNQLIVDLSKLDVKLDDEDKAIILLCSLPPSYEHVVTTLTYGKDTVKTEEIISSLLARDLRRSKKNEAMEASQAESLLVKAKHDHEAGVSKSKEHDHVCYKCHEFGHIRRNCPLLKKRRSASASLVAHSDDSESSSHEILTVSNEKSGEAWMLDSASSYHVTSKREWFSSYKSGDFGAVYLGDDTSYRVVGVGDVKFKMYDGNEVLLSYVRHVLGLRKSLISLGSLHETGWLYQVDSDRKTMNIMKDGKTVMTGERTSSCLYKLQGSAVAGGVMENGYAGVAVHDPEGGEPGVGSSGDSA

SEQ ID NO: 19347 - protein, 1616 aa, Oryza sativa
  Clone ID: TF_OSC900379j.C1.p17.fg
MSGQTGNGKDGDKGATFPYDYPSTSTSYVSTYSGKAPYFNDTDYATWKHKMKMHLKSINPLIWRIVEKGYVLQNPEEPTKEDDENEHKNAQAANAILSALSGSEFNRVDGIESAKVIWDTLRNLHEGTDSVRESKVEILKGQFERFVMLDGESPSDMYDRLSKIVNEIKGLGSKDMTDEVVVKKMVRAITPRNSTLVTIIRERPDYKTLTPHDLLGRILAHDMLEQESKEVIQYINQTSITSIKKEDLALKAKEEEEESRKSKSKAEIDDEEMALFVKKFGKFMKQSGFFKGSSSKYSSNKSSGRHSARVCYVCKEPRHFIADCPHIKDCLHFKEDKKLEKKEKHKHSKHDRYGQAHLGMIFGSDSESSSSDEEGVATFAVKPSSPPRFFNYSSDEDAPICLMAKESKVPSPLNSFNVDLVSDEEEDVEDEVMDDELFKSITKESIPHLSELLGRLEDQYATLERQEALLIREKKRSHELKSELAKEREKNEALVRLYKQTKESHANLEVANAQLQERVDGLDKAYLSLEEKFETLKNSVSLPMLCKSKMRSLCDSFTMALLKCHMGSKALKEYLGYQRDNFNHEGLGYVPPPKGKVDKSVMIKRPQGLSNFIKAKSILPNDYASHCSFDASYVLRKNASGRVVAKYVGPRGKNVSIKRVLWVPKALVTNMRGPKQESLSGGRSWVIDSGCTNHMTGEESMFCSLDLNGTSQENIVFGDNGKGKVMGLDRVCSACQAGKQIGAHHPVKNVMTTTRPLELLHMDLFGPIAYLSIGGNKYGLVIVDDFSRFTWVFFLHDKSETQAIFKKFAKRAQNEFDLKIKNIRSDNGKEFKNMCIESFLDEEGIKHEFSAPYSPQQNGVAERKNRTLIEMARTMLDEYKTSDCFWAEAVNTACHAINRLYLHRLLKKTPDELLTGNKPNVSYFRVFGSKCDILNKKARSSKFAPKVDEGFLLGYGSNECAYRVFNKTSNIVEIARDVTFDETNGSQVEQVDSHVLGEEEDPSEAIKRLALGDVRPREPQQGASSSTQVEPPTSTQADNPSTSSLDQGEEGEQVPPSPINLAHPRIHQSIQRDHPTDNILGDINKGVSTRSRIANFCEHYSFVSSIEPLRVEEALNDPDWVMAMQEELNNFTQNEVWTLVERPRQNVIGTKWIFRNKQDEAGVVIRNKARLVAQGFTQIEGLDFGETFAPVARLESIRILLAFATNLNFKLYQMDVKSAFLNGPINELVYVEQPPGFEDPKYPNHVYKLHKALYGLKQAPRAWYECFHNFLVKNGFEIGKADSTLFTKRHDNDIFVCQIYVDDIIFGSTNKSFSEEFSRMMTKCFEMSMMGELKFFLGLQIKQLKEGTFICQTKYLKDMLKKFGMENAKPIHTPMPSNGHLDLNEQGKDVDQKVYRSIIGSLLYLCASRPDIMLSVCMCARFQAAPKECHLVAVKRILRYLVHTSNLGLWYPKGARFDLICYADADYAGCKVDRKSTSGTCQFLGRSLVSWSSKKQNSVALSTAEAEYISAGSCCAQLLWMKQTLRDYGLNVSKILLLCDNESAIKIANNPVQHSRTKHIDIRHHFLRDHSTRGDIDIQHVRTDKQLADIFTKPLDEARFCELRSELNILDSRNVA

SEQ ID NO: 19348 - protein, 735 aa, Oryza sativa
  unsure (1)..(735): unsure at all Xaa locations
  Clone ID: TF_OSC23942j.C1.p1.np
PAIIMIIILFFGIKICXFMTKFPTFQKFDRSFLVVGFVALLKPHAFDGPNYKRWKACALLWLMAMQCFFASRGKMSEQPVSPEKEAKFEVTDCLFRVALINVLADNIVDMYMHMPSGKDMWDALEAKFGVSDAGSELYVMEQFYDYNMVDDXSVVEQAHEIQMLAKELENNKCVLSDKLVAGGIIAKLPHSWSDFATSLKHKRQEFSVTDFIGSLGVGEKARAKDNRGXKVEGGSSANLVQKKNPHASHNNKKVKPDVKPKTTINSKKKGKEKVKGDYFVCGKLGHWAKDCPDRKDKNSANMVVSNGRGTMGYGNLPTILSIFHSPNWRVDNGANSHLCADIFLFSSYQIAGGSSLLMGNRSLAAIHGVGMVVLKFTSGKTLQLKNVQHVPSIKRNLVSGSSCRDGFILVFKSNRCVVSKYGTFIGXGYDSGGLFRFSLDDRCNIVVNHVSNDDESNVWQXPLCHVNFGCMTRLANMSLISKFTLAKGSKCHTCVQSKQPRKPHKSEARNLAPLELVHSDMCEMNVVLTKGGKKYFMTLIDDCTRFCVYLLKTNDEALHYFMICKAEVNQLERKIKQLGSDQGGEYFSTEFTSFCEEFGIFHERMPLYSPQSNGVAERKNRTLTELVNAMLDTAGLSKEWWGEAILTACHVLNRISTKKEVTSFEEWEKKKLNLSYLRTXGCLAKVNVPIVKKRKLRLKTVDCVFLGYVIHGVGYRFLIANSRVSQQPAXSFLSS

SEQ ID NO: 19349 - protein, 271 aa, Oryza sativa
  Clone ID: TF_OSC419129j.C1.p1.fg
MSIVEHSASRSMREGGVSLPYPMLTSTNYSTWAIKMEANMEAQGIWDAIESAADDVVEKKKDKMALACLFGAVPDEVLQQIANKKTAKEAWESLKTRFLGVDRVKKARVQTLKSEFKALCMKKTETIDEFAGKISGLANAMSGLGATMTDDELVKKLLDSVPEKFLHIIAAIEQFCDLDTMPFEEAIGRLKAFEERIRKHSDNYGEQLLLTTRNTDDGAGRARSKRFDKSKVMCYHCQELGHFAFECPAKKKNKEIALLATASSDDEPTLL

SEQ ID NO: 19350 - protein, 320 aa, Oryza sativa
  Clone ID: TF_OSC900350j.C1.p20.fg
MEQTTFMKTKLNCMWSAARSSRIASKTRGEIPNNWYQSQFMPKILRFNKMSIVEHSASRSMREGGVSLPYPMLTSTNYSTWAIKMEANMEAQGIWDAIESAADDVVEKKKDKMALACLFGAVPDEVLQQIANKKTAKEAWESLKTRFLGVDRVKKARVQTLKSEFKALCMKKTETIDEFAGKISGLANAMSGLGATMTDDELVKKLLDSVPEKFLHIIAAIEQFCDLDTMPFEEAIGRLKAFEERIRKHSDNDGEQLLLTTRNTDDGAGRARGKRFDKSKVMCYHCQELGHFAFECPAKKKNKEIALLATASSDDEPTLL

SEQ ID NO: 19351 - protein, 498 aa, Oryza sativa
  Clone ID: TF_OSC402013j.C1.p4.fg
MDISRTNEGYTSCGPVVEMSWYRAGVLLLGAQSCLPVPEVPAVGGVGSVLLFMARMGWELCHVFRPYTVVLKCGMVGLGWLGTSWDPGSGCQFGLNHRRPWVKAGLKCLCNNMFNREKGKNVSGYASSNSSFQLNPPLASRELTRAHPWSIPSMRLSSQLPLVGSQDQNKYVFDRAFATQANELPMPEEHVPFCHDCREQGHYALNCPWVYAKEAPSFGLAGQTSLSQPPRTKSSLQPSVQSREPNEENPLNPGKCFLSSLSYHVGSHTKQAKGKKSKNQKRKAPMRTEEEVRKMTITSTEWPPAGITIPRRQRGNTFRGARQLTQHLLSHGGRVYDSEGSDQVSSDYEDESPRHLGEEEMESKACNRCGEIGHIASMCLTLCPHCGEDHPPGECPTRKVTCFLCEAPTILCTDSLSKELSSMEEVVSLPDLLQAEQRAINLRRAIPSRRPFSASNSNQKEASPVNDSNMQSYHIITEPIKDAVTRTMPAIPLQNQNE

SEQ ID NO: 19352 - protein, 415 aa, Oryza sativa
  Clone ID: TF_OSC402037j.C1.p4.fg
MSWHRAGVLLLGGSILPACPGGSGRRWGWMFNREKGKNVSGYASSNSSFQLNPPLASRELTRAHPWSIPSMRLSSQLPLVGSQDQNKYVFDRAFATQANELPMPEEHVPFCHDCREQGHYALNCPWVYAKEAPSFGLAGQTSLSQPPRTKSSLQPSVQSREPNEENPLNPGNCFLSSLSYHVGSHTKQAKGKKSKNQKRKAPMRTEEEVRKMTITSTEWPPAGITIPRRQRGNTFRGARQLTQHLLSHGGRVYDSEGSDQVSSDYEDESPRHLGEEEMESKACNRCGEIGHIASMCLTLCPHCGEDHPPGECPTRKVTCFLCEAPTILCTDSLSKELSSMEEVVSLPDLLQAEQRAINLRRAIPSRRPFSASNSNQKEASPVNDSNMQSYHIITEPIKDAVTRTMPAIPLQNQNE

SEQ ID NO: 19353 - protein, 313 aa, Oryza sativa
  Clone ID: TF_OSC858j.C1.p1.fg
MPEEHVPFCHDCREQGHYALNCPWVYAKEAPSFGLAGQTSLSQPPRTKSSLQPSVQSREPNEENPLNPGNCFLPSLSYHVGSHTKQAKGKKSKNQKRKAPMRTEEEVRKMTITSTEWPPAGITIPRRQRGNTFRGARQLTQHLLSHGGRVYDSEGSDQVSSDYEDESPRHLGEEEMESKACNRCGEIGHIASMCLTLCPHCEEDHPPGECPTRKVTCFLCEAPTILCTDSLSKELSSMEEAVSLPDLLQAEQRAINLRRAIPSRRPFSASNSNQKEASPVNDSNMQSYHIITEPIKDAVTRTMPAIPLQNQNE

SEQ ID NO: 19354 - protein, 1524 aa, Oryza sativa
  unsure (1)..(1524): unsure at all Xaa locations
  Clone ID: TF_OSC900038j.C1.p7.np
VKTRNGSRDSSNVSGSEEQISGARANSASDNSPSPPPENPTIAQVLDNQTQMMSMMMQQMQQQYHQVLQQVQQQAQQQQQNLQFGLPPPQSKLLEFLHVKLPTFSSTTNPIETNDWLHAIEKKLNLLQCNDQEKVAFATHXLQGPASVWWDNYVGTRPARTEVTWAEFCQSFNKAQVPEGIVAPKKREFRSLQQGTRTVIEYLHEFNRLARYAPEDVRTDAERQEKFLSGLDDELTNQLISRDYEDFQKLVDKAIRQEEQGNKMNRKRKASXFRTSQGNSQKPRFTMGHQGGPSTMIIRHHRPYHPDNFNSINNSGSHRNSEQHSLNPTPSPLMIPAQSVQSAQQEQPKKFGEKPELCFNCNEPRHMVRMCPKPRRARLKFVQARVNHASAEEAQSAPEVILGTFPVNSTPAVILFDSGATHSFISKRFAGAHGLSLVKLKIPMRVHTPGGGMTTTHYCPSMTVEIQGLIFPANLILLESKDLDVILGMDWLTRYRGVIDCASRTIKLTNAKGEVVTFQSPVPQKPGISLNQAAGEEQEVAVEKTTKKLEDIPIVREYPEVFPDDLTTMPPKRDIEFRIDLVPRTAPIHKRPYRMRANELAEVKNQVDEQLQKGYIRPSTSPWGALVIFVEKKDKTKRMCVDYRALNEVTIKNKYPLPRIDDLFDQLKGATVFSKIDLRSGYHQLRIREEDIPKTAFIARXGLFECTVMSFGLTNAPAFFMNLMNKVFMEFLDKFVVVFIDDILIYSKSEEEHEQHLRLVLEKLKEHQLYAKFSKCDFWLKEVQFLGHIVNAQGVAVDPANVESVTKWTPPRTVTQVQSFLXLAGYYRRFIENFSKIAKPMTQLLKKEEKFIWSAECNRSFEELKRRLVSAPVLILPDQTKVLQVYCDASRQGLGCVLMQDGKVVSYASWQLRPHEGNYPTHDLELAAVVHALKIWWHYLIGNRCEVYTDHKSLKYIFTQPDLNLRQRRWLELINDYDMGIHYHPGKANVVADALSRKSYCNVAWVEQLCCEVQCDLEHLNLGIVEHGFVAALEAQPTLVEQVRIAQASDPKIAELKKNMRVGKARGFVEDEQGTIWMGERLCVPENKELKDLIMTEAHQTQYSIHPGSTKMYQDLKEKFWWVNMRREIAEFVALCDVCQRVKAEHQRPAGLLQPLQIPEWKWEEIGMDFITGLPRTSSGHDSIWVVVDRLTKVAHCIPVHTTYSGKRLAELYLTRIMCLHGVPKKIVSDRGSQFTSKFXQKLQEELGTLLNFSTAYHPQTDGXTERVNQLLEDMLRACTLDFGGAWDKSLPYAEFSYNNSYQASLQMAPFEALYGWRCRTLLFWDQTGERQLFGTXVLNEAEEKVRAVRERLRIAQCRQKSYVDNRRRELIFETEDYVYLRVTPLRGVHHFQTKGKLAPRFVGPYRILERRGEVAYQLELPSNMLGIHNVFHVSQLKKCLRVPEEQASPDQIEIQKDLTYVEKPTRILETSERRTRNKVIRFCKVQWSHHSEEEATXERENELKTAHPHLFTNSSESRGRDSV

SEQ ID NO: 19355 - protein, 813 aa, Oryza sativa
  Clone ID: TF_OSC400433j.C1.p8.gm
MDLALQELARRIFCGVQIAFQEWPESRFGSLPHASAVDRASVPCAISCSPSLPLPRWLSSPPPDVFVRPDLCTAHLLLPDPILCARCLRSSVRLRTCTGRRAIKFLGSASSATALVLRGYCCYIGAFTKMSTEIGDKKMNDINGGNTASKSSGGTFSGVLADNIVDVYMHMPSGKDMWDALKAKFGAHEIQMLAKELENNNCELPDKFVAGVIIAKLPPSWTDFGTSLKHKRQEFSVTDLIGSLGVEEKARAKDNRGKKIEGGSSANLVQKKNPHASHNNNKKVKPDVKPKATTNFKKKGKGKAKGGCFVCGKSGYWAKDCPERKDKKSGNMVISEGGGTSRYGCKWVFKEKLRPDGTIEKYKARLVAKGYTQKEGEDFFDTYSSVARLTTIRVLLALAASHGLLVHQMDVKTAFLNGELDEEIYMDQPDGYVLEGQKGMVCKLLKSLYGLKQAPKQWHEKFDNTLTSAGFVVNEADKCVYYRYGGGEGVILCLYVDDILIFETSLNVIEEVKDFLSKSFEMKDFDCKAAPTPYDPSVLLRKNRRIARDQLRYSKIIGSLMYLASATRPDISFAVNKLGRFVSNPGDDHWHALERVMRYLKGIMSYEIHYVGYPKVLEGYSESNWIFDADEIKATSGYVFTLGGGAVSWKSCKQTILTRSTMEAELTALDTATVKAEWLRELLMDLPVVEKPVPAILMNCDNQTVIIKVNSSKDNMKSSRHVKRRLKCLRSSVRLRTCTGRRAIKFLGSASSATALVLRGYCCYIGAFTKMSTEIGDKKMNDINGGNTASKSSGMGGARPTPAPPGGFATGGG

SEQ ID NO: 19356 - protein, 1003 aa, Oryza sativa
  Clone ID: TF_OSC15301j.C1.p1.fg
MAGFADALRPDKFTGMHFKRWQIRVTLWLTAMKCFWVSTGKPMGVLNADQQKEFDEATTLFVGCILSVLGDRLVENKSKGKYKAQQTTNFKKKKNNNNPNQDERTCFVCGQPGYLARKCPQHKGMKAPAGQTSKSANVTIGNTGDGSGYGANIHVCADISLFSSYQAARGSTVLMGNGSHDSIDRNLVSGSRLTRDGFKLVFESNKVVVSKHGYFIGKGYECGGLFCFSLFDFCNKSVNHISGSVDDEANGGKRYFMTLIDDATRFCYVYLLKTKDEALDYFKIYKAEVENQLDRKIKRLWSDRGGEFFSNEFDLFCKEHGIIHERTPPYSPESNGIAERKNRTLTDLVNAMLDTAGLPKAWWGEALLTSNHVLNRVPNRNKDKTPYEIWIGRKPSLSYLRTWGCLAKINVPITKKRKLGPKTMDCVFLGYAHHSIAYRFLIVKSEVPDMHVGTIMESRDAIFFESFFPMKDTHSSSSQPSEIIPSSITPPEQTEYTHEYVTKDDDSEAPRRSKRQRMAKSFGDDFTVYLVDDTPKSISEAYASPDADYWKEAVRSEMDSIIANGTWEVTERPYGCKPVGCKWVFKKKLRPDASHGLLVHQMDVKTTFLNGELDEDIYMNQPDGFVVEGQEGKVCKLLKSLYGLKQAPKQWHEKFDKTLTSAGFAVNEVDKCVYYHHGGGEGVIPCLYVDDILIFGTNLEVINEVKSFLSQNFDMKDLGVADVILNMKLIRSENGITLLQSHYVEKILNRFGYIDNKPSPTPYDPSLLLRKNKRIARNQLQYSQIIGSLMYLASATRPDISFAMSKLSRFTSNPGDDHWRALERVMRYLKGTMELGFHYSGYPTVLEGYSDSNWISDMDEIKATSGYVFTLGGGAVSWRSCNQTILTRSTMEAELTALDTATVEAEWLRDLLMDLPIVEKPVPAILMNCDNQTVILKVNSSKDNMKSSRHVKRQVKSVRKLRNSGVITLDYIQTARNLADPFTKGLSRNVIDNASKEMGLRPM

SEQ ID NO: 19357 - protein, 996 aa, Oryza sativa
  Clone ID: TF_OSC379j.C1.p2.fg
MAPANPRHRLIAPIHAAAAAGGGGGGAGATSPSGLPSLVGIAHLLVSLGIVLASDKFLKQAFAAASIKFPSALFGMFCVFSVLVVLDAFAPALAKGFMDFFEPATLFIQRWLPLFYVPSLVVLPLAVRDVPAASGLKIFLIIFGGWFASLMVAGYTALTVRKIVQTQLIPAEPMSKPSPFATLEFWAWGAVFVASFAVAYVNPTALGTTARTCLPFLLASTVLGYMVGSGIPSGVKKVLHPIICCALSADLAAIAYGYLSRSGVDAVLGDYLTKAPSNPGAGDVLMGFLGSVIISFAFSMFKQRKLVKRHAAEIFTSIAIASTFSLYSTAILGRVIGLEPSLTISILPRCITVALALSIVSFFEGVNSSLTAAVVVLTGLIGANFVQAAMDKLGLNDPIARGIGTASSAHGLGTAALSAKEPEALPFCAIAYGLTGIFENMNTPRRENAKAIFTKSKTNYEVQGKSQARTARTSAGTGGRQEAAPRQQEAFGWEEASAAKVDSDEDDAAEECDDGAVVLGGVEREVAGEEVLQVLQPPDAIGAQHLDHAVHQLDEDILYYYPLAKTQKSSANLSVPKNCLSPGNLNLLGLGQPHLGRIVIILVEMRGILEYKEYNTVNRLFQFACKAEREVQGRNKHRSSFAGATSTRQSTPRQFTTAVRPPTSTPSHAQETSKNASVQTPAKSATSVASTGRTRDITCHRCHGIGHIARDYPNQRALFVNDDGEYTSTSDCDDEYALVATDHVGGQDNDDIEEVHLHPESLDQYPSLIVKLALSAKEKCEEQNQRHNLFQSKVLVKGHTVKVIIDSGSCNNLASEEMVKKLGLTTHPHPHPYHIQWFNTCGKMKEYEGAFHDEIPPRMTPGRQSEHDQEDGIESRTTPIQEGEDDEDITSSETHITSHVPMIIPSPSPFRPPETALTSNGPSAFLPTPIWVILDFVESYLATFQTHSVSCPNSSRVNGNHQNKTVMLLKPNLGLGPCNRLGPSRKCLPPPPRIST

SEQ ID NO: 19358 - protein, 1021 aa, Oryza sativa
  Clone ID: TF_OSC400758j.C1.p37.fg
MPTQPLLLLLLLPPSGGNLHGSRQSSPPPHRPDPRRRRRRRRRRRRGRHLSLGPTQRESSISQNARSLVAISHDLPIELTCFLKQAFAAASIKFPSALFGMFCVFSVLVVLDAFAPALAKGFMDFFEPATLFIQRWLPLFYVPSLVVLPLAVRDVPAASGLKIFLIIFGGWFASLMVAGYTALTVRKIVQTQLIPAEPMSKPSPFATLEFWAWGAVFVASFAVAYVNPTALGTTARTCLPFLLASTVLGYMVGSGIPSGVKKVLHPIICCALSADLAAIAYGYLSRSGVDAVLGDYLTKAPSNPGAGDVLMGFLGSVIISFAFSMFKQRKLVKRHAAEIFTSIAIASTFSLYSTAILGRVIGLEPSLTISILPRCITVALALSIVSFFEGVNSSLTAAVVVLTGLIGANFVQAAMDKLGLNDPIARGIGTASSAHGLGTAALSAKEPEALPFCAIAYGLTGIFENMNTPRRENAKAIFTKSKTNYEVQGKSQARTARTSAGTGGRQEAAPRQQEAFGWEEASAAKVDSDEDDAAEECDDGAVVLGGVEREVAGEEVLQVLQPPDAIGAQHLDHAVHQLDEDILYYYPLAKTQKSSANLSVPKNCLSPGNLNLLGLGQPHLGRIVIILVEMRGILEYKEYNTVNRLFQFACKAEREVQGRNKHRSSFAGATSTRQSTPRQFTTAVRPPTSTPSHAQETSKNASVQTPAKSATSVASTGRTRDITCHRCHGIGHIARDYPNQRALFVNDDGEYTSTSDCDDEYALVATDHVGGQDNDDIEEVHLHPESLDQYPSLIVKLALSAKEKCEEQNQRHNLFQSKVLVKGHTVKVIIDSGSCNNLASEEMVKKLGLTTHPHPHPYHIQWFNTCGKMKEYEGAFHDEIPPRMTPGRQSEHDQEDGIESRTTPIQEGEDDEDITSSETHITSHVPMIIPSPSPFRPPETALTSNGPSAFLPTPIWVILDFVESYLATFQTHSVSCPNSSRVNGNHQNKTVMLLKPNLGLGPCNRLGPSRKCLPPPPRIST

SEQ ID NO: 19359 - protein, 1304 aa, Oryza sativa
  unsure (1)..(1304): unsure at all Xaa locations
  Clone ID: TF_OSC422113j.C1.p1.np
MAGFADALRPDKFTGVHFKRWQIRVTLWLTAMKCFWVSTDKPMGVLNADQQKEFDEATTLFVGCILSVLGDRLVEVYMHMTDAKELXDALNTKFGATDASNDLYIMEQFHDYKMADNRSVVEQAHEIQTTAKELELLKCVLPDKFVAGCTIAKLTPSWRGFGTALKHKRQEYSVEGLIASLDVEEKAREKDAASKGDGGQSTANVVHKAQNKSKGKYKAQQTTNFKKKNNNNNPNQDERTCFVCGQPGYLARKCPQRKGMKAPAGQTSKSANVTIGNTGDGSGYGNLPTVFSVNQSTNWWVDTGANAHVCADISLFSSVARGSTVLMGNRSHAFVHGVGTVDLKFTSGKIVQLKNVQHVPSIDRNLVSGSRLTRDRFKLVFESKVVVSKHGYFIGKGYECGGLFCFSLSDFCNKSMNHICGSVDDEANVWHSRLCHINFGLMSRLSSMCLIPKFSIVKGSKCHSCVQSKQPRKPHKAAEERNLAPLELLHSDLCEMNRVLTKGEKRYFMTLIDDATRFCYVYLLKTKDEALDYFKIYKAEVENQLDRKKKRLRSDRDVEFFXNEFDLFCEEHDIIHERTPPYSPESNGFAESENRTLTDLVNAMLDTAGLPKAWWGEALLTSNHVLNRVPNRNKDKTPYKIWIGRKPSLSYLRTWGCLAKVNASITKKRKLGPKTVDCVFLGYAHHSIAYRFLIVKSEVPDMHLGTIMESRYATFFESFFPMKDTHSSSSQPSEIIPSSITLPEQTEHTHEHVTEEDDSEAPRRSKRQRTAKSFGDDFTVYLVDDTPKSILEAXASPDADYWKXAVRSEMDSIIANGTWEVTERPYGCKPMGCKWVFKKKLRPDGTIEKYKARLVAKGYTQKEGEDFFDTYSPVARLTTVRMLLSLAASHGLLVHQMDVKTAFLNGELDEEIYMDQPDGFVVEGQEGKVCKLLKSLYGLTQAPKQWHEKFDKTLTSAGFAVNEADKCVYYRHGGGEGVILXLYVDDILIFGTNLEVINEVKSFLSQNFDIKDLGVADVILNIKLIRGENGITLLQSHYVEKIFNRFGYIDSKPSPTPYDPSLLLRKNKRIARNQLEYSQIIGSLMYLASATRPDISFAVSKLSQFTSNPGDDHWRAVERVMRYLKGTMELGLHYSGYPAVLEGYSDSNWISDVDEIKATSGYVFTLGGGAVSWRSCKQTILTRSTMEAELTALDTATVEAEWLCDLLMDLPIVEKPTCEKTIEVCQEIEKLRSYNVGLHPNNXKPSRSLHEGTITKCDRXCIEGDGFETHSILERTHLCKLDCWSQSMKILSESSRKLTKDLGV

SEQ ID NO: 19360 - protein, 1388 aa, Oryza sativa
  Clone ID: TF_OSC101253j.C1.p7.fg
MGCIKDIPTLKGDNYAEWKRKLDLAFILGEVDWVLTTPCPIEPADLVRGENESDADWQKRQRDNAPLVMSYDIEQKKWSLANKKCLAVVKNTIEPTILGSIPECDAVSEYLERIKSQFTGSSKTYATQLIKQLVTERYHGGGVRDHILRMSNMASKLKPMDLGITDDFLVHLVMASLPKQFDNFIVNYNISPEKWNFEKLIANCVQEEERIKESNGGSINYVKDKKKNHKSPTSKGKQSQHLPQQQQFAVEKDQCLHCKKTGHYKKDCPDFLKMIMAKKGENIITFVNESHYVGYSRSTWWIDSGATIHACNCLKAFRSTRTTQRRESTIRVANGVEEKVEAVGDLPLELANGFILLLRDVFYVPSLQRNLISVSKLDFDGYDCRFGSGKCELWHNNACIGLAVLRDELYLLSLSENVNVVSSLTKENKKRKRTPDVSSKLWHCRLGHISRGRIERLVKNEILPPLEFSDLEQCIECIKGKFVKSIKKGAKRSAGILEIIHTDICGPFPVKSVDGYDSFITFTDDYSRYGYIYPIKERSEALDKFKIFKAEVENQHDIKIKVVRSDRGGEYYGRHTPYGQVPGPFARFLLENGIVAQYSTPGEPQQNGVAERRNRTLMDMVRSMMSYSTLPLGLWMEALKTAIHILNRVPSKSVPKTPYELWTGRVPSLTHLRVWGSPAEAKVFNPNIGKLDPKTVSCHFIGYPERSKGYRFYCPNSYTKFVETRHAVFLEDEMIRGSSVVREIDLEERRVSVPAPSTQEPFFSLPADVVPAMPVIEVPAPVVTPPVATMNESEEPVIQDSTEMVATPEEELQQPQIDNVPVQETHQEPQVQDVPNVQAPRRSERVRRSAIRDDYKVYNIEESHMEDDPTSYEEAMRSARSSEWLEAMKDEMKSMKLNDVWDLEEIPKGAKTVGCKWVYKTKYDSRGNIEKFKARLVAKGFTQREGIDYNETFSPVSCKDSFRIIMALVAHYDLELHQMDVKTAFLNGDLEEKVYMAQPKGFVMKGNENMGCRLKRSIYGLKQASRQWYLKFDGTIKKFGFQENVEDNCIYSKFKNGRFIFLILYVDDILLASSDVSLLQETKKFLSSNFDMKDLGEASYVLGIEIHRDRTKYALGLSQKTYIEKVLKKFNMYRCSATPAPIMKGEKYGASQCPRNQYELNEMKTKPYASAVGSLQYAQVCTRPDLAFVTGLLGRFQSNPGLEHWKLVKKVLRYLQGTKGLMLSYRRSESLQIVGYSDSDFAKDNTKSTSGYVFTLAGGAISWKSSKQTITAGSTMYAEFIACYEATGQVNWLKKFIPGLKVVDSIEKPLKLYCDNEPAVMYAHNNQSSGAAKHIDIKYYVVKDKVRDQTISLEHIKTERMLADPLTKGLPPNVFKEHVAGMGLREAL

SEQ ID NO: 19361 - protein, 355 aa, Oryza sativa
  Clone ID: TF_OSC101253j.C1.p8.gm
MPQTVPPKTAPRKPPPPTAVDRPISCCCCLGGEEKEARRCGRRGGAGEAERRRGRRGGYSLMGCIKDIPTLKGDNYAEWKRKLDLAFILGEVDWVLTTPCPIEPADLVRGENESDADWQKRQRDNAPLVMSYDIEQKKWSLANKKCLAVVKNTIEPTILGSIPECDAVSEYLERIKSQFTGSSKTYATQLIKQLVTERYHGGGVRDHILRMSNMASKLKPMDLGITDDFLVHLVMASLPKQFDNFIVNYNISPEKWNFEKLIANCVQEEERIKESNGGSINYVKDKKKNHKSPTSKGKQSQHLPQQQQFAVEKDQCLHCKKTGHYKKDCPDFLKMIMAKKGIPFDEDYAKKRKHH

SEQ ID NO: 19362 - protein, 694 aa, Oryza sativa
  Clone ID: TF_OSC11286j.C1.p1.fg
GYSLMGCIKDILTLKGDNYAEWKRKLDLAFILGDVDWVLTTPCPIEPAELIRGENESDADWQKRQRDNAPLVMSYDIEQKKWSLANKKCLAVVKNTIEPTILGSIPECDAVSEYLERIKSQFTGSSKTYATQLIKQLVTERYHGGGVRDHILRMSNMASKLKPMDLGITDDFLVHLVMASLPKQFDNFIVNYNISPEKWNFEKLIANCVQEEERIKESNGCSINYVKDNKKKNHKSSPTSKAKQSQHLPQQQQFAVEKDQCLHCKKTGHYKKDCPDFLKMIMARKDELYLLSLSENVNVVSSLTKENKKRKRTPDVSSKLWHCRLGHISRGRIERLVKNEILPPLEFSDLEQCIECIKGKFVKSIKKGAKRSTGILEIIHTDICGSFPVKSVDGYDSFITFTDHYFRYGYIYPIKERSEALDKFKIFKAEVENQHDIKIKVVRSNRGGEYYVDIHLMGKSMDLLQGEPQQNGVAERRNRTLMDMVRSMMSYSTLPLGLWMEALKTAIHILNRVPSKSMPKTPYELWTGRVPSLAHLRVWGSPAEAKVFNPNIGKLDPKTVSCHFIGYPERSKGYRFYCPNSYTKFVETRHAVFLEDEMIRGSSVVREIDLEERRVSVPAPSTQEPFFSLPADVVPAIPVIDVPAPVVTSPVATMNENEEPVIQDSTEMVATPEEELQQPQIDNVPVQETQQEPQ

SEQ ID NO: 19363 - protein, 1395 aa, Oryza sativa
  Clone ID: TF_OSC14708j.C1.p1.fg
MATPSTRSRGYSLMGCIKDIPTLKGDNYAEWKRKLDLAFILGEVDWVLTTPCPIEPADLVRGENESDADWQKRQRDNAPLVMSYDIEQKKWSLANKKCLAVVKNTIEPTILGSIPECDAVSEYLERIKSQFTGSSKTYATQLIKQLVTERYNGGGVRDHILRMSNMASKLKPMDLGITDDFLVHLVMASLPKQFDNFIVNYNISPEKWNFEKLIANCVQEEERIKESNGGSINYVKDKKKNHKSPTSKGKQSQHLPQQQQFAVEKDQCLHCKKTGHYKKDCPDFLKMIMAKKGENIITFVNESHYVGYSRSTWWIDSGATIHACNCLKAFRSTRTTQRRESTIRVANGVEEKVEAVGDLPLELANGFILLLRDVFYVPSLQRNLISVSKLDFDGYDCRFGSGKCELWHNNACIGLAVLRDELYLLSLSENVNVVSSLTKENKKRKRTPDVSSKLWHCRLGHISRGRIERLVKNEILPPLECIECIKGKFVKSIKKGAKRSAGILEIIHTDICGPFPVKSVDGYDSFITFTDDYSRYGYIYPIKERSEALDKFKIFKAEVENQHDIKIKVVRSDRGGEYYGRHTPYGQVPGPFARFLLENGIVAQYSTPGEPQQNGVAERRNRTLMDMVRSMMSYSTLPLGLWMEALKTAIHILNRVPSKSVPKTPYELWTGRVPSLTHLRVWGSPAEAKVFNPNIGKLDPKTVSCHFIGYPERSKGYRFYCPNSYTKFVETRHDVFLEDEMIRGSSVVREIDLEERRVSVPAPSTQEPFFSLPADVVPAMPVIEVPAPVVTPPVATMNESEEPVIQDSTEMVATPEEELQQPQIDNVPVQETHQEPQVQDVPNVQAPRRSERVRRSAIRDDYKVYNIEESHMEDDPTSYEEAMRSARSSEWLEAMKDEMKSMKLNDVWDLEEIPKGAKTVGCKWVYKTKYDSRGNIEKFKARLVAKGFTQREGIDYNETFSPVSCKDSFRIIMALVAHYDLELHQMDVKTAFLNGDLEEKVYMAQPKGFVMKGNENMGCRLKRSIYGLKQASRQWYLKFDGTIKKFGFQENVEDNCIYPKFKNGRFIFLILYVDDILLASSDVSLLQKTKKFLSSTFDMKDLGEASYVLGIEIHRDRTKYALELSQKTYIEKVLKKFNMYRCSATPAPIMKGEKYGASQCPRNQYELNEMKTKPYASAVGSLQYAQVCTRPDLAFVTGLLGRFQSNPGLEHWKLVKKVLRYLQGTKGLMLSYRRSESLQIVGYSDSDFAKDNTKSTSGYVFTLAGGAISWKSSKQTITAGSTMYAEFIACYEATGQVNWLKKFIPGLKVVDSIEKPLKLYCDNEPAVMYTHNNQSSGAAKHIDIKYYVVKDKVRDQTISLEHIKTERMLADPLTKGLPPNVFKEHVAGMGLREAL

SEQ ID NO: 19364 - protein, 1395 aa, Oryza sativa
  Clone ID: TF_OSC14723j.C1.p1.fg
MATPSTRSRGYSLMGCIKDIPTLKGDNYAEWKRKLDLAFILGEVDWVLTTPCPIEPADLVRGENESDADWQKRQRDNAPLVMSYDIEQKKWSLANKKCLAVVKNTIEPTILGSIPECDAVSEYLERIKSQFTGSSKTYATQLIKQLVTERYNGGGVRDHILRMSNMASKLKPMDLGITDDFLVHLVMASLPKQFDNFIVNYNISPEKWNFEKLIANCVQEEERIKESNGGSINYVKDKKKNHKSPTSKGKQSQHLPQQQQFAVEKDQCLHCKKTGHYKKDCPDFLKMIMAKKGENIITFVNESHYVGYSRSTWWIDSGATIHACNCLKAFRSTRTTQRRESTIRVANGVEEKVEAVGDLPLELANGFILLLRDVFYVPSLQRNLISVSKLDFDGYDCRFGSGKCELWHNNACIGLAVLRDELYLLSLSENVNVVSSLTKENKKRKRTPDVSSKLWHCRLGHISRGRIERLVKNEILPPLECIECIKGKFVKSIKKGAKRSAGILEIIHTDICGPFPVKSVDGYDSFITFTDDYSRYGYIYPIKERSEALDKFKIFKAEVENQHDIKIKVVRSDRGGEYYGRHTPYGQVPGPFARFLLENGIVAQYSTPGEPQQNGVAERRNRTLMDMVRSMMSYSTLPLGLWMEALKTAIHILNRVPSKSVPKTPYELWTGRVPSLTHLRVWGSPAEAKVFNPNIGKLDPKTVSCHFIGYPERSKGYRFYCPNSYTKFVETRHDVFLEDEMIRGSSVVREIDLEERRVSVPAPSTQEPFFSLPADVVPAMPVIEVPAPVVTPPVATMNESEEPVIQDSTEMVATPEEELQQPQIDNVPVQETHQEPQVQDVPNVQAPRRSERVRRSAIRDDYKVYNIEESHMEDDPTSYEEAMRSARSSEWLEAMKDEMKSMKLNDVWDLEEIPKGAKTVGCKWVYKTKYDSRGNIEKFKARLVAKGFTQREGIDYNETFSPVSCKDSFRIIMALVAHYDLELHQMDVKTAFLNGDLEEKVYMAQPKGFVMKGNENMGCRLKRSIYGLKQASRQWYLKFDGTIKKFGFQENVEDNCIYSKFKNGRFIFLILYVDDILLASSDVSLLQETKKFLSSNFDMKDLGEASYVLGIEIHRDRTKYALGLSQKTYIEKVLKKFNMYRCSATPAPIMKGEKYGASQCPRNQYELNEMKTKPYASAVGSLQYAQVCTRPDLAFVTGLLGRFQSNPGLEHWKLVKKVLRYLQGTKGLMLSYRRSESLQIVGYSDSDFAKDNTKSTSGYVFTLAGGAISWKSSKQTITAGSTMYAEFIACYEATGQVNWLKKFIPGLKVVDSIEKPLKLYCDNEPAVMYTHNNQSSGAAKHIDIKYYVVKDKVRDQTISLEHIKTERMLADPLTKGLPPNVFKEHVAGMGLREAL

SEQ ID NO: 19365 - protein, 1217 aa, Oryza sativa
  unsure (1)..(1217): unsure at all Xaa locations
  Clone ID: TF_OSC15718j.C1.p5.np
DFLVHLVMASLPKQFDNFIVNYNISEKXNFEKLIANCVQEEERIKESNGGSINYVKDKKNHKSPTSKGKQSQHLPSNNFAVEKDQCLHCKKTGHYKKDCPDFLKMIMEKGENIITFVNESHYVGYSRSTWWIDSGATIHACNCLKAFRSTRTTQRRESTIRVANGVEEKVEAVGDLPLELANGFILLLRDVFYVPSLQRNLISVSKLDFDGYDCRFGSGKCELWHNNACIGLAVLRDELYLLSLSENVNVVFLTKENKKRKRTPDVSSKLWHCRLGHISRGRIERLVKNEILPPLEFSDLEQCIECIKGKFVKSIKKGAKRSAGILEIIHTDICGPFPVKSVDGYDSFITFTDDYSRYGYIYPIKERLEALDKFKIFKAEVENQHDIKIKVVRSDRGGEYYGRHTPYGQVPGPFARFLLENGIVAQYSTPGEPQQNGVAERRNRTLMDMVRSMMSYSTLPLGLWMEALKTAIHILNRVPSKSVPKTPYELWTGRVPSLTHLRVWGSPTEAKVFNSNIGKLDPKTVSCHFISYPERSKGYRFYYPNSYTKFVETRHAVFLEDEMIRGSSVVREIDLEERRVSVPAPSTQEPFFSLPADVVPAMPVIEVPAPVVTPPVATLNESEEPVIQDSTEMVATPEEELQQPQINNVPVQETHQEPQVQDVPNVQAPRRSERVRRSAIRDDYKVYNIEESHMEDDPTSYEEAMRSARSSEWLESMKDEMKSMKLNDVWDLEEIPKGAKTVGCKWVYKTKYDSRGNIEKFKARLVAKGFTQREGIDYNETFSPVSCKDSFRIIMALVAHYDLELHQMDVKTAFLNGDLEEKVYMAQPKGFVMKGNENMGCRLKRSIYGLKQASRQWYLKFDGTIKKFGFQENVEDNCIYSKFKNGRFIFLILYVDDILLASSDVSLLQETKKFLSSNFDMKDLGEASYVLGIEIHRDRTKYALGLSQKTYIEKVLKKFNMYRCSTTPAPIMKGEKYGASQCPRNQYELNEMKTKPYASAVGSLQYAQVCTRPDLAFVTGLLGRFQSNPGLEHWKLIKKVLHYLQGTKGLMLSYRRSESLQIVGYSDSDFAKDNTKSTSGYVFTLAGGAISWKSSKXTITAGSTMYAEFIACYETTGQVNWLKKFIPGLKVVDSIEKPLKLYCDNEPAVMYAHNNQSSGAAKHIDIKYYIVKDKVRDQTISLEHIKTERMLADPLTKGLPPNVFKEHVAGMGLREAL

SEQ ID NO: 19366 - protein, 770 aa, Oryza sativa
  Clone ID: TF_OSC18458j.C1.p2.hg
MSYDIEQKKWSLANKKCLAVVKNTIEPTILGSIPECDAVSEYLERIKSQFTGSSKTYATQLIKQLVTERYHGGGVRDHILRMSNMASKLKPMDLGITDDFLVHLVMASLPKQFDNFIVNYNISPEKWNFEKLIANCVQEEERIKESNGGSINYVKDKKKNHKSPTSKGKQSQHLPQQQQFAVEKDQCLHCKKTGHYKKDCPDFLKMIMAKKGENIITFVNESHYVGYSRSTWWIDSGATIHACNCLKAFRSTRTTQRRENTIRVANGVEEKVEAVGDLPLELANGFILLLRDVFYVPSLQRNLISVSKLDFDGYDCRFGSGKCELWHNNACIGLAVLRDELYLLSLSENVNVVSSLTKENKKRKRTPDVSSKLWHCRLGHISRGRVERLVKNEILPPLEFSDLEQCIECIKGKFVKSIKKGAKRSAGILEIIHTDICGPFSVKSVDGYDSFITFTDDYSRYGYIYPIKERSEALDKFKIFKAEVENQHDIKIKVVRSDRGGEYYGRHTPYGQVPGPFARFLLENGIVAQYSTPGEPQQNGVAERRNRTLMDMVRSMMSYSTLPLGLWMEALKTAIHILNRVPSKSVPKTPYELWTGRVPSLTHLRVWGSPAEAKVFNPNIGKLDPKTVSCHFIGYPERSKRYRFYCPNSYTKFVETRHAVFLEDEMIRGSSVVREIDLEERRVSVPAPSTQEPFFSLPADVVPAMPVIEVPAPVVTPPVATMNESEEPVIQDSTEMVVTPEEELQQPQIDNVPVQETHQEPQVQDVPNVQ

SEQ ID NO: 19367 - protein, 1390 aa, Oryza sativa
  Clone ID: TF_OSC26474j.C1.p5.fg
MATPSTRSRGYSLMGCIKDIPTLKGDNYAEWKRKLDLAFILGEVDWVLTTPCPIEPAELVRGENESDADWQKRQRDNAPLVMSYDIEQKKWFLANKKCLAVVKNTIEPTILGSIPECDAVSEYLERIKSQFTDSSKTYATQLIKQLVTERYHGGGVRDHILRMSNMASKLKPMDLGITDDFLVHLVMASLPKQFDNFIVNYNISPEKWNFEKLIANCVQEEERIKESNGGSINYVKDKKKNHKSPTSKGKQSQHLPQQQQFAVEKDQCLHCKKTGHYKKDCPDFLKMIMAKKGENIITFVNESHYVGYSRSTWWIDSGATIHACNCLKAFRSTRTTQRRESTIRVANGVEKVEAVGDLPLELANGFILLLRDVFYVPSLQRNLISVSKLDFDGYDCRFGSGKCELWHNNACIGLAVLRDELYLLSLSENVNVVSSLTKENKKRKRTPDVSSKLWHYRLGHISRGRIERLVKNEILPPLEFSDLEQCIECIKGKFVKSIKKGAKRSAGILEIIHTDICGPFPVKSVDGYDSFITFTDDYSRYGYIYPIKERSEAMDKFKIFKAEVENQLDIKIKVVRSDRGGEYYGRHTPYGQVPGPFARFLLENGIVAQYSTPGEPQQNGVAERRNRTLMDMVRSMMSYSTLPLGLWMEALKTAIHILNRVPSKSVPKTPYELWTGRVPSLTHLRVWGSPAEAKVFNPNIGKLDPKTVSCHFIGYPERSKGYRFYCPNSYTKFVETRHAVFLEDEMIRGSSVVREIDLEERRVSVPAPSTQEPFFSLPADVVPAMPVIEVPMNESEEPVIQDSTEMVATPEEELQQPQIDNVPVQETHQEPQVQDVPNVQAPRRSERVRRSAIRDDYKVYNIEESHMEDDPTSYEEAMRSARSSEWLEAMKDEMKSMKLNDVWDLEEIPKGAKTVGCKWVYKTKYDSRGNIEKFKARLVAKGFTQREGIDYNETFSPVSCKDSFRIIMALVAHYDLELHQMDVKTAFLNGDLEEKVYMAQPKGFVMKGNENMGCRLKRSIYGLKQASRQWYLKFDGTIKKFGFKENVEDNCIYSKFKNGRFIFLILYVDDILLASSDVSLLQETKKFLSSNFDMKDLGEASYVLGIEIHRDRTKYALGLSQKTYIEKVLKKFNMYRCSATPAPIMKGEKYGASQCPRNQYELNEMKTKPYASAVGSLQYAQVCTRPDLAFVTGLLGRFQSNPGLEHWKLVKKVLRYLQGTKGLMLSYRRSESLQIVGYSDSDFAKDNTKSTSGYVFTLAGGAISWKSSKQTITAGSTMYAEFIACYEATGQVNWLKKFIPGLKVVDSIEKPLKLYCDNEPAVMYAHNNQSSGAAKHIDIKYYVVKDKVRDQTISLEHIKTERMLADALTKGLPPNVFKEHVAGMGLREAL

SEQ ID NO: 19368 - protein, 1197 aa, Oryza sativa
  Clone ID: TF_OSC34338j.C1.p3.fg
VDCVLTTPCPIEPAELVRGENESDADWQKRQRDNAPLVMSYDIEQKKWSLANKKCLAVVKNTIEPTILGSIPECDAVSEYLEKIKSQFTGSSKTYATQLIKQLVTERYHGGGVRDHILRMSNMASKLKPMDLGITDDFLEERIKGSNGGSINYVKDKKKNHKSPASKAKQSQHLPQQQQFAVEKDQCLHCKKTGHYKKDCPDFLKMIMARKGENIITFVNESYYVGYSRSTWWIDSGATIHACNCLKAFRSTRTTQRRESSIRVANGVEEKVEAVGDLPLELANGFMLLLRDVFYVPSLQRNLISVSKLDFDGYDCRFGSGKCELWHNNACIGLAVLRDEFYLLSLSENVNVVSSLTKENKKRKRTPDVSSKLWHRRLGHISRGRIERLVKNEILPPLEFSDLEQCIECIKGKFVKSIKKGAKRSARILEIIHTDICGPFPVKSVDGYDSFITFTDDYSRYCYIYPIKERSEALDKFKIFKAEVENQHDIKIKVVRSDRGGEYYGRHTPYGQVPGPFARFLLENGIVAQYSTPGEPQQNGVAKRRNRTLMDMVRSMMSYSTLPLGLWMEALKTTIHILNRIPSKSVPKTPYELWTGRVPSLAHLRVWGSSAEAKVFNPNIGKLDPKTVGCHFIGYPERSKGYRFYCPNSYTKFVEMRHAVFLEDEMIRGSSDSTEMVATPEEELQQPQIDNVPVQETQQEPQVQDVPNMQAPRRSERVRRSAIRDDYKIYNIEESHMEDDPTSYEEAMRSARSSEWLEAMKDEMKSMKLNNVWDLEEIPKRAKTDLMALVAHYDLELHQMDVKTAFLNGDLEEIVYMVQPKGFVMKGNENMGCRLKRSIYGLKQASRQWYLKFDGTIKKFGFQENVEDNCIYSKFKNGRFIFLILYVDDILLASSDVSLLQETKKFLSSNFDMKDLGEASYVLGIEIHRDRTKYALGLSQKTYIEKVLKKFNMYRCSATPAPIVKGEKYGASQCPRNQYELNEMKTKPYASAVGSLQYAQVCTRPDLAFVTGLLGRFQSNPGLEHWKLVKKVLRYLQGTKGLMLSYRRSESLQIVGYSDSDFAKDNTKSTSGYVFTLAGGAISWKSSKQTITAGSTMYAEFIACYEATGQVIDSIEKPLKLYCDNEPAVMYAHNNQSSGAAKHIDIKYYVVKDKVRDQTISLEHIKTERMLADPLTKGLPPNVFKEHVAGMGLREAL

SEQ ID NO: 19369 - protein, 1148 aa, Oryza sativa
  Clone ID: TF_OSC400203j.C1.p35.fg
MEKKLDLAFILGEVDWVLTTPCPIEPAELVRGENESDADWQKRQRDNAPLVMSYDIEQKKWSLANKKCLAVVKNTIEPTILGSIPECDVVSEYRERIKSQFTGSSKTYATQLIKQLVTERYHGGGVRDHILRMSNMASKLKPMDLGITDDFLVHLVMASLPKQFDNFIVNYNISPEKWNFEKLIANCVQEEERIKESNGGSINYVKDKKKNHKSPTSKGKQSQHLPQQQQFAVEKDQCLHCKKTGHYKKDCPDFLKMIMAKKGENIITFVNESHYVGYSRSTWWIDSGATIHACNCLKAFRSTRTTQGRESSIRVANGFEEKVEAVGDLPLELANGFTLLLRDVFYVPSLQRNLISVSKLDFDGYDCRFGSGKCELWHNNACIGLAVLRDELYLLSLSENVNVVSSLTKENKKRKRTSDVSSKLWHCRLGHISRGRIERLVKNEILSPLEFSDLEQCIECIKGKFVKSIKKGAKRSAGILEIIHTDICGPFPMKSMDGYDSFITFTDDYSRYGYIYPIKERSEALDKFKIFKAEVENQHDIKIKVVRSDRGGEYYGRHTPYGQVPGPFARFLLENGIVAQYSTPGEPQQNGVAERRNRTLMAMDRKSTLANSPPYTKFVETRHAVFLEDGMIRGSSVVREIDLEERRVSVPAPSTQEPFFSLPADVVPAMPVIEVPAPVVTPPVATMNESEEPVIQDSTEMVATPEEELQQPQIDNVPVQETHQEPQVQDVPNVQAPRRSERVRRSAIRDDYKVYNIEESHMEDDPTSYEEAMRSARSSEWLEAMKDEMKSMKLNDVWDLEEIPKGAKTVGCKWVYKTKYDSRGNIEKFKARLVAKGFTQREGIDYNETFSPVSCKDSFRIIMALVAHYDLELHQMDVKMAFLNGDLEEKETKKFLSSNFDMKDLGEASYVLGIEIHRDRTKYALGLSQKTYIEKVLKKFNMYRCSATPAPIMKGEKYGASQCPRNKYELNEMKTKPYASAVGSLQRSESLQIVGYSDSDFAKDNTKSTSGYVFTLAGGAISWKSSKQTITGGSTMYAEFIACYEATGQVNWLKKFIPGLKVVDSIEKPLKLYCDNEPAVMYAHNNQSSGAAKHIDIKYYVVKDKVRDQTISLEHIKTERMLADPLTKGLPPNVFKEHVAGMGLREAL

SEQ ID NO: 19370 - protein, 832 aa, Oryza sativa
  Clone ID: TF_OSC400458j.C1.p27.fg
MAGAAKASWMVAMSVGAVEALKDQGGLCRWNYALRSIHKAAKANAAGVSQGKKLPASAAAVAERRRAEKAEEGLRTVMYLSCWGPNCGYSLMGCIKDIPTLKGDNYAEWKRKLDLAFILGEVDWVLTTPCPIEPADLVRGENESDADWQKRQRDNAPLVMSYDIEQKKWSLANKKCLAVVKNTIEPTILGSIPECDAVSEYLERIKSQFTGSSKTYATQLIKQLVTERYHGGGVRDHILRMSNMASKLKPMDLGITDDFLVHLVMASLPKQFDNFIVNYNISPEKWNFEKLIANCVQEEERIKESNGGSINYVKDKKKNHKSPTSKGKQSQHLPQQQQFAVEKDQCLHCKKTGHYKKDCPDFLKMIMAKKGENIITFVNESHYVGYSRSTWWIDSGATIHACNCLKAFRSTRTTQRRESTIRVANGVEEKVEAVGDLPLELANGFILLLRDVFYVPSLQRNLISVSKLDFDGYDCRFGSGKCELWHNNACIGLAVLRDELYLLSLSENVNVVSSLTKENKKRKRTPDVSSKLWHCRLGHISRGRIERLVKNEILPPLEFSDLEQCIECIKGKFVKSIKKGAKRSAGILEIIHTDICGPFPVKSVDGYDSFITFTDDYSRYGYIYPIKERSEALDKFKIFKAEVENQHDIKIKVVRSDRGGEYYGRHTPYGQVPGPFARFLLENGIVAQYSTPGEPQQNGVAERRNRTLMDMVRSMMSYSTLPLGLWMEALKTTIHILNRVPSKSVPKTPYELWTGRVPSLTHLRVWGSPAEAKVFNPNIGKLDPKTVSCHFIGYPERSKGYRFYCPNSYTKFVETRHAVFLEDEMIRGSSVV

SEQ ID NO: 19371 - protein, 659 aa, Oryza sativa
  Clone ID: TF_OSC400762j.C1.p4.fg
MSDLGGKNGENGNEDGASSKGTPSPKGATIPFDYSKLTIPPHNFVSVPSGRAPQFDGTHYAAWKHKMKLHLISLHPSIWKVVCTGVDVPHDDMKLTLEQEQLIHRNAQASNANSLRLESGGVQQEEAHEVRQMVKNAAMIKNQEVALKAKQEEESSCEESEDEEMAFIVKRFKHFIRKSGYGKGRNDDDKGKRQSKRAWFNCGEYGHFIADCPKSNKAKAKGGKKKPERAHVAEAHMAEVWYSGDEEDLEVKPKPKPKDKVEGECGVATVAFKSSSSSKECLFNNLSDDDDDSYHYSCFMAQGRKVMTQKPSHTSLDVDSNDEESDNELDDVLKSFSKPAMQHLAKLMRALDSKEQSLERQEELLILEKKRNLALEESLAKECAKNEQLANELNLANGSLASLRDANETLQEKFASLDKSHKDLEVQFDTLWNNTSQPNVVSNSSNPSTSNGCARCYNIDLNSHATNVDAMQALKKENKRLGTLVKYGCMKTYHSKDALYKTITAHPNKDGHGLGFSGGSPVSKHVMVNVKECLMFVREGKAPQASEVTCPLTGQTPGSSGQNDRKFLPCKTGSSRKFRASDRPKGLTGSSGYNARKFRPEGLYYDLYVISKNSEGKVVAYFNGNYNDEYRTCVWVPKGLVTNIKGPKLRQVWVPKSQA

SEQ ID NO: 19372 - protein, 1405 aa, Oryza sativa
  Clone ID: TF_OSC401215j.C1.p30.fg
MSGASSSTNSSTGGYSLMGCIKDIPTLKGDNYAEWKRKLDLAFILGEVDWVLTTPCPIEPADLVRGENESDADWQKRQRDNAPLVMSYDIEQKKWSLANKKCLAVVKNTIEPTILGSIPECDAVSEYLERIKSQFTGSSKTYATQLIKQLVTERYHGGGVRDHILRMSNMASKLKPMDLGITDDFLVHLVMASLPKQFDNFIVNYNISPEKWNFEKLIANCVQEEERIKESNGGSINYVKDKKKNHKSPTSKGKQSQHLPQQQQFAVEKDQCLHCKKTGHYKKDCPDFLKMIMAKKGENIITFVNESHYVGYSRSTWWIDSGATIHACNCLKAFRSTRTTQRRESTIRVANGVEEKVEAVGDLPLELANGFILLLRDVFYVPSLQRNLISVSKLDFDGYDCRFGSGKCELWHNNACIGLAVLRDELYLLSLSENVNVVSSLTKENKKRKRTPDVSSKLWHCRLGHISRGRIERLVKNEILPPLEFSDLEQCIECIKGKFVKSIKKGAKRSAGILEIIHTDICGPFPVKSVDGYDSFITFTDDYSRYGYIYPIKERSEALDKFKIFKAEVENQHDIKIKVVRSDRGGEYYGRHTPYGQVPGPFARFLLENGIVAQYSTPGEPQQNGVAERRNRTLMDMVRSMMSYSTLPLGLWMEALKTAIHILNRVPSKSVPKTPYELWTGRVPSLTHLRVWGSPAEAKVFNPNIGKLDPKTVSCHFIGYPERSKGYRFYCPNSYTKFVETRHAVFLEDEMIRGSSVVREIDLEERRVSVPAPSTQEPFFSLPADVVPAMPVIEVPAPVVTPPVATMNESEEPVIQDSTEMVATPEEELQQPQIDNVPVQETHQEPQVQDVPNVQAPRRSERVRRSAIRDDYKVYNIEESHMEDDPTSYEEAMRSARSSEWLEAMKDEMESMKLNDVWDLEEIPKGAKTVGCKWVYKTKYDSRGNIEKFKARLVAKGFTQREGIDYNETFSPVSCKDSFRIIMALVAHYDLELHQMDVKTAFLNGDLEEKVYMAQPKGFVMKGNENMGCRLKRSIYGLKQASRQWYLKFDGTINKFGFQENVEDNCIYSKFKNGRFIFLILYVDDILLASSDVSLLQETKKFLSSNFDMKDLGEASYVLGIEIHRDRTKYALGLSQKTYIEKVLKKFNMYRCSATPAPIMKGEKYGASQCPRNQYELNEMKTKPYASAVGSLQYAQVCTRPDLAFVTGLLGRFQSNPGLEHWKLVKKVLRYLQGTKGLMLSYRRSESLQIVGYSDSDFAKDNTKSTSGYVFTLAGGAISWKSSKQTITAGSTMYAEFIACYEATGQVNWLKKFIPGLKVVDSIEKPLKLYCDNEPAVMYAHNNQSSGAAKHIDIKYYVVKDKVRDQTISLEHIKTERMLADPLTKGLPPNVFKEHVAGMGLREAL

SEQ ID NO: 19373 - protein, 390 aa, Oryza sativa
  Clone ID: TF_OSC401215j.C1.p34.fg
MATPSTRSRGYSLMGCIKDIPTLKGDNYAEWKRKLDLAFILGEVDWVLTTPCPIEPADLVRGENESDADWQKRQRDNAPLVMSYDIEQKKWSLANKKCLAVVKNTIEPTILGSIPECDAVSEYLERIKSQFTGSSKTYATQLIKQLVTERYNGGGVRDHILRMSNMASKLKPMDLGITDDFLVHLVMASLPKQFDNFIVNYNISPEKWNFEKLIANCVQEEERIKESNGGSINYVKDKKKNHKSPTSKGKQSQHLPQQQQFAVEKDQCLHCKKTGHYKKDCPDFLKMIMAKKGLRKEEKAPLELPMELKKKLKLVGDLPVELANGFILLLRDVFYVPSLQRNLISVSKLDFDGYDCRFGSGKCELWHNNACIGLAVLRDELYLVSSFLRM

SEQ ID NO: 19374 - protein, 1401 aa, Oryza sativa
  Clone ID: TF_OSC401218j.C1.p17.fg
MATPSTRSRGYSLMGCIKDIPTLKGDNYAEWKRKLDLAFILGEVDWVLTTPCPIEPADLVRGENESDADWQKRQRDNAPLVMSYDIEQKKWSLANKKCLAVVKNTIEPTILGSIPECDAVSEYLERIKSQFTGSSKTYATQLIKQLVTERYNGGGVRDHILRMSNMASKLKPMDLGITDDFLVHLVMASLPKQFDNFIVNYNISPEKWNFEKLIANCVQEEERIKESNGGSINYVKDKKKNHKSPTSKGKQSQHLPQQQQFAVEKDQCLHCKKTGHYKKDCPDFLKMIMAKKGENIITFVNESHYVGYSRSTWWIDSGATIHACNCLKAFRSTRTTQRRESTIRVANGVEEKVEAVGDLPLELANGFILLLRDVFYVPSLQRNLISVSKLDFDGYDCRFGSGKCELWHNNACIGLAVLRDELYLLSLSENVNVVSSLTKENKKRKRTPDVSSKLWHCRLGHISRGRIERLVKNEILPPLEFSDLEQCIECIKGKFVKSIKKGAKRSAGILEIIHTDICGPFPVKSVDGYDSFITFTDDYSRYGYIYPIKERSEALDKFKIFKAEVENQHDIKIKVVRSDRGGEYYGRHTPYGQVPGPFARFLLENGIVAQYSTPGEPQQNGVAERRNRTLMDMVRSMMSYSTLPLGLWMEALKTAIHILNRVPSKSVPKTPYELWTGRVPSLTHLRVWGSPAEAKVFNPNIGKLDPKTVSCHFIGYPERSKGYRFYCPNSYTKFVETRHAVFLEDEMIRGSSVVREIDLEERRVSVPAPSTQEPFFSLPADVVPAMPVIEVPAPVVTPPVATMNESEEPVIQDSTEMVATPEEELQQPQIDNVPVQETHQEPQVQDVPNVQAPRRSERVRRSAIRDDYKVYNIEESHMEDDPTSYEEAMRSARSSEWLEAMKDEMESMKLNDVWDLEEIPKGAKTVGCKWVYKTKYDSRGNIEKFKARLVAKGFTQREGIDYNETFSPVSCKDSFRIIMALVAHYDLELHQMDVKTAFLNGDLEEKVYMAQPKGFVMKGNENMGCRLKRSIYGLKQASRQWYLKFDGTINKFGFQENVEDNCIYSKFKNGRFIFLILYVDDILLASSDVSLLQETKKFLSSNFDMKDLGEASYVLGIEIHRDRTKYALGLSQKTYIEKVLKKFNMYRCSATPAPIMKGEKYGASQCPRNQYELNEMKTKPYASAVGSLQYAQVCTRPDLAFVTGLLGRFQSNPGLEHWKLVKKVLRYLQGTKGLMLSYRRSESLQIVGYSDSDFAKDNTKSTSGYVFTLAGGAISWKSSKQTITAGSTMYAEFIACYEATGQVNWLKKFIPGLKVVDSIEKPLKLYCDNEPAVMYAHNNQSSGAAKHIDIKYYVVKDKVRDQTISLEHIKTERMLADPLTKGLPPNVFKEHVAGMGLREAL

SEQ ID NO: 19375 - protein, 1401 aa, Oryza sativa
  Clone ID: TF_OSC401218j.C1.p21.fg
MATPSTRSRGYSLMGCIKDIPTLKGDNYAEWKRKLDLAFILGEVDWVLTTPCPIEPADLVRGENESDADWQKRQRDNAPLVMSYDIEQKKWSLANKKCLAVVKNTIEPTILGSIPECDAVSEYLERIKSQFTGSSKTYATQLIKQLVTERYHGGGVRDHILRMSNMASKLKPMDLGITDDFLVHLVMASLPKQFDNFIVNYNISPEKWNFEKLIANCVQEEERIKESNGGSINYVKDKKKNHKSPTSKGKQSQHLPQQQQFAVEKDQCLHCKKTGHYKKDCPDFLKMIMAKKGENIITFVNESHYVGYSRSTWWIDSGATIHACNCLKAFRSTRTTQRRESTIRVANGVEEKVEAVGDLPLELANGFILLLRDVFYVPSLQRNLISVSKLDFDGYDCRFGSGKCELWHNNACIGLAVLRDELYLLSLSENVNVVSSLTKENKKRKRTPDVSSKLWHCRLGHISRGRIERLVKNEILPPLEFSDLEQCIECIKGKFVKSIKKGAKRSAGILEIIHTDICGPFPVKSVDGYDSFITFTDDYSRYGYIYPIKERSEALDKFKIFKAEVENQHDIKIKVVRSDRGGEYYGRHTPYGQVPGPFARFLLENGIVAQYSTPGEPQQNGVAERRNRTLMDMARSMMSYSTLPLGLWMEALKTAIHILNRVPSKSVPKTPYELWTGRVPSLTHLRVWGSPAEAKVFNPNIGKLDPKTVSCHFIGYPERSKGYRFYCPNSYTKFVETRHAVFLEDEMIRGSSVVREIDLEERRVSVPAPSTQEPFFSLPADVVPAMPVIEVPAPVVTPPVATMNESEEPVIQDSTEMVATPEEELQQPQIDNVPVQETHQEPQVQDVPNVQAPRRSERVRRSAIRDDYKVYNIEESHMEDDPTSYEEAMRSARSSEWLEAMKDEMKSMKLNDVWDLEEIPKGAKTVGCKWVYKTKYDSRGNIEKFKARLVAKGFTQREGIDYNETFSPVSCKDSFRIIMALVAHYDLELHQMDVKTAFLNGDLEEKVYMAQPKGFVMKGNENMGCRLKRSIYGLKQASRQWYLKFDGTIKKFGFQENVEDNCIYSKFKNGRFIFLILYVDDILLASSDVSLLQETKKFLSSNFDMKDLGEASYVLGIEIHRDRTKYALGLSQKTYIEKVLKKFNMYRCSATPAPIMKGEKYGASQCPRNQYELNEMKTKPYASAVGSLQYAQVCTRPDLAFVTGLLGRFQSNPGLEHWKLVKKVLRYLQGTKGLMLSYRRSESLQIVGYSDSDFAKDNTKSTSGYVFTLAGGAISWKSSKQTITAGSTMYAEFIACYEATGQVNWLKKFIPGLKVVDSIEKPLKLYCDNEPAVMYAHNNQSSGAAKHIDIKYYVVKDKVRDQTISLEHIKTERMLADPLTKGLPPNVFKEHVAGMGLREAL

SEQ ID NO: 19376 - protein, 1405 aa, Oryza sativa
  Clone ID: TF_OSC401275j.C1.p16.fg
MAGTSSSSNTSTGGYSLMGCIKDIPTLKGDNYAEWKRKLDLAFILGEVDWVLTTPCPIEPADLVRGENESDADWQKRQRDNAPLVMSYDIEQKKWSLANKKCLAVVKNTIEPTILGSIPECDAVSEYLERIKSQFTGSSKTYATQLIKQLVTERYHGGGVRDHILRMSNMASKLKPMDLGITDDFLVHLVMASLPKQFDNFIVNYNISPEKWNFEKLIANCVQEEERIKESNGGSINYVKDKKKNHKSPTSKGKQSQHLPQQQQFAVEKDQCLHCKKTGHYKKDCPDFLKMIMAKKGENIITFVNESHYVGYSRSTWWIDSGATIHACNCLKAFRSTRTTQRRESTIRVANGVEEKVEAVGDLPLELANGFILLLRDVFYVPSLQRNLISVSKLDFDGYDCRFGSGKCELWHNNACIGLAVLRDELYLLSLSENVNVVSSLTKENKKRKRTPDVSSKLWHCRLGHISRGRIERLVKNEILPPLEFSDLEQCIECIKGKFVKSIKKGAKRSAGILEIIHTDICGPFPVKSVDGYDSFITFTDDYSRYGYIYPIKERSEALDKFKIFKAEVENQHDIKIKVVRSDRGGEYYGRHTPYGQVPGPFARFLLENGIVAQYSTPGEPQQNGVAERRNRTLMDMVRSMMSYSTLPLGLWMEALKTAIHILNRVPSKSVPKTPYELWTGRVPSLTHLRVWGSPAEAKVFNPNIGKLDPKTVSCHFIGYPERSKGYRFYCPNSYTKFVETRHAVFLEDEMIRGSSVVREIDLEERRVSVPAPSTQEPFFSLPADVVPAMPVIEVPAPVVTLPVATMNESEEPVIQDSTEMVATPEEELQQSQIDNVPVQETHQEPQVQDVPNVQAPRRSERVRRSAIRDDYKVYNIEESHMEDDPTSYEEAMRSARSSEWLESMKDEMESMKLNDVWDLEEIPKGAKTVGCKWVYKTKYDSRGNIEKFKARLVAKGFTQREGIDYNETFSPVSCKDSFRIIMALVAHYDLELHQMDVKTAFLNGDLEEKVYMAQPKGFVMKGNENMGCRLKRSIYGLKQASRQWYLKFDGTIKKFGFQENVEDNCIYSKFKNGRFIFLILYVDDILLASSDVSLLQETKKFLSSNFDMKDLGEASYVLGIEIHRDRTKYALGLSQKTYIEKVLKKFNMYRCSATPAPIMKGEKYGASQCPRNQFELNEMKTKPYASAVGSLQYAQVCTRPDLAFVTGLLGRFQSNPGLEHWKLVKKVLRYLQGTKGLMLSYRRSESLQIVGYSDSDFAKDNTKSTSGYVFTLAGGAISWKSSKQTITAGSTMYAEFIACYEATGQVNWLKKFIPGLKVVDSIEKPLKLYCDNEPAVMYAHNNQSSGAAKHIDIKYYVVKDKVRDQTISLEHIKTERMLADPLTKGLPPNVFKEHVAGMGLREAL

SEQ ID NO: 19377 - protein, 1370 aa, Oryza sativa
  Clone ID: TF_OSC401336j.C1.p1.fg
MAGGPRHTAPYKRGVEAGTARGGYSLMGCIKDIPTLKGDNYAEWKRKLDLAFILGEVDWVLTTPCPIEPAELVRGENESDADWQKRQRDNAPLVMSYDIEQKKWSLANKKCLAVVKNTIEPTILGSIPECDAVSEYLERIKSQFTGSSKTYATQLIKQLVTERYHGGGVRDHILRMSNMASKLKPMDLGITDDFLVHLVMASLPKQFDNFIVNYNISPEKWNFEKLIANCVQEEERIKESNGGSINYVKDKKKNHKSPTSKGKQSQHLPQQQQFAVEKDQCLHCKKTGHYKKDCPDFLKMIMAKKGENIITFVNESHYVGYSRSTWWIDSGATIHACNCLKAFRSTRTTQGRESSIRVANGVEEKVEAVGDLPLELANGFTLLLRDVFYVPSLQRNLISVSKLDFDGYDCRFGSGKCELWHNNACIGLAVLRDELYLLSLSENVNVVSSLTKENKKRKRTSNVSSKLWHCRLGHISRGRIERLVKNEILSPLEFSDLEQCIECIKGKFVKSIKKGAKRSAGILEIIHTDICGPFPVKSMDGYDSFITFTDDYSRYGYIYPIKERSEALDKFKIFKAEVENQHDIKIKVNGVAERRNRTLMDMVRSMMSYSTLPLGLWMEALKTAIHILNRVPSKSVPKTPYELWTGRVPSLTHLRVWGSPTEAKVFNPNIGKLDPKTVSCHFIGYPERSKGYRFYCPNSYTKFVETRHAVFLEDEMIRGSSVVREIDLEERRVSVPAPSTQEPFFSLPADVVPAMPVIEVPAPVVTPPVATMNESEEPVIQDSTEMVATPEEELQQPQIDNVPVQETHQEPQVQDVANVQAPRRSERVRRSAIRDDYKVYNIEESHMEDDPTSYEEAMRSARSSEWLEAMKDEMKSMKLNDVWDLEEIPKGAKTVGCKWVYKTKYDSRGNIEKFKARLVAKGFTQREGIDYNETFSPVSCKDSFRIIMALVAHYDLELHQMDVKTAFLNGDLEEKVYMAQPKGFFMKGNENMGCRLKRSIYGLKQASRQWYLKFDGTIKKFGFQENVEDNCIYSKFKNGRFIFLILYVDDILLASSDVSLLQETKKFLSTNFDMKDLGEASYVLGIEIHRDRTKYALGLSQKTYIEKVLKKFNMYRCSATPAPIMKGEKYGASQCPINQYELNEMKTKPYVSAVGSLQYAQVCTRPDLAFVTGLLGRFQSNPGLEHWKLVKKVLRYLQGTKGLMLTYRRSESLQIVGYSDSDFAKDNTKSTSGYVFTLAGGAISWKSSKQTITAGSTMYAEFIACYEATGQVNWLKKFIPGLKVVDSIEKPLKLYCDNEPAVMYAHNNQSSGAAKHIDIKYYVVKDKVRDQTISLEHIKTERMLADPLTKGLPPNVFKEHVAGMGLREAL

SEQ ID NO: 19378 - protein, 1127 aa, Oryza sativa
  Clone ID: TF_OSC401727j.C1.p3.fg
MSYDIEQKKWSLANKKCLAMVKNTIEPTILGSIPECDAVSEYLERIKRQFTGSSKTYATQLIKQLVTERYHGGGVRDHILRMSNMASKLKPMDLGITDDFLVHLVMASLPKQFDNFIVNYNISPEKWNFEKLIANCVQEEERIKESNGGSINYVKDNKKKNHKSPTSKAKQSQHLPQQQQFAVEKDQCLHCKKTGHYKKDCPDFLKMIMARKGENIVTFVNESHYVGYSRSTWWIDSGAIIHACNCLKAFRSTRTTQRRESSIRVANGVEKKVEAVGDLPLELANGFTLLLRDVFYVPSLQRNLISLSKLDFDGYDCRFGSGKCELCVDGYDSFITFTDDYSRYGYIYPIKERSEALDKFKIFKAEVENQHDIKIKVNGVAERRNRTLMDMVRSMMSYSTLPLGLWMEALKTAIHILNRVPSKSVPKTPYELWTGSVPSIAHLRVWGSPAEAKVFNPNIGKLDPKTVSCHFIGYPERSKGYRFYCPNSYTKFVETRHAVFLEDEMIRESSVVREIDLEERRVSVPAPSTQEPFFSLPADVVPAIPVIEEELQQPQIDNVLVQETQQEPQVQDVPNVQAPRRSERVKRSVIRDDYKVYNIEESHMEDDHTSYEEAMRSARSSEWLEVMKDEMKLMKLNNVWDLEEIPKGDKTVGCKWVYKTKYDSRGNIEKFKARLVAKGFTQREGIDYNETFSPVSCKDSFRIIMALVAHYDLELHQMDVKTTFLNGDLEEKVYMAQPKGFVMKGNGNMGCRLKRSIYELKQASRQWYLKFDGTIKKFGFQENVEDNCIYSKFKNGRFIFLILYVDDILLASSDVSLLQETKKFLSSNFDMKDLGEASYVLGIEIHRDRTKYALGLSQKTYIEKVLKKFNMYRCSATPAPIVKGEKYGASQCPRNQYELNEMKTKPYASAIGSLEYAQVCTRPNLAFVIGLLGRFQSNLGPEHWKLVKKVLHYFQGTKGLMLSYRRSESLQIMGYSDSDFTKDNTKSTSGYVFTLAGGAISWKSSKQTITAGSTMYAEFIACYEATGQVNWLKKFILSLKVVDSIEKPLKLYCDNEPAVMYAHSNQSSGAAKHIDIKYYVVKDKVRDQTISLEHIRTERMLADPLTKGLPPNVFKEHVAGMGLREAL

SEQ ID NO: 19379 - protein, 1407 aa, Oryza sativa
  Clone ID: TF_OSC401892j.C1.p4.fg
MARRREGRRRRRRRSARPRAREKRREARVFGGRPGEGGFDPPISAPGRPIETLADRTAGAGGYSLMGCIKDIPTLKGDNYAEWKRKLDLAFILGEVDWVLTTPCPIEPAELVRGENESDADWQKRQRDNAPLVMSYDIEQKKWSLANKKCLAVVKNTIEPTILGSIPECDTVSEYLERIKSQFTGSSKTYATQLIKQLVTERYHGGGVRDHILRMSNMASKLKPMDLGITDDFLVHLVMASLPKQFDNFIVNYNISPEKWNFEKLIANCVQEEERIKESNGGSINYVKDKKKNHKSPTSKGKQSQHLPQQQQFAVEKDQCLHCKKTGHYKKDCPDFLKMIMAKKGENIITFVNESHYVGYSRSTWWIDSGATIHACNCLKAFRSTRTTQRRESTIRVANGVEEKVEAVGDLPLELANGFILLLRDVFYVPSLQRNLISVSKLDFDGYDCRFGSGKCELWHNNACIGLAVLGRIERLVKNEILPPLEFSDLEQCIECIKGKFVKSIKKGAKRSAGILEIIHTDICGPFPVKSVDGYDSFITFTDDYSRYGYIYPIKERSEALDKFKIFKAEVENQHDIKIKVVRSDRGGEYYGRHTPYGQVPGPFARFLLENGIVAQYSTPGEPQQNGVAERRNRTLMDMVRSMMSYSTLPLGLWMEALKTAIHILNRVPSKSVPKTPYELWTGRVPSLTHLRVWGSPTEAKVFNPNIGKLDPKTVSCHFIGYPERSKGYRFYCPNSYTKFVETRHAVFLEDEMIRGSSVVREIDLEERRVSVPAPSTQEPFFSLPADVVPAMPVIEVPAPVVTPPVATMNESEEPVIQDSTEMVATPEEELQQPQIDNVPVQETHQEPQVQDVPNVQAPRRSERVRRSAIRDDYKVYNIEESHMEDDPTSYEEAMRSARSSEWLEAMKDEMKSMKLNDVWDLEEIPKGAKTVGCKWVYKTKYDSRGNIEKFKARLVAKGFTQREGIDYNETFSPVSCKDSFRIIMALVAHYDLELHQMDVKTAFLNGDLEEKVYMAQPKGFVMKGNENMGCRLKRSIYGLKQASRQWYLKFDGTIKKFGFQENVEDNCIYSKFKNGRFIFLILYVDDILLASSDVSLLQETKKFLSSNFDMKDLGEASYVLGIEIHRDRTKYALGLSQKTYIEKVLKKFNMYRCSATPAPIMKGEKYGASQCPRNQYELNEMKTKLYASAVGSLQYAQVCTRPDLAFVTGLLGRFQSNPGLEHWKLVKKVLRYLQGTKGLMLSYRRSESLQIVGYSDSDFAKDNTKSTSGYVFTLAGGAISWKSSKQTITAGSTMYAEFIACYEATGQVNWLKKFIPGLKVVDSFEKPLKLYCDNEPAVMYAHNNQSSGAAKHIDIKYYVMKDKVRDQTISLEHIKTERMLADPLTKGLPPNVFKEHVAGMGLREAL

SEQ ID NO: 19380 - protein, 206 aa, Oryza sativa
  Clone ID: TF_OSC401976j.C1.p3.fg
MSYDIEQKKWSLANKKCLAVVKNTIEPTILGSIPECDAVSEYLERIKSQFTGSSKTYATQLIKQLVTERYYGGGVRDHILRMSNMAFKLKPMDLGITDDFLVHLVMASLPKQFDNFIVNYNINNKKKNHKSPTSKAKQSQHLPQQQQFAVEKDQCLHCKKTGHYKKDCPDFLKMIMARKGLRKEEKAPLELPMELKKKLKLLEIFL

SEQ ID NO: 19381 - protein, 1112 aa, Oryza sativa
  Clone ID: TF_OSC405551j.C1.p1.fg
MSWHRAGVLLLGAQSCLPVPGVPAVGGIGSVLLSMARMGWKLCHIFRLYTVVEERIKESNGGSINYVKDKKKNHKSPTSKGKQSQHLPQQQQFAVEKDQCLHCKKTGHYKKDCPDFLKMIMAKKGENIITFVNESHYVGYSRSTWWIDSGATIHACNCLKAFRSTRTTQRRESTIRVANGVEEKVEAVGDLPLELANGFILLLRDVFYVPSLQRNLISVSKLDFDGYDCRFGSGKCELWHNNACIGLAVLRDELYLLSLSENVNVVFSLTKENKKRKRTPDVSSKLWHCRLGHISRGRIERLVKNEILPPLEFSDLEQCIECIKGKFVKSIKKGAKRSAGILEIIHTDICGPFPVKSVDGYDSFITFTDDYSRYGYIYPIKERLEALDKFKIFKAEVENQHDIKIKVVRSDRGGEYYGRHTPYGQVPGPFARFLLENGIVAQYSTPGEPQQNGVAERRNRTLMDMVRSMMSYSTLPLGLWMEALKTAIHILNRVPSKSVPKTPYELWTGRVPSLTHLRVWGSPTEAKVFNSNIGKLDPKTVSCHFISYPERSKGYRFYYPNSYTKFVETRHAVFLEDEMIRGSSVVREIDLEERRVSVPAPSTQEPFFSLPADVVPAMPVIEVPAPVVTPPVATLNESEEPVIQDSTEMVATPEEELQQPQINNVPVQETHQEPQVQDVPNVQAPRRSERVRRSAIRDDYKVYNIEESHMEDDPTSYEEAMRSARSSEWLESMKDEMKSMKLNDVWDLEEIPKGAKTVGCKWVYKTKYDSRGNIEKFKARLVAKGFTQREGIDYNETFSPVSCKDSFRIIMALVAHYDLELHQMDVKTAFLNGDLEEKVYMAQPKGFVMKGNENMGCRLKRSIYGLKQASRQWYLKFDGTIKKFGFQENVEDNCIYSKFKNGRFIFLILYVDDILLASSDVSLLQETKKFLSSNFDMKDLGEASYVLGIEIHRDRTKYALGLSQKTYIEKVLKKFNMYRCSTTPAPIMKGEKYGASQCPRNQYELNEMKTKPYASAVGSLQYAQVCTRPDLAFVTGLLGRFQSNPGLEHWKLIKKVLHYLQGTKGLMLSYRRSESLQIVGYSDSDFAKDNTKSTSGYVFTLAGGAISWKSSK

SEQ ID NO: 19382 - protein, 1401 aa, Oryza sativa
  Clone ID: TF_OSC406486j.C1.p2.fg
MATPSTRSRGYSLMGCIKDIPTLKGDNYAEWKRKLDLAFILGEVDWVLTTPCPIEPADLVRGENESDADWQKRQRDNAPLVMSYDIEQKKWSLANKKCLAVVKNTIEPTILGSIPECDAVSEYLERIKSQFTGSSKTYATQLIKQLVTERYHGGGVRDHILRMSNMASKLKPMDLGITDDFLVHLVMASLPKQFDNFIVNYNISPEKWNFEKLIANCVQEEERIKESNGGSINYVKDKKKNHKSPTSKGKQSQHLPQQQQFAVEKDQCLHCKKTGHYKKDCPDFLKMIMAKKGENIITFVNESHYVGYSRSTWWIDSGATIHACNCLKAFRSTRTTQRRESTIRVANGVEEKVEAVGDLPLELANGFILLLRDVFYVPSLQRNLISVSKLDFDGYDCRFGSGKCELWHNNACIGLAVLRDELYLLSLSENVNVVSSLTKENKKRKRTPDVSSKLWHCRLGHISRGRIERLVKNEILPPLEFSDLEQCIECIKGKFVKSIKKGAKRSAGILEIIHTDICGPFPVKSVDGYDSFITFTDDYSRYGYIYPIKERSEALDKFKIFKAEVENQHDIKIKVVRSDRGGEYYGRHTPYGQVPGPFARFLLENGIVAQYSTPGEPQQNGVAERRNRTLMDMVRSMMSYSTLPLGLWMEALKTAIHILNRVPSKSVPKTPYELWTGRVPSLTHLRVWGSPAEAKVFNPNIGKLDPKTVSCHFIGYPERSKGYRFYCPNSYTKFVETRHAVFLEDEMIRGSSVVREIDLEERRVSVPAPSTQEPFFSLPADVVPAMPVIEVPAPVVTPPVATMNESEEPVIQDSTEMVATPEEELQQPQIDNVPVQETHQEPQVQDVPNVQAPRRSERVRRSAIRDDYKVYNIEESHMEDDPTSYEEAMRSARSSEWLEAMKDEMESMKLNDVWDLEEIPKGAKTVGCKWVYKTKYDSRGNIEKFKARLVAKGFTQREGIDYNETFSPVSCKDSFRIIMALVAHYDLELHQMDVKTAFLNGDLEEKVYMAQPKGFVMKGNENMGCRLKRSIYGLKQASRQWYLKFDGTINKFGFQENVEDNCIYSKFKNGRFIFLILYVDDILLASSDVSLLQETKKFLSSNFDMKDLGEASYVLGIEIHRDRTKYALGLSQKTYIEKVLKKFNMYRCSATPAPIMKGEKYGASQCPRNQYELNEMKTKPYASAVGSLQYAQVCTRPDLAFVTGLLGRFQSNPGLEHWKLVKKVLRYLQGTKGLMLSYRRSESLQIVGYSDSDFAKDNTKSTSGYVFTLAGGAISWKSSKQTITAGSTMYAEFIACYEATGQVNWLKKFIPGLKVVDSIEKPLKLYCDNEPAVMYAHNNQSSGAAKHIDIKYYVVKDKVRDQTISLEHIKTERMLADPLTKGLPPNVFKEHVAGMGLREAL

SEQ ID NO: 19383 - protein, 1405 aa, Oryza sativa
  Clone ID: TF_OSC406486j.C1.p6.fg
MAGTSSSSNTSTGGYSLMGCIKDIPTLKGDNYAEWKRKLDLAFILGEVDWVLTTPCPIEPADLVRGENESDADWQKRQRDNAPLVMSYDIEQKKWSLANKKCLAVVKNTIEPTILGSIPECDAVSEYLERIKSQFTGSSKTYATQLIKQLVTERYNGGGVRDHILRMSNMASKLKPMDLGITDDFLVHLVMASLPKQFDNFIVNYNISPEKWNFEKLIANCVQEEERIKESNGGSINYVKDKKKNHKSPTSKGKQSQHLPQQQQFAVEKDQCLHCKKTGHYKKDCPDFLKMIMAKKGENIITFVNESHYVGYSRSTWWIDSGATIHACNCLKAFRSTRTTQRRESTIRVANGVEEKVEAVGDLPLELANGFILLLRDVFYVPSLQRNLISVSKLDFDGYDCRFGSGKCELWHNNACIGLAVLRDELYLLSLSENVNVVSSLTKENKKRKRTPDVSSKLWHCRLGHISRGRIERLVKNEILPPLEFSDLEQCIECIKGKFVKSIKKGAKRSAGILEIIHTDICGPFPVKSVDGYDSFITFTDDYSRYGYIYPIKERSEALDKFKIFKAEVENQHDIKIKVVRSDRGGEYYGRHTPYGQVPGPFARFLLENGIVAQYSTPGEPQQNGVAERRNRTLMDMARSMMSYSTLPLGLWMEALKTAIHILNRVPSKSVPKTPYELWTGRVPSLTHLRVWGSPAEAKVFNPNIGKLDPKTVSCHFIGYPERSKGYRFYCPNSYTKFVETRHAVFLEDEMIRGSSVVREIDLEERRVSVPAPSTQEPFFSLPADVVPAMPVIEVPAPVVTPPVATMNESEEPVIQDSTEMVATPEEELQQPQIDNVPVQETHQEPQVQDVPNVQAPRRSERVRRSAIRDDYKVYNIEESHMEDDPTSYEEAMRSARSSEWLEAMKDEMKSMKLNDVWDLEEIPKGAKTVGCKWVYKTKYDSRGNIEKFKARLVAKGFTQREGIDYNETFSPVSCKDSFRIIMALVAHYDLELHQMDVKTAFLNGDLEEKVYMAQPKGFVMKGNENMGCRLKRSIYGLKQASRQWYLKFDGTIKKFGFQENVEDNCIYSKFKNGRFIFLILYVDDILLASSDVSLLQETKKFLSSNFDMKDLGEASYVLGIEIHRDRTKYALGLSQKTYIEKVLKKFNMYRCSATPAPIMKGEKYGASQCPRNQYELNEMKTKPYASAVGSLQYAQVCTRPDLAFVTGLLGRFQSNPGLEHWKLVKKVLRYLQGTKGLMLSYRRSESLQIVGYSDSDFAKDNTKSTSGYVFTLAGGAISWKSSKQTITAGSTMYAEFIACYEATGQVNWLKKFIPGLKVVDSIEKPLKLYCDNEPAVMYTHNNQSSGAAKHIDIKYYVVKDKVRDQTISLEHIKTERMLADPLTKGLPPNVFKEHVAGMGLREAL

SEQ ID NO: 19384 - protein, 1401 aa, Oryza sativa
  Clone ID: TF_OSC406626j.C1.p7.fg
MATPSTRSRGYSLMGCIKDIPTLKGDNYAEWKRKLDLAFILGEVDWVLTTPCPIEPADLVRGESESDADWQKRHRDNAPLVMSYDIEQKKWSLANKKCLAVVKNTIEPTILGSIPECDAVSEYLERIKSQFTGSSKTYATQLIKQLVTERYNGGGVRDHILRMSNMASKLKPMDLGITDDFLVHLVMASLPKQFDNFIVNYNISPEKWNFEKLIANCVQEEERIKESNGGSINYVKDKKKNHKSPTSKGKQSQHLPQQQQFAVEKDQCLHCKKTGHYKKDCPDFLKMIMAKKGENIITFVNESHYVGYSRSTWWIDSGATIHACNCLKAFRSTRTTQRRESTIRVANGVEEKVEAVGDLPLELSNGFILLLRDVFYVPSLQRNLISVSKLDFDGYDCRFGNGKCELWHNNACIGLAVLRDELYLLSLSENVNVVSSLTKENKKRKRTPDVSSKLWHCRLGHISRGRIERLVKNEILPPLEFSDLEQCIECIKGKFVKSIKKGAKRSAGILEIIHTDICGPFPVKSVDGYDSFITFTDDYSRYGYIYPIKERSEALDKFKIFKAEVENQHDIKIKVVRSDRGGEYYGRHTPYGQVPGPFARFLLENGIVAQYSTPGEPQQNGVAERRNRTLMDMVRSMMSYSTLPLGLWMEALKTAIHILNRVPSKSVPKTPYELWTGRVPSLTHLRVWGSPAEAKVFNPNIGKLDPKTVSCHFIGYPERSKGYRFYCPNSYTKFVETRHAVFLEDEMIRGSSVVREIDLEERRVSVPAPSTQEPFFSLPADVVPAMPVIEVPAPVVTPPVATMNESEEPVIQDSTEMVATPEEELQQPQIDNVPVQETHQEPQVQDVPNVQAPRRSERVRRSAIRDDYKVYNIEESHMEDDPTSYEEAMRSARSSEWLEAMKDEMKSMKLNDVWDLEEIPKGAKTVGCKWVYKTKYDSRGNIEKFKARLVAKGFTQREGIDYNETFSPVSCKDSFRIIMALVAHYDLELHQMDVKTAFLNGDLEEKVYMAQPKGFVMKGNENMGCRLKRSIYGLKQDSRQWYLKFDGTIKKFGFQENVEDNCIYSKFKNGRFIFLILYVDDILLASSDVSLLQETKKFLSSNFDMKDLGEASYVLGIEIHRDRTKYALGLSQKTYIEKVLKKFNMYRCSATPAPIMKGEKYGASQCPRNQYELNEMKTKPYASAVGSLQYAQVCTRPDLAFVTGLLGRFQSNPGLEHWKLVKKVLRYLQGTKGLMLSYRRSESLQIVGYSDSDFAKDNTKSTSGYVFTLAGGAISWKSSKQTITAGSTMYAEFIACYEATGQVNWLKKFIPGLKVVDSIEKPLKLYCDNEPAVMYTHNNQSSGAAKHIDIKYYVVKDKVRDQTISLEHIKTERMLADPLTKGLPPNVFKEHVAGMGLREAL

SEQ ID NO: 19385 - protein, 1370 aa, Oryza sativa
  Clone ID: TF_OSC407404j.C1.p1.fg
MGCIKDIPTLKGDNYAEWKRKLDLAFILGEVDWVLTTPCPIEPADLVRGENESDADWQKRQRDNAPLVMSYDIEQKKWSLANKKCLAVVKNTIEPTILGSIPECDAVSEYLERIKSQFTGSSKTYATQLIKQLVTERYHGGGVRDHILRMSNMASKLKPMDLGITDDFLVHLVMASLPKQFDNFIVNYNISPEKWNFEKLIANCVQEEERIKESNGGSINYVKDKKKNHKSPTSKGKQSQHLPQQQQFAVEKDQCLHCKKTGHYKKDCPDFLKMIMAKKGENIITFVNESHYVGYSRSTWWIDSGATIHACNCLKAFRSTRTTQRRESTIRVANGVEEKVEAVGDLPLELANGFILLLRDVFYVPSLQRNLISVSKLDFDGHDCRFGSGKCELWHNNACIGLAVLRDELYLLSLSENVNVVSSLTKENKKRKRTPDVSSKLWHCRLGHISRGRIERLVKNEILPPLEFSDLEQCIECIKGKFVKSIKKGAKRSAGILEIIHTDICDDYSRYGYIYPIKERSEALDKFKIFKAEVENQHDIKIKVVRSDRGGEYYGRHTPYGQVPGPFARFLLENGIVAQYSTPGEPQQNGVAERRNRTLMDMVRSMMSYSTLPLGLWMEALKTAIHILNRVPSKSVPKTPYELWTGRVPSLTHLRVWGSPAEAKVFNPNIGKLDPKTVSCHFIGYPERSKGYRFYCPNSYTKFVKTRHAVFLEDEMIKGSSVVREIDLEERRVSVPAPSTQEPFFSLPADVVPAMPVIEVPAPVVTPPVATMNESEEPVIQDSTEMVATPEEELQQPQIDNVPVQETHQEPQVQDVPNVQAPRRSERVRRSAIRDDYKVYNIEESHMEDDPTSYEEAMRSARSSEWLEAMKDEMKSMKLNDVWDLEEIPKGAKTVGCKWVYKTKYDSRGNIEKFKARLVAKGFTQREGIDYNETFSPVSCKDSFRIIMALVAHYDLELHQMDVKTAFLNGDLEEKVYMAQPKGFVMKGNENMGCRLKRSIYGLKQASRQWYLKFDGTIKKFGFQENVEDNCIYSKFKNGRFIFLILYVDDILLASSDVSLLQETKKFLSSNFDMKDLGEASYVLGIEIHRDRTKYALGLSQKTYIEKVLKKFNMYRCSATPAPIMKGEKYGASQCPRNQYELNEMKTKPYASAVGSLQYAQVCTRPDLAFVTGLLGRFQSNPGLEHWKLVKKVLRYLQGTKGLMLSYRRSESLQIVGYSDSDFAKDNTKSTSGYVFTLTGGAISWKSSKQTITAGSTMYGEFIACYEATGQVNWLKKFIPGLKVVDSIEKPLKLYCDNEPAVMYAHNNQSSGAAKHIDIKYYVVKDKVRDQTISLEHIKTERMLADPLTKGLPPNVFKEHVAGMGLREAL

SEQ ID NO: 19386 - protein, 1335 aa, Oryza sativa
  Clone ID: TF_OSC410327j.C1.p10.fg
MSGASSSTNSSTGGYSLMGCIKDIPTLKGDNYAEWKRKLDLAFILGEVDWVLTTPCPIEPAELVRGENESDADWQKRQRDNAPLVMSYDIEQKKWSLANKKCLAVVKNTIEPTILGSIPECDAVSEYLERIKSQFTGSSKTYATQLIKQLVTERYHGGGVRDHILRMSNMASKLKPMDLGITDDFLVHLEERIKESNGGSINYVKDKKKNHKSPTSKGKQSQHLPQQQQFAVEKDQCLHCKKTGHYKKDCPDFLKMIMAKKGENIITFVNESHYVGYSRSTWWIDSGATIHACNCLKAFRSTRTTQGRESTIRVANGVEEKVEAVGDLPLELANGFTLLLRDVFYVPSLQRNLISVSKLDFDGYDCRFGSGKCELWHNNACIGLAVLRDELYLLSLSENVNVVSSLTKENKKRKRTPDVSSKLWHCRLGHISRGRIERLVKNEILPPLEFSDLEQCIECIKGKFVKSIKKDDYSRYGYIYPIKERSEALDKFKIFKAEVENQLDIKIKVVRSDRGGEYYGRHTPYGQVPRPFARFLLENGIVAQYSTPGEPQQNGVAERRNRTLMDIVRSMMSYSTLPLGLWMEALKTAIHILNRVPSKSVPKTPYELWTGRVPSLTHLRVWGSPAEAKVFNPNIGKLDPKTVSCHFIGYPERSKGYRFYCPNSYTKFVETRHAVFLEDEMIRGSSVVREIDLEERRVSVPAPSTQEPFFSLPADVVPAMPVIEVPAPVVTPPVATMNESEEPVIQDSTEMVVTPEEELQQPQIDNVPVQETHQEPQVQDVPNVQAPRRSERVRRSAIRDDYKVYNIEESHMEDDPTSYEEAMRSARSSEWLEAMKDEMKSMKLNNVWDLEEIPKGAKTVGCKWVYKTKYDSRGNIEKFKARLVAKGFTQREGIDYNETFSPVSCKDSFRIIMALVAHYDLELHQMDVKTAFLNGDLEEKVYMAQPKGFVMKGNENMGCRLKRSIYGLKQASRQWYLKFDGTIKKFGFQENVEDNCIYSKFKNGRFIFLILYVDDILLASSDVSLLQETKKFLSSNFDMKDLGEASYVLGIEIHRDRTKYALGLSQKTYIEKVLKKFNMYRCSATPAPIMKGEKYGASQCPRNQYELNEMKTKPYASAVGSLQYAQVCTRPDLAFVTGLLGRFQSNPGLEHWKLVKKVLRYLQGTKGLMLTYRRSESLQIVGYSDSDFAKDNTKSTSGYVFTLAGGAISWKSSKQTITAGSTMYAEFIACYEATGQVNWLKKFIPGLKVVDSIEKPLKLYCDNEPTVMYAHNNQSSGAAKHIDIKYYVVKDKVRDQTISLEHIKTERMLADPLTKGLPPNVFKEHVAGMGLREAL

SEQ ID NO: 19387 - protein, 1378 aa, Oryza sativa
  Clone ID: TF_OSC420229j.C1.p2.fg
MVAFPSLTPLCSLLGCRRRPFAPRHHQSSPPFSSFAPAAVFAGGYSLMGCIKDIPTLKGDNYAEWKRKLDLAFILGEVDWVLTTPCPIEPAELVRGENESDADWQKRQRDNAPLVMSYDIEQKKWSLANKKCLAVVKNTIEPTILGSIPECDAVSEYLERIKSQFTGSSKTYATQLIKQLVTERYHGGGVRDHILRMSNMASKLKPMDLGITDDFLVHLVMASLPKQFDNFIVNYNISPEKWNFEKLIANCVQEEERIKESNGGSINYVKDKKKNHKSPTSKGKQSQHLPQQQQFAVEKDQCLHCKKTGHYKKDCPDFLKMIMAKKGENIITFVNESHYVGYSRSTWWIDSGATIHACNCLKAFRSTRTTQRRESTIRVANGVEEKVEAVGDLPLELANGFILLLRDVFYVPSLQRNLISVSKLDFDGYDCRFGSGKCELWHNNACIGLAVLRDELYLLSLSENVNVVSSLTKENKKRKRTPDVSSKLWHCRLGHISRGRIERLVKNEILPPLEFSDLEQCIECIKGKFVKSIKKGAKRSAGILEIIHTDICGPFPVKSVDGYDSFITFTDDYSRYGYIYPIKERSEALDKFKIFKAEVENQHDIKINVNGVAERRNRTLMDMVRSMMSYSTLPLGLWMEALKTAIHILNRVPSKSVPKTPYELWTGRVPSLTHLRVWGSPAEAKVFNPNIGKLDPKTVSCHFIGYPERSKGYRFYCPNSYTKFVETRHAVFLEDEMIRGSSVVREIDLEERRVSVPAPSTQELFFSLPADVVPAMPVIEVQAPVVTPPVATMNESEEPVIQDSTEMVATPEEELQQPQIDNVPVQETHQEPQVQDVPNVQAPRRSERVRRSAIRDDYKVYNIEESHMEDDPTSYEEAMRSARSSEWLEAMKDEMKSMKLNDVWDLEEIPKGAKTVGCKWVYKTKYDSRGNIEKFKARLVAKGFTQREGIDYNETFSPVSCKDSFRIIMALVAHYDLELHQMDVKTAFLNGDLEEKVYMAQPKGFVMKGNENMGCRLRRSIYGLKQASRQWYLKFDGTIKKFGFQENVEDNCIYSKFKNGRFIFLILYVDDILLASSDVSLLQETKKFLSSNFDMKDLGEASYVLGIEIHRDRTKYALGLSQKTYIEKVLKKFNMYRCSATPAPIMKGEKYGASQCPRNQYELNEMKTKPYASAVGSLQYAQVCTRPNLAFVTGLLGRFQSNPGLEHWKLVKKVLRYLQGTKGLMLSYRRSESLQIVGYSDSDFAKDNTKSTSGYVFTLAGGAISWKSSKQTITAGSTMYAEFIACYEAMGQVNWLKKFIPGLKVVDSIEKPLKLYCDNEPAVMYAHNNQSSGAAKHIDIKYYVVKDKVRDQTISLEHIKTERMLADPLTKGLPPNVF

SEQ ID NO: 19388 - protein, 999 aa, Oryza sativa
  Clone ID: TF_OSC900016j.C1.p35.fg
MSYDIEYKKWSLTNKKCLAVVKNTIEPTILGSIPECDAVSEYLERIKSQFTGSSKTYATQLIKQLVTERYHGGGVRDHILRMSNMASKLKPMDLGITDDFLVHLVMASLPKHFDNFIVNYNISPEKWNFEKLIANCVQEEEKIKESNGGSINYVKDNKKKNYKSPSSKAKQPQHLPQQQQFAVEKDQCLHCKKTGHYKKDCPDFLKMIMAKKGKNIITFVNESHYVGYSRSTWWIDSGATIHACNCLKAFRSMRTTQRSESSIRVANGVEEKVDAVGDLSLELANGFTLLLRNVFYVPSFQRNLISVSKLDFDGYDCRFGSGECELWGRIERLVKNEILPPLEFSDLEQCIECIKGKFVKNIKKGAKRSAGFLEIIHTDICGPFPVKSVDGYDSFITFTDDYSRYSYIYPIKERSEALDKFKIFKAEVENQHDMGKSLDLFLLQAERRNRTLMDMVRSMMSYSTLSLGLWMEALKTAIHILNRVPSKSVPKTPYELWTGRVPSLAHLRVWGSPAEAKIFNPDLRKLDPKTDSTEIIATPEEELQQPQTDNVPVQETQQEPHIQNVPNVEAPRRSERVRRSAIRDDYQVYNIEESHMEDDPTSYKEAMRSARSSEWLEAMKDEMKSMKLNDVWDLEEIPKGAKTVGCKWVYKTKYDSRGNIEKFKARLVAKGFTQREGIDYNETFSPVSCKDSFRIIIALMAHYDLELHQMDVKTTFLNGDLEEKETKKFLSSNFDMKDIGEASYVLGIEIHRDRTKYALGLSQKAYIEKVLMKFNMYRCSATPAPIVKGEKYGASQCPRNQYELNEMKTKPYASAVGSLQYAQVCTRPDLAFVTELLGRFQSNPGPKHWKLVKKVLCFWKGTKGLMMSYRRLESLQIVGYSDSDFAKDNTKSTSGYVFTLAGGAISWKSSKQTITAGSTMYAEFIACYEATGQVNWLKKFISGLKVVDSIEKPLKLYCDNEPAVMYAHNNQSSGAAKHIDIKYYVVKDSPRSNNQSRAH

SEQ ID NO: 19389 - protein, 403 aa, Oryza sativa
  Clone ID: TF_OSC900040j.C1.p10.fg
MPVPVYAAAAMLPPSPCPSLAAAVLVYKGWLQGADRACRGAPPAMGCPAISSRNHLIPGRYHPIPRKYHAIHGRNRLIPDKYHMIPRENHAIRGRNRLIHDRFHMIPREYHAIRGRNRMIPDKYHLKRGYSLMGCIKDIPTLKEDNYAQWKRKLNLAFILGEVDWVLTTPCPIEPAALVRGENKSDADWKKRQRDNAPLVMSYDIEQKTWSLANKKCLAVVKNTIEPTILGSILECDAVSEYLERTKSQFTGSSKTYATQLIKQLVTERYHGGGVRDHILRMSNMASKLKPMDLGITYDFLVHLVMASFPKQFDNFIVNYNISPEKWNFEKLIANCVQEEERIKESNGGSINYVKDKKKNYKSPTSKAKQSQHLPQQQQFAVEKDQCLHCKKTGHYKKDCPDF

SEQ ID NO: 19390 - protein, 1310 aa, Oryza sativa
  Clone ID: TF_OSC900374j.C1.p17.fg
MGCIKDIPTLKGDNYAEWKRKLDLAFILGEVDWVLTTPCPIEPAELVRGENESDADWQKRQRDNAPLVMSYDIEQKKWSLANKKCLAVVKNTIEPTILGSIPECDAVSEYLERIKSQFTGSSKTYATQLIKQLVTERYHGGGVRDHILRMSNMASKLKPMDLGITDDFLVHLVMASLPKQFDNFIVNYNISPEKWNFEKLIANCVQEEERIKESNGGSINYVKDKKKNHKSPTSKGKQSQHLPQQQQFAVEKDQCLHCKKTGHYKKDCPDFLKMIMAKKGENIITFVNESHYVGYSRSTWWIDSGATIHACNCLKAFRSTRTTQRRESTIRVANGVEEKVEAVGDLPLELANGFILLLRDVFYVPSLQRNLISVSKLDFDGYDCRFGSGKCELWHNNACIGLAVLRDELYLLSLSENVNVVSSLTKENKKRKRTPDVSSKLWHCRLGHISRGRIERLVKNEILPPLEFSDLEQCIECIKGKFVKNIKKGAKRSAGILEIIHTDICGPFPVKSVDGYDSFITFTDDYSRYGYIYPIKERSEALDKDIKIKVVRSDRGGEYYGRHTPYGQVPGPFARFLLENGIVAQYSTPGEPQQNGVAERRNRTLMDMVRSMMSYSTLPLGLWMEALKTAIHILNRVPSKSVPKTPYELWTGRVPSLTHLRVWGSPAEAKVFNPNIGKLDPKTVSCHFIGYPERSKGYRFYCPNSYTKFVETRHAVFLEDEMIRGSSVVREIDLEERRVSVPAPSTQEPFFSLPADVVPAMPVIEVPAPVVTPPVATMNESKEPVIQDSTEMVATPEEELQQPQIDNVPVQETHQEPQVQDVPNVQAPRRSERVRRSAIRDDYKVYNIEESHMEDDPTSYEEAMRSARSSEWLEAMKDEMKSMKLNDVWDLEEIPKGAKTMDVKTAFLNGDLEEKVYMAQPKGFVMKGNENMGCRLKRSIYGLKQASRQWYLKFDGTIKKFGFQENVEDNCIYSKFKNGRFIFLILYVDDILLASSDVSLLQETKKFLSSNFDMKDLGEASYVLGIEIHRDRTKYALGLSQKTYIEKVLKKFNMYRCSATPAPIMKGEKYGASQCPRNQYELNEMKTKPYASAVGSLQYAQVCTRPDLAFVTGLLGRFQSNPGLEHWKLVKKVLRYLQGTKGLMLSYRRSESLQIVGYSDSDFAKDNTKSTSGYVFTLAGGAISWKSSKQTITAGSTMYAEFMACYEATGQVNWLKKFIPGLKVVDSIEKPLKLYCDNEPAVMYAHNNQSSGAAKHIDIKYYVVKDKVRDQTISLEHIKTERMLADPLTKGLPPNVFKEHVAGMGLREAL

SEQ ID NO: 19391 - protein, 500 aa, Oryza sativa
  unsure (1)..(500): unsure at all Xaa locations
  Clone ID: TF_OSC33621j.C1.p1.np
MGPXIERVVDVSISPPNDKELSFEEEEKCMHINAQATIVLFGVLSEDVFKTVMPFEDAHLIWTTLKERYDKSKCDDSKCDDVLFLEEALEECSTSSPNCTTFDDQDNHPTTTLSSTHDYIEGNELVCKVDDRPILPLDSNNTDNEFVIFYCVVDSCISPSPKYMCEDDMDKCSTSYSTCGTNLXKGEVNERQRTSEESTSPRCSSSISKDHACFMGEDGDFEFDHLSKKDITIVIKLMETIKKQQACLIKKNEDIMSLTEEHKKLKDFHSSLIMRYEKLENEFACATNSIACVASLEKQNQELKSQLDEITNKYVDLQEKHDELLCSHENLVDSHAMLEVSHEVIVPMVKSYEPHVQVDLTCTNPSCSQANISPSTICDLDCVGKREKQIDYGLVCIAQPSQDNHEGMVKKLVEESTVACTKIHQRDSKSINAYIKGRNQKMIKSSITCFKCKKVRHHVRDCPWKKGNKLNKKKDIPHIKCFKCTEVGHFASRYSCTLDE

SEQ ID NO: 19392 - protein, 601 aa, Oryza sativa
  Clone ID: TF_OSC401632j.C1.p1.fg
MAFEVGYEVAPEYHQIPHDPNEEKCRVRVTLTSDREDLPSIKFEAGGRKYSHACQEATLVAIGELRHRFDEELESSAFQYHPHKPHGQDYGTYNCPQSEGSPIVMHAVYMLSAMDAVGVEREKAAHDRENWNRGRICKLESKVYRLQKKLAGLKGEARPSAPKLRLTARKRTRPPPRLQLASKTRVVGDAVPDHAEPVIHVLSDEEEEEDPEEREPATPEEEDPSLRSDARRELLSSLTVAVVRCMVNTRTGSGNGHNEGDPTLAQVLAQQTQLINLLVQQAQNQQANNKNQPPPPPQNKLADFLRVRPPTFSSTTNPVEAAAPTQNHPVRKEQGSKPGVCFNCGDPRHYADKCPMPRRVKNAHVQNNSNAPAPKARVNHVAAAETQNAPDVVLESKDLDVILGMDWLTRHIGVIDCANRNVTLTSSNGQTVSFFVSSPKSHGLTLNQVALQEIPIVRDYPDVFPGDLPGMPPKRDIEFRIDLVPGTNPIHKRPYRMAANELAEVKRQVDDLLQKGYIRPNNSPWGALVIFVEKKDHTQRMCVDYPALNEVPIKNKYPLPRIDDLFDQLEGATAFSKIDLLPDITNFKSGGGYTLDWLYHM

SEQ ID NO: 19393 - protein, 790 aa, Oryza sativa
  Clone ID: TF_OSC900106j.C1.p17.fg
MDSPATPVGLSPPLLSLVPRNEPCYTKDKAVAHAGLWLARKRGFIASAARVSVDRAHGGGSRERTAEIDPSKTDGRDRSGPRRLTEEDDYDVGGDVTTGGGGSAARARMLAGERRHFGTNGEHQRVERDAANSPVTKGAAEDQRTATATTKKRRRSSGRRRRWRSGDLRRRRKGERGRRRDGDHDGGLPERRRRLERRRRTTGATAATAALGHTALWRYGRREAKAKVAAGREELGGPFKGARRRRRRPTAAGDEKERSGFEGKRPIRFELESNTFQTDLADISKGEKIIIPQPPYHQHMTTLKKGEVNERQRTSEESTSPRCSSSISKDHACFMGEDGDFEFDHLSKKDITIVIKLMETIKKQQACLIKKNEDIMSLTEEHKKLKDFHSSLIMRYEKLENEFACATNSIACVASLEKQNQELKSQLDEITNKYVDLQEKHDELLCSHENLVDSHAMLEVSHEVIVPMVKSYEPHVQVDLTCTNPSCSQANISPSTICDLDCVGKREKQIDYGLVCIAQPSQDNHEGMVKKLVEESTVACTKIHQRDSKSINAYIKGRNQKMIKSSITCFKCKKVRHHVRDCPWKKGNKLNKKKDIPHIKCFKCTEVGHFASRYSCTLDEQCKTSNFIVEPKALVRLLDLQSSSSITMPSSPESLGGYPGDSVKIPWSPEESRPEAPSSQEHAYLKVILPCKNHGRKMVHMLKRIGSWPYKKSTSTIRTQTVIKELNMFVMGKLKFFLGIGIKQIKEEISSSPSRCQIQIGFKISILSYGHLKNSQGRCQRGRKKRLIKG

SEQ ID NO: 19394 - protein, 1021 aa, Oryza sativa
  Clone ID: TF_OSC410574j.C1.p3.fg
MEHIKQWLSHQEEEGKNNFEEKKNEAPKLGQESISGNLTDGQLDQEKYEKPNGWYNVDAIGINSPNVVLKINDNIQEGKCCALLNSEGSSTARHGCAHERSEGAGPSEPHLRLRSAPGRRVIRFLGSASARLLSTSALFVVVSSSTMSAPGAAGAVSRVGAPGAGAAAGTAAAVSGDGAPGSRAAANFNINGGSSASQSSGGPFSGKDMWDALEAKFGVSDAGSELYVMEQFYDYKMVDDRSVVEQAHEIQMLAKELENNNCELPDKFVAGGIIAKLPPSWSDFATSLKHKRQEFSVSDLIGSLGVEEKARAKDNRGKKFEGGSSANMVQKKNPHASHNNKKVKPDVKSKATTNFKKKGKGKAKRDYFVCGKSGHRAKECPERKDRKSANMVGRGSSLLMGNGSLAAVHGVGSKCHTCVQSKQPRKPHKASEARNLAPLELVHSDLCEMNGVLTKGGKKYFMTLIDDCTRFLYVYLLKTKDEALHYFKTYKAEVENQLERKIKRLRSDRGGEYFSNEFASFCKEFGIIHERTPPYSPQSNGVAERKNRTLTEMVNAMLDTAGLSKEWWGEAVLTACHILNKIPTKHKEVTPFEESERKKLNLSYLRTWGCLAKSRDATFFENEFPMKHTPSTSSQETVMPHEHFAPIEHNDQMPEGNPEEHNIVDTHKSKQQRVAKSFGDDYIVYLVDDTPRTIEEAYSSPDADYWKEAVRSEMDSIMSNGTWEVIECPYGCKLVGCKWVFKKKLRPDGTIEKYKARLVVKGYTQKEDEDFFDTYSPVARLTTIRVLLALAASHGFLVHQMDVKTAFLNGELLNVIEEVKDFLSKSFEMKDLGEADVILNIKLLRGDEVGITLVQSHYVDKVLSRFGYSDCKPAPTPYDPSVLLRKNPRIARDQLRYSQIIGSLMYLASATRPDISFAVSKLSGFVSNSGDDHWQALERVMRYLKGTMSYGIHYTGYPKVLEGYSDSNWISDANEIKATSRYVFTLGGGAVSWKSCKQTILTRSTMEAELTALDTATVEAE

SEQ ID NO: 19395 - protein, 343 aa, Oryza sativa
  Clone ID: TF_OSC12276j.C1.p1.fg
MSDIAKKEFAELALDGSNYLTWALDVEIKLDSMGLGHTIVLPEVGTVESTKAEKAKALHFLRHHLHPDLKFEYMTEKDPLVFWQFLKDRFDQQGSIVLPKAQHDWITLRFQDYMSVAAYNSALHRIISQLRLCGLKIPDAEMIEKTLSTFHHNNIVLQQQYRNSKYPKYSDLILVLLVAERQNEVLLKNHSARPTGSMAVPEAHANVVGNSRGHKRGHGEKKGKRKGSIIFKGKSKGKPRGKGELKKVTGESSGEKQDNCYRCGGRGHWSRNCHVPKHLVELYQQSMNEKKSQHESHFTIEPEAQIEKHDDMLINVKDGGDVRMDDDWDNLLEKDDDIFGGLK

SEQ ID NO: 19396 - protein, 501 aa, Oryza sativa
  Clone ID: TF_OSC400423j.C1.p7.gm
MSDIAKKEFAELALDGSNYLTWALDVEIKLDSMGLDHTIVLPEVGTVESTKAEKAKALHFLRHHLYLDLKSEYMIEKDPLVLWQSLKDRFDQQGSIVLPQAQHDWITLRFQDYKSVAAYNSAHHRIISQLHLCGLKITDAEMIEKTLSTFHPNNIVLQQQYRNSKYPKYSDLISVLLVAERQNEVLLKNHSARPTRSMVVPEAQANVVGNSHGRKRGHGEKKGKGKGSIIFKGKSKGNPEDNCYRCGGRGHWSRNCHVPKHLVELYQQSMNEKKSQHESHFTIEPEAQIEKHDDMLINVKDGGDIRIARLKSPSTMPASNAPSLILFSIRDVAYVEAAMIIFFFLMQRSHWEFGLPYHILHIASSSVSRGGDLWVLGTRFRGDVRGDKDLSHLFHSKNQLKKLNLKLRKPHKWQLNLKDTILKMEDPVPYACTLALEDRNTPTRSLWEITTIPTPPRIIPVGCKWVFLRKRNGQVVRYKARLVAQGFTQRPVLTMMKLTLL

SEQ ID NO: 19397 - protein, 1091 aa, Oryza sativa
  unsure (1)..(1091): unsure at all Xaa locations
  Clone ID: TF_OSC874j.C1.p4.np
SMAVPEAHANVVGNSRGRKRGHGEKKGKGKGSIKFKGKSKGKPRGKGELKKVTGESSGEKQDNCYRCGGRGHWSRNCHVPKHLVELYQQSMNEKKSQHESHFTIEPEAQIEKHDDMLINVKDGGDVRMDDDWNNLLEKDDNIFGDLKETMYFHTLTKKTRNIMTIAGSNAHIVGTGSATLVLPMGTHIFVKDALLDPDSKRTLLSFKDIRANGFHIETEIEQDAEYLLIRKIDGYQKQVVERLPSLPSGLYYTYIKPTEEYVAMKTIFRNPESFRVWYDRLGHPGLGMMRRIISNSAGHNVETNDFPNPEDFICPACAKGKLIIRPSLLKIRDESPVFLVRIQGDICGPIQPLSGPVRYFVVLIDASTRWHVDLLSTRNHAFKLIAQIIKLKACFPDSRVQSIRMDNAGEFRSKAFDDYCLAMAIWDPTRSWGYTLVMRLSIIKYLERMTGDLHMARYADCIFDEDYFPTLGGERHPEECRDIIWNATGMQSLDPRTSEAELEVQRIINLQNIVNKLPDAFTDYKGVTRSHIPTVNAPERVEVTQKVTDSALTPHPRKMGRPPVEEAQPEVEKAPEEATQPEVEMVPEGHHPKDGEPSALRAYLGSGRSEHSNSVVMGNHDELEEINEEISTNCSDTGELHHRKTTIVDIHFASKIVVIMDPDPEPKSMIECQKRSDWDKWKAAIEAKMRSLYKRELMDVVTAYLYGSLDSEIYMRVPEGLKIPNPKGNRNMYSVRLQRSLYGLKQSGRMWFNRLSNYLLKRGYLNNDDCPCVFIKSEMKDLGKTKFCLGLQLEHLPEGVFMYQSTYTKRVLGKFNMDKCHPLKTPMVVXSLEADKDPFKPKKDDEEMLGPEVPYLSAIGALMYLAYCTRPDIAFALNLLARYSATPTRRHWVGVKTILRYLRGTQDLGLWFPKNQDPSMVGYVDAGYMSDPHNAISQTGFIFLCGNTAISWRSVKQTLVATSTNHSEIIALYEATRECVWLRRMIGHIQKSCGLNIDNTPTIIYEDNAACVAQIHMGYVKSNFTKHIVPKFFYPHELQKSGEINVLQTKSCENLADLFTKSLPASSFHRCVRGIGMRRLSELQGSGGAKG

SEQ ID NO: 19398 - protein, 1214 aa, Oryza sativa
  Clone ID: TF_OSC874j.C1.p5.fg
MEGIKLKFQGYRRDQLTTEESLRQKPTYRGSQLTAQASLQEKPAYGVSRLTTQARRSKAYDGRCRCLKHRHGNLDGSAAVATKYRRQTNLLHDPEVSFWMSFVLWTSPIWALDATKNMSDITKKEFAELALDGSNYLTWALDVEIKLDSIGLDHTIVLPELGTVESTKAEKAKALHFLRHHLHPDLKSEYMTEKNPLVLWQSLKDRFDQQGSIVLPQVQHDWITLHFQDYKSTAAYNSAPHRIISQLRFCGQKITDAEMIEKTLSTFHPNNIVLQQQYRNSKYPKYSDLISVLLVAERQNEVLLKNHSARPTGSMAVPEAHANVVGNSRGRKRGHGEKKGKGKGSIKFKGKSKGKPRGKGELKKVTGESSGEKQDNCYRCGGRGHWSRNCHVPKHLVELYQQSMNEKKSQHESHFTIEPEAQIEKHDDMLINVKDGGDVRMDDDWNNLLEKDDNIFGDLKPYGNPMAEEDICLVDNATTNTILRETMYFHTLTKKTRNIMTIAGSNAHIVGTGSATLVLPMGTHIFVKDALLDPDSKRTLLSFKDIRANGFHIETEIEQDAEYLLIRKIDGYQKQVVERLPSLPSGLYYTYIKPTEEYVAMKTIFRNPESFRVWYDRLGHPGLGMMRRIISNSAGHNVETNDFPNPEDFICPACAKGKLIIRPSLLKIRDESPVFLVRIQGGPCGPVVHKEPCFSKLIAQIIKLKACFPDSRVQSIRMDNAGEFRSKAFDDYCLAMAMGIKVEYSVPHVHTQNGLAESLIKRIKLIAQPLLQDWGERHPEECRDIIWNATGMQSLDPRTSEAELEVQRIINLQNIVNKLPDAFTDYKGVTRSHIPTVNAPERVEVTQKVTDSALTPHPRKMGRPPVEEAQPEVEKAPEEATQPEVEMVPEGHHPKDGEPSALRAYLGSGRSEHSNSVVMGNHDELEEINEEISTNCSDTGELHHRKTTIVDIHFASKIVVIMDPDPEPKSMIECQKRSDWDKWKAAIEAKMRSLYKREVFGPAVPTPPRIIPVGCKWVFLRKRNGQVVRYKARLVAQWSMQRPGIDYDETYSPVMSGITFRYLISMATNMNLDMQLMDVVTAYLYGSLDSEIYMRVPEGLKIPNPKGNRNMYSVRLQRSLYGLKQSGRMWFNRLSNYLLKRDIVQPQPEDIGLALKLSSGTFEVLKILGCGSRRTKIHPWWDMWMLAICLILIMPYPRLGLYFFVVILPFPGGL

SEQ ID NO: 19399 - protein, 240 aa, Oryza sativa
  unsure (1)..(240): unsure at all Xaa locations
  Clone ID: TF_OSC1572j.C1.p1.np
EFSSVPPNAPEDVRTDADKQETFMSFSDDELTNQLICEDYTDYERLFDTAIRHEDQRNTTATKRQAAQLTAHQGGNHKPDLTHRQKAGPTTMSVGQHRTFNHTNLHHGSSGSXNDHGSQTNRCTAPRSPMAPAQTGQTAQANKETGAKPKSCFNCGELGHFDDKCPKHRRAGPRFIQADVNHSYGEEAQAPPQDLLDTIADNSIPATELCDSGATHSFISKKFVGMHGLIREELNTPMRV

SEQ ID NO: 19400 - protein, 1269 aa, Oryza sativa
  Clone ID: TF_OSC401828j.C1.p34.fg
MSGNEGEKSPQDFADCVSQEQLRTLQENTQKDITEAVAKSVQDAFAKIGFLNHMERLDKRISTLTDRVAALETPSNEEVVSGDDDAYPEDTVYDSSGYIDAPATRQARLRRRLCTNRTGMGGTRHQQGNNNNRVPDDPYAKVKFKIPSFSGYYDAEKYLDWEMIVEQKFNAHLVPEQHRVRQASSEFKDFAIMWWAGLSDEGVLPTTWEELKVAMRDRFVPPSYHRDLRKKLMRLEQGDKSVQDYYEKELQGCDHQGKSKASTYTPRTMPSVGLPKAVSFRASSQPAGKRPAASGASATPKPSPPRPAESGKGSSQVPAKSASSVASTGRIQCHRCQGFGHVQKDCPSQPAYVATEDGYITTSDVEEEEGEEEVEDEDVEVFARDDTTNYRTIIVQWVLSTQIFFVINNRRARVIIDGGSWNNLVSSDLVKKLGLTTRTHPHPYHIQWLNDSGRANVTQVCRVSFSIGSYADSVDCDVVLMQACSLLLGRPWEHDNDATHHGRSNKYTFVHNGKKITLLPLTPAEIVEADKERAASLKLDESENQQVAKSVFPPKKDKLSPSSKVEGIKLKGGVMLATKCDIAEISDDDMCYFLICKQALVSLDDIASSIPPVVNNLLQEYEDVFPAEIPPGLPPMRGIEHQIDLIPGASLPNRAAKSLDEHMDHLRAIFNALRDARLFANLEKCIFCTERVSFLGYVVTPQGIEVDESKIEAIKSWPVPQTITQVRSFLGLAGFYRRFVKDFSTFSAPLNELTKKGVVFHWGKTQEKSFDTLKDKLTHAPLLQLPNFGKTFELECDASGVGIGGVLMQDGKPVAYFSEKLHGPVLNYSTYDKELYALEAHGGGLMGHFGAKKTEDVLAMHFFWPRMRKDVERFVARCTTCQKAKSRLNPHGLYMPLPVPSIPWADISMDFVLRLPRIKRGRDSIFVVVDRFSKVAHFIPCHKSDDAVHIADLFFHEIVRLHGMPSTIVSDRDAKFLSHFWRTLWNKLGTKLLFSTTCHPQIDGQTEVVNHTLGTMLRAILKKNLKMWEECLPHVEFAYNRATHSTTKMTEKYRIAGSKGRQEVKLEPGDLVWLHLRKDRFPELRKSKLMPRADGPFKIVEKINDNAYKLELPPEFGVSPTFNISDLKPYLGEEDELESRMTSIQEGEDDADITNSDTHNNPPTVIQGPITRARARQLNLEEQWGGTRRHLEKDLEPWRIIEDVQVKVEAQTKSTSGAIRSPGPVCTKTGAQVAYALRLGRSLYVWKAKKITFPMVLVPCPNSFRVNGN

SEQ ID NO: 19401 - protein, 455 aa, Oryza sativa
  Clone ID: TF_OSC409825j.C1.p1.fg
MSGNEGEKSPQDFADCVSQEQLRTLQQNTQKDITEAVAKSVQDAFTKIGFLNHMERLDKRISTLTDRVAALETPSNEEVVSGDDDAHPEDTVYYDAEKYLDWEMTVEQKFNAHLIPEQHRVRQASSEFKDFAIMWWTGLSDEGVLPTTWEELKVAMRDRFVPPSYYRDLRKKLMRLEQGDKSIQDYYGELQKGVRRCGIVEGVEDAICRFYSGLREEIQNIVDYKEFNSVNQLFRFAMLAEKELQGRDHQGKSKASTYTPRTTPSAGLPKAVSFRTSSQPAGKRPAASGASAAPKPSPPPRPAESGKGSSQVPAKSASSVALTGCIQCHRCQGFGHVQKDCPSQRAYVATEDGYITTSDVEEEEEEEEVEDEDGEVFGRDDTTDYRTIIVQRVLSTQIFFVINNRRALVIIDGGSCNNLWLNDSGRAKVTQVCRVSFSIGSYADSVDCNVVPMQA

SEQ ID NO: 19402 - protein, 611 aa, Oryza sativa
  Clone ID: TF_OSC411208j.C1.p1.fg
MEGTRRHLEKDLEPWRIIEDVQVKVEAQTNSTSGAIRSPGPVCTKTAAQVAYVLELGRNEGEKSPQDFADCVSQEQLRTLQENTQKGITEAVAKSVQDAFTKIGFLNHMERLDKRISTLTDRVAALETPSNEEVSGDDDAHPEDTVYDSSGYIDGPATRQARLRRRLGTNRTGMGGTRHQQGNNNRVPDDPYAKMTVEQKFNAHLVPEQHRVRQVSSEFKDFTIMWWAGLSDEGVLPTTWEELKVAMRDRFVPPSYHRDLRKKLMRLEQGDKSVQDYYGELQKGVRRCGIVEGVEDAICRFYSGLREEIQNIVDCKEFNSVNQLFQFAILAEKELQGREQQGKNKASMYTLCTTPSVGLPKAVSFRALSQPVSKRPAAFGASATPKPSPPRPAESGKSSSQVPAKSASSVASTGRIQCHRCQGFGHVQKDCPSQRAYVVTEDGYITTSDVEEEEEEEEVEDEDGEVFGRDDTMAYRTIIVQRVLSTQIFFIINNRRARVIIDGGSCNNLVSFDLVKKLGLTTRTHPHPYHIQWLNDSGRAKVDSRGSPGYRARIRPIMSRITIHWPSFYNVVTGKTLALPNLIALQHIPLSPAGVIAKRPAPIALPNSCAA

SEQ ID NO: 19403 - protein, 733 aa, Oryza sativa
  Clone ID: TF_OSC420832j.C1.p1.fg
MAKTMEHERRGARDRASTLSSQRPLGRRVQGEEYIPEEDDFATASSPPRGPKKPFRPINPRDRKADDRPMAHQGPMSPYYIMYPCKCPFHKGNHDADITISDTHNNPPTVIQGPITRARTMEGTRRHLEKDLDPWRTIGDVQVKVEAQTKSTSGAIRSPGPVYTKTGAQHYYLSLDCVPLIFVYLAFLAPLITSGQHRFLIPAITDYAFQVSFALLVTKDITEAVAKSVQDAFTKIGFLNHMERLDKRISTLTDRVAALETPSNEEVVSGDDDAHPEDTVYDSSGYIDAPATRQAQLRRRLRTNCIGMGGTRHQQGNNNNRVSDDPYAKVKFKIPSFSGYYDAEKYLDWEMTVEQKFNAHLVPEQHRVRQASSEFKDFAIMWWVGLTAEGVLPTTWEELKVAMRNRFVPPSYHRDLRKKLMRLEQGDKSVQDYYGELQKGLFRFAMLAEKELQGRDHQGKSKASTYTPRTTPSAALPKAVSFRVSSQPAGKRPAASGASAAPKPSPPPRPAESGKGSTQVPAKSASSVASTGRIQCHRCQGFGHVQKDCPSQRAYVATEDGYITTSDMEEEEGEEEVEDEDGEVFGRDDTTDYRTNIVQWVLSMQVAATHLVSSDLVEKLGLTTLTHPHPYHIQWLNDSGRAKQVAKSVFPPKKDKISPSSKVEGIKLKGGVMLATKCDIAEMSDDDMCYFLICKQALVSLDDIASSIPPVVTNLLQKYEDVFPAEIPPGFRL

SEQ ID NO: 19404 - protein, 1289 aa, Oryza sativa
  Clone ID: TF_OSC900041j.C1.p10.fg
MERLDKRISTLTDRVAALETPSNEEVVKLKIPSFSGYYDAEKYLDWEMTVEQKYNAHLVPEQHRVRQASSEFKDFAIMWWAGLSDEGVLPTTWEELKVAMRDRFVPPSYHRDLRKKLMRLEQGDKSVQDYYGELQKGVRRCGIVEGVEDAICRFYSGLREEIHNIVDCKEFNSVNQLFRFAMPAEKELQGRDHQGKSKASTYTPRTTPSAGLPKAVSFRASSQPAGKRPAASGASAAPKPFPPPRPAESGKGSTQVPAKSASYVASTGRIQCHRCQGFGHVQKDCPSQRAYVATEDGYITTSDMEEEEEEEEVEDEDGEIFGRDDTTDYRTIIVQRVLSTQIFFVINNRRARVIIDGGSCNNLWLNDSGRAKVTQVCRVSFSIGSYADSVDCDVVPMQACSLLLGRPWEHDNDATHHGRSNKYTFVHNGKKITLLPLTPAEIVEADKERAASLKLDESENQQVAKSVFPPKKDKLSPSSKVEGIKLKGGVMIATKCEIAEISDDDMCYFLICKQALVSLDDIASSMPPVVTNLLQEYEDVFPAEIPLGLPPMRGIEHQIDLIPGASLPNRAAYRTNPEETKEIQRQVQDLLDRWYVRQSLSPCVVPVILVPKKDGSWRMCVDYRAINNITIRYRHPIPRSDDMLDELCGSIIFTKIDLRSGYHQIRMKLGDEWKTAFKTKFGLYEWLVMPFGLTNAPSTFMRLMNEVLRPFIGRFVVVYFDDILIYSKSFDEHMDHLRAVFNALHDARLFANLENCIFCTERVSFLGYVVTPQGIEVDESKIEAIKSWPVPQTITQLRSFLGLAGFYRRFVKDFSIFAAPLNELTKKGVVFHWGKTQEQSFDTLKDKLTHAPLLQLPNFGKTFELECDASGVGIGGVLMQDGKPVAYFSEKLHGPVLNYSTYDKELYALEAHGGGLIGHFGAKKTKDVLAMHFFWPRMRKDVERTKRGRDSIFVVVDRFSKMAHFIPYHKSDDAVHIADLFFHEIVRLHGMPFTIVSDRDAKFLSHFWRTLWNKLGTKLLFSTTCQPQTDGQTEVVNCTLGTMLRAILKKNLKMWEECLPHVEFAYNRTIHSTTKVSPFQVVYGFNPCASIDILPLPTSERVHNDDKAHAEFILSMHESTKFNIEKMTEKYRIAGSKVEKINDNAYKLELPPEFGVSPTFNISDLKPHLGEEDELESRTTSIQEGEDDADITTSDTHNNPPTVIQGPITRARARQLNLEVSSFLCSSLYEFENRLLPNDYIVLWNNGGDKETLGEGLTAMEDHRGCSSQGGGPNQVDVWCNSEFRTNLH

SEQ ID NO: 19405 - protein, 1539 aa, Oryza sativa
  unsure (1)..(1539): unsure at all Xaa locations
  Clone ID: TF_OSC900370j.C1.p2.np
QEQLRTLQQNTQKDITEAVAKSVQDAFTKIGFLNHMERLDKRISTLTDRVAVLETPSNEEVVSGDDDAHPEDTVYDSSGMATTSSTHKPHRYGWHSPPMATTSSTHKPHRYGWHSPPTRXXNDRVPDDPYAKVKFKIPSFLGYDDAKKYLDWEMTVEQKFNVHLVPEQHRVRRASSEFKDFAIMWWAGSDEGVLPTTWEELKVAMRDRFVPPSYHRDLRKKLMRLEQGDKSVQDYYGELQKGVRRCGIVEGVEDAICRFYTSLREEIQNIVDYKEFNSVNQLFRFAMLAEKELQGRDHQGKSKASTYTLRTTVSFRASQPAGKRPAASGASAAPKPSPPRPAESSKGSSQVPAKSASSVTSTGRIQCHRCQGFGHVQKDCPSQRAYVATEDGYITTSDMEEEEEEEEVEDEDGEVFGRDDTTDYRTIIVQRVLSTQVQQHDRLQRHNLFXIFFVINNCRARVIIDGCSCNNLVSSDLVNKLGLTTCTHPHPYHIQWLNDSGRAKVTQVCRVSFSIGSYADSVDCDVVPMQACSLLLGRPWEHDNDATHHGRSNKYTFMHNGKKITLLPLTPAEIVEADKERAASLKVDESENQQVAKSVFPPKKDKLSPSSKVEGIKLKGGVMLATKCDIGDISNDDMCYFLICKQALVSLDDIASSIPPVVTNLLQEYEDVFPAEIPPGLPPMRGIEHQIDLIPGASLPNRAAYRTNPDETKEIQWQVQDLXDRGYVRQSLSPCPVPVILVPKKDGSWRMCVDCRAINNITIRYCHPIPRLDDMLDELCGYIIFTKIDLRSGYHQIRMKLGDEWKTAFKTKFGLYEWLVMPFGLTNAPSTFMSLMNEVLRPFIGRFVVVYFDDILIYSKSLDEHMDHLRAVFNALRDARLFANLEKCIFCMERVSFLGYVVTPQGIEVDESKIEAIRSWSVPQTITQVRSFLGLAGFYHRFVKDFSTFAAPLNELTKKGVVFHWGKTQEKSFDILKEKLTHAPLLQLPNFGKTFELECDATGVGIGGVLMQDGKPVAYFSEKLHGPILNYSTYDKELYALVRSLETWRHYFWPKEFVIHSDHESLQYLRSQNNLNRRHAKWVEFIESFPYVIKHKKGKDNVIADALSRRYTFLSQLECRIFGLESIKEQYALDPDFNEVMINCKEGRTWNKFVINGGFVYRANRLCIPVGSVRLLLIQEAHGGELMGHFGAKKTEDVLAMYFFWPRMRKDVDRFMARCTTCQKAKSHLNPHGLYMPLPVPSIPWADISMDFVLGLSRTKRGRDSIFVVVDHFSKMAHFIPCHKSDDAVHIADLFFHEIVRLHGMPSIVSDRDAKFLSHFWRTLWNKLGTKLLFSTTCHPQTDGQTEVVNRTLGTMLRAILKKNLKMWEECLPHMEFAYNRATHSTTKVSSFQVVYGFNPRAPIDMLPLPTSERVHNDAKARAEFILKMHESTKFNIEKMTEKYRIAGSKSRQEVKLEPGDLVWLHLRNDRFPELRKSKLMPRADGPFKIVEKINDNAYKLELPPEFGVSPTFNISDLKPYLGEEYELESRTTSIQEGE

SEQ ID NO: 19406 - protein, 176 aa, Oryza sativa
  Clone ID: TF_OSC401057j.C1.p6.gm
MAGATGWRAIKFLGSASSATAPVLCDYCCCIDAFTIMSTKIGDKEVNDINRGEGEGKDNWGKKIEGDSSANLVQKKNPHASHNNNKKVKPDVKPNATTNFKKKDKGKAKGDYFVCGKPGHWAKDCLEHKDKKSANMSISEGGGTSGYGQERFLLVVGKRIDADEHGNGGYQRTTIQ

SEQ ID NO: 19407 - protein, 1815 aa, Oryza sativa
  unsure (1)..(1815): unsure at all Xaa locations
  Clone ID: TF_OSC400839j.C1.p11.np
LVWHLIDHLHTGSLLVTLGGCRLLDGLWRSCPVTSPRRLWRRPGAGFAITGTPLTEIDHRNLQLNAQAMNVLFNSLSQEEFDRVSHLETAYEIWNKLASWKIHEGTSEYKDAKLHFLKIQYETFSMLPHESVNDMYGRLNVIVNDLKGLGANYTDLEVAQKMLRALPGKYETLVTMLINSDMSRMTPASLLGKINTNDMYKLKKKEMEEASPSKKCIALQAEVEDKGKGKERGRGSNSSRERGRGSNSSRRRNRRPNKTLSNLKCFECGEKGHFTSKCPSKDDGDKSSKKKSGGYKLMKKLKKEGKKIEAFIGEWDSNEESSASSGSEEEGGEDASSKKKKMAVVAIKEALSLFAPLCLMAKGSSKVTSLSDSESDDDCDDVSYDELVSMFEELHAYSEKEIVKFKALKKDHASLEVLYEELKTSHERLTISHEKLKEAHDNLLSTTQHGALIDVGISCDLLDDSATCHIAHVASSSISTSCDGLVDMPSSSSSSCISICDASLVVENNELKEQVAKLNKSLERCFKGRLMMVALLLDMWVPLYSVVNYRTGGSHWVLDSGCTQHMTGDRAMFTTFEVGGNEQEKVTFGDNSKGKVIGLVAKTSLGWLXHRRLAHVGMNQLSKLSKRDLVVGLKDVKFEKDKLCSACQAGKQVACSHPTKSIMSTSRPLELLHMDLFGPTTYKSIGVERKNRTLIEMARTMLDEYGVSDSFWAEAINTACHATNWLYLHRLLKKTSYELIVGRKPNVAYFRVFGCKCYIYRKGVRLTKFESRCDEGFLLGYASNSKAYRVYNKNKGIVEEIVDIQFDETNGSQEGHENLDDVGDEGLMRAMKNMSIGDVKPIEVEDKPSTSTQDKPSTSATPSQAQVEVEEEKAQDPPMPPRIHTALSKDHPIDQVLGDISKGVQTRSRVASICEHYSFVSCLEPKHVNEALCDPWMNAMHEELNNFARNKVWTLVERPRDHNVIGTKWVFRNKQDENGLVVRNKARLVAQGFTQVEGLDFGETFAPVARLEAIRILLAFASCFDIKLFQMDVKSAFLNGEIAELVFVEQPPGFEDPKNPNHVYKLSKALYGLKQAPRAXYERLRDFLLSKDFKIGKVDTTLFTKIIGDDFFVCQIYVDDIIFGSTNEVFCKEFGDMMSREFEMSMIGELSFFLGLQINQLKDGTFVSQTKYIKDLLKRFGLEDAKPIKTPMATNGHLDLDEGGKLVDLKLYRSMIGSLLYLIASRPDSMFSVCMCARFQAAPKECHLVAVKRILRYLKHSSTIGLWYPKGAKFKLVGYSDSDYTGCKVDRKSTSGSCQMLSRSLVSWSSKKQNSVALYRXGGICFGGIXILSFGQNEIYPQNKIEKEFEKSFKTKLRRSDRAACSGLTGCGRRSDRPSVRGLTAPDWPMMPPRTRHGRCAPTPMPPRTRHGRCAPTPDPVSEPEESSGEDYAQSDEEVEANIEGASEEASGDDDSGSGEDEDEGSDDMHVDPSIXFDVNMRNPSQYTILRHHDQFLRPRDTPDPRFHTAFQKLWVAGDYNEMKWMSDTLQCSISRRQFWRLLNIRLDFGYDLHEEHTHNPLSIDYLSQFYEDGVRYTHGKVAGLRTIPSVVNRIVRATILPRLGNNDDIRGVAWHIIDTIIQGRQFDIVSLMMQEIAISKGTFTQGIYYAPYIMRLIQDKLGAAQNLKKHKQYKPRLQLGAPHARMVPSSHLGASSSSAPPPPHGYDPNAFFHPQYTYFGIQPNEYFNPVLGAINTLSKSIQRLSTGHEAXHEDVRGLRTDVGDLNASMGRLHTRVGTLDSQVQMLESSQAFVYHRRRDAPHPSTSARPPSPPQ

SEQ ID NO: 19408 - protein, 493 aa, Oryza sativa
  Clone ID: TF_OSC21755j.C1.p8.gm
MVRERKVRESPLGARGSGGSVRKLNGGSYKPGRPPGAVILHRRPTSSPSFLPPSGRRYLRCAGRWLGGAVERRLSARSSDRVGSSVQKVNGDGDKPAVLHSWQSITIGQPHPRLLSCRLVVAIRDVSPGKEIQEGSTLWGDLSLILKWEDSWHQRGGAWEYGEENARGGQGRAGAIDYFLYIDARYFARVLSTSQHLLPLHSASSALAPSNFNLRSILEKEKLTGTNFMDWYRNLRIVLRQEHKEFVLTQPFPADLPNNAPVAKRREHERRCNEYLDISCLMLATMSPEFQRQYEALDAHTIITRLRNMFEDQARAKRFNTSKSLFACRLAEGNPVSPHVIKMIGYTESLDKLGFPLSRELATDLILQSLPPSFEPFIMNFNMNNLNRTLAELHGMLKTTEESIKKNSNHVMVMHKHKPNNKKSGQKRKLNSDEITSTSNSKTKVQKTGLAKDAECFFCKETGHWKRNCKKYLEQLKQKQQDGKSSTSGAEKK

SEQ ID NO: 19409 - protein, 589 aa, Oryza sativa
  Clone ID: TF_OSC28635j.C1.p1.fg
IDVGHLCAEIIGLLDKIMAAPASSNFNLRSILEKEKLTGINFMDWYRNLRTVLRQEHKEFVLTEPFPANLPNNAPAAQRREHEKRCNDYLDTSYLMLATMSPELQRKYDALDAHTIITRLRNMFEDQARAERFNTSKSLVACRLAEGNPMSPHVIKMIGYAESLDKLGFPLSRELVTDLILQSLPPSFEPFIMNFNMNNLNRTLAELHGMLKTAEESIKKNSNHVIVVHKRKPNNKKSCQKRKLNSDEITSTSNSKTKVQKTGPAKDAECFFCKETGHWKRNCKKYLEQFKQKQQDGKSSTSVYNINAKRQRPNDLNPTFIWHCRLGHINEKRMEKLHRDGLLHSFDFKSFETCESCLLGKMTKAPFTGQSERASELLGLVHTDVCGPMSSTAKGGFGYFITFTADFSRYGYVYLMRHKSEYFEKFKEFQNEVQNHLGKTIKYLRFDRGGKYLSLEFGNHLKECAIVPQLTPPGTPQWNGVSERRNRTLLDMVRSMMSQTDLPLSFWGYALETVAFTLNRVPSKSVDKTPYEIWTGKRPSLSFLKIWGCVVYVKRLQSDKLTPKSDKCFFVGYPKETKGYYFYNREEGK

SEQ ID NO: 19410 - protein, 1183 aa, Oryza sativa
  Clone ID: TF_OSC28818j.C1.p1.fg
MEIQYEHTSYRDPNRSLTGLGGPSDGSYIFVRGVTGGGIASPRRVVTIYDLILAWFLVYAIEMFDLCYRSLRLSQQWIDVGHLCAEIIGLLDKIMAAPASSNFNLRSILEKEKLTGINFMDWYRNLRTVLRQEHKEFVLTEPLQANLPNNAPAAQRREHEKRCNDYLDTSYLMLATMSPELQRKYDALDAHTIITRLRNMFEDQARAERFNTSKSLVACRLAEGNPMSPHVIKMIGYAESLDKLGFPLSRELVTDLILQSLPPSFEPFIMNFNMNNLNRTLAELHGMLKTAEESIKKNSNHVIVVHKRKPNNKKSCQKRKLNSDEITSTSNSKTKVQKTGPAKDAECFFCKETGHWKRNCKKYLEQFKQKQQDGKSSTSVYNINAKRQRPNDLNPTFIWHCRLGHINEKRMQKLHRDGLLHSFDFKSFETCESCLLGKMTKAPFTGQSERASELLGLVHTDVCGPMSSTAKGGFGYFITFTADFSRYGYVYLMRHKFEYFEKFKEFQNEVQNHLGKTIKYLRFDRGGKYLSLEFGDHLKECAIVPQLTPPGTPQWNGVSERRNRTLLDMVRSMMSQTDLPLSFWGYALETVAFTLNRVPSKSVDKTPYEIWTGKRPSLSFLKIWGCVVYVKRLQSDKLTPKSDKCFFVGYPKETKGYYFYNREEGKVFVARHGVFLEKEFISRQDSGSMVQLEEIQETPENASTSTQPQAEQDVVQQVEQVVVEPVVEAPASRRSDRIRRTPASLELLVDPPNGVKAIECKWVFKKKTDVDGNFNIYKARLVAKGFRQIQGVDYDETFSPVAMLKSIRIVLAIAAYFDYEIWQMDIKIAIHNGNLDEDVYMTQPKGFVDPQSAKKICKLQKSIYGLKQASRSWNIRLDKVVKALGFVKNEEEACVYKKISGSALVFLILYVDDILLIGNDILMLESVKTSLKNSFSMKDLGEATYILGIRIYRDRSKRLIGLSQSTYIERFIMYAMLCTRPDVSYSLSATSRYQSDPCESHWIAVKNILKYLRRTKDMFLVNGGQEELVVNGYTDASFQTDKDDFRSQSGFVFCLNGGAVSWKSSKQDTVSNYTTEAEYIASSEAAKEAVWIKKFISRLGVVTSASSPMDLYCDNSGAIAQAKEPRSHQKSKHILRRYHLIREIVGRGDVKICKIHTDLNVADPLTKPLPQPKHEAHTRAMGI

SEQ ID NO: 19411 - protein, 569 aa, Oryza sativa
  Clone ID: TF_OSC2957j.C1.p1.fg
MEIQYEHTSYRDPNRSLTGLGGPSDGSYIFVRGVTGGGIASPRRVVTIYDLILAWFLVYAIEMFDLCYRSLRLSQQWIDVGHLCAEIIGLLDKIMAAPASSNFNLRSILEKEKLTGINFMDWYRNLRTVLRQEHKEFVLTEPFPANLPNNAPAAQRREHEKRCNDYLDTSYLMLATMSPELQRKYDALDAHTIITRLRNMFEDQARAERFNTSKSLVACRLAEGNPMSPHVIKMIGYAESLDKLGFPLSRELVTDLILQSLPPSFEPFIMNFNMNNLNRTLAELHGMLKTAEESIKKNSNHVIVVHKRKPNNKKSCQKRKLNSDEITSTSNSKTKVQKTGPAKDAECFFCKETGHWKRNCKKYLEQFKQKQQDGKSSTSVYNINAKRQRPNDLNPTFIWHCRLGHINEKRMEKLHRDGLLHSFDFKSFETCESCLLGKMTKAPFTGQSERASELLGLVHTDVCGPMSSTAKGGFGYFITFTADFSRYGYVYLMRHKSEYFEKFKEFQNEVQNHLGKTIKYLRFDRGGKYLSLEFGNHLKECAIVPQLTPPGTPQWNGVSERRNRTLLDM

SEQ ID NO: 19412 - protein, 335 aa, Oryza sativa
  Clone ID: TF_OSC33768j.C1.p1.fg
MVFLVWLKMMDDTLTTGSIRSTEGEKRRLAEASLAYNCERIDVGHLYAEIIGLLDKIMAAPAPYNFILQSILEKEKLTGTNFMDWYCNLRIVLRQEHKEFMLTQPFPADLPNNAPVAQRREHERRCNEYLDISCLMLATMSPELQRQYEALDAHMIITGLRNMFEDQARAEWFNTSKSLFACRLVEELHGMLKTVEESIKKNSNHVMVMHKRKPNNKKSGQKRKLNSDEITSTSSSKTKVQKTGPAKDAECFFCKETGHWKRNCKKYLQQLKQKQQDGKSSTSGINVIEINLATSFTDSWVFDTGSVAHICKSLQGLKRSRSLVSHPEVPFPSLN

SEQ ID NO: 19413 - protein, 880 aa, Oryza sativa
  Clone ID: TF_OSC400763j.C1.p50.fg
MATVTSGDGIGQSSVGSRQRASAMGAGGGHRLWKCMAMPKVIEESITSYIIYQQKLTETNFMDWYRNLRIVLSQEHKEFVLREPFPANLPNNASAAQQREHEKRCNDYLDISCLMLATMSPELQRQYEALDAHTIITGLRNMFEDQARAERFNTSKSLFACRLAEDKCGQKSAAKTYSILEFVRDNGRVRIKSTGTLIHPKARTLAELHGMLKTAEESIKKNSNHVMVMHKRKPNNKKSGQKRKLNSDEITSTSNFKTKVQKTGPAKDAECFFCKETGHWKRNCKKYLEQLKQKQQDGKSSTSGINVIEINLATSSTDSWVFDTGSVAHICKSLQGLKRSRSLARDEVDIRVGNGPRVAAVTIWYVYLMRHKSESFEKFKEFQNEVQNHLGKTIKYLRSDRGGEYLSLEFGNHLKEYGIVPQLTPPGTPQWNGVSERRNRTLLDMVRSMMSQTDLPLSFWGYALETAAFTLNRVPSKSVDKTPYEIWTGKRPSLSFLKIWGCELWKHRLHEGPIGYGIHLRAIAAYFDYEIWQMDVKTAFLNGNLDEDVYMTQPKGFVDPQSAKKICKLQKSIYGLKQASRSWNIRFDKVVKALGFVKNEEESCVYKKISGSALVLKRFNMQDSKKGFLPMSHGINLGKNQCPQTTDERNKMSVIPYASAIGSIMYAMLCTRLDVSYALSATSRYQSDPGESHWIAVKNILKYLRRTKDMFLVYAGQEELVVNGYTDASFQTDKDDFRSQSGFVFCLNGGAVSWKSSKQDTVADSTTEAEYIAASEAAKEAVWIKKFVSQLGVMTSASSPMDLYCNNSGAIAQAKEPRSHQKSKHILRRYHLIREIVGRGDVKICKIHTDLNVADPLTKPLPQPKHEAHTRAMGIRYIHD

SEQ ID NO: 19414 - protein, 659 aa, Oryza sativa
  Clone ID: TF_OSC400770j.C1.p42.fg
MAPPVPSNFNLRSIFEKEKLTGTNFMDWYRNLRIVLRQEHKEFVLTQPFPADLPNNAPAAQRREHERRCNEYLDISCLMLATMSPELQRQYEALDAHTIITGLRNMFEDQARAERFAEGNPVSPHVIKMIGYTESLDKLGFPFSRELATDLILQSLPPSFELFIMNVNMNNLNRTLTELHGMLKTAEESIKKNSNHVMVMHKRKPNNKKSCQKRKLNSDEITSTSNSKTKVQKTGPAKDAECFFCKETGHWKRNCKKYLEQLKQKQQDGKSSILGINVIEISLATYSTDSWVFDTGYGYVYLMRHKSESFEKFKEFQNEVQNYLGKTIKYLRSDRGGEYLSLEFGNHLKECGIISQLTPPGTPQWNGVSERSNRTLLNMLWKHWLHEGPKGYGVHLRDKVEPTTYDEAMVGPDSEKWLEAMKSEIESMHVNQVWNLVNPPDGVKAIECKWVFKKKTDVDGNVHIYKTRLVVKGFRQIQDVSYALSATSRYQSDPGESHWIAVKNILKYLRRTNDTFLVYGGEEELVVNGAMSWKSSKQDTVADSTREAEYIVASEAAKEAVWIKKFVSQLGVMTSASGPMDLYCDNSGAIVQTKEPRSHQKSKHILQRYHLIREIVGRGDVKICKIHTDLNVADQLTKPLPQPKHEAHTRAMGIRYIHD

SEQ ID NO: 19415 - protein, 1316 aa, Oryza sativa
  unsure (1)..(1316): unsure at all Xaa locations
  Clone ID: TF_OSC400770j.C1.p70.np
IMAAPVPSNFNLRSILEKEKLNGTNFMDWYRNLRIVLRQEHKXFVLAQPFPADLPNNAPAAQRREHEKRCNDYFDISCLMLATISPELRRQYETLDAHTIITGLHNMFEDQARAERFNTSNSMFVCRLAEGNPVSPHVIKMIGYTESLEKLGFPLSRELATGLILQSLPPSFEPFILNFNMDNLNRTLAELHGMLKTADESIKKNSHVMVMKRKPNNKKSGQKRKLNSDEITSTSNSKVKVQKIGPAEDAECFFCKETGHWKRNCKKYLEQLADLAFQGLSTPINNYSRRLATLFPGFYLSSGGIWHLTRGCIGLVRSPAKGXVLRSAGPGESIGYVGVVQAFKAASLRSLGSLWFGWYICLPDISILSLIALCLETHRFSWNYLGXVRSSVLADIFYNHNVVLNSLYIVNLDGCSVYNINAKRQRPNDLNPTFIWHCHLSHIKEKRMEKLHKDEDGFLYSFDFESFETCESCLLDKTTKAPFTDQSERASELLALVHTDVCGPMSTTRGGFGYFITFTDYFSRYGYVYLMRHKSESFEKFKEFHNEVQNHLVKTIKYLRSDRGGEYLSLEFGNHLKECGIVPQLTPLGTPQWNGLSERRNRMLLDMVRSMMSQTDLPLSFWGYALETAAFTLNRIPSKSVDKTPYXIWTGKRPSLSFLKIWGCEAYVKRLQSDKLTPKSDKCLFVGYPKETKGYYFYNREEGKVFVARHGVFLEKEFISRKDSGSMVRLEEIQETPENASTSTQPQQGEQDVGQQVEQVVVQPAVEAPASRRSERKRRTPATYASTRQRDILLLDNDEPTTYEEAMVGPDSEKWLGAMKSEIESMHVNQVCKLVDPPDGVKAIECKWVFKKKTDVDRNVHIYKARLVVKGFRQIQGVDYDETFSPVTMLKSVRIVLAIDAYFDYEIWQMDVKTAFLNGNLYEDVYMTQPKGFVDPQSAKKICELQKSIYGLKQVSRSWNIRFDEVVKALGFVKNEEEPCVYKKISGSALVFLILYVDDILLIGNDIPMLESVKTSLKNSFSMKDLGEAAYILGIRIYRDTSKRLIGLSQSTYIDKVLKRFNMQDSKKGFLPMSHGINLGKNQCPQKMSVIPYASAIGSIIYAMLCTRPDVSYALSATSRYQSALGESHWIAIKNILKYLRRTKDMFLVYGGQEELVVNGYTDASFQTDKDDFRSXSGFVLCLNGGVVSWKSSKQDTVADSTTXAEYIASSEVAKEAVWIKKFVSQLGVMTSASSPMDLYCDNSGAIAQAKEPRSHQKSKHILRRYHLIREIVGRGFVKICKIHTDLNVADPLTKPLPQPKHEAHNRAMGIRYVHD

SEQ ID NO: 19416 - protein, 996 aa, Oryza sativa
  Clone ID: TF_OSC401355j.C1.p12.fg
MVTAGDHRRGGAAPERAEGRGKAKGRSSAHPGSTATTGTAAEAEEGGGAIRDGEGDGAPAVGERIGGADGVDDDAAKPKEVTPSGEEVRSDDGGEPELGGDGGEKVRRIDVGHLYAEIIGLLDKIMAAHAPSNFNLRSILEKEKLTGTNFMDWYRNLRIVLRQEHKEFLLIQPFPADLPNNAPAAQRRKHERRCNDYLDISCLMLATMSPELQSQYEALDAHTIITGLRNMFEDQARAERFNTSKFLFAYRLAQGNPVSPHVIKMIGYTESLDKLGFPLSRELATDLILQSLPPSFEPFIMNFNMNNLNRTLAELHGMLKTAEESIKKNSNYVMVMHKLKPNNKKSGQKRKLNSDEITSTSNCKTKVQKTGPAKDAECFFCKETGHWKRNCKKYLEQLKQKQQDGKSSTSALCKNVISASCLQAEGYGFRSVDNGCSVYYNDIFYFHAPMMNGLYIVNLDGCSVYNINAKRQRPNDLNPTFIWHCRLGHINEKRMEKLHRDGLLHSFDFESFETCESCLLGKMTKAPFTGQSERASELLALVHTDVCGPMSSTARSGFGYFITFTDDFSRYGYVYLMRHKSESFEKFKEFQNEVQNHLGKTIKYLRSDHGGEYLRLEFEFISRKDSGSMVRLEEIHETPENASTSTQPQQAEQDVVQQVEQVVVEPVVEAPASRRSERIRRTPARYALLTTGQRDILLLDNDEPTTYEEAMKSIHGLKQASRSWNIRFDEVVKVLGFFKNEQEPCVYKKISGSALVFLILYVDDILLIGNDIPILESVKTLLKNSFSMKDLGEAAYILGIRIYRDRSKRLIGLSQSTYIDKVLKRFNMQDSKKGFLPMSHDINLGKNQCPQTTDERNKMSVIPYASAIGSIMYAMLCTCPDVSYALSATNRYQSDPGESHWIAVKNILKYLRRTEDMFLVYGGQEELVVNGYTDASFQTDKDDFRSRSGFVFCLNGGVVSWKSSKQDTVADSTTEAEYIAASEAAKDAVWIKKFVS

SEQ ID NO: 19417 - protein, 1387 aa, Oryza sativa
  Clone ID: TF_OSC401416j.C1.p1.fg
MEIQYELTSDRDPNRSPMGLGGPSDGSYIFVRGVTGGGIASLLTKAERDCVHRIVRCPLEPHANEKNEPMRLTRFRLNSITPLRIDVGHLYAEIIGLLDKIMAAPAPSKFILRSILEKEKLTGTNFMDWYRNLRIVLRQEHKEFVHTQPFPADLPNNAPAAQRREHERRCNEYLDISCLMLPTMSPELQRKYEALDAHMIITGLRNMFEDQARAERFNTSKSLFACRLAEGNPVSPHVIKMIGYTESLHKLGFPLSRELATDLILQSLPPSFEPFIMNSNMNNLNRTLPELHGMLKTAEKSIKKNSNHVMVMHKRKPNNKKSGQKRKLNSDEITSTSNSKTKVQKTGPAKDAECFFCKETGHWKRNCKKYLEQLKQKQQDGKSSTSGINVIEINLATSSTDSWVFDTGSVAHICKSLQGLKRSRSLARGKVDIRVGNGARVAAVAVGTMPLSLPSGLVLELNNCYCIPALCKNVISASCWQAEGYDFRSVDNGCSVYYNDIFYCHAPMMNGLYIVNLDGCLVYNINAKRQRPNDLNPTFIWHCRLGHINEKRMEKLHRDGLLHSFDFESFETCESCLLSKMTKAPFTGQSERASELLGLVHTDVCGPMSSTARGGFGYFITFTDDFSRYGYVYLMRHKSESFEKFKEFQNEVQNHLDKTIKYVRSDRGGEYLSLEFGNHLKECGIVLQLTPPGTPRWNGVSERRNRTLLDMVRSMMSQTDLPLSFWDYALETAAFTLNRVPSKSVDKTPYEIWTGKRPSFSFLKIWGCEFYVKRLQSDKLTPKSDKCFFVGYPKEMKGYYFYNRDESKVFVARHSVFLEKEFISRKDSGTMVQLEEIQETTENASTSTQPQAKQDVVQQVEQVVVELVVEAPASRRSERIWCTTARYALLTTGQRDILLLDNDEPTTYEKAMVGPDSEKWLGAMKSEIEYMHVNQVWNLVDPPDGVKAIECKWVFKKKTDVDGNVHIYKARLVAKGFRQIQGVDYDETFSPVAMLKSIRIVLAIAAYFDYKIWQMDVKTAFLNGNLDEDVYMTQPKGFVDPQSAKKICKLQKSIYGLKQASRSWNIRFDEVVKALGFVKNKEEPCVYKKISGSALVFLILYVDDILLIGNDIPMLESVKTSLKNSFSMKDLGETAYILGIRIYRDTSKRLIGLSQSTYIDKNQCPQTTDERNKMSVIPYASAIGSIIATSRYQSDPGESRWIAVKNILEYLRRSKDMFLVYGGQEERVVNGYTDASFQTDKDDFRSQSGFVFCLNGGAVSWKSSKQDIVVDSTTEAEYIAASEAAKKAVWIKKFVSQLGVMTSASSPMDLYCDNSSAIAQAKEPRSHQKSKHILRRYHLIREIVDRGDVKICKIHTDLNVADPLTKPLPQPKHEAHTRAMGIRYVHD

SEQ ID NO: 19418 - protein, 328 aa, Oryza sativa
  Clone ID: TF_OSC401555j.C1.p4.gm
MSPELQRQYEALDAHTIITGLRNMFEDQARAERFNTSKSLFACRLAEGNPVSPHVIKIIGYTESLDKLGFPLSQELATDLILQSLPPSFEPFIMNFNMNNLNRTLAELHGMLKTAEESIKKNSNHVMVMHKRKPNNRKSGQKRKLNSDEITSTSNSKTKVQKTVPAKDAECFFCKETGHWKRNCKKYLEQLKQKQQDGKSSTSGAEKKYGYVYLMRHKSESFEKFKEFQNEIQNHLGKTIKYLRSDRGGEYLSLEFGNHLKECGIVPQLTPPGTPQWNGVSERRNRTLLDMETPENAPTSTQPQAEQDVVQQVEQAVVEPVVEAPASR

SEQ ID NO: 19419 - protein, 1095 aa, Oryza sativa
  Clone ID: TF_OSC401834j.C1.p18.fg
MPKVIEESITSYYQQIMAAPAPSNFNLRSILEKEKFTGTNFMDWYRNLRIVLRQEHKEFVLTESFPANLPNNAPAAQRREHEKRCNDYLDISRLILATMSPELQRQYEALDAHTIITGLRNMFEGQARAERFNISKSLFACRLVEGNPVSPHVIKMIGYTESLDKLGFPLSRELATDLILQSLPPSFEPFIMNFNMNNLNRALVELPGMLKTAEESIKKNSNHVMVMHKRKPNNKKSGQKRKLNSDEITSTSNSKTKVQKTGPAKDAECFFCKETGHWKRNCKKYVEQLKQKQQDGKNSTSEGYGFRSVDNGCPVYYNDIFYFHAPMMNGLYIVNLDGYSVYDINAKRQRPNDLNPTFIWHCCLGHINEKRMEKLHRDGLLHSFDFESFETCESCLLGKMTKAPFTGQSERASELLGLIHTDVCGPMSSTDRGGFGYFITFIDDFSRYGYVYLMRHKSESFEKFKEFQNEVQNHLGKTIKYLRSDRGGEYLSLEFGNHLKECGIVPQLTPPGMPQWNGVSERRNRTLLDMVRSMMSQTDLPLSFWGYALETAAFTLSRVPSKSVDKTPYEIWTGKRPSLSFLKIWGCEVYVKRLQSDKLTPKSDKCFFVGYPKETKGYYFYNQEEGKVFVARHGVFLEKEFISRKDSGSMLWKHRLHEGPIGYGVHLRDNDEPTTFEEAMVGPDSEKWFGAMKSEIESMHVNQVWNLVDPPDGVKAIECKWVFKKKTDVDGNVHIYKARLVAKGFIYKARLVAKGFRQIQGVDYDETFSPVAMLKSIRIVLAIAAYFDYEIWQMDVKTAFLNGNPDEDVYMTQPKGFVDPQSAKKICKLQKSIYGLKQASRSWNIRFDEVLKALGFVKNEEEPCVYKKISGSALVFLILYVDDILLIGNDIPMLESVKTSLKNSFSMKDLGEAAYILGIRIYRDRSKRLIGLSQSTYIDKVLKRFNMQDSKKGFLPMSHGINLGKNQCPQTTDERNKMSVIPYASAIGSIMYAMLCTRPDVSYALSATSQYQLDPGESHWIVVKNILKYLRRTKDMFLVYGGLEELVVNGYTDARFQTDKDDFRSQSGFMFCLNGGAVSWKSSKQDTVADSTTEA

SEQ ID NO: 19420 - protein, 679 aa, Oryza sativa
  Clone ID: TF_OSC417977j.C1.p3.fg
MAYGTTSSANRRSSLKASMENQEIAEIVAVVACEQGVFRSMRIASYEQAEAGDVGERGAGRAGPSSAGGSWSGETQQPLRLHRRRRGSVLSVSAASDGEQWLPPTSTVCLLHVDLGLMFAAQSQWISPTWIENPAHIRLSLEWVESRPTTAFHPHPGPGKRITSTLLRRLRRRRRRNALSSGCPSPSLVGSRLPPEARPDDRSGMAYAKDQARAERFNTSKSLFACRLGEGNPVSPHVIKMIGYTESLDKLGFPLSRELATDLILQSLPPSFELFIMNFNMNNLNRTLAELHGMLKTAEESIKKNSNHVMVMHKRKPNNKKSGQKRKLNFDEITSTSNSKTKVQKTGRAKDAECFFCKETGHWKRNCKKYLEQLKQKQQDGKSSTLGINVIEINLATSSTDSWVFDTRGGFGYFITFTDDFSRYGYVYLMRHKSESFEKFKEFQSEVQNHLGKTIKYIRSDRGGEYLSLEFGNHIKECGIVPQLTPPGTPQWNGVSERRNRTLLDMVRSMMSQTDLPLSFWGYALETAAFTLNRVPSKSVDKSPYEIWIGKCPSLSFLKIWGCEVYVKRLQSDKLTPKSDKCFFVGYPKETKGYYFYNREEGKVFVARHGVFLEKEFISRKDSGSMVRLEEIQETPENASTCTQPQQAEQDVVQEQVVVEPVVEAPASRRFERIRRTPA

SEQ ID NO: 19421 - protein, 1183 aa, Oryza sativa
  Clone ID: TF_OSC900184j.C1.p14.fg
MEIQYEHTSYRDPNRSLTGLGGPSDGSYIFVRGVTGGGIASPRRVVTIYDLILAWFLVYAIEMFDLCYRSLRLSQQWIDVGHLCAEIIGLLDKIMAAPASSNFNLRSILEKEKLTGINFMDWYRNLRTVLRQEHKEFVLTEPFPANLPNNAPAAQRREHEKRCNDYLDTSYLMLATMSPELQRKYDALDAHTIITRLRNMFEDQARAERFNTSKSLVACRLAEGNPMSPHVIKMIGYAESLDKLGFPLSRELVTDLILQSLPPSFEPFIMNFNMNNLNRTLAELHGMLKTAEESIKKNSNHVIVVHKRKPNNKKSCQKRKLNSDEITSTSNSKTKVQKTGPAKDAECFFCKETGHWKRNCKKYLEQFKQKQQDGKSSTSVYNINAKRQRPNDLNPTFIWHCRLGHINEKRMEKLHRDGLLHSFDFKSFETCESCLLGKMTKAPFTGQSERASELLGLVHTDVCGPMSSTAKGGFGYFITFTADFSRYGYVYLMRHKSEYFEKFKEFQNEVQNHLGKTIKYLRFDRGGKYLSLEFGNHLKECAIVPQLTPPGTPQWNGVSERRNRTLLDMVRSMMSQTDLPLSFWGYALETVAFTLNRVPSKSVDKTPYEIWTGKRPSLSFLKIWGCVVYVKRLQSDKLTPKSDKCFFVGYPKETKGYYFYNREEGKVFVARHGVFLEKEFISRQDSGSMVQLEEIQETPENASTSTQPQAEQDVVQQVEQVVVEPVVEAPASRRSDRIRRTPASLELLVDPPNGVKAIECKWVFKKKTDVDGNFNIYKARLVAKGFRQIQGVDYDETFSPVAMLKSIRIVLAIAAYFDYEIWQMDIKIAIHNGNLDEDVYMTQPKGFVDPQSAKKICKLQKSIYGLKQASRSWNIRLDKVVKALGFVKNEEEACVYKKISGSALVFLILYVDDILLIGNDILMLESVKTSLKNSFSMKDLGEATYILGIRIYRDRSKRLIGLSQSTYIERFIMYAMLCTRPDVSYSLSATSRYQSDPCESHWIAVKNILKYLRRTKDMFLVNGGQEELVVNGYTDASFQTDKDDFRSQSGFVFCLNGGAVSWKSSKQDTVSNYTTEAEYIASSEAAKEAVWIKKFISRLGVVTSASSPMDLYCDNSGAIAQAKEPRSHQKSKHILRRYHLIREIVGRGDVKICKIHTDLNVADPLTKPLPQPKHEAHTRAMGI

SEQ ID NO: 19422 - protein, 2048 aa, Oryza sativa
  Clone ID: TF_OSC900190j.C1.p9.fg
MPRYKPEYLFGTEGFVQELRTMSFLIGFGIALLYALIPHDRDEEKCRVKVTLNNNREDIPSVMFEAGGGSYIHACQEVARIAIGELRESYNDRLADTEYRYHPRQPQGSDRGSYLEPAGIENDATRRHLVEMLWAMDETRTKIVIAAHDREDWNRGKICKLEDKMVLTRSNGKGPNSNNNNNNNAENPTLAQVLAQQAQLMNLMMQQLQNQQNQGNNHAPPQNMLAEFLRVRPPVFSSTTNPVEAGDWLHTIEKKLDLLQCTDQEKVSFASHQLHGPASEWWDHFRLNRTTPEPISWLEFTTAFRKTHIPSGLVSLKNKEFRSLTQGSRTVTEYLHEFNRLEKFLEELNDELSYPLMTGDYHDFQKLVDKAIRQEDKYNRMEQNFAGNHGMEVEELRRPLMVSTPSNQALSSQRSPSIRIEIQGVPFLANLILLESKDLDVILGMDWLARYKGLIDCANRKVTLTSNEGQVVTVHALPSEPLRSSLNQMTLEEIPIVQEYPDVFPDDLPGATVFSKIDLRSGYHQLRIKEEDIPKTAFTTRYGLFECTVMSFRLTNAPAFFMNLMNKVFMEYLDKFVVVFIDDILIYSQTKEEHEKHLRLALEKLREHQLYAKFSKCEFWLSEVKFLGHVISAGGVAIDPSNVESVTNWKQPKIVSEIRSFLGLAGYYRRFIENFSKIAKPMTRLLQKHVKYKWSEECEQSFQELKNRLISALILILPDPKKGFQVYCDASKLGLGCVLMQDGKVVAYASRQLRPHEKNYPTHDLELAAVVHALKIWRHYLFGTRTEVYTDHKSLKYIFTQPDLNMRQRRWLEWIKDYDLGIHCHPGKANVVADALSRKGFCNAMEGRQLPLELCKEFERLNLGIVSKGFVAALEAKPTLIDQVREAQINDPDILEIKKNMRRGKAIGFLEDEQGTVWLGERICVLDNKDLKDAILKEAHDTLYSIHPGSIKMYQDLKERFWWASMKREIAEYVAVCDVCQRVKAEHQKPAGLLQPLKILEWKWEEIGMDFITRLPRTSSGHDSIWVIVDRLTKAAHFIPVRATYSGSRLAELYMARIVCLHGVPKKIVSDRGSQFTSKFWKKLQEEMGSTLNFSTAYHSQTDGQTERVNQILEDMLRACVLDFGGSWDKNLPYAEFSYNNSYQASLQMAPYEALIDVGHLYAEIIGLLDKIMAASAPSNFNLRSILEKEKLTGTSFMDWYRNLRIVLRQEHKEFVLTQPFLADLPNNSPAAQRMEHERRCKEYLDISCLMLATMSPELERQYEALDAHTIITGLRNMFEDQARAERFNTSKSMFACRLAEGNPVSPHVIKIIGYTESLDKLGFPLSQELATDLILQSLPPSFEPFIMNFNMNNLNRTLAELHGMLKTAEESIKKNSNHVMVMHKRKPNNKKSGQKRKLNSDEIMSTSNSKTKVQKTGPAKDAECFFCKETGHWKRNCKKYLEQLKQKQKDGKSSTSGINVIEINIATSSTDYWVFDTRGGFGYFITFTDDSSRYGYVYLMRHKSESFENFKEFQNEVQNHLGKTIKYLRSDRGGECLSLEFGNHLKEYGIVPQLTPPGTPQWNGVSERRNRTLLDMLWKHRLHEGPIGYGVHLRDNDEPTTYEEEMVGPDSEKWLGAMKSETESMHVNQIWNSVDPPDGVKAIECKWVFKKKIDVDGNVHIYKARLVAKGFRQIQAIAAYFDYEIWQMEVKTAFLNGNLNEDVYMTQPKGFVDPQSAKKICKLQKSIYGLKQASRSWNIRFDEVVQALGFFKNEEEPCVYKKISGSALVFLILYVDDILLIGNDIPILESVKTSLKNSFSMKDLGEAAYILGIRIYRDRSKRLIGLSQSTYIDKVLKMLNMQDSKKGFLPMPHGINLGKNQCPQTTDERNKMSVIPYASAIGSIIDSSTRVSTHIPRYKPEYLFGTEGFVQELRTMSFLIGFGIAPLYAQIPHDRDEEKCRVKVTLNSNPEDIPSGMFEAGGGSYIHACQEVARITIGELRESYNDRLADTEYRYHPRQPQGSDRGSYLEPAGIENDATTRHLVEMLWAMNETVATGKIAFSRTLVY

SEQ ID NO: 19423 - protein, 1320 aa, Oryza sativa
  unsure (1)..(1320): unsure at all Xaa locations
  Clone ID: TF_OSC900201j.C1.p17.np
IMAAPAPSSFNLRSILEKEKLTGTNFMDWYRNLRIRQEHKEFVLTQPFPTDLPNNAPAAQHREHEKRCNDYLDISCLMLATMTPELQRQYEALDAHTIITGLRNMFEEHARAERFNTSKSLFACRLTEGNPVSPYVIKMIGYTESLDKLGFPLSRELATDLILQLLPPSFEPFIMNFNMNNLNRTLAELHGMLKTAEESIKKNSNHVMVIHNKPNNKKSGQKIKLNSDEITSTSNSKTKVQKTGPTKDAECFFCKETGHWKRNCKKYLEQLKQKQQDGKSSISGINVIEINLATFSTDSXVFDTWSVAHICKSLQGLKRSRNLARGEVDIRVGNGARVAAVAVGSMLLSLPSGLVLELNNCYCIPALCKNVISASCLQAEGYGFRSVDNGCLVYYNDIFYSHAPIMNGLYIVNLDGCSVYNINAKRQRPNDLNPTFIWHCRLGHINEKHIEKLHRDGLLHWFDFESFTCESCLLSKMTKAPFTGQSERASELLGLVHTDVCGPMSSTARGGFGYFITFTDDFSRYGYVYLMRHKSESFEKFKEFQNEVQNHLGKTIKYIXSDRGGEYLSLEFGNHVKECGIVPQLTPPGTPQWNGVSERRNRTLLDMVRSMMSQTDLPLSFWGYALETAAFTLNRVPSKSVDKTPYEIWTDKRPSLSFLKIWGCEVYVKRLQSNKLTPKSDKCFFVGYPKETEGYYFYNWEEGKVFVAXHGVFLEKEFISRKVSGSMVXLEEIQETPENASTSTQPQQAEQDVVQQVEQVVVEPVVEAPASRRSERIRRTPTRYAATGQRDILLLDNDEPTTYEEAMVGPDSEKWLGAMKSEIESMHVNQVWNLVDQPDGVKAIECKWVFKKKTDVDGNVHIYKARLVAKCFRQIQGVDYDETFSPVAMLKSIRIVLAIAAYFFEIWQMDVKTAFLNGNLDEDVYMTQPKRFVDPQSAKRICKLQKSIYGLKQASRSWNIRFDEVVKVLGFVKNEEEPCVYKKISSALVFIILYVDDILXIGNDIPMHESVKTSLKNSFSMNDLGEAAYILGIRIYRDRSKRLIGLSQSTYIDKVLKRFNMQYSKKGFLPMLHGINLGKNQCPQTTDEGNKMSAIPYASAIGSIIYAMLCTRPDVSYALSATNXYQSDPGESHWIALKNILKYLRRTKDIFLVYGGQEELVVNGYTYATFQTDKDDFRSQSGFVFCLNGGAVSWKSSKQDTVADSTTEAEYIATSEAAKEAVWIMKFVSQLGVMTSVSSPMDLYCDNSGAIAQAKEPRSHQKSKYILRRYHLIREIVGRGDVKICKIHTDLNVADPLTKPLPQPKHEAHTRAMGIRYVHD

SEQ ID NO: 19424 - protein, 1322 aa, Oryza sativa
  unsure (1)..(1322): unsure at all Xaa locations
  Clone ID: TF_OSC900297j.C1.p10.np
IMAAPAPSNFNLWSILEKEKLTRTNFMDWYRNLRIVLRXEHKKFVLTQPFPADFPNNAPAAQRREHERRCNEYLDISCLMLATMSPELQRQYEALDAHTIITGLRNMFEDQARAERFNTSKSLFACRLAEGNPVSPHVIKIIGYTESLDKLGFPLSQELATDLILQSLPPSFEPFIMNFNMNNLNRTLAELHGMLKTAEESIKKNSNHVMVMKRKPNNRKSGQKRKLNSDEITSTSNSKKGSKDSAAKDAECFFCKETGHWKRNCKKYLEQLKQKQQDGKSSTSGINVIEINLATSSTDSWVFDTGSVAHICKSLXGLKRSRSLARGEVDIRVGNGARVAAVAVDTMPLSLPLGLVLELNNCYCIPALCKNVISASCLQAEGYGFRSMDNGCSVYYNDIFYFHAPMMNGLYIVNLDGCSVYNINAKWQRPNDLNPTFIWHCRLGHINEKRMEKLHRDGLLHSFDFESFETCESCXLGKITKAPFTGQSERASELLGPVHTDVCGPMSSTARGGFGYFITFTDDFSRYGYVYLMRHKSESFEKFKEFQNEIQNHLGKTIKYLRSDRGGEYLSLEFGNHLKECGIVPQLTPPGTPQWNGVSERRNRTLLDMVRLMMSQTDLPLSFWGYALETAAFTLNRVPSKSVDKTTYEIWTGKRPILSFLKIWGCEVYVKRLQSDKLTPKSDKCFFVGYPKETKGYYFYHREEGKVFVARHSVFLEKKFISRKDSVSMVXLEEIQETPENAPTSTQPQAEQDVVQQVEQAVVEPVVEAPASRRSEKIRRTPARYASTVQCDILLLDNDEPTTYEKAMVGPDSEKWLGTMKSEIESMHVNQVXKLVDPPDDVKAIECKWVFKKKTDVDGNVHIYKARLVTKSFKQIQGVDYDETFSPVAMLKSIWIVLAIAGYFDYEIWQMDVKTAFLNGNLYEDVYMTQPKGFVDPQSAKKICKLHKSIYGLKQASRSWNIRFDEVVKALGFVKNEEEPCVYKKVSGSALVFLILYVDDILLIGNDIPMLESVKTSLKNSFSMKDLGEVVYILGIRIYRDKSKRLIGLSQSTYIDKVLKRFNMQDSKKGFLPMSHGINLGKNQCPQTTDEXNKMSVIPYASAIGSIMYAMLCTRPNVSYALSATSRYQSDPGESHXITVKNILKYLRRTKDMFLVYGGXEELVVNGYTDASFQTDKDDFRSQSGFVFCLNRGAVSWKSSKQDTVADSTTEAEYIAASEAAKEVVWIKKFVSQLGVMTSASSPMDLYCDNSGAIAQAKPRSHQKSKHILRRYHLIREIVGRGDVKIHKIHTDLNVADPLTKPLPQPKHEAQTRAMGVIYIHD

SEQ ID NO: 19425 - protein, 748 aa, Oryza sativa
  Clone ID: TF_OSC23004j.C1.p7.fg
MSAPTPRVSRSPRHQSRSPPLRRGRRRPGDAWHLGPVRRVVKEVGGSANYSILTKTNYSDWSLLMRAMLQVRGLWEAVDTGDVNFQEDRMALEAVLKVVPADLLPVLSVKETAKDAWDAIKTMRVGVDRVRKSKAQELRKQFNAIEFKEGESVEEFSVRLSGLVNNLAVLGIQLEESKKLTGRLRNAEERRPKKKSGDEGDKLYITEEQWAARAKERQSGEGSSRKKAGNNRRHRDGRKKTEGTADGERGARYTRDQGRDKCKNCGRLGHWAKDCCQPKKQVAAHVAQGEEEDDELALLMAHAVELAPPPPSLPPSTEPLNLVEPKVFTHLHCDVDAGVWHLDTGATNHMTGVHDIFSELDTVVRGKVCFGDGSVVAIEGQGKIIFECRNSEHRALIGVYYIPKLNANLVSLRQLDENGCDICIFHGVCTIRDAARQLLARVRCTRIRLYLIKITVARPVCLSARTQEAAWLWHARFGHLHFDALRRLTQQDMVRGLPQIDQVEQLCDCCVISKQRRSPFPGQSLFREEDRLELIHGDLCGPISPATPGGKKHFLLLVDDASCYMWLTLLQNKGEAAAAIKHFQARSEAESGCHLKLLHPDNGGEFTSAEFASYCTESGVKRQLTPPYSPQQNGVVERRNQTILAMAQCLLRAKSVPACYWGEAVMTVVFLLNHAPTKCLVDKTPYEAWLGRKPAVGHLRTFGCLVYSRTFSHTSPSSRNAASPWSSSATLRELKPTRCSTRSRVAFK

SEQ ID NO: 19426 - protein, 874 aa, Oryza sativa
  Clone ID: TF_OSC101575j.C1.p1.fg
MSGQTGNGKDGDKGATFPYDYPSTSASYVSTYSGKAPYFNGTDYAAWKHKMKMHLKSINPLIWRIVEKGYVLQNPVEPTKEDDKNEHKNAQAANAILSALSGSDFNRVDGIESAKVIWDTLRSLHEVTDSVSEFKVEILKGQFERFVMLDGESPSDMYDRLSKIVNEIKVLGSKDMTNEVVVKKMVRAITPRNSTLVTIIRERPDYKTLTPHDLLGRILAHDMLEQESKEVIQYINQTSTTSIKKEDLALKAKEEEEESRKSKSKSKAEIDDEEMALFVKKFDKFMKQSGFFKESSSKYSSNKSSGRHSARVCYVCKEPEHFIDDCPHIKDCPHFKEDKKKLEKNEKHKHSKHDRYGQAHLGVIFGSDFESSSSDEEGVATFAVKPSSPPRLFNYSSDEDAPICLMAKEPKVPSPLKSFNVDLVSDEEEDVEDEVMDDELFKSIAKESIPHLSELLGRIENQYANLERQEELLIREKERSHELKSELAKEREKNEALVRLYKQTKESHTNLEVANAQLQERVDGLDKAYLSLEEKFETLKNSVSLPSEASCSKIVPSNEPCVRCKDIDIEACSTNSTSLSALQKQNEKLMGLLHNGLLKCHMGSKALKEYLGYQRDNFNHEGLGYVSPPKGKVDKSVMIKNPQGLSNFVKAKCILPNDYASHCSFDTSYVLRKNANGRAVAKRDDSSVVFKGVLEGKLYLVDFFSTKAKHETCLVAKSNMRWLWHRRLTHVGMRNLHKLLKHDHILGLTNVQFEKDRVCSACQAGKQIGAHHPVKNVMITTRPLELLHMDLFGPIAYLSIGGDKYGLVIVDDFSRFTWVFFLHDKSETQAIFKKFERRAQNEFDLKIKNIRSDNGKEFKNTCIESFLDEEGIKH

SEQ ID NO: 19427 - protein, 1310 aa, Oryza sativa
  Clone ID: TF_OSC400991j.C1.p12.fg
MSGQTGNGKDGDKGATFPYDYPSTSASYVSTYSGKAPYFNGTDYAAWKHKMKMHLKSINPLIWRIVEKGYVLQNPVEPTKEDDKNEHKNAQAANAILSALSGSDFNRVDGIESAKVIWDTLRSLHEVTDSVSEFKVEILKGQFERFVMLDGESPSDMYDRLSKIVNEIKVLGSKDMTNEVVVKKMVRAITPRNSTLVTIIRERPDYKTLTPHDLLGRILAHDMLEQESKEVIQYINQTSTTSIKKEDLALKAKEEEEESRKSKSKSKAEIDDEEMALFVKKFDKFMKQSGFFKESSSKYSSNKSSGRHSARVCYVCKEPEHFIDDCPHIKDCPHFKEDKKKLEKNEKHKHSKHDRYGQAHLGVIFGSDFESSSSDEEGVATFAVKPSSPPRLFNYSSDEDAPICLMAKEPKVPSPLKSFNVDLVSDEEEDVEDEVMDDELFKSIAKESIPHLSELLGRIENQYANLERQEELLIREKERSHELKSELAKEREKNEALVRLYKQTKESHTNLEVANAQLQERVDGLDKAYLSLEEKFETLKNSVSLPSEASCSKIVPSNEPCVRCKDIDIEACSTNSTSLSALQKQNEKLMGLLHNGLLKCHMGSKALKEYLGYQRDNFNHEGLGYVSPPKGKVDKSVMIKNPQGLSNFVKAKCILPNDYASHCSFDTSYVLRKNANGRAVAKRDDSSVVFKGVLEGKLYLVDFFSTKAKHETCLVAKSNMRWLWHRRLTHVGMRNLHKLLKHDHILGLTNVQFEKDRVCSACQAGKQIGAHHPVKNVMITTRPLELLHMDLFGPIAYLSIGGDKYGLVIVDDFSRFTWVFFLHDKSETQAIFKKFERRAQNEFDLKIKNIRSDNGKEFKNTKCYILNKKARSSKFAPKVDEGFLLGYRSNECAYRVFNKTSGIVEIARDVTFDEINGSQVEQVDSHVLGEGEDPNETIKRVEEALNDPDWGMAMQEELNNFTRNEVWTLVERPRQNVIGTKWIFRNKQDEARVVIRNKAKLVAQGFTQIDGLDFGETFAPVARLESIRILLAFATNLNFKLFQIDVKSVFLNGPINELVYVEQPLGFEDPKYPINVYKLHKALYGLKQAPRAWYECLHNFLVKNGFEIGKADSTLFTKRYDNDIFVCQIYVDDIIFGSTNKSFNEEFSRMMTKRFEMSMMGELKFFLGLQIKQLKEGTFICQTKYLKDMLKKFGMENAKPIHTPMPSNGHLDLNEQGKDVDQKVYRSIIGSLLYLCASRPDIMLSVCMCARFQAALKECHLVAMKRILRYVHTPNLGLWYPKGASFDLIGYADADYAGCKVDRKSTLGTC

SEQ ID NO: 19428 - protein, 1242 aa, Oryza sativa
  Clone ID: TF_OSC900312j.C1.p14.fg
MSGQTGNGKDGDKGATFPYDYPSTSASYVSTYSGKAPYFNGTDYAAWKHKMKMHLKSINPLIWRIVEKGYVLQNPVEPTKEDDKNEHKNAQAANAILSALSGSDFNRVDGIESAKVIWDTLRSLHEVTDSVSEFKVEILKGQFERFVMLDGESPSDMYDRLSKIVNEIKVLGSKDMTNEVVVKKMVRAITPRNSTLVTIIRERPDYKTLTPHDLLGRILAHDMLEQESKEVIQYINQTSTTSIKKEDLALKAKEEEEESRKSKSKSKAEIDDEEMALFVKKFDKFMKQSGFFKESSSKYSSNKSSGRHSARVCYVCKEPEHFIDDCPHIKDCPHFKEDKKKLEKNEKHKHSKHDRYGQAHLGVIFGSDFESSSSDEEGVATFAVKPSSPPRLFNYSSDEDAPICLMAKEPKVPSPLKSFNVDLVSDEEEDVEDEVMDDELFKSIAKESIPHLSELLGRIENQYANLERQEELLIREKERSHELKSELAKEREKNEALVRLYKQTKESHTNLEVANAQLQERVDGLDKAYLSLEEKFETLKNSVSLPSEASCSKIVPSNEPCVRCKDIDIEACSTNSTSLSALQKQNEKLMGLLHNGLLKCHMGSKALKEYLGYQRDNFNHEGLGYVSPPKGKVDKSVMIKNPQGLSNFVKAKCILPNDYASHCSFDTSYVLRKNANGRAVAKRDDSSVVFKGVLEGKLYLVDFFSTKAKHETCLVAKSNMRWLWHRRLTHVGMRNLHKLLKHDHILGLTNVQFEKDRSETQAIFKKFERRAQNEFDLKIKNIRSDNGKEFKNTKCYILNKKARSSKFAPKVDEGFLLGYRSNECAYRVFNKTSGIVEIARDVTFDEINGSQVEQVDSHVLGEGEDPNETIKRVEEALNDPDWGMAMQEELNNFTRNEVWTLVERPRQNVIGTKWIFRNKQDEARVVIRNKAKLVAQGFTQIDGLDFGETFAPVARLESIRILLAFATNLNFKLFQIDVKSVFLNGPINELVYVEQPLGFEDPKYPINVYKLHKALYGLKQAPRAWYECLHNFLVKNGFEIGKADSTLFTKRYDNDIFVCQIYVDDIIFGSTNKSFNEEFSRMMTKRFEMSMMGELKFFLGLQIKQLKEGTFICQTKYLKDMLKKFGMENAKPIHTPMPSNGHLDLNEQGKDVDQKVYRSIIGSLLYLCASRPDIMLSVCMCARFQAALKECHLVAMKRILRYVHTPNLGLWYPKGASFDLIGYADADYAGCKVDRKSTLGTC

SEQ ID NO: 19429 - protein, 1303 aa, Oryza sativa
  unsure (1)..(1303): unsure at all Xaa locations
  Clone ID: TF_OSC18902j.C1.p2.np
GVDRKATRARAXPVLLLSASPVLIACTHERSERAGHSEPHHCLRSAPGRRVIKFLGSARTTALVFCSSTFVIDRTSNGASRAGAQNNNTNGGSYASQSSVIDRTSNGASRAGAQNNNTNGGSYASQSSGGTFTGSFSVVGFAAALKPHAFDGSNYKRWKARTLLWLTAMQCFYVSRGKRSEPPVSPEEEVKFEASDCLFRGALISVLADNIVDVYMHMPSGKDMWDALEAKFGVSDAGSELYVMEQFYDYKMVDDRSVVEQAHEIQMLAKELENNNCELPDKFVVGGIIAKLPPWSDFATFLKHKRQEFSVSDLIGFLGVEEKARAKDNRGKKVEGGSSAIMVQKNPHASHNNKKVMPDVKPKATTNFKKKGKGKAKGDCFVCGKSRHWAKYCPERKDIKSANMVISEGGGTSGYGKLLPIVLSVFHSPDWXVDTGANIHVCADIFLFSSYQVGRGSSLHGVGTVDLKFTSGKTVQLKNVQHVPSIKKNLVSGSLLCREGFRLVFESNKCVVSKYGTFIGKSYDSGGLFRFSLDDMCNNNNVVNHISENDESNVWHSRLCHVNFGCMTRLADMSLISKFTLVKGFKCHTCVXSKQHHKPHKASEARDLAPLELVHSDLCEMNGVWTKGGKKYFITLIDDCTRFCYVYLLKTNDEALHYFKTYKVEVENQLERKIKRLRSDRGGEYFFNEFTSFCEEFGIIHESTPPYSPQSNGVAERKNRTLTKMVNAMLDTAGLSKEWWGEAVLTARHVLNKIPMKHKEVTPFEEWERKKLNLSYLRTWSCLAKVNVPIAKNNLGPNTVDCVFLGYAIHSMGYRFLIVNSRVPDMRVGTIIESRDATFFENEFPMKNTPSTSSQKTVIPHEHFAPIEHNDQTLEGNPEEDNIVDTRKSKRQRVAKSFGDDYIVYLVDDTPRTIEEAYSSPDADYWKEAVRSKMDSIMSNGTWEVVERSYGCNPVGCKWVFKKKFRLDGTIEKYKARLVAKSYTQKEGDDFFDTYSPVARLTTIRVLLALAASHGLLVHQMDVKTAVLNGELEEEIYMDQPDGYVLEGXEGMVCKLLIFLYGLKQAPKQXHEKFDTTLTSAGFVVNEGDKCVYYRYGGGEGVILCLYVDDILIFGTSLNVIEEVDFLSKTFEMKDLGETNVILNIKLLRGDEGGITLVQSHNVDKVLSRFGYSDCKPAITPYDPSVLLRKNRRIARDXLRYSQIIGLLMYLACATRPDISFAVSKLSRFVSNPGDDHWQALERVMRYLKGTISYGINYNGYPKVLEWYSGSNWISDDDEIKATSGYVFTLGGGAISWKSCKQT

SEQ ID NO: 19430 - protein, 439 aa, Oryza sativa
  Clone ID: TF_OSC18902j.C1.p8.gm
MAHRELVHRTTTPTEAVMPHNPAEGLSQAMQCFYVSRGKRSEPPVSPEEEVKFEASDCLFRGALISVLADNIVDVYMHMPSGKDMWDALEAKFGVSDAGSELYVMEQFYDYKMVDDRSVVEQAHEIQMLAKELENNNCELPDKFVVGGIIAKLPPWSDFATFLKHKRQEFSVSDLIGFLGVEEKARAKDNRGKKVEGGSSAIMVQKNPHASHNNKKVMPDVKPKATTNFKKKGKGKAKGDCFVCGKSRHWAKYCPERKDIKSANMVISEGGGTSGYGRERFLLVHGVGTVDLKFTSGKTVQLKNVQHVPSIKKNLVSGSLLMGYRFLIVNSRVPDMRVGTIIESRDATFFENEFPMKNTPSTSSQKTVIPHEHFAPIEHNDQTLEGNPEEDNIVDTRKSKRQRVAKSFGDDYIVYLVDDTPRTIEEAYSSPDADYWKEA

SEQ ID NO: 19431 - protein, 478 aa, Oryza sativa
  Clone ID: TF_OSC900359j.C1.p9.gm
MAHRELVHRTTTPTEAVMPHNPAEGLSQAMQCFYVSRGKRSEPPVSPEEEVKFEASDCLFRGALISVLADNIVDVYMHMPSGKDMWDALEAKFGVSDAGSELYVMEQFYDYKMVDDRSVVEQAHEIQMLAKELENNNCELPDKFVVGGIIAKLPPWSDFATFLKHKRQEFSVSDLIGFLGVEEKARAKDNRGKKVEGGSSAIMVQKNPHASHNNKKVMPDVKPKATTNFKKKGKGKAKGDCFVCGKSRHWAKYCPERKDIKSANMVISEGGGTSGYGRERFLLVHGVGTVDLKFTSGKTVQLKNVQHVPSIKKNLVSGSLLMGYRFLIVNSRVPDMRVGTIIESRDATFFENEFPMKNTPSTSSQKTVIPHEHFAPIEHNDQTLEGNPEEDNIVDTRKSKRQRVAKSFGDDYIVYLVDDTPRTIEEAYSSPDADYWKEAVRTSHGLLVHQMDVKTAVLNGELEEEIYMDQPDGYVLEG

SEQ ID NO: 19432 - protein, 1461 aa, Oryza sativa
  Clone ID: TF_OSC418782j.C1.p3.fg
MDISRANEGYTSCGPVVEMSWHRAGVLLLGAQSCLPVPEVPAVGGVGSVLLSMARMGWKLCHVFRPYTVVMAGSINRRGLDLTGFVLELRGMCVVLGYPHGVDYQGKQLLEQEGDDVEPHAAWEVTVVVLTGSPERTSLAVTAGGDSFSAACQNAALLAIGTLHQRYPDELQHSPYRYHPRRGGARDYATFRDASSEDDATIMHLARMVQAYNATRINFHHMVRRGLVENNMKILELRQENLQLKKDLDAVEAQLCQLKIAQGEMVTTRRSAAFLHHIQNPPQHNAPPLPPPPQHSKLAEFLRIRPPIFSSSNNPVDALDWLHAVGKKLDTVQCNDEEKVIFAAHQLQGPASLWWDHFQATQPEGQPITWARFTAAFRRTHVPAGVMALKKREFRELKQGNRSVMEYLHEFNNLARVRYTIPYPGGSSSQQQQQQQPRSAPRPQFVVRVPQPQQQQSQQGTRAPRPPAPVVQPGQGRRDAQGQQRLCFNCFESGHFADKCPKPRRQQGQAPPRPNNGGKDVIRGRVNHVTAEDVLTTPDVIVGVVDCARRTVTLYRGLEQPVVFFAPPTSVGSSELHQIGLSEIPIVREFGDVFPEELPGMSPKREIEFRIDLAPGTTPLYKRPYRMAANELAEVERQLEELKEKGYIWPSTSPWGAPVIFVEKKDKTKRMCVDYRALNEVTIKNRYPLPRIDDLFDQLKGATVFSKIDLRSGYHQLRIREEDIPKTAFTTRYGLYEFTVMSFGLTNDPAFFMNLMNKVFMEYLDKFVVVFIDDILVYSQSEEDHQQHLRLVLGKLREHQLYAKLSKCEFWLSEVKFLGHVISAKGVAVDPDTVTAVTDWKQPKTVTQVRSFLGLAGPQCEKAFQTLKEKLVSSPVLILPDTRKDFLVYCDASRQGLGCVLMQEGHVVAYASRQLRPHEGNYPTHDLELAAVVHALKIWRHYLIGNRCEIYTDHKSLKYIFTQSDLNLRQRRWLELINDYDVGIHYHPGKANVVADALSRKSRCNTLGVRDIPPELNQQMEALNLSIVGHGFLATLEAKPTLLDQIREAQKNDLDMHGILKNMKQGKAAGFTEDEHGTLWNGNRVCVPDDRELKKLILQEAHESPYSIHPGSTKTYLDLKEKYWWVSMKREIAEFVALCDVCQRVKAEHQRPAGLLQPLQVPEWKWDEIGMDFITGLPKTQGGYDSIWVVVDRLTKVARFIPVKTTYGGNKLAELYFARIVSLHGVPKKIVSDRGSQFTSHFWKKLQEELGTRLNFSTAYHPQTDGQTERLNQILEDMLCACVLDFGKTWDKSLPYAEFSYNNSYQASIQMAPYEALYGRKCRTPLLWDQVGESQVFGTDILREAEAKVKTIRDNLKVAQSRQKSYADNRRRNLEFAVDDFVYLRVTPLRGVHRFQTKGKLAPRFVGPFCIIARRGEVAYQLELPASLGNVHDVSMCRNSRNVFECHPSRPIQSKLKFAKT

SEQ ID NO: 19433 - protein, 698 aa, Oryza sativa
  Clone ID: TF_OSC10766j.C1.p1.fg
MAPAQSGPPAVSAQSEQPKKGAVGKPGPCFNCGKHGHFAGKCPKLNRTGPRFIQARANHVSAEEAQAAPEVVLGTFPVNSYPATVLFDSGASHSFISKRFAGTHGLSVVELKIPMQVHTPGNDMRTAHYCPSVTIEIKRSPFLSNLILLESKDLDVILGMDWLTRNKGVIDCASRTITLTNDKGEKITFRSPASQKSVASLNQAAIEGQTETVEKSSRKLEDIPIVQEYPEVFPEDLTTMPPKREIEFRIDLAPGTAPIYKRPYRMAANELAEVKKQVDEQLQKGYIRPSTSPWGAPVIFVEKKDKTKRMCVDYRALNEVTIKNKYPLPRIDDLFDQLKGAKVFSKIDLRSGYHQLRIREEDIPKTAFTTRYGLFECTVMSFGLTNAPAFFMNLMNKVFMEFLDKFVVVFIDDILIYSKSEEEHEQHLRLVLEKLKEHQLYAKFSKCDFWLSEVKFLGHVISAQGVVVDPSNVESVTKWTPPKTVSQIRSFLGLAGYYRRFIENFSKIARPMTQLLKKDEKFKWSAECNQSFEELKKKLVSAPVLILPDQTKDFQVYCDASRQGLGCVLMQEGRVVAYASRQLRPHEANYPTHDLELAAVVHALKIWRHYLIGNRCEVYTDHKSLKYIFTQPDLNLRQRRWLELIKDYDMGIHYHPGKANVVADALSRKSYCNAVCTEGMCDKLQQDLEHLNLGIVEH

SEQ ID NO: 19434 - protein, 1457 aa, Oryza sativa
  Clone ID: TF_OSC12547j.C1.p1.fg
MMKTRNDPRDSNDASGSEEQTDGAHVSGASGSRSSPPPENPTVTQMMTMMMQQMQQHYHQMLQQAQQNQQFGPPPSHVSKLLDFLRIQPPTFSSTTNPMEANDWLRAIEKKLNLLQCNDREKVAFATHQLQGPASAWWDNYVATRLDATEVTWAEFCQSFRKAQIPEGIMAQQKREFRALQQGTRTVTEYLHEFNRLARYAPEDVRTDAEKQEKFLFGLDDELTNQLISGVYEDFEKLVDKAIRQEEQRNKMDRKRKAAQISFPQGNNQKPRFMTGQLGGPSTLIVCQHRPYHPSNFNNDYNGGSHNNSKQHNHNSTPPPLMAPAQSDPPAVSVQSEQPKKGAVGKPGPCFNCGKHGHFAGKCPKLNRTRPRFIQARANHVSAEEAQAAPEVVLGTFPVNSYPATVLFDSGASHSFISKRFAGMHGLSVVELKIPMQVHTPGNDMRTAHYCPSVTIEIKRSPFLSNLILLESKDLDVILGMDWLTRNKGVIDCASRTITLTNDKGEKITFRSPVSQKSVASLNQAAIEGQTETVEKSPRKLEDIPIVQEYPEVFPEDLTTMPPKREIEFRIDLAPGTAPIYKRPYRMAANELAEVKKQVDEQLQKGYIRPSTSPWGAPVIFVEKKDKTKRMCVDYRALNEVTIKNKYPLPRIDDLFDQLKGAKVFSKIDLRSGYHQLRIREEDIPKTAFTTRYGLFECTVMSFGLTNAPAFFMNLMNKVFMEFLDKFVVVFIDDILIYSKSEKQHEQHLRLVLEKLKEHQLYAKFSKCDFWLSEVKFLGHVISAQGVAVDPSNVESVTKWTPPKTVSQIRSFLGLAGYYRRFIENFSKIARPMTQLLKKDEKFKWSAECNQSFEELKKKLVSAPVLILPDQTKDFQVYCDASRQGLGCVLMQEGRVVAYASRQLRPHETNYPTHDLELAAVVHALKIWRHYLIGNRCEVYTDHKSLKYIFTQPDLNLRQRRWLELIKDYDMGIHYHPGKANVVADALSRKSYCNAVCTEGMCDKLQQDLEHLNLGIVEHGFVAALEARPTLVDQVRAAQVNDPEIAELKKNMRVGKARDFHEDEHGTIWLGERLCVPDDKELKDLILTEAHQTQYSIHPGSTKMYQDLKEKFWWVSMRREIAEFVALCDVCQRVKAEHQRPAGLLQPLQIPEWKWEEIGMDFITGLPRTSSGHDSIWVVVDRLTKVAHFIPVHTTYTGKRLAELYLARIMCLHGVPKKIVSDRGSQFTSKFWQKLQEELGTRLNFSTAYHPQTDGQTERVNQILEDMLRACALDFGGAWDKSLPYAEFSYNNSYQASLQMAPFEALYGRKCRTPLFWDQTGERQLFGTEVLTEAEEKVRTIRERLRIAQSRQKSYADNRRRELTFEAGDYVYLRVTPLRGVHRFQTKGKLAPRFVGPYKILERRGEVAYQLELPSNMIGIHDVFHVSQLKKCLRVPEEQADSEHIDIQEDLTYVEKP

SEQ ID NO: 19435 - protein, 1013 aa, Oryza sativa
  Clone ID: TF_OSC12547j.C1.p1.gm
MMKTRNDPRDSNDASGSEEQTDGAHVSGASGSRSSPPPENPTVTQMMTMMMQQMQQHYHQMLQQAQQNQQFGPPPSHVSKLLDFLRIQPPTFSSTTNPMEANDWLRAIEKKLNLLQCNDREKVAFATHQLQGPASAWWDNYVATRLDATEVTWAEFCQSFRKAQIPEGIMAQQKREFRALQQGTRTVTEYLHEFNRLARYAPEDVRTDAEKQEKFLFGLDDELTNQLISGVYEDFEKLVDKAIRQEEQRNKMDRKRKAAQISFPQGNNQKPRFMTGQLGGPSTLIVCQHRPYHPSNFNNDYNGGSHNNKQPKKGAVGKPGPCFNCGKHGHFAGKCPKLNRTRPRFIQARANHVSAEEAQAAPEVVLGTFPVNSYPATVLFDSGASHSFISKRFAGMHGLSVVELKIPMQVHTPGNDMRTAHYCPSVTIEIKRSPFLSNLILLESKDLDVILGMDWLTRNKGVIDCASRTITLTNDKGEKITFRSPVSQKSVASLNQAAIEGQTETVEKSPRKLEDIPIVQEYPEVFPEDLTTMPPKREIEFRIDLAPGTAPIYKRPYRMAANELAEVKKQVDEQLQKGYIRPSTSPWGAPVIFVEKKDKTKRMCVDYRALNEVTIKNKYPLPRIDDLFDQLKGAKVFSKIDLRSGYHQLRIREEDIPKTAFTTRYGLFECTVMSFGLTNAPAFFMNLMNKVFMEFLDKFVVVFIDDILIYSKSEKQHEQHLRLVLEKLKEHQLYAKFSKCDFWLSEVKFLGHVISAQGVAVDPSNVESVTKWTPPKTVSQIRSFLGLAGYYRRFIENFSKIARPMTQLLKKDEKFKWSAECNQSFEELKKKLVSAPVLILPDQTKDFQLRPHETNYPTHDLELAAVVHALKIWRHYLIGNRCEVYTDHKSLKYIFTQPDLNLRQRRWLELIKDYDMGIHYHPGKANVVADALSRKSYCNAVCTEGMCDKLQQDLEHLNLGIVEHGFVAALEARPTLVDQVRAAQVNDPEIAELKKNMRVGKARDFHEDEHGTI

SEQ ID NO: 19436 - protein, 1450 aa, Oryza sativa
  Clone ID: TF_OSC1521j.C1.p1.fg
MVKTRDDPRDSNDASGSEEQTDGAHVSGASGSRSSPPPENPTVTQMMTMMMQQMQQHYHQMLQQAQQNQQFGPPPSHVSKLLDFLRIQPPTFSSTTNPMEANDWLRAIEKKLILLQCNDREKVAFATHQLQGPASAWWDHYVVTRPDATEVTWAEFCQSFRKAQIPEGIMAQQKREFRALQQGTRTVTEYLHEFNRLARYAPEDVRTDAEKQEKFLFGLDDELTNQLISGVYEDFEKLVDKAIRQEEQRNKIDRKRKTAQISFPQGNNQKPRFMTGQLGGPSTLIVCQHRPYRPSNFNNDYNGGSHNNSKQHNHNSTPPPLMAPAQSDPPAVSVQLEQPKKGAVGKPGPCFNCGKHGHFAGKCPKLNRTGPRFIQARANHVSAEEAQAAPEVVLGTFPVNSYPATVLFDSGASHSFISKRFAGTHGLSVVELKIPMQVHTPGNDMRTAHYCPSVTIEIKRSPFLSNLILLESKDLDVILGMDWLTRNKGVIDCASRTITLTNDKGEKITFRSPASQKSVASLNQAAIEGQTETVEKSPRKLEDIPIVQEYPEVFPEDLTTMPPKREIEFRIDLAPGTAPIYKRPYRMAANELAEVKKQVDEQLQKGYIRPSTSPWGAPVIFVEKKDKTKRMCVDYHALNEVTIKNKYPLPRIDDLFDQLKGAKVFSKIDLRSGYHQLRIREEDIPKTAFTTRYGLFECTVMSFGLTNAPAFFMNLMNKVFMEFLDKFVVVFIDDILIYSKSEEEHEQHLRLVLEILKEHQLYAKFSKCDFWLSEVKFLGHIISAQGVAVDPSNVESVTKWTPPKTVSQIRSFLGLAGYYRRFIENFSKIARPMTQLLKKDEKFKWSAECNQSFEELKKKLVSAPVLILPDQTKDFQVYCDASRQGLGCVLMQEGRVVAYASRQLRPHEANYPTHDLELAAVVHALKIWRHYLIGNRCEVYTDHKSLKYIFTQPDLNLRQRRWLELIKDYDMGIHYHPGKANVVADALSRKSYCNAVCTEGMCDKLQQDLEHLNLGIVEHGYVAALEARPTLVDQVRAAQVNDPEIAELKKNMRVGKARDFHEDEHGTIWLGERLCVPDDKELKDLILTEAHQTQYSIHPGSTKMYQDLKEKFWWVSMRREIAEFVALCDVCQRVKAEHQRPAGLLQPLQIPEWKWEEIGMDFITGLPRTSSGHDSIWVVVDRLTKVAHFIPVHTTYTGKRLAELYLSRIMCLHGVPKKIVSDRGSQFTSKFWQKLQEELGTRLNFSTAYHPQTDGERQLFGTEVLTEAEEKVRTVRKRLRIAQSRQKSYADNRRRELTFEAGDYVYLRVTPLRGVHRFQTKGKLAPRFVGPYKILERRGEVAYQLELPSNMIGIHDVFHVSQLKKCLRVPEEQADSEHINIQEDLTYVEKPVRILDTSERRTRNKVTRFCRVQWSHHSEEEATWEREDELKAAHPHLFTSSSESRGRDSV

SEQ ID NO: 19437 - protein, 1468 aa, Oryza sativa
  Clone ID: TF_OSC16872j.C1.p1.fg
MMMQQMQQHYHQMLQQAQQNQQFGPPPSHVSKLLDFLRIQPPTFSSTTNPMEANDWLRAIEKKLNLLQCNDREKVAFATHQLQGPASAWWDNYVATRLDATEVTWAEFCQSFRKAQIPEGIMAQQKREFRALQQGTRTVTEYLHEFNRLARYAPEDVRTDAEKQEKFLFGLDDELTNQLISGVYEDFEKLVDKAIRQEEQRNKMDRKRKAAQISFPQGNNQKPRFMTGQLGGPSTLIVCQHRPYHPSNFNNDYNGGSHNNSKQHNHNSTPPPLMAPAQSDPPAVSVQSEQPKKGAVGKPGPCFNCGKHGHFAGKCPKLNRTRPRFIQARANHVSAEEAQAAPEVVLGTFPVNSYPATVLFDSGASHSFISKRFAGMHGLSVVELKIPMQVHTPGNDMRTAHYCPSVTIEIKRSPFLSNLILLESKDLDVILGMDWLTRNKGVIDCASRTITLTNDKGEKITFRSPVSQKSVASLNQAAIEGQTETVEKSPRKLEDIPIVQEYPEVFPEDLTTMPPKREIEFRIDLAPGTAPIYKRPYRMAANELAEVKKQVDEQLQKGYIRPSTSPWGAPVIFVEKKDKTKRMCVDYRALNEVTIKNKYPLPRIDDLFDQLKGAKVFSKIDLRSGYHQLRIREEDIPKTAFTTRYGLFECTVMSFGLTNAPAFFMNLMNKVFMEFLDKFVVVFIDDILIYSKSEKQHEQHLRLVLEKLKEHQLYAKFSKCDFWLSEVKFLGHVISAQGVAVDPSNVESVTKWTPPKTVSQIRSFLGLAGYYRRFIENFSKIARPMTQLLKKDEKFKWSAECNQSFEELKKKLVSAPVLILPDQTKDFQVYCDASRQGLGCVLMQEGRVVAYASRQLRPHETNYPTHDLELAAVVHALKIWRHYLIGNRCEVYTDHKSLKYIFTQPDLNLRQRRWLELIKDYDMGIHYHPGKANVVADALSRKSYCNAVCTEGMCDKLQQDLEHLNLGIVEHGFVAALEARPTLVDQVRAAQVNDPEIAELKKNMRVGKARDFHEDEHGTIWLGERLCVPDDKELKDLILTEAHQTQYSIHPGSTKMYQDLKEKFWWVSMRREIAEFVALCDVCQRVKAEHQRPAGLLQPLQIPEWKWEEIGMDFITGLPRTSSGHDSIWVVVDRLTKVAHFIPVHTTYTGKRLAELYLARIMCLHGVPKKIVSDRGSQFTSKFWQKLQEELGTRLNFSTAYHPQTDGQTERVNQILEDMLRACALDFGGAWDKSLPYAEFSYNNSYQASLQMAPFEALYGRKCRTPLFWDQTGERQLFGTEVLTEAEEKVRTIRERLRIAQSRQKSYADNRRRELTFEAGDYVYLRVTPLRGVHRFQTKGKLAPRFVGPYKILERRGEVAYQLELPSNMIGIHDVFHVSQLKKCLRVPEEQADSEHIDIQEDLTYVEKPVRILDTSERRTRNKVTRFCRVQWSHHSEEEATWEREDELKAAHPHLFTSSSESRGRDSV

SEQ ID NO: 19438 - protein, 1003 aa, Oryza sativa
  Clone ID: TF_OSC16872j.C1.p1.gm
MMKTRNDPRDSNDASGSEEQTDGAHQAQQNQQFGPPPSHVSKLLDFLRIQPPTFSSTTNPMEANDWLRAIEKKLNLLQCNDREKVAFATHQLQGPASAWWDNYVATRLDATEVTWAEFCQSFRKAQIPEGIMAQQKREFRALQQGTRTVTEYLHEFNRLARYAPEDVRTDAEKQEKFLFGLDDELTNQLISGVYEDFEKLVDKAIRQEEQRNKMDRKRKAAQISFPQGNNQKPRFMTGQLGGPSTLIVCQHRPYHPSNFNNDYNGGSHNNSKQHNHNSTPPPLMAPAQSDPPAVSVQSEQPKKGAVGKPGPCFNCGKHGHFAGKCPKLNRTRPRFIQARANHVSAEEAQAAPEVVLGTFPVNSYPATVLFDSGASHSFISKRFAGMHGLSVVELKIPMQVHTPGNDMRTAHYCPSVTIEIKRSPFLSNLILLESKDLDVILGMDWLTRNKGVIDCASRTITLTNDKGEKITFRSPVSQKSVASLNQAAIEGQTETVEKSPRKLEDIPIVQEYPEVFPEDLTTMPPKREIEFRIDLAPGTAPIYKRPYRMAANELAEVKKQVDEQLQKGYIRPSTSPWGAPVIFVEKKDKTKRMCVDYRALNEVTIKNKYPLPRIDDLFDQLKGAKVFSKIDLRSGYHQLRIREEDIPKTAFTTRYGLFECTVMSFGLTNAPAFFMNLMNKVFMEFLDKFVVVFIDDILIYSKSEKQHEQHLRLVLEKLKEHQLYAKFSKCDFWLSEVKFLGHVISAQGVAVDPSNVESVTKWTPPKTVSQIRSFLGLAGYYRRFIENFSKIARPMTQLLKKDEKFKWSAECNQSFEELKKKLVSAPVLILPDQTKDFQLRPHETNYPTHDLELAAVVHALKIWRHYLIGNRCEVYTDHKSLKYIFTQPDLNLRQRRWLELIKDYDMGIHYHPGKANVVADALSRKSYCNAVCTEGMCDKLQQDLEHLNLGIVEHGFVAALEARPTLVDQVRAAQVNDPEIAELKKNMRVGKARDFHEDEHGTI

SEQ ID NO: 19439 - protein, 365 aa, Oryza sativa
  Clone ID: TF_OSC25996j.C1.p4.gm
MVKTRNDPRDSNDASGSEEQTDGAHVSGASGSRSSPPPENPTVTQMMTMMMQQMQQHYHQMLQQAQQNQQFGPPPSHVSKLLDFLCIQPPTFSNTTNPMEANDWLRAIEKKLNLLQCNDQEKVAFATHQLQGPASAWWDNYVATRLDATEVTWAEFCQSFRKAQIPEGIMAQQKREFRALQQGTMSVTEYLHEFNRLARYAPEDVRTDAEKQEKFLFGLDDELTNQLISGVYEDFEKLVDKAIRQEEQRNKMDRKRKAAQISFPQGNNQKPRFMTGQLGGPSTLIVCQHRPYHPSNFDNDYNGGRHNNKQPKKGAVGKPGPCFNCGKHGHFAGKCPKLNRTGPRFIQARANHVSAEEAQAAPEVV

SEQ ID NO: 19440 - protein, 1448 aa, Oryza sativa
  Clone ID: TF_OSC27228j.C1.p1.fg
MVKTRNDPRDSNDASGSEEQTDEAHTSGAPGSSSSPPPENPTVTQMMTMMMQQMQQHYHQMLQQAHQNQQFGPPPSHVSKLLDFLRIQPPTFSSTTNPMEANDWLRAIEKKLNLLQCNDQEKVAFATHQLQGPASAWWDNYVVTRPDATKVTWAEFCQNFRKVQIPEGIMAQQKREFRALQQGTRTVTEYLHEFNRLARYAPEDVRTDAEKQEKFFFGLDDELTNQLISGVYEDFEKLVDKAIRQEEQRNKMDRKRKAAQISFPQGNNQKPRFMTGQLGGPPTLIVCQHRPYHPSNFNNDYNGGSHNNSKQHNHNSTPPPLMAPAQSDPPAVSAQSEQPKKGAVGKPGPCFNCGKHGHFAGKCPKLNRTRPRFIQARANHVSAEEAQAAPEVVLGTFPVNSYPATVLFDSGASHSFISKRFAGTHGLSVVELKIPMQVHTPGNDMRAAHYCPSVTIEIKRSPFLSNLILLESKDLDVVLGMDWLTRNKGVIDCASRTITLTNDKGEKITFHSPASQKSVASLNQAAIEGQTETVEKSPRKLEDIPIVQEYPEVFPEDLTTMPPKREIEFRIDLAPGTAPIYKRPYRMAANELAEVKKQVDEQLQKGYIRPSTSPWGAPVIFVEKKDKTKRMCVDYRALNEVTIKNKYPLPRIDDLFDQLKGAKVFSKIDLRSGYHQLRIREEDIPKTAFTTRYGLFECTVMSFGLTNAPAFFMNLMNKVFMEFLDKFVVVFIDDILIYSKSEEEHEQHLRLVLEKLKEHQLYAKFSKCDFWLSEVKFLGHVISAQGMAVDPSNVESVTKWTPPKTVSQIRSFLGLAGYYRRFIENFSKIARPMTQLLKKDEKFKWSAECNQSFEELKKRLVSAPVLVLPDQTKDFQVYCDASRQGLGCVLMQEGRVVAYASRQLRPHETNYPTHDLELAAVVHALKIWRHYLIFNRCEVYTDHKSLKYIFTQPDLNLRQRRWLELIKDYDMGIHYHPGKANVVADALSRKSYCNAVCIEDMCDKLQQDLEHLNLGIVEHGFVAALEARPTLVDQVRAAQVNDPEIAELKKNMRVGKARDFHEDEHGTIWLGERLCVPDDKELKDLILTEAHQTHYSIHPGSTKMYQDLKEKFWWVSMRKEIAEFVALCDVCQLAELYLSRIMCLHGVPKKIVSDRGSQFTSKFWQKLQEELGTRLNFSTAYHPQTDGQTERVNQILEDMLRACALDFGGAWDKSLPYAEFSYNNSYQSSLQMAPFEALYGRKCRTPLFWDQTGERQLFGTEVLTEAEEKVRTVRERLRIAQSRQKSYADNRRRELTFEAGDYVYLRVTPLRGVHRFQTKGKLAPRFVGPYRILERRGEVAYQLELPSNMVGIHDVFHVSQLKKCLRVPEEQASSEHIDIQEDLTYVEKPVRILETSERRTRNKVIRFCKVQWSHHSEEEATWEREDELKAAHPHLFASSSESRGRDSV

SEQ ID NO: 19441 - protein, 1512 aa, Oryza sativa
  unsure (1)..(1512): unsure at all Xaa locations
  Clone ID: TF_OSC27228j.C1.p3.np
VKTRNDPRDSNDASGSEEQTDEAHTSGAPGSSSSPPPENPTVTQMMTMMMQQMQQHYHQMLQQAQNQQFGPPPSQSKLLDFLRIQPPTFSSTTNPMEANDWLRAIEKKLNLLQCNDQEKVAFATHQLQGPASAWWDNYVVTRPDATKVTWAEFCQNFRKVQIPEGIMAQQKREFRALQQGTRTVTEYLHEFNRLARYAPEDVRTDAEKQEKFFFGLDDELTNQLISGVYEDFEKLVDKAIRQEEQRNKMDRKRKAAQISFPQGNNQKPRFMTGQLGGPPTLIVCQHRPYHPSNFNNDYNGGSHNNSKQHNHNSTPPPLMAPAQSDPPAVSAQSEQPKRAVGKPGPCFNCGKHGHFAGKCPKLNRTRPRFIQARANHVSAEEAQAAPEVVLGTFPVNSYPATVLFDSGASHSFISKRFAGTHGLSVVELKIPMQVHTPGNDMRAAHYCPSVTIEIKRSPFLSNLILLESKDLDVVLGMDWLTRNKGVIDCASRTITLTNDKGEKITFHSPASQKSVASLNQAAIEGQTETVEKSPRKLEDIPIVQEYPEVFPEDLTTMPPKREIEFRIDLAPGTAPIYKRPYRMAANELAEVKKQVDEQLQKGYIRPSTSPWGAPVIFVEKKDKTKRMCVDYRALNEVTIKNKYPLPRIDDLFDQLKGAKVFSKIDLRSGYHQLRIREEDIPKTAFTTRYGLFECTVMSFGLTNAPAFFMNLMNKVFMEFLDKFVVVFIDDILIYSKSEEEHEQHLRLVLEKLKEHQLYAKFSKCDFWLSEVKFLGHVISAQGMAVDPSNVESVTKWTPPKTVSQIRSFLGLAGYYRRFIENFSKIARPMTQLLKKDEKFKWSAECNQSFEELKKRLVSAPVLVLPDQTKDFQVYCDASRQGLGCVLMQEGRVVAYASRQLRPHETNYPTHDLELAAVVHALKIWRHYLIFNRCEVYTDHKSLKYIFTQPDLNLRQRRWLELIKDYDMGIHYHPGKANVVADALSRKSYCNAVCIEDMCDKLQQDLEHLNLGIVEHGFVAALEARPTLVDQVRAAQVNDPEIAELKKNMRVGKARDFHEDEHGTIWLGERLCVPDDKELKDLILTEAHQTHYSIHPGSTKMYQDLKEKFWWVSMRKEIAEFVALCDVCQXVKAEHQRPAGLLQPLQIPEWKWEEIGMDFITGLPRTSLGHDSIWVVVDRLTKVAHFIPVHTTYTGKRLAELYLSRIMCLHGVPKKIVSDRGSQFTSKFWQKLQEELGTRLNFSTAYHPQTDGQTERVNQILEDMLRACALDFGGAWDKSLPYAEFSYNNSYQSSLQMAPFEALYGRKCRTPLFWDQTGERQLFGTEVLTEAEEKVRTVRERLRIAQSRQKSYADNRRRELTFEAGDYVYLRVTPLRGVHRFQTKGKLAPRFVGPYRILERRGEVAYQLELPSNMVGIHDVFHVSQLKKCLRVPEEQASSEHIDIQEDLTYVEKPVRILETSERRTRNKVIRFCKVQWSHHSEEEATWEREDELKAAHPHLFASSSESRGRDSV

SEQ ID NO: 19442 - protein, 918 aa, Oryza sativa
  Clone ID: TF_OSC31102j.C1.p13.gm
MVKTRDDPRDSNDASGSEEQTDGAHVSGASGSRSSPPPENPTVTQMMTMMMQQMQQHYHQMLQQAQQNQQFGPPPSHVSKLLDFLRIQPPTFSSTTNPMEANDWLRAIEKKLILLQCNDREKVAFATHQLQGPASAWWDHYVVTRPDATEVTWAEFCQSFRKAQIPEGIMAQQKREFRALQQGTRTVTEYLHEFNRLARYAPEDVRTDAEKQEKFLFGLDDELTNQLISGVYEDFEKLVDKAIRQEEQRNKIDRKRKTAQISFPQGNNQKPRFMTGQLGGPSTLIVCQHRPYRPSNFNNDYNGGSHNNSKQHNHNSTPPPLMAPAQSDPPAVSVQLEQPKKGAVGKPGPCFNCGKHGHFAGKCPKLNRTGPRFIQARANHVSAEEAQAAPEVVLGTFPVNSYPATVLFDSGASHSFISKRFAGTHGLSVVELKIPMQVHTPGNDMRTAHYCPSVTIEIKRSPFLSNLILLESKDLDVILGMDWLTRNKGVIDCASRTITLTNDKGEKITFRSPASQKSVASLNQAAIEGQTETVEKSPRKLEDIPIVQEYPEVFPEDLTTMPPKREIEFRIDLAPGTAPIYKRPYRMAANELAEVKKQVDEQLQKGYIRPSTSPWGAPVIFVEKKDKTKRMCVDYHALNEVTIKNKYPLPRIDDLFDQLKGAKEHQLYAKFSKCDFWLSEVKFLGHIISAQGVAVDPSNVESVTKWTPPKTVSQIRSFLGLAGYYRRFIENFSKIARPMTQLLKKDEKFKWSAECNQSFEELKKKLVSAPVLILPDQTKDFQLRPHEANYPTHDLELAAVVHALKIWRHYLIGNRCEVYTDHKSLKYIFTQPDLNLRQRRWLELIKDYDMGIHYHPGKANVVADALSRKSYCNAVCTEGMCDKLQQDLEHLNLGIVEHGYVAALEARPTLVDQVRAAQ

SEQ ID NO: 19443 - protein, 1014 aa, Oryza sativa
  Clone ID: TF_OSC32579j.C1.p3.fg
MVKTRNGSQSNKVSGSEEQINGPRASGASDSSSSPPLENPTIAQVLDNQTQMITMMMQQMQQQYHQVLQQSKLLEFLRVKPPTFSSTTNPIEANDWLRAIEKKLNLLQCNDQEKVAFATHQLQLQGPASVWWDNYMVTRPAGTEVTWIEFCQSFNKAQVPEGIVAQKKREFRSLQQGTRTVIEYLHEFNRLTRYAPEDVRTDAERQEKFLSGLDDELTNQLISQHYEDFQKLVDKAIRQEEQCNKMNRKRKAVQFRTSQGISQKPRLTMGHQGGPSTMIIQQHRPYHPGSFDKNYHSGSHNNSEQHSLNPTPSSLMNVAQSALPAQPEQPKKFGEKPDLCFNCNEPGHMVGKCPKPRRAGLKFVQAHVNHASAEEAQSAPEVILGTFPVNSTPAVILFDSGATHSFISKRFAGAHGLSLVKLKIPMRVHTPGGGMTTTHYCPSVTVEIQGLIFPANLILLESKDLDVILGMDWLTRHRVIDCTSHTIKLTNAKGEVVTFQSPVLQKPGISLNQAAGEEQEVAVEKTTKKLEDIPIVREYPEVFPDNLTTMPPKRDIEFRIDLAPGTAPIHKRPYRMGANELAEVKKQVDEQLQKGYIRPSTLPWGAPYALNEVTIKNKYPLSRIDDLFDQLKGATVFPKMDLRSGYHQLRIREEDIPKTAFITCYGLFECTVMSFGLTNEPAFFMNLMNKVFMEFLDKFVVVFIDDILIYSKSEEEHEQHLRLVLEKLKEHQLYAKFSKCDFWLKEVQFLGHIVNAQGVAVDPANVESVTKWTPPRTVTQVRSFFGLAGYYRQFIEKFSKIAKPMTQLLKKKEKFIWSAECNRSFEELKRRLVSAPVLILPDQTKDFQLRPHEGNYPTHDLELAAVVHALKIWRHYFIGNRCERRWLELIKDYDMGIHYHAGKANVVADALSRKSYCNVAWVEKLCCEVKRDLEHLNLSIVEHGFVAALEAQPTLVEQVRIAHASDPEIAELKKNMRVGKARGFDEDEQGTIWMGERLCVPGWEKDCVYLKTRS

SEQ ID NO: 19444 - protein, 1498 aa, Oryza sativa
  Clone ID: TF_OSC400202j.C1.p2.fg
MVKTRNDPRDSSDARGSEEQTDGAHVGGASDSSSSPPLGNPTVTQMMTMTMQQMQQHHHQVLQQVQQNQWFAPPPSHLSKLLDFLRIQPPTFSSTTNPMEANDWLRVVEKKLNLLQCNDREKVAFATHQLQGPASAWWDNYVVTRLDATEVTWAEFCQSFRKAQIPEGIMAQQKREFRALQQGTMSVTEYLHEFNCLARYAPEDVRTDAEKQEKFLFGLDDELTNQLISGVYDDFEKLVDKAIRQEEQRNKMDRKRKAAQISFPQGNNQKPRFMTGQLGGPSTLIVCQHRPYHPSNFDNDYNGGCHNNSKQHNHNSTPPPLMAPAQSDSPAVSAQSEQPKKGAVGKLGPCFNCGKHGHFAGKCPKLNRAGPRFIQARVNHASAEEALAAPEVVLGTFPVNSYPATVLFDSGASHSFISKRFAGAHGLSVVELKIPMQVHTPGNDMRTSHYCPSVTIEITRSPFLSNLILLESKDLDVILGIDWLTRHKGVIDCASRTITLTNDKAEKITFRSPVSQKSVASLNQAAIEGQTETVEKSPRKLEDIPIVQEYPEVFPEDLTTMPPKREIEFRIDLAPGTAPIYKRPYRMAANELAEVKKQVDEQLQKGYIRPSTSPWGAPVIFVEKKDKTKRMCVDYRALNEVTIKNKYPLPRIDDLFDQLKGAKVFSKIDLRSGYHQLRIREEDIPKTAFITRYGLFECTVMSFGLTNAPAFFMNLMNKVFMEFLDKFVVVFIDDILIYSKSEEEHEQHLRLVLEKLKEHQLYAKFSKCDFWLSEVKFLGHVISDQGVAVDPSNVESVTKWTPPKTVSQIRSFLGLAGYYRRFIENFSKIARPMTQLLKKDEKFKWSAECNQSFEELKKKLVSAPVLILPDQTKDFQVYCDASRQGLGCVLMQEGRVVAYASRQLRPHESNYPTHDLELAAVVHALKIWRHYLIGNRCEVYTDHKSLKYIFTQPDLNLRQRRWLELIKDYDMGIHYHPGKANVVADALSRKSYCNAVCTEGMCDKLQQDLEHLNLGIVEHGYVAALEARPTLVDQVRAAQVNDPEIAELKKNMRVGKARDFHEDEHGTIWLGERLCVPDDKELKDLILTEAHQTQYSIHPGSTKMYQDLKEKFWWRVKAEHQRPAGLLQPLQIPEWKWEEIGMDFITGLPRTSSGHDSIWVVVDRLTKVAHFIPVHTTYTGKRLAELYLSRIMCLHGVPKKIVSDRGSQFTSKFWQKLQEELGTRLNFSTAYHPQTDGQTERVNQILEDMLRACALDFGGAWDKSLPYAEFSYNNSYQSSLQMAPFEALYGRKCRTPLFWDQTGGRQLFGTEVLTEAEEKVRTVRERLRIAQSRQKSYADNRRRELTFEAGDYVYLRVTPLRGVHRFQTKSKLAPRFVGPYRILERRGEVAYQLELPSNMVGIHDVFHVSQLKKCLRVPEEQASSEHIDIQEDLTYVEKPIRILETSERRTRNKVIRFCKVQWSHHSEEEATWEREDELKAAHPHLFASSSESRGRDSV

SEQ ID NO: 19445 - protein, 1516 aa, Oryza sativa
  Clone ID: TF_OSC401215j.C1.p19.fg
MVKTRNDPRDSSDARGSEEQTDGAHVSGASGSRSSPPPENPTVTQMMTMMMQQMQQHYHQMLQQAQQNQQFGPPPSHVSKLLDFLRIQPPTFSSTTNPMEANDWLRAIEKKLNLLQCNDQEKVAFATHQLQGPASAWWDNYVATRLDATEVTWAEFCQSFRKAQIPEGIMAQQKREFRALQQGTMSVTEYLHEFNRLARYAPEDVRTDAEKQEKFLFGLDDELTNQLISGVYEDFEKLVDKAIRQEEQRNKMDRKRKAAQISFPQGNNQKPRFMTGQLGGPSTLIVCQHRPYHPSNFDNDYNGGSHNNSKQRNHNSTPPPLMAPAQSDPPTVSVQSEQPKKGAVGKPGPCFNCGKHGHFAGKCPKLNRTGPRFIQARANHVSAEEAQAAPEVVLGTFPVNSYPATVLFDSGASHSFISKRFAGTHGLSVVELKIPMQVHTPGNDMRTAHYCPSVTIEIKRSPFLSNLILLESKDLDVILGMDWLTRNKGVIDCASRTITLTNDKGGKITFRSPASQKSVASLNQAAIEGQTETVEKSPRKLEDIPIVQEYPEVFPEDLTTMPPKREIEFRIDLAPGTAPIYKRPYRMAANELAEVKKQVDEQLQKGYIRPSTSPWGAPVIFVEKKDKTKRMCVDYRALNEVTIKNKYPLPRIDDLFDQLKGAKVFSKIDLRSGYHQLRIREEDIPKTAFTTRYGLFECTVMSFGLTNAPAFFMNLMNKVFMEFLDKFVVVFIDDILIYSKSEEEHEQHLRLVLEILKEHQLYAKFSKCDFWLSEVKFLGHIISAQGVAVDPSNVESVTKWTPPKTVSQIRSFLGLAGYYRRFIENFSKIARPMTQLLKKDEKFKWSAECNQSFEELKKKLVSAPVLILPDQTKDFQVYCDASRQGLGCVLMQEGRVVAYASRQLRPHETNYPTHDLELAAVVHALKIWRHYLIGNRCEVYTDHKSLKYIFTQPDLNLRQRRWLELIKDYDMGIHYHPGKANVVADALSRKSYCNAVYTEVMCDKLQQDLEHLNLGIVEHGYVAALEARPTLVDQVRAAQVNDPEIAELKKNMRVGKARDFHEDENGTIWLGERLCVPDDKELKDLILTEAHQTQYSIHPGSTKMYQDLKEKFWWASMRREIAEFVALCDVCQRVKAEHQRPAGLLQPLQIPEWKWEEIGMDFITGLPRTSSGHDSIWVVVDRLTKVAHFIPVHTTYTGKRLAELYLSRIMCLHGVPKKIVSDRGSQFTSKFWQKLQEELGTRLNFSTAYHPQTDGQTERVNQILEDMLRACALDFGGAWDKSLPYAEFSYNNSYQSSLQMAPFEALYGRKCRTPLFWDQTGERQLFGTEVLTEAEEKVRTVRERLRIAQSRQKSYADNRRRELTFEAGDYVYLRVTPLRGVHRFQTKGKLAPRFVGPYRILERRGEVAYQLELPSNMVGIHDVFHVSQLKKCLRVPEEQASSEHIDIQEDLTYVEKPICILETSERRTRNKVIKFCKVQWSHHSEEEATWEREDELKAAHPHLFASSSESRGRDSV

SEQ ID NO: 19446 - protein, 1501 aa, Oryza sativa
  Clone ID: TF_OSC401219j.C1.p10.fg
MVKTRNDPRDSNDASGSEEQTDGAHVSGASGSRSSPPPENPTVTQMMTMMMQQMQQHYHQMLQQAQQNQQFGPPPSHVSKLLDFLRIQPPTFSSTTNPMEANDWLRAIEKKLNLLQCNDQEKVAFATHQLQDATEVTWAEFCQSFRKAQIPEGIMAQQKREFRALQQGTMSVTEYLHEFNRLARYAPEDVRTDAEKQEKFLFGLDDELTNQLISGVYEDFEKLVDKAIRQEEQRNKMDRKRKAAQISFPQGNNQKPRFMTGQLGGPSTLIVCQHRPYHPSNFDNDYNGGSHNNSKQHNHNSTPPPLMAPAQSDPPAVSVQSEQPKKGAVGKPGPCFNCGKHGHFAGKCPKLNRTGPRFIQARANHVSAEEAQAAPEVVLGTFPVNSYPATVLFDSGASHSFISKRFAGTHGLSIVELKIPMQVHTPGNDMRTAHYCPSVTIEIKRSPFLSNLILLESKDLDVILGMDWLTRNKGVIDCASRTITLTNDKGEKITFRSPASQKPVASLNQAAIEGQTETVEKSPRKLEDIPIVQEYPEVFPEDLTTMPPKREIEFRIDLAPGTTPIYKRPYRMAANELAEVKKQVDEQLQKGYIRPSTSPWGAPVIFVEKKDKTKRMCVDYRALNEVTIKNKYPLPRIDDLFDQLKGAKVFSKIDLRSGYHQLRIREEDIPKTAFTTRYGLFECTVMSFGLTNAPAFFMNLMNKVFMEFLDKFVVVFIDDILIYSKSEEEHKQHLRLVLEKLKEHQLYAKFSKCDFWLSEVKFLGHVISAQGVAVDPSNVESVTKWTPPKIVSQIRSFLGLAGYYRRFIENFSKIARPMTQLLKKDEKFKWSAECNQSFEELKKRLVSAPVIILPDQTKDFQVYCDASRQGLGCVLMQEGRVVAYASRQLRPHETNYPTHDLELAAVVHALKIWRHYLIGNRCEVYTDHKSLKYIFTQPDLNLRQRRWLELIKDYDMGIHYHPGKANVVADALSRKSYCNAVCTEGMCDKLQQDLEHLNLGIVEHGYVAALEARPTLVDQVRAAQVNDPEIAELKKNMRVGKARDFHEDEHGTIWLGERLCVPDDKELKDLILTEAHQTQYSIHPGSTKMYQDLKEKFWWASMRREIAEFVALCDVCQRVKAEHQRPAGLLQPLQIPEWKWEEIGMDFITGLPRTSSGHDSIWVVVDRLTKVAHFIPVHTTYTGKRLAELYLSRIMCLHGVPKKIVSDRGSQFTSKFWQKLQEELGTRLNFSTAYHPQTDGQTERVNQILEDMLRACALDFGGAWDKSLPYAEFSYNNSYQASLQMAPFEALYGRKCRTPLFWDQTGERQLFGTEVLTEAEEKVRTVRERLRIAQSRQKSYADNRRRELTFEAGDYVYLRVTPLRGVHRFQTKGKLAPRFVGPYRILERRGEVAYQLELPSNMVGIHDVFHVSQLKKCLRVPEEQASSEHIDIQEDLTYVEKPIRILETSERKTRSKVIRFCKVQWSHHSEEEATWEREDELKAAHPHLFASSSESRGRDSV

SEQ ID NO: 19447 - protein, 1626 aa, Oryza sativa
  Clone ID: TF_OSC401577j.C1.p3.gm
MVKTRNDPRDSNDASGSEEQTDGAHVSGASGSRSSPPPENPTVTQMMTMMMQQMQQHYHQMLQQAQQNQQFGPPPSHVSKLLDFLRIQPPTFSSTTNPMEANDWLRAIEKKLNLLQCNDQEKVAFATHQLQGPASAWWDNYVATRLDATEVTWAEFCQSFRKAQIPEGIMAQQKREFRALQQGTMSVTEYLHEFNRLARYAPEDVRTDAEKQEKFLFGLDDELTNQLISGVYEDFEKLVDKAIRQDEQRNKMDRKRKAAQISFPQGNNQKPRFMTGQLGGPSTLIVCQHRPYHPSNFDNDYNGGSHNNKQPKKGAVGKPGPCFNCGKHGHFAGKCPKLNRTGPRFIQARANHVSAEEAQAAPEVVLGTFPVNSYPATVLFDSGASHSFISKRFAGTHGLSVVELKIPMQVHTLGNDMRTAHYCPSVTIEIKRSPFLSNLILLESKDLDVILGMDWLTRNKGVIDCASRTITLTNDKGEKITFRSPASQKSVASLNQAAIEGQTETVEKSPRKLEDIPIVQEYPEVFPEDLTTMPPKREIEFRIDLAPGTAPIYKRPYRMAANELAEVKKQVDEQLQKGYIRPSTSPWGAPVIFVEKKDKTKRMCVDYRALNEVTIKNKYPLPRIDDLFDQLKGAKVFSKIDLRSGYHQLRIREEDIPKTAFTTRYGLFECTVMSFGLINAPAFFMNLMNKVFMEFLDKFVVVFIDDILVYSKSEEEHEQHLRLVLEKLKEHQLYAKFSKCDFWLSEVKFLGHVISAQGVAVDPSNVESVTKWTPPKTVSQIRSFLGLAGYYRRFIENFSKIARPMTQLLKKDEKFKWSAECNQSFEELKKKLVSAPVLILPDQTKDFQVYCDASRQGLGLVHALKIWRHYLIGNRCEVYTDHKSLKYIFTQPDLNLRQRRWLELIKDYDMGIHYHPGKANVVADALSRKSYCNALCTEDMCGKLQQDLEHLNLGIVEHGYVAALEARPTLVDQVRAAQVNDPEIAELKKNMRVGKARDFHEDENGTIWLGERLCVPDDKELKDLILTEAHQTQYSIHPGSTKMYQDLKEKFWWVSMRREIAEFVALCDVCQRVKAEHQRPAGLLQPLQIPEWKWEEIGMDFITGLPRTSSEHIDIQEDLTYVEKPICILETSERRTRNKPTLDAISPGQELAAGDKLVSSNGRFALGFFQTDSNKSSSNSTPNIYLGIWFNTVPKFTPVWVANGENPVADLASCKLLVSSDGNLAIVATTHAKNSSMVWSSKANIPTNTTHAVLLDDGNLVLRSTSTTNASSTILWQSFDHPTDTVLQGGKIGWNNATGVNRRLVSRKNTVDQAPGMYSFELLGHNGPTSMVSTFNSSNPYWSSGDWNGRYFSNIPETVGQTWLSLNFTSNEQEKYIEYAIADPTVLSRTILDVSGQLKALVWFEGSRDWQTIFTAPKSQCDVYAFCGPFTVCNDITFPSCTCMKGFSVQSPEDWELDDRTGGCVRNTPLLCNSNKTAAGTADKFYPMTSVQLPDKAQSIGAATSADECAAACLSSCSCTAYSYGEGGCSVWHDKLLNVRQQGNGVLYLRLSAKEVLESRRNNRWGVILGASIGASTAALGEKSREFPTFSTYDSCSKIFSSSGNSSKLELPKTEEDGGTEARECK

SEQ ID NO: 19448 - protein, 1264 aa, Oryza sativa
  Clone ID: TF_OSC407633j.C1.p19.fg
MIVLQHRPYNPGNFNNDYNSGSHNSSEEHHHNSTPPPLMAPAQSDLPAVSTQSEQPQGSAGKPGPCFNCGKHGHFAGKCPKLKRAGPRFAGTHGLTVVELKIPMQVHTPRSDMKIAHYCPSVTIEIKRSPFLSNLILLESKDLDVILGMDWLTRHKGVIDCASRTITLTNNKGEKITFRSPMPHKSVATLNQAAIEEQTEIAKKSPKKLEDIPIVQEYPEVFPEDLTTMPPKREIEFRIDLAPRTAPIYKRPYRMAANELAELRIREEDIPKTAFTTRYGLFECTVISFGLTNASAFFMNLMTKVFMEFLDKFVVVFIDDILIYSKSEEEHEQHLRLVLEKLKEHQLYAKFMDPSNVESVTKWTPPKTVSHIRSFLRLAGYYRRFIENFSKIVRPMTQLLKKDEKFKWSTECNQSFEELKKSCPRGMTYARGSSPSSSVHTTYTGKRLAELYLSRIMCLHGVPKKIVSDRGSQFTSKFWQKLQEELGTRLNFIIAYHPQTDGQTERVNQILEDMLRACALDFGGAWDKSLPYAKFSYNNNYQDSLQMAPFETLYGRKCRTPLFWDQTGERQLFGTEVLTEAEEKDYPTKTEIVRCNSSGDLYPFPADDFSSAASARAFIATESTTDLWHHRLGHIGHEALTRLSQASVIPPPRGAAPVVMLANLTQFSTTIRNIQCDNGREFDNLTARTFFLTNGVHMRMSCPHTYPRTDFTAPSLTPISRPHSGRSGPAARVAPAGPTAEVARSTEPPTPPVGSAPVSSAPAGPASTAPSAELPAHESASPGPPSTGSAARRPPASPSSTSSMLWRPPGPPPGFPALPSRPPPLLAPPSGAPTRARSSRVPDAVIPNQLGVSPGVNTHGMTTRGKDDIHLPVTRYNLNATTLSPVPRTYRAALEEEFAALMPSCMVLYKRPSTALSHLDLKTTPGLIWCVASTSRWYSRFASYLLTLGFIEAKFDTSLFIYHHGSHLVYLLLYVDDIVLTASSAGLLRWAIQALQSEFSMKDLGSLHHFLGITVTGDSSGLLLSQHQYSIEVLERAGMSDCKPCSTPVDTNAKLSSSDGSPVVDPTDCHSLAGALHYLTFTRPDISYAVQQVCLHMHDPGIPIVPLSSGYSDWAGCPDTRKSTWSFKRQNTVSRSSDEAEYRVVANTVAETCWLCQLLHELTPPSRATLVYCDNVSAIYLSTNPVQHQRTKHVEIDLHFVHDRVAAGSVRVLHVPTTSQYADIFTKGLPTSIFVEFRSSLNVRCTNVATAGGVSCIYVFHVYL

SEQ ID NO: 19449 - protein, 1276 aa, Oryza sativa
  Clone ID: TF_OSC415897j.C1.p1.fg
MVKTRNDPRDSNDASGSEEQTDGAHTSGASGSRSSPPPENPTVAQMMTMMMQQMQQHYHQMLQQAQQNQQSDFLRIQPPTFSSTTNPMEANDWLRAIEKKLNLLQCNDQEKVAFATHQLQGPASAWWDNYVVTRPDATEVTWAKFCQSFRKAQIPEGIMAQKKREFRALHQGTRTVTEYLHEFNRPARYAPEDVRTDAEKQEKFLFGPDDELTNQLISGVYEDFEKLVDKAIRGPSTLIVCQHRPYHPSNFNNDYNGGSHNNSKQHNHNSTPPPLMAPAQSDPPAGSAQSEQPKKGAVGKPGPCFNCGKHGHFAGKCPKLNRAGPRFIQARANHVSVEEAQAAPEVVLGTFPVNSYPATVLFDSEIKRSPFLSNLILLESKDLDVILGMEWLTRHKGVIDCASRTITLTNDKGEKITFRSPASQKSVASLNQAAIEGQTETVEKSPRKLEDIPIVQEYPEVFPEDLTTMPPNREIEFRIDLAPGTAPIYKRPYRMAANELAEVKKQVDEQLQKGYIRPSTSPWGAPVIFVEKKDKTKRMSVDYCALNEVTIKNKYPLPRIDDLFDLLKGAKVFSKIDLRSGYHQLRIREEDIPKTAFTTRCGLFECTVMSFGLTNAPAFFMNLMNKVFMEFLDKFVMVFIDDILIYSKSEEEHEQHLRLVLEKLKEHQLYAKFSKCDFWLSEDKFLGHVITAQGVAVDPSNVESVTKWTPPKTVSQIRSFLGLAGYYRRFIENFSKIARPMTQLLKKDEKFKQKTSKSTVMHLAKGWDRHYLIGNRCEVYTDHKSLKYIFTQPDLNLRQRSWLELIKDYDMGIHYHPGKANVVADALSRKSYCNALCTEGMCGKLQQDLEHLNLGIVQHGYVAALEARPTLVDQVRAAQVNDPEIAELKKNMRVGKARDFHEDEHGTIWLGERLCVPDDKELKDLILTEAHQTQYSIHPGSTKMYQDLKEKFWWASMRREIAGFVALCDVCQRVKAEHQRPIGLLQPLQIPEWKWEEIGMDFITGLPRTLSGHDSIWVVVDRLTKVAHFIPMHTTYTGKRLAKLYLSRIMCLHGVPKKIVSDRGTLYGRKCRTPLFWDQTGERQLFGTEVLTKAEEKVRTVRERLRIAQSRQKSYADNRQRELTFEVGDYVYLRVTPLRGVHRFQTKGKLAPRFVGPYRILERRGEVAYQLELPSNMVGIHDVFHVSQLKKCLRVPEEQADSEHIDIQEDLTYVEKPVRILETSERRTRNKVIRFCKVQWSHHSQEEATWEREDELKAAHPHLFASSSESRGRDSV

SEQ ID NO: 19450 - protein, 1567 aa, Oryza sativa
  unsure (1)..(1567): unsure at all Xaa locations
  Clone ID: TF_OSC416775j.C1.p2.np
APMSPPPPKPAPRPLGPRRPRRARAPPFPRPPPSLASSLLCAPSSSARAPSSSAAAAAFGMVKTRNDLRDPNDASGSEEQTDEAHTSGAPGSRSSPPPENPTITQMMTMMIQQMQQHYHQMLQQAQQNQQFGSPPSQSKLLDFLRIQPPTFSSTTNPMEANDWLRAIEKKLNLLQCNDQEKVPFATHQLQGPASAWWDNYVVTRPDAMEVTWSEFCQGFRKAQIPEGIMAQQKREFRALQQGTRTVTEYLHEFNRLTCYAPEDVRIDAEKQEKFLFGLDDELTNQLISGVYEDFEKLVDKAIRQEEQRNKMDRKRKAAQISFPQGNNQKPRFMTGQLGGPSTLIVCQHRPYHPSNFDNDYNGGSHNNSKQHNHNSTPSPLIPPAGSAXSEQPKKGAVGKPGPCFNCGKHGHFAGKCPKLNRAGPRFIQARANHVSAEEAQAAPEVVLGTFPVNSYPATVFFDSGASRSFISKRFAGAHRLSVVELKIPMQVHTPGNDMRTTHYCPLVTIEIKRSQFLSNLILLESKDLDVILGMDWLTRHKGVIDCASRTITLTNDKGEKITFRSPVPQKSVASLNQATIEEQTEVAEKSPRKLEDIRIVQEYPEVFPEDLTTMPPKREIEFQIDLVKVTTPIYKRPYRIAANELAEVKKQVDEQLXKGYIRPSTSPWGAPVIFVEKKDKTKRMCVDYRALNEVTINKYPLPRIDDLFDQLKGAKVFSKIDLRSGYHQLRIREEDIPKTAFTTRYGLFECTVMSFGLTNAPAFFMNLMNKVFMEFLDKFVVVFIDDILIYSKSEEEHEQHLRLVLEKLKEHQLYAKFSKCDFWLSEVKFLGHVITAQGVTVDQSNVESVTKWTPPKIVSQIRSFLGLAGYYRRFIENFSKIARPMTQLLKKDEKFKWSAECNQSFEELKKRLVSAPVLILPDQTKDFQVYCDASRQGLGCVLMQEGRVVAYASRQLRPHESNYPTHDLELAAVVHALEIWXHYLFGNRCEVYTDHKSLKYIFTQPDLNLRQRRWLELIKDYDMGIHYHPGKANVVADALSRKSYCNAVCTEGICDKLQQDLEHLNLGIVEHGYVAALEARPTLVDQVRVAPVNDPEIAELKKNMRVKARDFHEDEHGTIWLGERLCVPDDKELKDLILIEAHQTQYSIHPSSTKMYQDLKEKFWWASMRREIAGFVALCDVCQRVKAEHQRPAGLLQPLQIPEWKWEEIGMDFITGLPRTSSGHDSIWVVVDRLTKVAHFIPVHTTYTGKRLAELYLSRIMCLHGVPKKIVSDRGSQFTSKFWQKLQEELGTRLNFSTAYHPQTDGQTERINQILEDMLRACALDFGGAWDKSLPYAKFSYNNSYQASLQMAPFEALYGRKCRTPLFWDQTGERQLFGTEVLTEAEEKVRTVRERLRIAQSRQKSYADNRRRELAFEAGDYVYLRVTPLRGVHRFQTKGKLAPRFVGPYRILERKGEVAYQLELPSNMVGIHDVFHVSQLKKCLRVPEEQASSEHIDIQEDLTYVEKPVRILETSERRTRNKVIRFCKVQWSQHSQEETTWEREDELKAAHPHLFASSSESRGRDSV

SEQ ID NO: 19451 - protein, 1516 aa, Oryza sativa
  Clone ID: TF_OSC900179j.C1.p8.fg
MMKTRNDPRDSNDASGSEEQTDGAHVSGASGSRSSPPPENPTVTQMMTMMMQQMQQHYHQMLQQAQQNQQFGPPPSHVSKLLDFLRIQPPTFSSTTNPMEANDWLRAIEKKLNLLQCNDREKVAFATHQLQGPASAWWDNYVATRLDATEVTWAEFCQSFRKAQIPEGIMAQQKREFRALQQGTRTVTEYLHEFNRLARYAPEDVRTDAEKQEKFLFGLDDELTNQLISGVYEDFEKLVDKAIRQEEQRNKMDRKRKAAQISFPQGNNQKPRFMTGQLGGPSTLIVCQHRPYHPSNFNNDYNGGSHNNSKQHNHNSTPPPLMAPAQSDPPAVSVQSEQPKKGAVGKPGPCFNCGKHGHFAGKCPKLNRTRPRFIQARANHVSAEEAQAAPEVVLGTFPVNSYPATVLFDSGASHSFISKRFAGMHGLSVVELKIPMQVHTPGNDMRTAHYCPSVTIEIKRSPFLSNLILLESKDLDVILGMDWLTRNKGVIDCASRTITLTNDKGEKITFRSPVSQKSVASLNQAAIEGQTETVEKSPRKLEDIPIVQEYPEVFPEDLTTMPPKREIEFRIDLAPGTAPIYKRPYRMAANELAEVKKQVDEQLQKGYIRPSTSPWGAPVIFVEKKDKTKRMCVDYRALNEVTIKNKYPLPRIDDLFDQLKGAKVFSKIDLRSGYHQLRIREEDIPKTAFTTRYGLFECTVMSFGLTNAPAFFMNLMNKVFMEFLDKFVVVFIDDILIYSKSEKQHEQHLRLVLEKLKEHQLYAKFSKCDFWLSEVKFLGHVISAQGVAVDPSNVESVTKWTPPKTVSQIRSFLGLAGYYRRFIENFSKIARPMTQLLKKDEKFKWSAECNQSFEELKKKLVSAPVLILPDQTKDFQVYCDASRQGLGCVLMQEGRVVAYASRQLRPHETNYPTHDLELAAVVHALKIWRHYLIGNRCEVYTDHKSLKYIFTQPDLNLRQRRWLELIKDYDMGIHYHPGKANVVADALSRKSYCNAVCTEGMCDKLQQDLEHLNLGIVEHGFVAALEARPTLVDQVRAAQVNDPEIAELKKNMRVGKARDFHEDEHGTIWLGERLCVPDDKELKDLILTEAHQTQYSIHPGSTKMYQDLKEKFWWVSMRREIAEFVALCDVCQRVKAEHQRPAGLLQPLQIPEWKWEEIGMDFITGLPRTSSGHDSIWVVVDRLTKVAHFIPVHTTYTGKRLAELYLARIMCLHGVPKKIVSDRGSQFTSKFWQKLQEELGTRLNFSTAYHPQTDGQTERVNQILEDMLRACALDFGGAWDKSLPYAEFSYNNSYQASLQMAPFEALYGRKCRTPLFWDQTGERQLFGTEVLTEAEEKVRTIRERLRIAQSRQKSYADNRRRELTFEAGDYVYLRVTPLRGVHRFQTKGKLAPRFVGPYKILERRGEVAYQLELPSNMIGIHDVFHVSQLKKCLRVPEEQADSEHIDIQEDLTYVEKPVRILDTSERRTRNKVTRFCRVQWSHHSEEEATWEREDELKAAHPHLFTSSSESRGRDSV

SEQ ID NO: 19452 - protein, 1215 aa, Oryza sativa
  unsure (1)..(1215): unsure at all Xaa locations
  Clone ID: TF_OSC900192j.C1.p1.np
VVSRPCPRVRLTRGAHGAGRCEPGAPGPPWTVRLPRGSHYNDYNCGSHNSSEQHNQSSTPPSLMAPAPSDPPAMPAQSEQPKKESGGKPGPCFNCGKHGHFAGKCPKPXRAGPKFVQARINHASAEEARAAPEVVLGTFPVNSHPTVVLFDSGATHSFISKKFAGTHGLSVVXLKIPMRVHTHGNDMKTTHNCPSVTSEIKRSQLLAAKGVIDCASRTITLTNDKGEKITFRPLVPQKSVASQDQAATEEQTEIVKKSPKKLEDILVVQEYPEVFPEDLTTMPPKREIEFRIDLAPGTAPIYMRPYRMAANELAKVKKQVDEQLQKGYIRLSTSPWGAPVIFVEKKDKTKIMCVDYRAFNEVTIKNRQKYPLPRIDDLFDQLKGAKVFCKIDLRSGYPXLRIWEEDIPKTAFTTRYMLFECTVMSFGLTNAPAFFMNLMNKVFMEFLDKFAVVFIDDILICSKSEEEHEQHLHLVLEKLKVHQLYAKFSKCDFXLSEVKFLDHVITAQGVAVDSSNVESVTKWTPPKTVSQIRSFLGLAGYYRWFIENFSKIARPMTLLLKKDEKFKWSAECNQSFEEHKKKLVSAPILILPDQTKDFXVYCDASRQGLGCVLMQEGRVVAYSSRQLRPHESNYPTHDLELAAVVHALKIXRHYVIGNCCEVYTDHKSLKYIFTQPDLNLRQRRWLELVKDNDMGIHYHLGKANVVADALSRKSYCNALCTDKLQQLEAWPTLVDQVRAAQVNDAEIAELKKNMRVGKAXDFHEDEHGTIWMGEMLCVPEDKELKDLILTEAHXTQYSIHPGSTKMYQDLKEKFRWASMKREIAEVVALCDVCQRVKVEHQRLAGLLQPLQIPKWKXEDIGMDFITGMPRTSSGHDSIXVVVDRLTKVAHFIPAHTTYTGKRLEELYLSRIICTHGVPKNIVSDRGSQFTSKFWQKLQEELGTRLNFNTAYHPQMDDQTERVNQILEDMLXACALDFGGAWDKSLPYAEFSYNNSYXAILXMAPFEALYGCKCRIPLSWDQIGERQLFGTEVLSEAEKKVRIVRERLRIAQTQQKSYAENRRRELTFEVGDYVYLCVTPLKRVHRFQTKGKLAPCFVGPDRILEHRCEVAYQLELPSNMVGIHDVFHVSQLKKCLRVPEEQASSEHIDIQEDQTYVEKPVRILETNERRTXNNVIRFCKVQWSHHSEEEATWEKEDELKPHLFASSSESRGRDSV

SEQ ID NO: 19453 - protein, 671 aa, Oryza sativa
  unsure (1)..(671): unsure at all Xaa locations
  Clone ID: TF_OSC17325j.C1.p1.np
MPRYKPEYLFGVEGFVQELRTMSFVIGFGTAPFYAQIPHDRHEEKCRVKVTLNSNSEDIPSVMFEAGGRNYIHACQEVARIAIGELRDRYSDQLADTEYRYHPRQPQGSDRGNYLETEGIENDATTRHLVEMLWAMDESRAETVLAAQDREDRNRGKICKLEDKVDRLEKELAALKGEAPPQKARIRLTAMKRALFVPRYQLAPKVRVVENEVAPTLADPPVIIISDDEEEESKHTHSKIEWVVTQDDEDEPNEPSIDLRCSEELEXLFCPVSLLVPCPCQMVNTRSNGNGPNNNPNNNNKVERPTLAQVLAQQTQLMNMMMQQLQNQQNQGNNHAPPQNKLAEFLRVRPPVFSSTTNPVEAGDWLHAIEKKLDLLQCTDQEKVSFASHQLHGPASEWWDHFRLNRTTAEPITWLEFTAAFRKTHIPSGVVSLKKKEFRSLTQGSRSVTEYLHEFNRLARYAPEDVRNDEERQEKFLEGLNDELSYPLMTGDYSDFQKLMDKAIRQEDKYNRMEQKKRRIAHFKAQQGSNQKPRLTLGPQSMPQGGSSSVVRPQRQFFNNNAGNNIRNQAPRPVAAPTQQQPAKREPGSKPVVCFNCGDPGHYAKCPKPRRKVVPAQSNSTAPASKARVNHVAAAEAQDAPDVILGTFSVNSVPATVLFDSGATHSFGLQE

SEQ ID NO: 19454 - protein, 1044 aa, Oryza sativa
  unsure (1)..(1044): unsure at all Xaa locations
  Clone ID: TF_OSC22791j.C1.p1.np
MASPHRAARAPARFGFEEGRVEPEADHESANEQSHHSNRSHRTASRNAEVEQSHRSNRSHRIVSRNAEVEXSHRSHRSVGHNSGEERIPSPPHVENNMQHLMAVQTQILQGLATAIAGIQHNAHGNGHPHMGNNRSKLTDFLRSRPPEFSQTVKPVEAGDWLKDVERKLNLVQCIPIEKTVYASHQLRGPAADWWENYCNAHPEPTNIPWNEFAAAFRVAHVPKSTIDMKKEEFIRLKQGNSSVNEYLSQFNKLARYAPEEVDTDKKKIRKFLKGVTVGMRLQLLAHDFPTFQHMINKALPLEDARKEATEEYKKRKSTHQGNSSRGAPHPRFGQPKQYHQSVTQANRQPGYAPRPQMNRPAPPPQQRAPSGNIAPNSVTSFKSPPGLSTVQCFRWDKMGHSARQCPQNPTNTNSGHANGSTARTPTLAAAQSRPSSXASGQGSHASNNFGRGRVNHIQAETAQDAPDVVMGMFSVNSIPAIILFDSGASYSFISQAFVKRNGWKTXNLRVPMIVHSTGRDIRATKICPEVNLRIEEVDFLAKLIVLDSQSLDIILGMDWLAKHKGQIDCAERSITLQGPGGKQVHFTPNTLTASRSILTNLQATPLESVPIVCEYPDVFPEELSSMPPDREIEFSIELAPGTAPIAKRPYRMAANELAEVKRQIEELESKGYVRPSSSPWGAPVLLVKKKDGFERMVIDYRALNEVTIKNKYPLPRIDDLFDQLEGVKVFSKIDLRSGYHXLKIRSEDIRKTAFSTRYGLYEFTVMSFGLTNAPAFFMNLMNKIFMEYLDKFVVVFIDDILICSKNEEEHAEQLRLIIEKLRGHQLFAKFSKCEFWLDRVAFLGHVISSNGIEVDPSKVEAVLAWNPPKNVSEIRSFLGLAGYYRRFIEGFSKLARPMTELLKKEKMFEWSAACEDSFQEIKKRLTTALVLTLPDIRKDFEIFCDASRQGLGCVLMQERKVVAYASRQLRPHEVNYPTRDLELAAVVHAFKIWRHYLIGNKCEAYTDHKRLKYIFTQTELNMRQRRWLELIKDYDLGIHYHPG

SEQ ID NO: 19455 - protein, 1529 aa, Oryza sativa
  unsure (1)..(1529): unsure at all Xaa locations
  Clone ID: TF_OSC5140j.C1.p1.np
PLGTSKSRWRPKPSRRLDDPYAKVKFKIPSFLGYDDAKKYLDWEMTVEQKFNVHLVPEQHRVRRASSEFKDFAIMWWAGLSEGVLPTTWEELKVAMRDRFVPPSYHRDLRKKLMRLEQGDKSVQDYYGELQKGVRRCGIVEGVEDAICRFYTSLREEIQNIVDYKEFNSVNQLFRFAMLAEKELQGRDHQGKSKASTSTPSAGLPKAVSFRASQPAGKRPAASGASAAPKPSPPPRPAESSKGSSQVPAKSASSVTSTGRICHRCQGFGHVQKDCPSQRAYVATEDGYITTSDMEEEEEEEVEDDGEVFGRDDTTDYRTIIVQRVLSTQVQQHDRLQRHNLFXIFFVINNCRARVIIDGCSCNNLVSSDLVNKLGLTTCTHPHPYHIQWLNDSGRAKVTQVCRVSFSIGSYADSVDCDVVPMQACSLLLGRPWEHDNDATHHGRSNKYTFMHNGKKITLLPLTPAEIVEADKERAASLKVDSENQQVAKSVFPPKKDKLSPSSKVEGIKLKGGVMLATKCDIGDISNDDMCYFLICKQALVSLDDIASSIPPVVTNLLQEYEDVFPAEIPPGLPPMRGIEHQIDLIPGASLPNRAAYRTNPDETKEIQWQVQDLXDRGYVRQSLSPCPVPVILVPKKDGSWRMCVDCRAINNITIRYCHPIPRLDDMLDELCGYIIFTKIDLRSGYHQIRMKLGDEWKTAFKTKFGLYEWLVMPFGLTNAPSTFMSLMNEVLRPFIGRFVVVYFDDILIYSKSLDEHMDHLRAVFNALRDARLFANLEKCIFCMERVSFLGYVVTPQGIEVDESKIEAIRSWSVPQTITQVRSFLGLAGFYHRFVKDFSTFAAPLNELTKKGVVFHWGKTQEKSFDILKEKLTHAPLLQLPNFGKTFELECDATGVGIGGVLMQDGKPVAYFSEKLHGPILNYSTYDKELYALVRSLETWRHYFWPKEFVIHSDHESLQYLRSQNNLNRRHAKWVEFIESFPYVIKHKKGKDNVIADALSRRYTFLSQLECRIFGLESIKEQYALDPDFNEVMINCKEGRTWNKFVINGGFVYRANRLCIPVGSVRLLLIQEAHGGELMGHFGAKKTEDVLATYFFWPRMRKDVDRFMARCTTCQKAKSHLNPHGLYMPLPVPSIPWADISMDFVLGLSRTKRGRDSIFVVVDHFSKMAHFIPCHKSDDAVHIADLFFHEIVRLHGMPSIVSDRDAKFLSHFWRTLWNKLGTKLLFSTTCHPQTDGQTEVVNRTLGTMLRAILKKNLKMWEECLPHMEFAYNRATHSTTKVSSFQVVYGFNPRAPIDMLPLPTSERVHNDAKARAEFILKMHESTKFNIEKMTEKYRIAGSKSRQEVKLEPGDLVWLHLRNDRFPELRKSKLMPRADGPFKIVEKINDNAYKLELPPEFGVSPTFNISDLKPYLGEEYELESRTTSIQEGEDDADITTSDTHNNPPMVIQGPITRARARQLNLEVSSFLCSSLYEFENRLQPDYIVLRNNGGDKEREGLRVMEDHRGRPSQGGGPNQSTSGAIRSPGPV

SEQ ID NO: 19456 - protein, 357 aa, Oryza sativa
  Clone ID: TF_OSC10016j.C1.p1.np
RKRYGEGTVKNEGERERPARAAGKWPPDREEFSYNYIPGQYRHMGTKRRDFEKPVKFQNQRSDGAILNLAAHDPIDWPNIISIWKGLIVQKYIQNQHNIGSKVEDMITYLETFLGESAKILWEQWVEKNPNNYEELKRAGSNPHNFANVISNIIIAEDPELGYTTLQNERLKEIEKLTLTSWKGIKEFSQHYLYNATTAKQGYNRGIVERYFNKLPDPLGSMIFEEYKKETEGAEINISQAITFVFKQLRKICTGIQAQRSMKHSDYNFCNKIVQIPLSYGEDKPRSKRIYKHQNRNHNNIRTKKRYFLRRSDNRAPFLHKRNVRRYNPKKTYDKTCRCFICNSPDHLSRTCPNKDQ

SEQ ID NO: 19457 - protein, 1029 aa, Oryza sativa
  Clone ID: TF_OSC100588j.C1.p35.fg
MASKTLREFAAPSADNVAIGPQVNIGDVDFDLKSNLITMAQASPFCGKPNEDANAHLQQFLEICSTYTIEGVRPDTDKYSTAFLSKFFPMGKTNALRGRISSFQQTRDESIPEAWERLQEHVAACPHHGMVDWLILQNFYNGLTPMSRDHLDAAAGGAFFSKTVQGAVELIEKMVSNMGWSEERLQTRQRGMLTVTETELLAAKLDLVMKRLDDHEKGPQGTVKAMDSHVTCEVCGGTGHSRNDCPETREETMYMGNNNGYRPQEGNNNDNLSNQPSLKDLIFAQAKTTDALSKNLAANDKILENINVKLDGFASAFQNQSSFNKMIETQLAQLASLVPANETGRIPGQPDSSIENVKAITTRGGKSTRDPPYPNPAGTNGMSKEAPSNDSAYKEIQPNKTVPLEYYNTRLLPFPQRSRKPSVDEQFARFVEVIQKIHINVPLLDAMQVPTYARYLKDILNNKRPLPTTEVVKLTEQCSNVILHMLLEKKKDPGCATITCLIGAQQFDQALCDLGASVSVMPKDVFDKLNFTMLEPTPMRLQLVDSSVRYPAGIAEDVPDKIRDSFIPVDFVVLDMDTGKKTPLILGRPFLSTAGANIDVGMGSICFHINGKEEKFEFQPRTEQCSMVRIKYGPNPQNIQEVKVEPPKTDSLVKFMQNFLEKETTIPRNRYWRTPVKSPVSAKKLEQPAQKKPPSAPKPKKVWKEKPKMPAPSPPETEIEDGISFRFFHEEFTFTWKGLSTFLGFHDSCKIDLQKGISGFEKNRFWEDISGAPICKKPRTNDILNPTLRLMHKWIAMTLFPRAKGLGVVSDQIAFILAARPRIDEAYLVLAHILKHGADGSLIYFFPGCTNEIPLPNAGYHLYNCHELTIPLQTIEESRAGGTFREMHNMTRNEREISLSSTPVQMYEAGWTPTGDAPGWTQAPRRSIGVSTWASASEDRWHAPHDIQRGDNQPPRSSDVSSSPSEWRSSSSRWDLGEITRRMDTLDVQTGEIQYNLTEHMAQTQEWQQSADAQFANINNMMQQQHDNL

SEQ ID NO: 19458 - protein, 1014 aa, Oryza sativa
  Clone ID: TF_OSC29942j.C1.p1.fg
MTTMADASSSSNTSTGGYSLMGCIKDIPTLQGDNYAEWKRKLDLAFIMGEVDWVLTTPCPVEPVELIKGENESDADWQKSQRDNAPLVMSYDIEQKKWSLANKKCLAVVKNTIEPTILGSIPECDAVSEYLERIKSQFTGFSKTYATQLIKQLVTERYHGGGVRDHILRMSNMASKLKPMDLGITDDFLVHLVMASLPKQFDNFIINYNISLEKWNFEKLIANYVQEEERIKESNGGSINYVKDNKKKNHKSPTSKAKQSQHLPQQQQFAVEKDQCLHCKKIGHYKKDCPDFLKMIMARKDENIITFVNESHYVGYSRSTWWIDSGATIHACNCLKAFRSTRTMQRSESSIRVANGVEEKVEAVGDLPLELANGFTLLLRNVFYVPSLQRNLISVSKLDFDGYDCRFGSGKCELWGRIERLVKNEILRPLEFSDLEQCIECIKGKFVKSIKKGAKRSAGILEIIHTDICGPFLVKSVDGYDSFVTFTDDYSRYGYIYPIKERSEALDKFKIFKVEVENQHVIKIKVNGVAERRNRTLMDMVHSMMSYSTLPLGLWMEALKTAIHILNRVPSKSVPKTPYELWTGRVPSLAHLRVWGSPVEAKVFNPNIGKLDPKTVSCHFIGYPGISKGYRFYCPNSYTKFVEMRHAIFLEDEMIRGSSVVREIDLEERRVSIPAPSTQEPFFSLPADVVPTMPVIAEELQQPQTDNVLVQETQQEPQVQDVPNVEAPRRSERVRRSAIRDDYNVYNIEESHVEDDPTSYEEAMRSARSSKWLEAMKDEMKSMKLNDVWDLEEIPKGAKTIDVKTAFINGDLEEKVCMAQPKGFVMKGNENMGCRLKRSIYGLKFQSNPGPEHWKLVKKVLRYLQGTKGLMLSYRRSESLQIVGYSDFDFEKIIQRSTMYAEFIACYEANEATGQVNWLKKFIPGLKVVDSIKKPLKLYCDNKPAVMYAHNNQSSGAAKHIDIKYYVVKDKVWDQTISLEHIRTERMLADPLTKGLPPNMFKEHVAGMGLREAL

SEQ ID NO: 19459 - protein, 1252 aa, Oryza sativa
  Clone ID: TF_OSC400543j.C1.p10.fg
MASRRRASTSNEETQTPDLNTLARVMTTQTQLLQAIANNQGNRGGSSFGEFMRTKPPTFATAEEPMDAEDWLRIIEKKLTLVRVREADKVIFAANQLEGPAGDWWDTYKEAREEDAGEPSWEEFTIAFRDNFVPTAVMRMKKNEFRRLRQGNTSIQEYLNRFTQLARYATGDLADEEEKIDKFIEGLNDELRGPMIGQDHDSFQSLINKVVRLENDRKVVEHNRKRRLAMNRPPQAAPQRPKGTTSSVWKPAVVTTNCPSAPSNFHRPVTTQNRAPAPNQAATGSVRPGSCFNYGEYGHFANKCPHPNKTPIRTGANATAIHGTATPAAGRGLFRTPQTNRTSTGFGPGQTLDVILGMDWLTKNRGVINCRRREVTLTTPWGSDMRATMDQDPRLTEHAGGIFTMLPLKGMPVVQRFPDVFPQDLPGMPPDRDIEFIIDLILGTAPISKRPYRMPVNELEELKKQIRELQEKGFVRPSLSPWGAPVLFVKKKDGSMRMCVDYRSLNEVTIKNKYPLPRIDDLFDQLKGAKVFSKIDLRSGYHQLKIRTGDIPKTAFSTRYGLYEFTVMSFGLTNAPAYFMNLMNKVFMDYLDKFVVVFIDDILIYSKDEEEHAEHLRLVLEKLRKHKLYAKFSKCEFWLKEVTFLGHVISAGGVAVDPAKVEAATEWKAPKSVTEIRSFLGLAGYYRRFIEGFSKIARPMTQLLKKEKKFVLSEQCQESFEQLKEKLTSAPILVLPDNRKDFVIYCDASRQGLGGVLMQDGKVVAYASRQLRPHEENYPTHDLELAAVVHALKIWRHYLIGNHCDIYTDHKSLKYIFTQSDLNLRQRMEGMAPELKEDIAQLNLHIVPRGQINTLDIQPLLRTQIEEAQKDNEEIQEVKERLATGFAKEFSTDEKDVLWYKKMIYVPEQGGLRGLILKEAHESAYSLHPGSMKMYQDLKEGYWWPNMKRDVAEYVALCDVCQKVKAEHQRPAGLLQPLRIPEWKWDEIGMDFIVGLPKTATGYDSIWVIVDRLTKTARFIPVKTNYSGAKLAELYMTRIVCLHGVPKRIISDRGTQFTSHFWEKTGERAVFGPDIIKEAEEKVRLIRDHLKVAQSRQKSYADTRRRNLEFKEEDYVYLKVSTMRGTKRFKVKGKLAPRYVGPFQIMARRGEVAYQLQLPENIADVHLVFHVSQLKKCLRVPKEQAPLEEIHNSNDLTYPEHPVRILDEAEKRTRTKVWHMYKVQWSNHTEDEATWESEEFLKTEYPHLFENR

SEQ ID NO: 19460 - protein, 1360 aa, Oryza sativa
  Clone ID: TF_OSC400785j.C1.p28.np
MDLSRSLFRRIASRDDKSLSCIDKQKGKNKDIDELEDIAEVDKQLERYQRDTLRAIRPQQIYCMGFFENKNGLYRISREVELSVLTKPVELKIVAKEFENGLKYSGYKYIHQGMYTIGIKGMTRKKLGAKVLITLLDKRWDTIDKAALGFLEGDMNENMLITYIAPDLMMPIKEFIDKMSFGFQTKGYEEFKGTNLLVSIEFIGRLTNRSASKYKINVNDVIENMHSKGITFMSPLKISSEERAGEEWKISDLIESKTLSQPENYISYQNSKGNTSIRFINYKPRTTDDLETEASDRNIIDNRRHSVSEFMKKLDQESEIKYYENKLKEINEEYNKSIKCEWPKIRDKELYFYRELARVKKVKKNEDMAVEIFKNQETKIEQIKRKEQDKHGKEEQNLGKILSEEEQWAENERLFLESYEEEINLINEMENIENEIDNAEQYNDFIDTLDEVGLHNLDNAMEAMEVDLGTGKRKIYGEGTVKNEGERERPARAAGKWPPDREEFSYNYIPGQYRHMGTKRRDFEKPVKFQNQRSDGAILNLAAHDPIDWPNIISIWKGLIVQKYIQNQHNIGSKVEDMITYLETFLGESAKVLWEQWVEKNPNNYEELKRAGSNPHNFANVISNIIIAEDPELGYTTLQNERLKEIEKLTLTSWKGIKEFSQHYLYNATTAKQGYNRGIVERYFNKLPDPLGSMIFEEYKKETEGAEINISQAITFVFKQLRKICTGIQAQRSMKHSDYNFCNKIVQIPLSYGEDKPRSKRIYKHQNRNNNNIRTKKRYFLRRSDNRAPFLHKRNVRRYNPKKIYDKTCRCFICNSPDHLSRTCPNKDQKRYSSKYEEQERVLIIDSVNENILVCDDEIKDDESIYSIIETDEVETINEEYESSDEELDLIDELAGLKVEMMDQLNCEHDWIRGKGDYNIKCAFCIYYPSQENRVTCSICLKQACAECIKVNKQKWRKEIELESDEKTLSSRVRVLENRLNKLEVELENLKNNCDIKALPENKDIQNTEFKEQLITLKDSNTAKIIQLRKAITNFGNKYIVRLPFKEILGIRIPVKIKLTPKVSYKILALVDTGCTKNIIHDKYFIRCPEIVHTIDDNKAEVSTDMSGIKKIHNQLAYNIEVYINATKYIIDEITIRDLSMINDDMIIGLRFLQQSVQTTVIHEQGITFIPYQNNVPYISDVRKRGGTSPKLDNLEVPNLESEERINEYELTYPEDDDGQNSVRRSSGQQEELRTMAGRVGGSEEGARNHRRSGRRFVKINPAYSAGRYGKLIPRLLRPIDARTPHAPGVDTDLVVVAFHAPGVDTDLVVVAFADARSVRAEPPASERRGVVQTVKREENNVDVARSRAYTYGRSEGACC

SEQ ID NO: 19461 - protein, 1214 aa, Oryza sativa
  unsure (1)..(1214): unsure at all Xaa locations
  Clone ID: TF_OSC401724j.C1.p7.np
MDIFRSLFRRIASRDDCSDKQKGKYDDIDELKDVAQVDKQLERYQRDTLRAIRPQQVYCMGFFENKNGLYRISREVELSVLTKPVELKIVAKEFENSLKYSGYKYIHQGMYIIGIKGMTRKKLGAKVLITLLDKRWDTINKASLGYLEGDMNENMLITYIAPDLMMPVNEFIDKMSFFQTKGYEEFKGTNLLISIEFIGRLTNRSATKYKINVNDVIEKMHSKGIKFMSPLTIDTEERAGEKWPISEFIKNKTLSQPENFISYQDSKGNVSIRFTNYKTRASDDLDAESTDRNIIDNRRHSISELMEKLDHESEIKYYEDKLRDIADEYNNSMKSEWPKIRDKELYFYRELSRIKKQKKEKSLAIETPRTQEIKIEQIKSKEPEEIQKFDKVLSEEEQWEVNEKLLLESYEEENNLIEEIENIEEEDNAEQYNDFIDSLDEVGLHNLDNAMEAMKVDLGTGKRKRYGEGSVQNEGERKRPARAAGRWPPEKEEYSYHYIPGQYRHMGTKRRDFEKSIKFQNQKSDGAILNLAAHDPIDWPNIISFWKGLIVQKYIQNQHNIGNNVGDMITYLETFLGESAKVLWEQWVEKNPNNYEELKRAGSNPHNFANIVSNIIIAEDPELGYTTLQNERLKEIEKLTLTSXKGIKEFSQHYLYNATTDKQGYNKGIVERYFNKLPDPLGSMIFEEYKKETEGAEINISQAITFVFKQLRKICTGIQAQRSMKHSDYNFCNKIIQIPLSYGEDRPRNKRNHRYQSRNNNNIKTKKRYFLRRSDNRAPFLHKXNVRRYNPKKTYDKTCRCFICNSPDHLSRTCPNKDQKRYSSKYEEQERVLIIDSVNENILVCDDEIKDDESIYSIIETDEIENTNEEYESTNEELDLIDELAGLKIETMDXLNCEHDWIRGKGDYNIKCAFCIYYPSQDNRVTCSICLKQACVECIKANKQKWRKEIELESDERILSSRVRVLENRINKLEVELENLKINYDIKALPENKDIQNTEFKEQVITLKDSNTAKIIQLKDAITNFGNKYIVKLPFKEILGIRIPVKVKLSPKVLYKILALVDTGCIKNIIHDKYFIKCSEIVHTIDDNKAEVSTDMSGIKKIHNQLARNIEVYINGTKYIIDEITIRNLSMISDDMIIGLRFLQXSVQTTVIHEQGITFIPYQNNVPYISEVRKRGGARIKPDNLEALNLESEERINEYELNYNQLNSKKSSTR

SEQ ID NO: 19462 - protein, 548 aa, Oryza sativa
  Clone ID: TF_OSC413662j.C1.p1.np
FPRPKNGYLLSIEKLTLTSWKGIKEFSQHYLYNATTAKQGYNRGIVERYFNKLPDPLGSMIFEEYKKETEGAEINISQAITFVFKQLRKICTGIQAQRSMKHSDYNFCNKIVQIPLSYGEDKPRSKRIYKHQNRNNNNIRTKKRYFLRRSDNRAPFLHKRNVRRYNPKKTYDKICRCFICNSPDHLSRTCPNKDQKRYSSKYEEQERVLIIDSVNENILVCDDEIKDDESIYSIIETDEVETINEEYESSDEELDLIDELAGLKVEMMDQLNCEHDWIRGKGDYNIKCAFCIYYPSQENRVTCSICLKQACAECIKANKQKWRKEIELESDEKSSRVRVLENRLNKLEVELENLKNNCDIKALPENKDIQNTEFKEQLITLKDSNTAKIIQLREAITNFGNKYIVRLPFKEILGIRIPVKIKLTPKVSYKILALVDTGCTKNIIHDKYFIRCPEIVHTIDDNKAEVSTDMSGIKKIHNQLAYNMEVYINATKYIIDEITIRDLSMINDDMIIGLRFLQQSVQTTVIHEQGITFIPYQNNVPYISEVRK

SEQ ID NO: 19463 - protein, 728 aa, Oryza sativa
  unsure (1)..(728): unsure at all Xaa locations
  Clone ID: TF_OSC900074j.C1.p1.np
RGGERERGEDKVGRRRERRELKIFELLKGKXEASKTCRRLFKRHVYIQNQKSDGAILNLAAHDPIDWPNIISIWKGLIVQKYIQNQHNIGNKVEDMITYLETFLGESAKVLWEQWVEKNPNNYEELKRAGSNPHNFANIVSNIIIAEDPELGYTTLQNERLKEIEKLTLTSWKGIKEFSQHYLYNATTAKQGYNKGIVERYFNKLPDPLGSMIFEEYKKETEGAEINISQAITFVFKQLRKICTGIQAQRSMKHSDYNFCNKIIQIPLSYGEDRPRNKRNHRYQSRNSNNIKTKKRYFLRRSDNRAPFLHKRNVRRYNPKKTYDKTCRCFICNSPDHLSRTCPNKDQKRYSSKYEEQERVLIIDSVNENILVCDDEIKDDESIYSIIETDEIENTNEEYESTDEELDLIDELAGLKIEMMDQLNCEHDWIRGKGDYNIKCAFCIYYPSQDNRVTCSICLKQACAECIKANKQKWRKEIELESDERILSSRVRVLENRINKLEVENLKINYDIKALPENKDIQNTEFKEQVITLKDSNTAKIIQLKDAITNFGNKYIVKLPFKEILGIRIPVKVKLSPKVSYKILALVDTGCTKNIIHDKYFIKCPEIVHTIDDNKAEVSTDMSGIKKIHNQLAHNVEVYINGTKYIIDEITIRNLSMISDDMIIGLRFLQQSVQTTVIHEQGITFIPYQNNVPYISEVRKRGGARIKPDNLEALNLESEERINEYELI

SEQ ID NO: 19464 - protein, 1375 aa, Oryza sativa
  Clone ID: TF_OSC900151j.C1.p8.fg
MDLSRSLFRRIASRDDKSLSCIDKQKGKNEDIDELEDIAEVDKQLERYQRDTLRAIRPQQIYCMGFFENKNGLYRISREVELSVLTKPVELKIVAKEFENGLKYSGYKYIHQGMYIIGIKGMTRKKLGAKVLITLLDKRWDTIDKAALGFLEGDMNENMLITYIAPDLMMPVKEFIDKMSFGFQTKGYEEFKGTNLLVSIEFIGRLTNRSASKYKINVNDVIENMHSKGITFMSPLKISSEERAGEEWKISDLIESKTLSQPENFISYQNSKGNTSIRFINYKPRTTDDLETEASDRNIIDNRRHSVSEFMEKLDQESEIKYYENKLKEINEEYNNSMKCEWPKIRDKELYFYRELARVKKVKKNEDMAVEIFKTQETKIEQIKRKEQDKYDKEEQNLGKILSEEEQWAENERLFLESYEEEINLINEMENIENEIDNTEQYNDFINTLDEVGLHNLDNAMEAMEVDLGTGKRKRYGEGTVKNEGERERPARAAGKWPPDREEFSYNYIPGQYRHMGTKRRDFEKPVKFQNQRSDGAILNLAAHDPIDWPNIISIWKGLIVQKYIQNQHNIGSKVEDMITYLETFLGESAKILWEQWVEKNPNNYEELKRAGSNPHNFANVISNIIIAEDPELGYTTLQNERLKEIEKLTLTSWKGIKEFSQHYLYNATTAKQGYNRGIVERYFNKLPDPLGSMIFEEYKKETEGAEINISQAITFVFKQLRKICTGIQAQRSMKHSDYNFCNKIVQIPLSYGEDKPRSKRIYKHQNRNHNNIRTKKRYFLRRSDNRAPFLHKRNVRRYNPKKTYDKTCRCFICNSPDHLSRTCPNKDQKRYSSKYEEQERVLIIDSVNENILVCDDEIKDDESIYSIIETDEVETINEEYESSDEELDLIDELAGLKVEMMDQLNCEHDWIRGKGDYNIKCAFCIYYPSQENRVTCSICLKQACAECIKANKQKWRKEIELESDEKTLSSRVRVLENRLNKLEVELENLKNNCDIKALPENKDIQNTEFKEQLITLKDSNTAKIIQLREAITNFGNKYIVRLPFKEILGIRIPVKVKLTPKVSYKILALVDTGCTKNIIHDKYFTRCPEIVHTIDDNKAEVSTDMSGIKKIHNQLAYNMEVYINATKYIIDEITIRDLSMINDDMIIGLRFLQQSVQTTVIHEQGITFIPYQNNVPYISEVYINATKYIIDEITIRDLSMINDDMIIGLRFLQESVQTTVIHEQGITFIPYQNNVPYISEVRKRGGVSPKLDNLEVPNLESEERINEYELSENIDNYYISNSNIECIGLQAFAPNWYRDIKSKRDIEKIIQRLEDIQIIGEIPMKYWEKNAIECKINIINPEYIIKTSPIEATPKDIEEFKMHKEERRYGSRNF

SEQ ID NO: 19465 - protein, 1197 aa, Oryza sativa
  Clone ID: TF_OSC900372j.C1.p14.np
MDLSRSLFRRIASRDDKSLSGIVKQKGKNEDIDELEDIAEVDKQLERYQRDTLRAIRPQQIYCMGFFENKNGLYRISREVELSVLTKPVELKIVAKEFENGLKYSGYKYIHQGMYIIGIKGMTRKKLGAKVLITLLDKRWDTIDKAALGFLEGDMNENMLITYIAPDLMMPIKEFIDKMSFGFQTKGYEEFKGTNLLVSIEFIGRLTNRSASKYKINVNDVIENMHSKGITFMSPLKISSEERAGEEWKISDLIESKTLSQPENFISYQNSKGNTSIRFINYKPRTTDDLETEASDRNIIDNRRHSVSEFMEKLDQESEIKYYENKLKEINEEYNNSMKCEWPKIRDKELYFYRELARVKKVKKNEDMAVEIFKNQEQDKHDKEEQNLGKILSEEEQWAENERLFLESYEEEINLINEMENIENEIDNTEQYNFINTLDEVGLHNLDNAMEAMEVDLGTGKRKRYGEGTVKNEGERERPARAAGKWPPDREEFSYNYIPGQYRHMGTKRRDFEKPVKFQNQRSDGAILNLAAHDPIDWPNIISIWKGLIVQKYIQNQHNIGSKVEDMITYLETFLGESAKILWEQWVEKNPNNYEELKRAGSNPHNFANVISNIIIAEDPELGYTTLQNERLKEIEKLTLTSWKGIKEFSQHYLYNATTAKQGYNKGIVERYFNKLPDPLGSMIFEEYKKETEGAEINISQAITFVFKQLRKICTGIQAQRSMKHSDYNFCNKIVQIPLSYGEDKPRSKRIYKHQNRNHNNIRTKKRYFLRRSDNRAPFLHKRNVRRYNPKKTYDKTCRCFICNSPDHLSRTCPNKDQKRYSSKYEEQERVLIIDSVNENILVCDDEIKDDESIYSIIETDEVETINEEYESSDEELDLIDELAGLKVEMMDQLNCEHDWIRGKGDYNIKCAFCIYYPSQENRVTCSICLKQACAECIKANKQKWRKEIELESDEKTLSSRVRVLENRLNKLEVELENLKNNCDIKALPENKDIQNTEFKEQLIILKDSNTAKIIQLRDAITNFGNKYIVRLPFKEILGIRIPVKIKLTPKVSYKILALVDTGCTKNIIHDKYFTRCPEIVHTIDDNKAEVSTDMSGIKKIHNQLAYNMEVYINATKYIIDEITIRDLSMINDDMIIGLRFLQQSVQTTVIHEQGITFIPYQNTVPYISEVRKRGGTSPSPKPDKLDNLEVPNLEYI

SEQ ID NO: 19466 - protein, 1943 aa, Oryza sativa
  Clone ID: TF_OSC100320j.C1.p1.fg
MGREALTYHPADHHSGARRPPSKPQFGSWRDVVKKGRGPAAAEEAAWTEVRRKGSTEHSLRAGDPTSNKHDRAFKPRKEFSNHDRAFNSEKEIPRWLLGRCFKCLGLGHRKLDCKGETRCFHCWYPGHLAWACPERKEVSGGNPGRQSQGRAATEKGAVIAMAGANLGGYQICAATPPQFVEKYRIGEPDSRPERGRVVLSWTSGMERHERYLQELSLMASVLKGRPPVSPAELAEAIELHTGVQQRYFRVEVTRPEDFLISFRNQREKEAVLRCSKALFCNEVPVSFKPWNICCWAEASAFQFFTKISLDGLPPHAWEEEAMHKLVNSLDGQLAELIPAADARCLGLFAWFKNPSDLSHHLDVEIPERPAAGRWREGTSATPPSPPREKPALTYPVIIHVEEVIDPTPLHTPPTSFDDNSDDEDVTRRNTFSCWAGRYDGAGPWPTEVGGGHVYAAAVVGVVDMAAADRVLDRADIVVQDMEAGEVLASQPHSPTLVLQAPGVWFSPQAVQAVEQPGADVGIATPLAAPVVATAKALIVLDDDCSWALVAGGVSPLSPPLQLSLDELTGGELSALGTEKDGDRAELSDEDTMAEVSLVEHGCERPALKATGDALSSAQESRSDRGFESAAKAGEFRVYVRKQAQKKPSHEQPGTEGIGLMGLAGQDLGQADLRRAVAGLGQEMSVGQVVCGEDEPPQAHQEEVAHSDDERPVQETEIESSREALSGEMMLPPPASPSTALARARPTSEGSPANTPLPPEADQILQGFLASVATEPPPSLLGRRPPESVPKSKPCWRNVIPEWFTPWRSPRLQQQGNGARRHSTSKAQKVTMKKMGIIEEEEEADQDTFQQNTTVIDQPLSTQHMKVLAELLDVDVALEEADVPPPDLASLVAAGSKLEVVDLLVIHELCGPDFDDFVALPASHTRGGVIVAWKGSVFRGSQVHLGQWSVTAKLEWIAGNHSCFLTSVYGPQDDNEKILFLEELAEIRGICGEVWLVAGDFNLIAAAADKNNSRVNRRLMNAFRNKINELELKELYLFGRRYTWSSEQQIPTLVKLDRVLVSTEWEDAFPDAHLQALSSSSSDHCALLLSCGETPQGRRRFRFETFWTKLEDFDQVVADSWQQAVESTDPYVILYVKMARLAMSLCSWGQKRISRFRLQLQIANELIFRFDVAQENRLLSPLERRFRAILKGRCLALASLERIRVRQRARISQLREGDANSKYFHMKVNARRRKLFIPVLEYEGQTTTSQEDKIALAKDYFQGILGVSEPNSAELQFNQIFPLAPNLQELEVPFSEEEVWKVIKEMPNEKAPGPDGFTGLFYQRCWQVIKGEVLAALTKFHSGNHQNLDNLNTAVITLLPKKDAPTLIKDYRPISLIHSFSKLATKILASRLAPRMGDLVAENQTAFIRGRSIHENFIFVRGLALQFHRRKKPMILLKLDITKAFDTISWCFLLNLLRNRGFGSRWRSWIAALLLTSETRILLNGHESDSFKPARGLRQGDPLSPLLFVLVMDALQGLLAKATSWGLLAKLDTRRSIPNTSIYADDTIVFLQPIEREATVVNAILQLFGKATGLKTNLSKSALTPIRCDDDVLVGVQQLLGCRVENFPITYLGLPLSLRRPTKAEVQPILDRLSKKVAGWKPKLLSPDGRLRLIKSVLTALPVHFMSVLVLPKWAIKEFNKKCRAFLWKGQEEVNGGHCLVAWDIVCSPKECGGLGVKNLELFGQAMRMKWLARRLEQRGRPWTLINSVPTNDITGLFQSVASFQVGDGKDTDFWRANWLPRGCISVSSPLLFTHLGRTKLTVAEALSQNRWVRDIRGSFSALALSEYFRLWDEIQEVQLQEDAQDSTSWKLTPNRVFCTASVYEMFFAAREFADWWIKVRLCFQTGYRGAFDSLCILICWFVWRERNLRIFEQKARTAAELFSDIKDEVAVWRETNILREVG

SEQ ID NO: 19467 - protein, 323 aa, Oryza sativa
  Clone ID: TF_OSC103j.C1.p1.fg
MKDTESIDEFAGKISGLANKLSDLGVTMDDDEQVKKLLDSVPDKFLHVIAAIEQFSDLDSMPFDEAIGRLKAYEERIRKRDDKNGEHLLFTSGDTSGGRSRVKKPDRSKTMCYYCQELGHFAYECPEKKKKKEIALLAAASSFAQGSSVWQQRIRAKRRDSNNWYQSQFMPKILRFNKMAIVEHSASRSMREGIVSLPYPVLTSTNYSTWAIKMEANMEAQGIWDAIEPAADEAVDIKKDKQARACLFGAVPEDVLQQIAKKKTAKEVWESLKTRFLGVERVKKARVQTLKSDFKALHMKDTESIDEFAGKISGLANKLSDLG

SEQ ID NO: 19468 - protein, 947 aa, Oryza sativa
  Clone ID: TF_OSC29911j.C1.p3.fg
MVGPLPATQPEGQPITWAHFTAAFRRTHVPAGVMALKKREFRELKQGNRSVMEYLHEFNNLARYAPEDVREDEEKQEKFLAGMDPELSVPLVDKSIRLEAKHKELESHKRRLANFRNQQGANQRIRYTNPYPGGSSSQPQQQPRSALRPQFVVRVPQPQQQQNQQGAHAPRPPAPAVQPGQGRRDAQGQQCLCFNCFKPGHFADKCPKPRRQQGQAPPRPNNGGKDVTRGRVNHVTAEDVLRTPDIIVGTFLIHSIPATILFDSGASHSFISVPFMGRNQLGVERLRNPLLITTPGGVMTAKYYSPAVPIEIQGIAFPSDLILLDTKNLDVILGMNWLAQFQGVVDCARRTVTVYRGPDQPVVFFAPPTSAGSSVLHQLGLPEIPIVSEFGDVFPEELPGMPPKREIEFQIDLAPGTAPLYKRPYRMAANELAEPSTSPWGAPVIFVEKKEKTKRMCVDYRALNEVTIKKKYPLPRIDDLFDQLKGATVFSKIDLRSGYHQLRIREEDIPKTAFTTQYGLYEFTVMLFGLTNAPAFFMNLMNKVFMEYLDKFVVVFIDDILVYSQSEEDHQQHLRLVLGKLREHQLYAKLSKCEFWLPEVKFLGHVISAKGVVVDPETLLKKEEKFVWSPQCEKAFQTLKEKLVSLLVLILPDTRKDFLVYCDASRQGLGCVLMQKGHVVAYASRQLRPYEGNYPTHDLELAAVVHALKIRRQYLIGNRCEIYTDHKSLKYIFTQSDLNLRQRRWLELIKDYDVGIHYHPGKANVVADTLSRKSHCNTLGIRGIPPELNQQMEALNLSIVGRGFLATLEAKPTLLDRIREAQKNDPDIHGILKNMKQRKAAGFTEDEHGTLWNGNRVCVPDDKELKRLILQEAHESPYSIHPGSTKMYLDLKEKYWWVSMKRVSKQSTNDRPDFSNLSKYQNGNGMKLGWISSPDFQKPKADMILYG

SEQ ID NO: 19469 - protein, 367 aa, Oryza sativa
  Clone ID: TF_OSC403247j.C1.p39.fg
MALFVSAGEDVASVHVGVGQPDVQHAGPISPSAGLTIVDSSTPGTAATAGGGVATTSSSRRGFAQGSSVWQQRIRAKRRDSNNWYQSQFMPKILRFNKMAIVEHSASRSMREGIVSLPYPVLTSTNYSTWAIKMEANMEAQGIWDAIEPAADEAVDIKKDKQARACLFGAVPEDVLQQIAKKKTAKEVWESLKTRFLGVERVKKARVQTLKSDFKALHMKDTESIDEFAGKISGLANKLSDLGVTMDDDEQVKKLLDSVPDKFLHVIAAIEQFSDLDSMPFDEAIGRLKAYEERIRKRDDKNGEHLLFTSGDTSGGRSRVKKPDRSKTMCYYCQELGHFAYECPEKKKKKEIALLAAASSDEEPTLL

SEQ ID NO: 19470 - protein, 403 aa, Oryza sativa
  Clone ID: TF_OSC23015j.C1.p1.fg
MFNREKGKNVSGYASSNSSFQFNPPLASRELTRAHPWSIPSMLLSSQLPLVGSQDQNQYVFDRAFATQVNELPMPEEDVPFCHDCREQGHYALNCPWVYVKEAPSFGLAGQTSLNQPPRTKSSLQPSVQSEEPNGDNPLNPRKCFPPSLSHHVGSRTKQAKGKKSKNQKRKAPMRTEEEVRKMTITSTEWPPAGITIPRRQRGNTFRGARQLTQHLLSHGGRVSDSEGSDQVSSDYEDESPRHLGEEEMESKACPRCGEIGHVASMCFTLCPHCEEDHPPGECPTRKVHVFSAQARSEIFNSVSDATRSEKCKHRLPVDNLSEVDSEDMNHEKFWNGSITALPQPSLSQPKGAPWSKSGEGKIPSATGGQAKQFRVVKFCWKFVKTRRKKSDKKRRPPNLSSC

SEQ ID NO: 19471 - protein, 232 aa, Oryza sativa
  Clone ID: TF_OSC25610j.C1.p1.np
HKALGSPKPRLANFHIHREANQRIRYPNPFPEGSSSQQQQQQQPRSAPRLHFVVRVPQPQHKQSQQGTRAPRPLTPAAQSGQGRRDVQGPQRLCFTCFEPGHFADKCPKQRRQQGQAPPRSNNGGKDVIRGRVNHVTAEDVLTTPDVIVGTFLIHSIPATILFDSGASHSFISVPFVGRNQLGVERLRNPLLITTPGGVMTAKYYSPAVPIEIQGIPFPSDLVRLITKNIAQ

SEQ ID NO: 19472 - protein, 1750 aa, Oryza sativa
  Clone ID: TF_OSC31864j.C1.p2.fg
MSWHRAGVLLLGAQSCLPVLGVPAVGGIGSVLLSMARMGWKLCHVFRLYTVVMAGSVSRRGLDMTGFVLELRGMCVVLGYPHGVDYQGRPLPEQEGDDAEPHAAWEVTAVILTGSPERTSLAVTAGGDSFPAACQSAALLAIGTLHQGYPDELQHSPYRYHPRRGGARDFATFRDASSEDDATIMHLARMVEAYDAARIDFHQMVRRGMVENNMKILELRQENLQLKKDLDAVEAQLHQLKITQGEVCRPKCRRVCRSQKITARKSTSRPELVRQSLAWTCFVETPRAEPAPVVPQEGEASGVGSMEDALLLTFRPGPSQRKSAATGEGNQSEGSNHNHQGSPPPLHLPLPPPPPDTNAILTQILAQQANMMTAFLHHLQNPPQQNAPPPPPQHSKLAEFLRIRPPTFSSSNNPVDALDWLHAVGKKLDTVQCSDEEKVIFAAHQLQGPASLWWDHFQATQPEGQPITWARFTAAFRRTHVPAGVVALKKREFRELKQGNRSVMEYLHEFNNLARYAPRFSGDYPDFQRLVDKSIRLEDKHKELESHKRRLANFRNQQGANQRVRYTNPYPGGSSSQQEQQQQQPRSAPRPQFVVRVPQPQQQQSQQGTRAPRPPMPTVQPGQSRRDAQGPQRLCFNCFERGHFADKCPKLRRQQGQAPPRSNNGGKDVIRGRVNHVTAEDVLTTPDVIVGTFLIHSIPATILFDSGASHSFISVPFVGRNQLGVERLRNPLLITTPGGVMTAKYYSPAVPIEIQGIPFPSDLILLDTKSLDVILGMNWLAQFQGVVDCARRTVTLYPGPEQPVVFFAPPTSVSSSELHQIGLSEIPIVREFGDVFPEELPGMPPKREIEFRIDLAPGTTPLYKRPYRMAANELAEVKKQLEELKEKGYIRPSTSPWGAPVIFVEKKDKTKRMCVDYRALNEVTIKNKYPLPRIDDLFDQLKGATVFSKIDLRSGYHQLRIREEDIPKTAFTTRYGLYEFTVMSFGLTNAPAFFMNLMNKVFMEYLDKFVVVFIDDILVYSQSEEDHQHHLRLVLGKLREHQLYAKLSKCEFWLSEVKFLGHVISAKGVAVDPKTVTAVTDWKQPKTVTQIRSFLGLAGYYRRFIENFSKIARPMTQLLKKEEKFVWSPQCEKAFQTLKEKLVSSPVLILPDTRKDFMVYCDASRQGLGCVLMQDGHVVAYASRQLRPHEGNYPTHDLELAAVVHALKIWRHYLIGNRCEIYTDHKSLKYIFTQSDLNLRQRRWLELIKDYDVGIHYHPGKANVVADALSRKSHCNTLNVRGFPPELNQQMEALNLSVVSRGFLAALEAKPTLLDQIREAQKNDPDMRGLLKNMKQGKAAGFTEDEHGTLWNGNRVCVPDVREHKQLILQEAHESPYSIHPGSTKMYLDLKEKYWWVSMKREIAEFVALCDVCQRVKAEHQRPAGLLQPLQVPEWKWDEIGMDFITGLPKTQGGYDSIWVVVDRLTKVARFIPVKTTYGGNKLAELYFARIVSLHGVPKKIVSDRGSQFTSHFWKKLQEELGTRLNFSTAYHPQTDGQTERLNQILEDMLRACVLDFGKTWDKSLPYAEFSYNNSYQASIQMAPYEALYGRKCRTPLLWDQVGESQVFGTDILREAEAKTKGKLAPRFVGPFRIIARREEVAYQLELPASLGNGHDVFHVSQLKKCLRVPSEQADSEQIEVREDLTYVERPVKILDTMERRTRNRVIRFCKVQWSNHAEEEATWEREDELKAAHPDLFASSSESRGRDSV

SEQ ID NO: 19473 - protein, 1112 aa, Oryza sativa
  Clone ID: TF_OSC400086j.C1.p12.fg
MSSRCDRLLPLHRHALLRESSFDFSASSSAAQRVEWIDVGHLYAEIIGLLDKIMAAPAPSSFNLRSILEKEKLTGTNFMDWYHNLRIVLRKEHKEFVLTELFPANLPNNAPAAQRREHEKRCNDYLDISCLMLATMSPELQRQYEALDAHTIITGLCNMFEDQARAERFNTSKSLFACRLAEGNLVSPHVIKMIGYTESLDNLGFPLSRELATDLILQSLPPSFEPFIINFNMNNLNRTLAELHGMLKTAEESIKKNPNHVMVMHKRKPNNKKSGQKRKLNSDEFTSTSNSKTKVQKTGPAKDAECFFCKEIGHWKRNCKKYLEQLKQKQHDGKSSTSGINVIEIILATSSTDSWVFDTGSVAHICKSLQGLKKSRSLARGEVDIRVGNGARVAAIAVGTMPLSLPSGLVLELKNCYCIPALCKNVISASCSQAEGYGFRSVDNGCSVYYNDIFYFHAPMMNGLYIVNLDGCSVYNIIAKRQHPNDLNPTFIWHCRLGHINEKRMEKLHRDGLLHSFDFESFETCKSCLLGKMTKAPFTGQSERASEPLGLVHIDVCGPMSSTARGGFRYFITFTDDFSRYGYVYLMRHKSESFGKFKEFQNEVQNHLGKTIKYLRSDRGGEYLSLEFGNHLKECGIVPQVTPLGTPQWNGVSERRNRTLLDMVRSMMSQTDLPLSFWGYALETAAFTLNRVPSKSVDKTPYEIWTGKRPILSFLKIWGCELWKHRFYECPKGYGVHLRVWNLVDPPDGVKAIECKWVFKKKTDVDGNVHIYKARLMAKGFIQIQGVDYDETFSPVAMLNSIRIVLAIAAYFDYEIWQMDVKTAFLNGNLDEDVYMTQPKGFVDPQSTKKICKLQKSIYGLKQASRSWNIRFDEVVKALGFVKHEEEPCVYKKISGSALVFLILYVDDILLIGNDIPMLESVKTSLKNSFSMKDLGEAAYILGIRIYRDRSKRLIGLSQSTYIDKVLKRFNMQDSKKSFLPMSHGINLGKNQCPQTTDERNKMNVSYALSVTSRYQSDPGESHWIAVKNILKYLRRTKDMFLVYGGQEELVVNGYTDASFQTDKDDFRSQSGFVFCLNGGAVSWKSSKQDTVVDSTTEAEYIAASKAAKEAV

SEQ ID NO: 19474 - protein, 710 aa, Oryza sativa
  Clone ID: TF_OSC400850j.C1.p22.fg
MASSSSSIAATNPLVGIQVSEKLTKQNYALWSAQVLTALRGARLEGFISGKTTPPPAEIEKKEGDKKEGEKTIKIANPAVDEWFATDQQVLGFLFSSLSREILSQVAGATTAAQAWQAISDMFASKSRAGLINMRLALTSTQKGTMSVTEYVAKMRAIADELAAAGKPIDQDDLIAYIINGLDANFDPVVEALVARVEPITVQEMYSHLLNFENKIRLRQAFLTASTNAANRNNVTRGGRGGMPRGRGGRGGGGRGGNGGRGNNGGGRGDNRPTCQVCNKRGHVASDCWHRFDETYVPDEKIGGAATHAYGIDTNWYVDTGATDHITSQLDKLTTKEKYQGTDQIHTASGEEVFEKFHEFQNMVERQFNRKIVTMQTDWGGRVYVSRDVTFDEHEFPFSHLHSNAGARLRAEISLLPEHLLSHAYDQGGEKHSTDHMHEYILPVSTNSQDLSPVFTEIGTGGIIPGTSDGLHPENDDQAGKTASDQPSTSAVLPLQPQQSLEQQPDGTTSSHHPASPAHASPPRQPAVDVSAGTHHDASGSSASDEPVATTAPPEVTLRPKTRLQSGIRKEKIYTDGTVKYSCFTSSGEPQNLNEALGDKNWKETMDAEYMALMKNKTWHLVPTKKGINIINCKWVYKIKRKTDGSLDRYKARLVAKSFKQRYGIDYEDTFRPVVKAATIRTILSIAVSRGWSLRQLDVQNAFLHGVLEE

SEQ ID NO: 19475 - protein, 1716 aa, Oryza sativa
  Clone ID: TF_OSC24701j.C1.p1.fg
MAQKYSWQSPRSDDAEKGSAEPPSSTEPLAGPTSPGSRLFLARQEQQQRGVGVPVAKAQHPCGSCSRTANVVSFPKSKFILLSSKDREPPLLHQVVSELKLLGGSGEHPQHSPRTRGIIQHFERQVREHAEGLDEDVRVANDRLGQLEAAQIDTNSKLSSLERSLVAVNTSLAGILNTLERMGQDGHDGSARRNHNGHDANSSIAAREELEYVADTEHDEEVLGRPQRQQRRQRHGLGAPPRREVRDNDDSLGKIKFTIPCFDGKYDPDAYLTWELAIDQKFACHDFPENKCVRAATSEFTDFASIWWSEFVRSNPNNTPQTWDAMKRVMRARFVPSYHARDLLHKLQQLRQGNKSVEEYYQALQTGMLRCGLVENDDAGMARFMGGLNREIQDILTYKEYNSINHLFHLACKAEREVQGRRASFRTNISAGRASSWTSSNAAAPSTRAAAPSSSSNKLRPSTTNSTPCPSEPTRGVAATPSKTSSSVASSGRTRDIQCLRCKGYGHVRKDCPSTRVMIVRADGGYSSASDLDGETYALLATNNAREGDAPHQDEEHIGAEAAEHYESLVVQRVLSAQMERAEQNQRHTLFQTKCVIKERSCRVIIDGGSCNNLASAEMVEKLALSTQPHPQPYYIQWLNSSGKVKVTRLVRVHFAIGSYHDSINCDVVPMQACSMLLGRPWQFDKDSLHFGKSNQYSFVHNGKKLVLHPMSPEVILKDELARASKQKNQEHTRSEHLIAANELEKHKKKPTNSVQNNKNEIKLKGSCFIATKSDLDEVDTDTVVCYALVCKETLFPIEDTPISLPPPVTNLLQEYADIFPKEVPPGLPPIRGIEHQIDLIPGASLPNRAPYRTNPEETKEIQRQVQELLDKGYVRESLSPCSVPVLLVPKKDGSWRMCVDCRAINNITIRYRHPIPRLDDMLDELSGSLVFSKIDLRSGYHQIRMKLGDEWKTAFKTKFGLYEWLVMPFGLTNAPSTFMRLMNEVLRAFIGRFVVVYFDDILIYSRSIEDHHGHLRAVFDALRDARLFGNLEKCTFCTDRVSFLSYVVTPQGIEVDQAKVEAIHNWPVPTTITQVRSFLGLAGFYRRFVKDFSTIAAPLHELTKRNVTFTWAAAQRNAFDTLKDKLTHAPLLQLPDFNKTFEHECDASGIGLGGVLLQEGKPVAYFSEKLSGPSLNYSTYDKELFALVRTLETWQHYLWPKEFVIHSDHESLKHIRSQAKLNRRHAKWVEFIESFPYVIKHKKGKENVIADALSRRYAMLSQLDFKIFGLETIKEQYAHDDDFKNVLLNCKEGRTWNKFVLTNGFVFRANKLCIPASSVRMLLLQEAHGGGLMGHFGVKKTEDILADHFFWPKMRRDVERFVARCTTCQKAKSRLNPHGLYMPLPVPSVPWEDISMDFVLGLPRTKKGRDSIFVVVDRFSKMAHFIPCHKSDDATHVADLFFREIVRLHGVPNTIVSDRDTKFLSHFWRTLWAKLGTKFLFSTTCHPQTDGQTEVVNRTLSTMLRAVLKKNIKMWEECLPHVEFAYNRSQHSTTKKCPFEIVYGLLPRAPIDLLPHPTSERVNFDAKYRAELMLKLHETTKENIERMNIKYKLAGSKGKKHVAFEPGDLVWLHLRKDRFPNLRKSKLLPRADGPFKVLQKINDNAYKLELPADFGVSPTFNIADLKPYLGEEDELESRTTQMQEGEDDEDILSNDTSTPIAQQGPMTRARAHELN

SEQ ID NO: 19476 - protein, 1116 aa, Oryza sativa
  Clone ID: TF_OSC27996j.C1.p2.fg
MPHGRWWDSINPIPASKSKKQDEQFARFVIQKIHIKVPLLDAMQVPTYARYLKDILNNKRPLPTTEVVKLTEQCSNLILHKLPEKKKDPGCPTITCSIGAQQFDQTWCDLGASVSVMPKDVFDKLNFTVLEPTPMRLQLADSSVRYPAGIAENVPVKIRDFFIPVDFVVLDMDMGKEMPLILGRPFLSTAGANIDVGTGSIRFHINGKEEKFEFQPRTEQCSMNFLEKETTMPRNRYWKTPVKSPVPAKKSDQPAQKKPPSAPKSKKGWENDHNDEDIPSNDTTTPIAQQGPMTRARARELNYQVQGCSWHGKNSNNVESVYRLLRRSTPVVVVVGPPMSYPSPNRSLSSSHRKIGNPRCCIKWYESSSCSDRAVVGSGGSGEHPQHSPRTRGIIQHFERQVREHAEGLDEDVRVANDRLGQLEAAQIDTNSKLSSLEMSLVAVNTSLAGILNTLERMGQDGHDGSARRNHMAMMLIAASQQGKNWSTLLTLSIMRRYLVVHKDNSTGSAMAWALHHGGSEFVRSNPNNTPQTWDAMKRVMRARFVPSYHARDLLHKLQQLRQGNKSVEEYYQALQTGMLRCGLVENDDAGMARFMGGLNREIQDILAYKEYNSINRLFHLACKAEREVQGRRASFRTNISAGCASSWTSPNAAAPSTRAAAPSSSSNKLRPSTTNSTPCPSEPTRGVAATPSKSSSSVASSGRTRDIQCLRCKGYGHVRKDCPSTRVMIVRADGGYSSASDLDEETYALLATNNAGEGDAPHQDEEHIRAEAAEHYESLVVQRVLSAQMERAEQNQRHTLFQTKCVIKERSCRVIIDGGSCNNLASAEMVEKLSLSTQPHPQPYYIQWLNSSGKEHTRSEHLIAANELEKHKKKPTNSVQNNKNEIKLKGSCFIATKSDLDEVDTDTVVCYALVCKETLFPIEDTPISLPPPVTNLLQEYADIFPKEVPPGLPPIRGIEHQIDLIPGASLPNRAPYRTNPEETKENQRQVDEDIPSNDTTTPIAQQGPMTRAQARELNYQVQGCSWHGKNSNNVESVYRLLRRNTPVVVVVGPPTSYPSPNRSLSSSHRKIGNPRCCITSARVTRQGSCSTRLGRTPHGPHLGRGPKRSYKPKGP

SEQ ID NO: 19477 - protein, 1452 aa, Oryza sativa
  Clone ID: TF_OSC31043j.C1.p2.fg
MTGGSGEHPQHSPRTRGIIQHFERQVREHAEGLDEDVRVANDRLGQLEAAQIDTNSKLSSLERSLVAVNTSLAGILNTLERMGQDGHDGSARRNHNGHDANSSIAAREELEYAADTEHDEEVLGRPQRQQRRQRHGMGAPPRQEVRDNDDSLGKIKFTIPCFDEKYDPDAYLTWELAIDQKFACHDFPENKRVRAATSEFTDFASIWWSEFVRSNPNNTPQTWDAMKRVMRARFVPSYHARDLLHKLQQLRQGNKSVEEYYQALQTGMLRCGLVENDDAGMARFMGGLNREIQDILAYKEYNSINRLFHLACKAEREVQGRRASFRTNISAGRASSWTSSNVAAPSTRAAAPSSSNNKLRPSTTNSTPCPSEPTRGVAATPSKSSSSVASSGRTRDIQCLRCKGYGHVRKDCPSTRVMIVRADGGYSSASDLDEETYALLATNNAGKGDAPHQDEEHIGAEAAEHYESLVVQRVLSAQMERAEQNQRHTLFQTKCVIKERSCRVIIDRGSCNNLASAEMVEKLALSTQPHPQPYYIQWLNSSGKEHTRSEHLIAANELEKHKKKPTNSVQNNKNEIKLKGSCFIATKSDLDEVDTDTVVCYALEYADIFPKEVPPGLPPIRGIEHQIDLIPGASLPNRAPYRTNPEETKEIQRQVQELLDKGYVRESLSPCSIPVLLVPKKDGSWRMCVDCRAINNITIRYRHPIPRLDDMLDELSGSLVFSKIDLRSGYHQIRMKLGDEWKTAFKTKFGLYEWLVMPFGLTNAPSTFIRLMNEVLRAFIGRFVVVYFDDILIYSRSIEDHHGHLRAVFDALRDERLFGNLEKCTFCTDRVSFLGYVVTPQGIEVDQAKVEAIHSWPVPTTITQVRSFLGLAGFYRRFVKDFSTIAAPLHELTKRNVTFTWAAAQRNAFDTLKDKLTHAPLLQLPDFNKTFELECDASGIGLGGVLLQEGKPIEYFSEKLSGPSLNYSTYDKELFALVRTLETWQHYLWPKEFVIHSDHESLKHIRSQAKLNRRHAKWVEFIESFPYVIKHKKGKENVIADALSRRYAMLSQLDFKIFGLETIKEQYAHDDDFKDVLLNCKEGRTWNKFVLTNGFVFRANKLCIPASSVRMLLLQEAHGGGLMGHFGVKKTEDILADHFFWPKMRRDVERAVLKKNIKMWEECLPHVEFAYNRSQHSTTKKCPFEIVYGLLPRAPIDLLPLPTSERVNFDAKYHAELMLKLHETTKENIERMNIKYKLAGSKGKKHVAFEPGDLVWLHLRKDRFPNLRKSKLLPRADGPFKVLQKINDNTYKLELPADFGVSPTFNIADLKPYLGEEDELESRTTQMQEGEDDEDIPSNDTTTPIAQQGPMTRARARELNYQVQGCSWHGKNSNNVESVYRLLRRSTPVAVVVGPPTSYPSPNQSLSSSHRTIRNPRCCISLSSRHNRSSLYVFYFLLSPFSRTCISNSIIV

SEQ ID NO: 19478 - protein, 1708 aa, Oryza sativa
  Clone ID: TF_OSC400192j.C1.p21.fg
MTGGSGEHPQHSPRTRGIIQHFERQVREHAEGLDEDVRVANDRLGQLEAAQIDTNSKLSSLERSLVAVNTSLAGILNTLERMGQDGHDGSARRNHNGHDANSSIAAREELEYAADTEHDEEVLGRPQRQQRRQRHGMGAPPRQEVRDNDDSLGKIKFTIPCFDEKYDPDAYLTWELAIDQKFACHDFPENKRVRAATSEFTDFASIWWSEFVRSNPNNTPQTWDAMKRVMRARFVPSYHARDLLHKLQQLRQGNKSVEEYYQALQTGMLRCGLVENDDAGMARFMGGLNREIQDILAYKEYNSINRLFHLACKAEREVQGRRASFRTNISAGRASSWTSSNVAAPSTRAAAPSSSNNKLRPSTTNSTPCPSEPTRGVAATPSKSSSSVASSGRTRDIQCLRCKGYGHVRKDCPSTRVMIVRADGGYSSASDLDEETYALLATNNAGKGDAPHQDEEHIGAEAAEHYESLVVQRVLSAQMERAEQNQRHTLFQTKCVIKERSCRVIIDRGSCNNLASAEMVEKLALSTQPHPQPYYIQWLNSSGKVKVTRLVRVHFAIGSYHDSINCDVVPMQACSIFLGRPWQFDKDSLHFGKSNQYSFVHNGKKLVLHPMSPEVILKDELARASKQKNQEHTRSEHLIAANELEKHKKKPTNSVQNNKNEIKLKGSCFIATKSDLDEVDTDTVVCYALVCKETLFPIEDTPISLPPPVTNLLQEYADIFPKEVPPGLPPIRGIEHQIDLIPGASLPNRAPYRTNPEETKEIQRQVQELLDKGYVRESLSPCSIPVLLVPKKDGSWRMCVDCRAINNITIRYRHPIPRLDDMLDELSGSLVFSKIDLRSGYHQIRMKLGDEWKTAFKTKFGLYEWLVMPFGLTNAPSTFIRLMNEVLRAFIGRFVVVYFDDILIYSRSIEDHHGHLRAVFDALRDERLFGNLEKCTFCTDRVSFLGYVVTPQGIEVDQAKVEAIHSWPVPTTITQVRSFLGLAGFYRRFVKDFSTIAAPLHELTKRNVTFTWAAAQRNAFDTLKDKLTHAPLLQLPDFNKTFELECDASGIGLGGVLLQEGKPIEYFSEKLSGPSLNYSTYDKELFALVRTLETWQHYLWPKEFVIHSDHESLKHIRSQAKLNRRHAKWVEFIESFPYVIKHKKGKENVIADALSRRYAMLSQLDFKIFGLETIKEQYAHDDDFKDVLLNCKEGRTWNKFVLTNGFVFRANKLCIPASSVRMLLLQEAHGGGLMGHFGVKKTEDILADHFFWPKMRRDVERFVARCTTCQKAKLRLNPHGLYMPLPVPSVPWEDISMDFVLGLPRTKKGRDSIFVVVDRFSKMAHFIPCHKSDDATHVADLFFREIVRLHGVPNTIVSDRDTKFLSHFWRTLWAKLGTKLLFSTTCHPQTDGQTEVVNRTLSTMLRAVLKKNIKMWEECLPHVEFAYNRSQHSTTKKCPFEIVYGLLPRAPIDLLPLPTSERVNFDAKYHAELMLKLHETTKENIERMNIKYKLAGSKGKKHVAFEPGDLVWLHLRKDRFPNLRKSKLLPRADGPFKVLQKINDNTYKLELPADFGVSPTFNIADLKPYLGEEDELESRTTQMQEGEDDEDIPSNDTTTPIAQQGPMTRARARELNYQVQGCSWHGKNSNNVESVYRLLRRSTPVAVVVGPPTSYPSPNQSLSSSHRTIRNPRCCISLSSRHNRSSLYVFYFLLSPFSRTCISNSIIV

SEQ ID NO: 19479 - protein, 353 aa, Oryza sativa
  Clone ID: TF_OSC400283j.C1.p30.fg
MDADKWDEMKAQAAATIRLSLLDSVMYQVMDEKTPKEIWDKLASLYMSKSLTSKLYLKQQSYGLQMQEESDLRKHVDIFNQLVVDLRKLDVKLDDEDKAIILLCSLPPSYEHLRRSKKNEATEASQAESLLVKAKHDYEAGVSKSKEKGARCYKCHEFGHIRRICPLLKKRKGGIASLAARGDDSDSSSHEILTVSNEKSGEAWMLDSASSYHVTSKREWFSSYKSGDFGVVYLGDDTSYRVVGVGDVKFKMYDGNEVLLSDVRHMPGLRKSLISLGSLHETGWLYQVDSDRKTMNIMKDGKTVMTCEMTSSCLYKLQGSVVAGGVMEDGYVGVAVHDPEGGEPGVGSSGGSA

SEQ ID NO: 19480 - protein, 1699 aa, Oryza sativa
  Clone ID: TF_OSC400488j.C1.p2.fg
MSWHRAGVLLLGAQSCLPVPGVPAVGGIGSVLLSMARMGWRLCHVFCPYTVVMAGSINRGGLDLTGFVLELRGMCVVLGYPHGVDYQGKQLSEQEGDDAEPHAAWEVTAVILTGSPERTSLAVTAGGDSFSAACQNAALLTIGTLHQRYPDELQHSPYRYHPRRGGARDYATFRDASSEDDATIMHLARMVEAYDAARIDFHQMVRRGLVENNMKILELRQENLQLKKDLDAVEAQLRQLKIAQGEVCRPKRRRVCRSQKITAHKSTSRPELVRQSLAWTCFVETPRAEPAPVVPQEDGASGVGSTDAHLPSWPIAAVDKQLVGLRMVTTRKNAATGDGSHPEGSNHNHQGNPPSPPPPPPPPPPDTNAILTQILAQQANMMAAFLHHIQNPPQHNAPPPPPQHSKLAEFLRIRPPTFSSSNNPVDALDWLHAVGKKLDTVQCSDEEKVIFAAHQLQGPASLWWDHFKATQPEGQPITWARFTAAFRRTHVPAGVMALKKREFRELKQSNRSVMEYLHEFNNLARYAPEDVREDEEKQEKFLAGMDPELSVRLVSGDYPDFQRLVDKSIRLEAKHKELESHKRRLASFRNQQGANQRVRYTNPYPGGSSSQQQQQQQQPRSAPRPQFVVRVPQPQQQQSQQGTRAPRPPTPAVQPGQGRRDVQGPQCLCFNCFEPGHFADKCPKPRRQQGQAPPRSNNGGKDVIRGRVNHVTAEDVLTTPDVIVGTFLIHSIPATILFDSGASHSFISMPFVGRNQLGVERLRNPLLITTPGGVMTAKYYSPAVPIEIQGIPFPSDLILLDTKNLDVILGMNWLAQFQGVVDCARRTVTLYRGPEQPVVFFAPPTSVRSSELHQIGLSEIPIVREFGDVFPEELPGMPPKREIEFRIDLAPGTTPLYKRPYRMAANELAEVKKQLEELKEKGYIRPSTSPWGAPVIFVEKKDKTKRMCVDYRALNEVTIKNKYPLPRIDDLFDQLKGATVFSKIDLRSGYHQLRIREEDIPKTAFTTRYGLYEFTEDHQHHLRLVLGKLREHQLYAKLSKCEFWLSEVKILGHVISAKGVAVDPETVTAVTDWKQPKTVTQIRSFLGLAGYYWRFIENFSKIARPMTQLLKKEEKFDGHVVAYASRQLRPHEGNYPTHDLELAAVVHALKIWRHYLIGNRCEIYTDHKSLKYIFTQSDLNLRQRRWLELIKDYDVGIHYHPGKANVVADALSRKSHCNTLNVRGIPPELSQQMEALNLSIVGRGFLAALEAKPTLLDQIREAQKNDPDMHGLLKNMKQDKAAGFTEDEHGTLWNGKRVCVPDNRELKQLILQRVKAEHQRPAGLLQPLQVPEWKWDEIGMDFITGLPKTQGGYDSIWVVVDRLTKVARFIPVKTTYGGNKLAELYFARIVSLHGVPKKIVSDRGSQFTSHFWKKLQEELGTRLNFSTTYHLQTDGQTESLNQILKDMLRACVLDFGKTWDKSLPYAEFSYNNSYQASIQMAPYEALYGRKCRTPLLWDQVGESQVFGTDILREAEAKVRIIRDNLKVAQSRQKSYADNQRRNQEFAVDDFVYLRVMPLRGVHRFQTKGKLAPRFVGPFRIIARRGEVAYQLELAASLGNVHDVFHVSQLKKCLRVPSEQADSEQIEVREDLTYVERPVKILDTMERRTRNRIIRFCKVQWSNHAEEEATWEREDELKAAHPNLFASSSESRGRDSVYGG

SEQ ID NO: 19481 - protein, 1170 aa, Oryza sativa
  Clone ID: TF_OSC400798j.C1.p4.fg
MTRARARELNYQDILAYKEYNSINRLFHLACKAEREVQGRRASFRTNISAGCASSWTSSNAAAPSTRAAAPSSSSNKLRPSTTNSTPRPSEPTRGVAATPSKSSSSVASSGRTRDIQCLRCKGYGHVRKDCPSTRVMIVRADGGYSSASDLDEETYALLATNNAGEGDAPHQDEEHIRAEAAEHYESLVVQRVLSAQMERAEQNQRHTLFQTKCVIKERSCRVIIDGGSCNNLASAEMVEKLALSTQPHPQPYYIQWLNSSGKEHTRSEHLIAANELEKHKKKPTNSVQNNKNEIKLKGSCFIATKSDLDEVDTDTVVCYALVCKETLFPIEDTPISLPPPVTNLLQEYADIFPKEVPPGLPPIRGIEHQIDLIPGASLPNRAPYRTNPEETKEIQRQMQELLDKGYVRESLSPCSVPVLLVPKKYGSWRMCVDCRAINNITIRYRHPIPRLDDMLDELSGSLVFSKIDLRSGYHQIRMKLGDEWKTAFKTKFGLYEWLVMPFGLTNAPSTFMRLMNEVLRAFIGRFVVVYFDDILIYSRSIEDHHGHLRAVFDALRDARLFGNLEKCTFCTDRVSFLGYVVTPQGIEVDQAKVEAIHSWPVPTTITQVRSFLGLAGFYRCFVKDFSTIAAPLHELTKRNVTFTWAATQRNAFDTLKDKLTHAPLLQLPDFNKTLELECDASGIGLGGVLLQEGKPVAYFSEKLSGPSLNYSTYDKELFALVRTLETWQHYLWPKEFVIHSDHESLKHIRSQAKLNRRHAKWVEFIESFPYVIKHKKGKENVIADALSRRYAMLSQLDFKIFGLETIKEQYAHDDDFKDVLLNCKEGRTWNKFVLTNGFVFRANKLCIPASSVRMLLLQEAHGGGLMGHFGVKKTEDILADHFFWPKMRRDVERAVLKKNIKMWEECLPHVEFAYNRSQHSTTKKCPFEIVYGLLPRAPIDLLPLPTSERVNFDAKYRAELMLKLHETTKENIERMNIKYKLAGSKGKKHVAFEPGDLVWLHLRKDRFPNLRKSKLLPRADGPFKVLQKINDNAYKLELPADFGVSPTFNIADLKPYLGEEDELESRTTQMQEGEDDEDIPSNDTTTPIAQQGPMTRARARELNYQVQGCSWHGKNSNNVESVYRLLRRSTPVVVVVGPPTSYPSPNRSLSSSHRKIGNPRCCITARITK

SEQ ID NO: 19482 - protein, 1279 aa, Oryza sativa
  Clone ID: TF_OSC401314j.C1.p4.fg
MTGGSGEHPQHSPRTRGIIQHFERQVREHAEGLDEDVRVANDRLGQLEAAQIDTNSKLSSLERSLVAVNTSLAGILNTLERMGQDGHDGSARHNHNGHDTNSSIAAREELEYAADTEHDEELLGRPQRQQRRQRHGMGAPPRREVRDNDDSLGKIKFTIPCFDGKYDPDAYLTWELAIDQKFACHDFPENKRVRAATSEFTDFASIWWSEFVRSNPNNTPQTWDAMKRVMRARFVPSYHARDLLHKLQQLRQGNKSVEEYYQALQTGMLRCGLVENDDAGRASSWTPSNTAAPSTRAAAPSSSSNKLRPSTTNSTPCPSEPTRGVAATPSKSSSSVASLGRTRDIQCLRCKGYGHVRKDCPSTRVMIVRADGGYSSASDLDEETYALLATNNTGEGDAPHQDEEHIGAEAAEHYESLVVQRVLSAQMERAEQNQRHTLFQTKCVIKERSCRVIIYGGSCNNLASAEMVEKLALSTQPHPQPYYIQWLNSSGKEYADIFSKEVPPGLPPIRGIEHQIDLIPGASLPNRAPYRTNPEETKEIQRQVQELLDKGYVRESLSPCAVPVLLVPKKDGSWRMCVDCRAINNITIRYRHPIPRLDDMLDELSGSLVFSKIDLRSGYHQIRMKLGDEWKTAFKTKFSLYEWLVMPFGLTNAPSTFMRLMNEVLRAFIGRFVVVYFDGILIYSRSIEDHHGHLRAVFDALRDARLFGNLEKCTFCTDRVSFLGYVVTPQGIEVDQAKVEAIHSWPVPTTITQVRSFLGLAGFYRRFVKDFSTIAAPLHELTKRNVTFTWAAAQRNAFDTLKDKLTHAPLLQLPDFNKTFELECDASGIGLGGVLLQEDKPVAYFSEKLSGPSLNYSTYDKELFALVRTLETWQHYLWPKEFVIHSDHESLKHIRSQAKLNRRHAKWVEFIESFPYVIKHKKGKENVIANALSRRYTMLSQLDFKIFGLETIKEQYAHDDDFKDVLLNCKEGRTWNKFVLTNGFVFRANKLCIPASSVRMLLLQEAHGGGLMGHFGVKKTEDILANHFFWPKMRRDVERAVLKKNIKMWEECLPHVEFSYNRSQHSTTKKCPFEIVYGLLPRAPIDLLPLPTSERVNFDAKHRAELMLKLHETTKENIERMNIKYKLAGSKGKKHVAFEPGNLVWLHLRKDRFPNLRKSKLLPRADGPFKVLQKINDNAYKLELPADFGVSPTFNIADLKPYLGEEDELESRTTQMQEGEDDEDIPSNDTTTPIAQQGPMTKARARELNYQVQGCSWHGKNSNNVESVYRLLRRSTPVR

SEQ ID NO: 19483 - protein, 781 aa, Oryza sativa
  Clone ID: TF_OSC401783j.C1.p2.gm
MALEMPGNTTNTMTTRERLDLAIKTPNKQAPKGAEGLTANALPLPDLSADALPLPAPVAAGLGEAGHGWERHGGRQWRGVEGNDGCGRIRWWGGYSVVAGELRIHRVGSGDSNNNDGRGRVWWQCDEDIPSNDTTTPIAQQGPMTRARARELNYQVQGCSWHGKNSNNVESVYRLLRRSTPVPKRKTTKIGGSGEHPQHSPRTRGIIQHFERQVREHAEGLDEDVRVANDRLGQLEAAQIDTNSKLSSLERSLVAQGKNWSTLLTLSMMRRYLVVHKDNCAGSAMAWALHHGGSSTIVLKQQAASLYNKLYTMPETRDIQCLRCKGYGHVRKDCPSTRVMIVRADGGYSSASDLDEETYALLATNNAGEGDAPHQDEEHIGAEAAEHYESLVVQRVLSAQMERAEQNQRHTLFQTKCVIKERSCRVIIDGGSCNNLASAEMVEKLALSTQPHPQPYYIQWLNSSGKEYADIFPKEVPPGLPPIRGIEHQIDLIPGASLPNRAPYRTNPEETKEIQRQVQELLDKGYEAHGGGLMGHFGVKKTEDILADHFFWQRVNFDAKYRAELMLKLHETTKENIEHMNIKYKLAGSKGKKHVAFEPGDLVWLHLRKDRFPNLRKSKLLPRADGPFKVLQKINDNAYKLELPADFGVQGCSWHGKNSNNVESVYRLLRRSTPVSDNLRDRITAASTANTRQLIIVFSASDVWDAHHHQCQYSFSQEHELMPPASTPRQCCSRLPTADLISGHIVHADLLTPSITIGHAVLPRRAGSMRMTWTDQKVRDG

SEQ ID NO: 19484 - protein, 386 aa, Oryza sativa
  unsure (1)..(386): unsure at all Xaa locations
  Clone ID: TF_OSC422885j.C1.p2.np
HSNSTPEPNLLGYGATRPAAIKQSDWRRRAVTSREGGLIGQTTPVRPAAXERSDRCAHGGQTALHXLHQQGXLLCPLKFMTWPHVFYGVNFPYWCEKSYIMSESYDIWQKVANPYKIPAXINTVVLKTDFKNNCKARNILLNGIPCSDFDRVSHLQTAHEIWKPLSDFHQGTSNINEVRKDLFKDYVKFEMQPEETLDDYLARFNKVLSNLRSVDSSYDTYYTQSEISRHFLNGLDMSIWEMKVTSIXESVNMSALTLDSLYTKLKTHEVNILSRKIDPXISALISSEDLVXVTNKLSQGFEKVKNRKRGGSVQCFQCGKLNHIKFNCPNRQEDKSWRRKXTSMTSSRCASSFEQRLIQVLIEAFDSVVSVVVVVCHIVGKTGVVK

SEQ ID NO: 19485 - protein, 1393 aa, Oryza sativa
  Clone ID: TF_OSC900141j.C1.p1.fg
MTGGSGEHPQHSPRTRGIIQHFERQVREHAEGLDEDVRVANDRLGQLEAAQIDTNSKLSSLERSLVAVNTSLAGILNTLERMGQDGHDGSARRNHNGHDANSSIAAREELEYAADTEHDEEVLGRPQRQQRRQRHGMGAPPRREVRDNDDSLGKIKFTIPCFDGKYDPDAYLTWELAIDQKFACHDFPENKRVRAATSEFTDFASIWWSEFVRSNPNNTPQTWDAMKRVMRARFVPSYHARDLLHKLQQLRQGNKSVEEYYQALQIGMLRCGLVENDDAGMARFMGELNREIQDILAYKEYNSINRLFHLACKAEREVQGRRASFRTNISAAAPSSSSNKLRPSTTNSTPCPSEPTRGVAATPSKSSSSVASLGRTRDIQCLRCKGYGHVRKDCPSTRVMIVRADGGYSSASDLDEETYALLATNNAGEGDAPHQDEEHIKAEAAEHYESLVVQRVLSAQMERAEQNQRHTLFQTKCVIKERSCRVIIDGGSCNNLASAEMVEKLALSTQPHPQPYYIQWLNSSGKEHTRSEHLIAANELEKHKKKPTNSVQNNKNEIKLKGSCFIATKSDLDEVDTDTVVCYALVCKETLFPIEDTPISLPPPVTNLLQEYADIFPKEVPPGLPPIRGIEHQIDLIPGASLPNRAPYRTNPEETKEIQRQVQELLDKGYVRESLSPCSVPVLLVPKKDGSWRMCVDCRAINNITIRYRHPIPRLDDMLDELSGSLVFSKIDLCSGYHQIRMKLGDEWKTAFKTKFGLYEWLVMPFGLTNAPSTFMRLMNEVLRAFIGRFVVVYFDDILIYSRSIEDHHGHLRAVFDALRDARLFGNLEKCTFCTDRVSFLGYVVTPQGIEVDQAKVEAIHSWPVPTTITQVRSFLGLAGFYRLFVKDFSTIAAPLHELTKRNVTFTWAAAQRNAFDTLKDKLTHAPLLQLPDFNKTFELECDASGIGLGGVLLQEGKPVAYFSEKLSGPSLNYSTYDKQLFALVRTLETWQHYLWPKEFVIHSDHESLKHIRSQAKLNRRHAKWVEFIESFPYVIKHKKGKENVIVDALSRRYAMLSQLDFKIFGLETIKEQYAHDDDFKDEAHGGGLMGHFGVKKTEDILADHLFWPKMRRDVERFVARCTTCQKAKSRLNPHGLYMPLPVPSVPWEDISMDFVLGLPRTKKGRDSIFVVVDRFSKMAHFIPCHKSDDATHVADLFFREIVRLHGVPNTIVSDRDTKFLSHFWRTLWAKLGTKLLFSTTCHPQTDGQTEVVNRTVSTMLRAVLKKNIKMWEECLPHVEFAYNRSQHSTTKKCPFEIVYGLLPRAPIDLLPLPTLERVNFDAKYRAELMLKLHETTKENIERMNIKYKLAGSKGKKHVAFEPGDLVWLHLRKDRFPNLRKSKLPPRADGPFQ

SEQ ID NO: 19486 - protein, 1477 aa, Oryza sativa
  unsure (1)..(1477): unsure at all Xaa locations
  Clone ID: TF_OSC900215j.C1.p10.np
MAAGPPAPVSSLPRPPSLDRALFKPSPHLLRPFLPLAALPPRRNRARAVALSLRRHRQAPVRRRRRPGPPPTSAPPPSDSPHPRRPRPPLRFARRPPERRRPHRPEPRRRLPPLRPPFSSSPSTXGEPWTAASFPTSLPLSRPPLRRAYGRCRRPXRRVASRRLRRLGRPRARRVAAAWGPAVSRPRPXVRLTRAVSPGAPGPPWTHLGHIRTGLRASVAKHYRFHMSSGANEGYTSCGLVVEMSWHRAGVLLLGAXSCLPVPEVSAVGGVGSMYTSDQSIIYSNSRALGYGQAEQCTQMAGSINRRGLDLTGFVLELRGMCVVLGYPHGVDYQGKRLPEQEGDDAEPHAAWEITAVILTGSPERTSLVVTVGGDSFSAACQNAALLAIGTLHQCYPNELQHSPYRYHPCRGGARDYATFRDASSEDDATIMHLARMVEAYDAAHIDFHQMVRRGLVENNMKILELRQENLQLKKDLDAVDAQLRQLKIAQGEVCRPKRRRVCRSLKITARKSTSRPELVRQSLAWTCFVETPRAEPAPVVPQEDGASGVGSTEDVLLLTFHGETRRSAATGEGSHPEGSNHNNHGSPPPPPPPPPPPPPDTNSILTQILAXQANMMAAFLHHIQNPPQHNAPPPPPQHSKLAEFLRIRPPTFSSSNNPVDALDWLHAVGKKLDTVQCSDEEXVIFAAHQLQGPASLWWDHFQAMQPEGQPITWARFTAAFRRTHVPAGVMALKKREFRELKQGNRSVMEYLHEFNNLARYALEDVREDEEKQEKFLAGMDPELSVRLVSGDYLDFQRLVDKSIRLEAKHKELESHKRRLANFRNQQGANQKVRYTATNPYPGRSSSQQQQQQQPRSAPRPQFVVRVPQPQQQQSQQGTRAPRPPTPAVQPGQGRRDVQGQQCLCFNCFEPGHFADKCPKPRCQQGQAPPRSNHGGKDVIRGRVNHVMAEDVLTTPDVIVGTFLIHSIPATILFDSGASHLFIFVPFVGRNQLGVERLRNPLLITTPGGVMTAKYYSPAVPIEIQGIPFSSDLILLDTKNLDVILGMNWLAQFQGVVDCARRTVTLYRGPEQPVVFFAPPTSVGSSELHQIRLSEIPIIREFGDVFPEELPGMPPKREIEFRIDLALGTTPLYKRPYRMAANELAEVKKQLEELKEKGYIRPSTSPWGAPVIFVEKKDKTKRMCVDYRALNEVTIKNKYPLPRIDDLFDQLKGATVFSKIDLRSGYHQLRIREEDIPKTAFTSRYGLYEFTVMSFGLTNAPAFFMNLMNKVFMEYLDMFVVVFIDDILVYSQSEEDHQHHLRLVLGKLREHQLYAKLSKCEFWLSEVKFLGHVISAKGVAVDPETVTAVTDWKQPKTVTQIRSFLGLAGYYRRFIENFSKIARPMTQLLKKEEKFVWSPQCEKAFQTLKERLVSSPVLILPDTRKDFMLYCDASRQGLGIFISHGHWNGWIIVELDSHRGNIPRDSLPLSPHFSLPL

SEQ ID NO: 19487 - protein, 1467 aa, Oryza sativa
  Clone ID: TF_OSC9454j.C1.p21.fg
MTGGSGEHPQHSPRTRGIIQHFERQVREHAEGLDEDVRVANDRLGQLEAAQIDTNSKLSSLERSLVAVNTSLAGILNTLERMGQDGHDGSARRNHNGHDANSSIAAREELEYAADTEHDEEVLGRPQRQQRRQRHGMGAPPRREVRDNDDSLGKIKFTIPCFDGKYDPDAYLTWELAIDQKFACHDFPENKRVRAATRMLRCGLVENDDAGMARFMGGLNREIQDILAYKEYNSINRLFHLACKAEREVQGRRASFRTNISAGRASSWTSSNAAAPSTRAAAPSSSSNKLRPSTTNSTPCPSEPTRGVAATPSKSSSSVASSGRTRDIQCLRCKGYGHVRKDCPSTRVMIVRADGGYSSASDLDEETYALLATNNAGEGDAPHQDEEHIGAEAAEHYESLMVQRVLSAQMERAEQNQRHTLFQTKCVIKERSCRVIIDGGSCNNLASAEMVEKLALSTQPHPQPYYIQWLNSSGKERTRSEHLIAANELEKHKKKPTNSVQNNKNEIKLKGSCFIATKSDLDEVDTDTVVCYALVCKETLFPIEDTPISLPPPVTNLLQEYADIFPKEVLPGLPPIRGIEHQIDLIPGASLPNRAPYRTNPEETKEIQRQVQELLDKGFVVVYFDDILIYSRSIEDHHGHLRVVFDALRDARLFGNLEKCTFCTDRVSFLGYVVTPQGIEVVQAKVEAIHSWPVPTTITQVRSFLGLAGFYRRFVKDFSTIAAPLHELTKRNVTFTWAAAQRNAFDTLKDKLTHAPLLQLPDFNKTFELECDASGIGLGGVLLQEGKPVAYFSEKLSGPSLNYSTYDKELFALVRTLETWQHYLWPKEFVIHSDHESLKHIRSQAKLNRRHAKWVEFIESFPYVIKHKKGKENVIADALSRRYAMLSQLDFKIFGLETIKEQYAHDDDFKDVLLNCKEGRTWNKFVLTNGFVFRANKLCIPASSVRMLLLQEAHGGGLMGHFGVKKTEDILADHFFWPKMRRDVERFVARCTTCQKAKSRLNPHGLYMPLPLPSVPWEDISMDFVLGLPRTKKGRDSIFVVIDRFSKMAHFIPCHKSDDATHVADLFFREIVHLHGVPNTIVSDRDTKFLSHFWRTLWAKLGTKLLFSTTCHPQTDGQTEVVNRTLSTMLRAVLKKNIKMWEECLPHVEFAYNRSQHSTTKKCPFEIVYGLLPRAPIDLLPLPTSERVNFDAKYRAELMLKLHKTTKENIERMNIKYKLAGSKGKKHVAFEPGDLVWLHLRKDRFPNLRKSKLLPRADGPFKVLQKINDNAYKLELPADFGVSPTFNIADLKPYLGEEDELESRMTQMQEGEDDEDIPSNDTTTPIAQQGPMTRARARSRLFLARQEQQQRGVGVPVAKAQHPCGSCSRTANVVSFPKSKFILLSSKDREPPLLHQNPYGNVGEAHTRGSNTSNWKEGKTESVSQLLPTTVYTSNGRGVPLLCSLLKREREQFPPHSFLPHATNLKA

SEQ ID NO: 19488 - protein, 827 aa, Oryza sativa
  Clone ID: TF_OSC400773j.C1.p43.fg
MAAHAVDLMRPEKFAGENFKRWQSKVRHYLVSQNLWYVIPQVRPLTQQQHADFETSNDVALGVMLSLLSDQLYDVYGAYTSAAELWEALDRKYSVSDAGRWIYVVEQYHDFKMIDNQSVVKQAHDLLTIMGEMSQFGAIVNPKFVVGGIIAKLPPFWRDFATALKHKREDMMVDDLIAHLDVEEKARAKDTPTMAQEGTSNANLVQKSNAKNKGKQAVQNHKAKNTTNFKKKITCYVCGLEGHKANKCRDRKGKKNVQQGQKIANMVVSEAGSSGYDSTPVALSAYQSFDWWVDTGANIHAATGSSILMGNGSGAAVLGVGKVDLKLTSGKIISLKNVQHAEAENQLERKIKRLRSDRGGEYVSDEFSQFCADHGIIHEITPPYSPQSNGVAERKNRTLTDLVNAMLDSAGMSKAWWGEAVLTACHILNRVPTKNSEITPYEGWKGRKPSLSYLRTWGCLAKVNVPITKKRKLGPKTIDCVFLGYAHNSVAYRFLVVRSDVPDVPINMVTESRDATFFEDIFPMKANETWEITDRPFGCKPVGCKWIFKKKLRPDGTIEKYKVRLVAKGYTQKEGEDFFDTYSPVARLTTIRVLLSLAALYGFVVHQMDVKTAFLNGELDEEIYMEQPDGFVALGQEGKVVKLLKSLYGLKQAPKQWHEKFDRTLTSAGFIVNEADKCVYYRFGGGEGVILCLYVDDILIFGTNINVVSELKSFLSQKFDMKDLGEADVISNIKLIKGEDGIMLSQAHYVEKVLTRFGLMDCKIAPTPYDPSLKLRKNKGLGKDQLRYSQIIGSLMYLACATRPDISYAVSKLSRFTSNPEMIIGKH

SEQ ID NO: 19489 - protein, 1261 aa, Oryza sativa
  Clone ID: TF_OSC406055j.C1.p2.fg
MSTEIGDKKMNDINGGNTTSKSSGGTFSGYTFILPILLDVSLLILFAMAALRYFVNVDAYFILSILKLYTSSTVTRSTHIVNVMFIILIFWIKICRIMTKFPTIQKLVRSFSVVGFAASLKPHAFDGSNYKRWKARALLWLTVMHCFFVSRGKPSEPPLSLEEEAKFEATDCLFRGAMISVLADNIVDVYMHIPSGKDMWDALEAKFGVSDAGSKLYVMEQFYDYKMVDDRSVVEQAHEIQMLKELENNNGELPDKFVAGGIIAKLPPSWSDFATSLKHKRQEFSVTDLIGSLGIEEKVRAKDNRCKKIEGGSSANLMQKKNPHASNNNNKKVKPDVKPKATTNFKKKGKGKVKGDFFLCGKPEHWAKDCPEHKDKKFANMVISEGRGTLGYGKFLPTVLSVCHSPDWWVDTGANIHVCADISLFSSYQVGRGSSFLMGNGSLAAVHGVGTVDLKFTSGKIVQLKNVQHVPSIKKNLVSGSLLCRDGFRLVFESNKCVVSKYGTFIGKGYDSGGLFRFSLDDMCNKVVNHVNDDDDESNVWHLRLCHVNFGCMTRLANMSLIPKFTLVKGSKCHTCVQSKQPRKPHKASEARNLAPLELVHFDLCEMNGVLTKGGKKYFMTLIDDCTRFCYVYLLKTKDEALHYFKIYKDEVENQLERKIKRLRIPTKHKEVTPFEEWERKKLNLSHLRTWGCLTKVNVLIAKKRKLEPKTVDCVFLGYAIHSVGYRFLIVNSGVPDMRVGTITESRDATFFENEFPMKNAPSTSSQEPILSPEHFVPIEHIDQTLEENPEEDNIVATRKSKRQRTAKSFGYDYIVYLVDDTPRTIEEAYSSPDADYWKEAVCSEMDSIMSNGTWEVVEHPYGCKPVGCKWVFKKKLRPDGTIEKYKARLVAKGYTQKEGEDFFDTYSSVACLTTIRVLLALAASHGLLVHQMDVKTAFLNGELEEEIYMDQPDGLNVIEEVKDFLSKSFEMKDLGVADVILNIKLLRGVEGGITLVQSHYVDKVLSRFGYSDCKAAPTPYDPSVLLRKNRRIARDQLRYSQIIGSLMYLASATRPDISFAVSKLSRLVSNPGDDHWHALERVMRYLKGAMSYGIHYARYPKVLEGYSDSNWISDADDIKATSGYVFTLGGGAVSWKSCKQTILTRSTIEAELTALDTATVEAEWLRELLMDLPVVEKPVPAILMNCDNQTVIIKVNSSKDNMKSSRHVKRRLKSVRKQKNSGVIALDYVQTAKNLADQFTKGLPRNVIDCASREMGLRPT

SEQ ID NO: 19490 - protein, 337 aa, Oryza sativa
  Clone ID: TF_OSC420396j.C1.p6.fg
MLLSSQLPLIRSQNQNQYVFDQAFAPQVNELPMPEEDVPFCHDCREQGHYALNCPWVYAKEATSFGSAGQTSLNQPPCTKSSLQPSVQSGEPNGDNPLNPRKCFPPSLSYHVGSRTKQAKGKKSKTQKRKAPMRTEEEVRKMTITSTEWPPAGITIPRRQRGNTFRGARQLTQHLLSHGGRVSDSEGSDQVSSDDEDEPPRHLGEEEMESKACTRCGEIGHVASMCLTLCPHCEEDHPPGECPTSPTILCTDSLSKELSSMEEVVSLPDLLQAEQRAINLRRAIPSRRPLSASTSNQKEASPVNDSNMQSYHIITEPIKDDAVTRTMPAISLQNQNE

SEQ ID NO: 19491 - protein, 466 aa, Oryza sativa
  Clone ID: TF_OSC900190j.C1.p18.fg
MEMDEVGGRWTFSRTNEGYTSCGPVVEMSWHRVGALLLGAQSCLPVPKVPAVGGIGSVLLSMARMGWKLCHVFHPYTVVMFNREKGKNVSGYASSNSSFQLNLPLASRELTRAHPWSIPSMLLSSQLPLVGSQDQNQYVFDRAFATQVNELPMPEEDVPFCHDCREQGHYALNCPWVYVKEAPSLGLAGQTSLNQPPHTKSSLQPSVQSRELNGENPLNPGKCFPPSLSYHVGSHTKQAKGKKSKNQKRKAPMRTEEEVRKMTITSTEWPPAGITIPRRQRGNTFRGARQLTQHLLSHGGRVSDSEGSDQVSSDDEDESPRHLGEEEMESKACTRCGEIGHVASMCLTLCTHCEEDHPPGECPTRKVTCFLCEAPTILCTDSLSKELSSIEEVVSLPDLLPAEQRAINLRRAIPSRRPLSASTSNQKEASPVNDSNMQSYHIITEPIKDDAVTRTMPAISLQNQNK

SEQ ID NO: 19492 - protein, 1186 aa, Oryza sativa
  Clone ID: TF_OSC413662j.C1.p7.gm
MGRPRKPAKPAAAASSSASAAAAFSIGNCKVEIHGSSLRCQSTEQEEEELTISGPRGAKIVVSVDGAKSSSVGDGFDFILLSPSDVNERNKALLQVVKLYSFCINHFQCTSKASESGYEEDAELAAAEERRRATAQTAAAAARAARLAAAELAAARAEAEAEVAEDAARAAEVEVETLRSSINGSIASDITADRELEELARGRARERAERWAAVHPHGGGGGPRDRAPADGNPDGRGRAGGSPEPARGPRRQRGSPSPDRCHGHHGVQTVVRDFGPGGGWPTLTKTNYIEWAAVMRVRLQVRHMWEAVWYSDVDYDEDRRALDALIAAVPPEMQFSLSQKRTAKEAWDAIAAARIGSDRACKSTLQALRKEWENLALKPGEDVDDFALRLNTLLQKMVQYGDNTYNEERAVEKLFRCVLEKYRQIARSIESLLDLSMMSIEEALGRLKVVDGDEPQPLSGPTTIGGKLHLTREQWEASQGDRRKGESSPSTGGLKPRKARGGVQLRWARRRAEGGARRGAQGGAAGNHKPARDDTCRNCGKLGYWAKDCRQPRRGQAHVAQVEEEEPALLLAHASIELPPAAPAAVAFLHLDEPKVLVSLCNGSSNDKADGWYLDTGATHHMTGRREFFTEIKGVVSVTFTAKSGEHRLLTGVYYIPALRNSIISVGQLDENGSRVLVEDGLMRIWDRRRRLLAKWHERFGHLHFEALKRLSAKEMVRGMPCLDHVEQLCDVCLVTKQRRLPFPQQTNFRAKERLELVHGDFKGEAADAIRRAQAAAEAECGRKLRVLRTDNGGEFTAAEFASYCADEGIQRHYTAPYNPQQNGVVERLNQMALDGRTPYEAWHGRKPAVSHLRVFGCLAFAKELGHIGKLDDRSTPGVFIGYAEGSKAYRILDPETQRVRTTRDVVFDEGRGQLFFTERVYPSPRASTDSNTNTLSGHDFDYDELFVDTTPAARVERSPVEFATSLSHDGERIDAYHDGEQLRYRTMEDLLGDQPVPGLVPRDMEAQLHLACDDGEPRSFVEVEKHAAWRATMQSKMDAVQENRTWELADLPRGHRAITLKWVFKLKRDEAGAIVKHKTRLVARGFMQQEGIDYDDAFSPVARMESVRLLALAAQEGWGVHHMDVKSAFLNNLKEEVYVHQPPGFVLPGKEGKVLRLHKALYGLRQAPRAWNAKLDSTLKGMGFE

SEQ ID NO: 19493 - protein, 2978 aa, Oryza sativa
  Clone ID: TF_OSC415120j.C1.p11.fg
MDYQQSDGIYDMPDEPLFTLNLRLSHSNDLDRVHKSFTSKIDKARTYLTGRFRRIVKVKGSKRKEFVLTPEGPDVFTIAFTDGTNRVTAIIEERNMWLRGFQTADGHIFEFNDEHGNEGKDANLDDKTDEMNNQFNGNDKTRDEEVKDEEEAIKDQKLKVIKDPKMKAIKDRGMNKHCKQKEKSKAACGSKKKQVNRKDQLNPKKYIRGSVLLRHDSNYGSLLGPNRLPLFQVVYSTMRDMLQNLAHFDPNNYSDKHKRSMAALIIHTAETLKNKYISSLVLNSFNPHIGARLQALDDMGAAHINGWSTASELILKSIHLPSKVWDFQQQEFSKCNEFYKNQCWTTDPNVAMKSIVFLKGDAYTDTTASTVMAPPSGKPGAISLLKPPVIFNGLNFREYALHMQIHMCSQWLWGYLIGDRPCPPCPTLPAEPAISADADENTKRGLLDDLAAAMEAYQTDLSLYETWLEQEAYAKAILVGSMEQYEPRNDAMFLAVVNEAQSLRQLDATVDEFFRKMSAVWRQMDLQGADVCRTCTCCQRQRVQTETTRLYEFLSRLRPEFEPVRAQLLARRPRPSLLETLPELRAEETRCREAGIGIAQQSTSVLVAQGLPSQVHVSAQPVVVPSPLPVAAGAPSTPSGIVCGYCSKTGHTASMCYKKKRDQSHRTSQGSRQGSSQSSSQQITSTEQELVRLLRRLMTTASTSTHGSAAQASSLPPPPPSSSGILSSWFLDSGASFHMTPDSTHLSSMSPPDTPLTVQTANGTSLPVVDRGTLSTSSFRVPTVSHVPKLTMQLMSAGQITDHGCRIILEADSCCVQDRRTGLLVGTGPRRHDSQRLWELDWLHLPSDASTSQSVGSTASALATSATTTFAQWHRCLGHLSGARLSTLIGSWGLRSCFWRHRSTFQFLSIYQQFATMVRTQYDSSIRVFRADSVAPAPASRYDLRDRHAIRPAPKYGFTAAAIVEPTTYREAIAHQEWQQAMAEEIAALERTKTWDVVPAPTHVTPITCKWVYKIKTRSDGSLERYKARLVARGFQQEHGRDYGETFAPVAHMTTIRTLLAVASIRQWSISQLDVKNAFLNGELHEEVYMQPPPGYSVPDGMVLRLCRSLYGLKQAPRAWFERFSSVVTDIGFKASDHDPALFVHTSSCGRTLLLLYVDDMIITGDDSRFINLVKKRLSDQFLMSDLGPLRYFLGIEFSSTSSGFYLSQEKYIQDLLARSGLTDKRVVDTPMELGIHLRPNDASDHSDRRSLSAYCVFLGSSLIAWKTKKQTAVSRSSAEAELRAMAALTAEITWLRWLLEDFGVFVSPPTPLLSDSTGAISIARDPVKHELTKHIGVDASYMRSQVQNEVVALHLNASVGVVVMGGINHILMHNWEVPCAAEISLKASSYSAKIPIVEGEVKVFTDHHNQLYTSHLKLSSKEGQKEVKVRLYVDGFLALTAKSCQVENEEVLRDEKGETCTDNDKVTRCLGRVFAVMDRESAWGLDDVRGGQRSCGILRLELMHVVDGDSIWHTMELLCAYGMRSRIWKESKFERSNKVVIHFKSSSIYVSPGFGGLTGGAPAEYIKFEMKSGEALDDYLSRFNKILSNLRSVDSSYDANYPQSKISRHFLNGLDMSIWDMKVTSIQESVNMSTLTLDSLYTKLKTHEMNILSRKVDSKSSALVSSSSSLVVDVSSSMPSFLAAFNATSDDQLEQIEEEDLALVANRIARAMNNARNRKRGGPNRCFECDSIDHLRSHCPKLGRGKREDKDGEKTNNNKPNNYNKSKGSNQGRKMENLRKAFQQVCAAFEPLSDVDGESGDDDNGKNVSDVCFMARGESDTELKSLIPNDDDCENCEVLMNDISKIRDVNAAHDLKNRSSLACSFALHTRTLDELFLTKKLLQKYQIAFHASLMFNMISAKKLKQPHDVLDCSTCNLNKMKLKDALGRVEYMEDVVKNNEVLSFPKCRKSKGVMVDCENCANLEKEVSYLKNSLLRFSDGKKNLNMILDQLKVLVLEVALVARKENVWIVDSGCSRHMTGDKNWFSSLKKASKTESIVFADASTSAVVAIGLVKVNEKFELKNVALVKDLKYNLLSVSQIVDENSEVHFKKTGSKVFDSCGDSVLNISRYGRAFKADFENSVSPVTTCLVAKFDKDVMFWHCRLGHVGFDHLTRLSGLDLVRGLPKLKKDLDLVQGEDGRIFEDESDYDDDDEVGSAGQTRHQAGQTAGTPPVRPAHEERSDRPGLSGSGTVDVDRDGPPENSTSTSTGTKRGSTSEVAAPLYIQRRHPPEQIIGNIGERTTRSKVTTHDVCANSAFVASFEPKDVSHALTDESWINAMHEELENFERNKVWTLVEPPSGHNIIGTKWVFKNKQNEDGLIVRNKARLVAQGFTQVEGLDFDETFAPVARIEAIRLLLAFAASKGFKLYQMDVKSAFLNGFILEEVSVKQPPGFENPDFPNHVFKLSIALYGLKQALRAWYDRLKNFLLAKGFTMGKVDKTLFVLKHGDNQLFVQIYVDDIIFVCSTHALVVDFAETMRREFEMSMMGELSYFLGLQIKQTPQGTFVHQTKYTKDLLRRFKMENLQPISTPIGSTAVLDPDEDGEAVDQKEYRSMIGSLLYLTASRPHIQFAVCLCAGFQASPRASHRQAVKRIMRYLNHTLEFGIWSSTSSSICLSGYSDADFGGCRIDRKSTSGTCHFLGTSLIAWSSRKQSSVAQSTAESEYVAAASCCSQILWLLSTLKDYDLTFEKVHLFCDNTSAINIAKNPVQHSRTKHIDIRFHFLRDHVEKGDVELQFLDTKLQIADIFTKPLDSNRFAFLRGELGIIHPFGMVTRCLGRVFAVMDRESAWGLDDVRGGQRSCGILRLELMHVVDGDSIWHTMELLCAYGMRSRIWKESKFERSNKVVIHFKSSSICVSPGFGGLTGGAPAVRPVASRQSDRRTHGGQTGGDRSRRQAFSAVRPINLHRSDRRSSGGQTGATTSVRPRSIDFEGNFYFR

SEQ ID NO: 19494 - protein, 366 aa, Oryza sativa
  Clone ID: TF_OSC406457j.C1.p9.fg
MSWDWYRDRGFVGSGSRRFPYDTLLSGAVIRRYQIGFSVPLKQMAPQPTCQTCVRNYLGSEEDPALSENPNQLAEQVTNQVAKTGNAVPGPNKEVATRNQHSSMDIYQILANQTQMLQEIAQNLASIQQQLLLPQPKVNPDKSKNEAAEIQGTQSVEGTDTHKEKNKEFLNVMITGMKTPLRANNCPNLQNSINESVSQENSMVKEGSCHKRKTLPSEVDMQDVPQCQTLQSCQNLSKTPTLKSKKIRHVPGFICFICHEIGHYMRHCPQKPYMDALLQANMSISRMPFYPQGSPNSPNVNAVRPTFPDDKRAKASCDMCQDIQEKKEMQEYKRRKVMSLEIQAKEDLCRKNKLASTILSESISFN

SEQ ID NO: 19495 - protein, 404 aa, Oryza sativa
  Clone ID: TF_OSC408556j.C1.p1.hg
MMKEILQVVVEPITWLEFTVAFKKIHVPSGVVALKKREFRALTLRSCSITEFLHEFNCLARYAPEDVCMDEKLVDKAIRQEDKYNRMEEKKHKIAHNQPIKEQGNMPVVCFNYDEPGHFADKCPKPRRVETAPIQNKSIAPAPKARVNHVAAAEAQGAPDVISMRDYPNVFPVDLRGIPPKRDIEFRIDLVMRTSPTITRWQRRNKGSSGGGNDEDILYYYPLAKTRDTNRSGFLNEHALEPRNRSTTSSLVITRVETRMTSPRRLIPVCELKNTNKDKILDVKLFSQVPLTRKEFGRGTKTIGKFIFLAFHPYKECPNMSTKDPAAVREEEERRWSGLLHRGTWSSVTAGSTPPTPAVAATKEALADAAVGERWIRALSARVWGKKRNKIWTGGWSGLEFGIS

SEQ ID NO: 19496 - protein, 1811 aa, Oryza sativa
  Clone ID: TF_OSC100811j.C1.p5.fg
MEEKYSAKPFVFDGHNFVIWKARMEAYLQSQGHNVWNKVKSPYTMPDDADITPANVAQVDFNYRARNAIIGGISSGEFNRVQHHQSAHDMWTALCNFHEGNNDIQLVRQNQFHKEYQRFEMHPGESIDSYFKRFEEIVSKLRSVGKEFSDNDNARHLLNCLDYGVWEMKVTSITESAPLSDLTMDKLYSKLKTHEMDVFHRKGLKHSMALVADPSGSTSSNDLAFVCGGFSLAALHSVTEEQLEKIPEDDLALFTRKFSRAYKNVRDRKGGKTNEPFVCFECGEPNHIRVNCPKLKKKSDKTTKKLEGQGRKGKKDLIKKAIHKVLAALEEVQLSDIDSDDDDQEKGDKDFSGMYCLANNEDFINLCLMALEDKDDSSEHHEVCLDDIPSLDGSLCDDSCSDNDSVDDELSKERMTHLMIEISDKYRSSKYKIEKLKYENDGMALEIARLRSMIPEEDTCSTCASYLSEINLLKDKLKSCALGAGNPSSASAACSTCYEMKVDMSLLEMELKELKENFVHDRISSCENCPILTSDNDELRQQVDMLRTKNDLLESYATKEPVHSSCANCVILETELKDTKIVIDYVKSVDSCSSCISLKVDLESAKRENSYLQQSLERFAQGKKKLNMILDQSKVSINNQGIGYDFAESLRIGTHEILGVTDGMIELAQKPITFKSAGFIGNTSSSTPKTSEPKMVPMTSKSKSVELPRPKNPKQVEHKQNQKQTKPVEKTKYECTYCGKAGHLVGFCFRKARKKRQERLRTRRAARVPERFECACHCHSSGVSRFPRRDVHPRCDLAGLGQNRHGHLAYNYAHNTKDACTPRMDFGVGRSNSWLVDSGCSRHMTGEAKWFTSLTRASGDETITFGDASSGRVMAKGTIKVNDKFMLKDVALVSKLKYILLSVLQLCDENLEVRFKKDRSRVLDASESPVFDISRVGRVFFANFDSSAPGPSRCLIASENRDLFFWHRRLGHIGFDHLSRISGMDLIRGLPKLKAPKDLVCAPCRHGKMTSSSHKPVTMVMTDGPGQLLHMDTVGPAQVQSVGGKWYVLVVVDDFSRYSWVYFLETKEETCGFFQSLARSLALQFPGALRAIRSDNGSEFKNSAFESFCDSSGVEHQFSSPYVPQQNGVVERKNRTLVEMARTMLDEFTTPRKFWTEAISTACFISNRVFLRTILHKTPYELRFGRRPKVSHLRVFGCKCFVLKSGNLDKFESRSLDGIFLGYATHSRAYRVYVLSTNKIVETCEVTFHEASPGARPEISGVPDESIFVDKDSDDDDDDSIPPPLDSTPPVQETAFVASFEPKNVCHALSDENWVNAMHEELENFERNKVWSLVEPPLGFNVIGTKWVFKNKLGEDGSIVRNKARLVAQGFTQVEGLDFEETFAPVARLEAIRILLAFAASKGFKLFQMDVKNAFLNGVIEEEVYVKQPPGFENPKFPNHVFKLDKALYGLKQAPRAWYERLKTFLLQNGFEMGAVDKTLFTLHSGIDFLLVQIYVDDIIFGGSSHALVAQFSDVMSREFEMIMMGELTFFLGLQIKQTKEGIFVHQTKYSKELLKKFDMADCKPIATPMATTSSLGPDEDGEEVDQREYRSMIGSLLYLTASRPDIHFSVCLCARFQASPRTSHRQAVKRIFRYIKSTLKYGIWYSCSSALSVRAFSDANFAGCKIDRKSTSGTCHFLGTSLVSWSSRKQSSIAQSTAEAEYVAAASTCSQVLWMISTLKDYGLSFSGVPLLCDNISAINIAKNPVQHSRTKHIEIRYHFLRDNVEKGTIVLEFVESEKQLADIFTKPLDRSRFEFLRSELGVIHPYGLI

SEQ ID NO: 19497 - protein, 1006 aa, Oryza sativa
  Clone ID: TF_OSC28501j.C1.p1.fg
MVKTRNGSRDSNNASGSGEQINGPRASGASDSSSSPPPENPTIAQVLDNQTQMMTMMMQQMQQQYHQVLQQSKLLEFLRVKPPTFSGTTNPIEANDWLHAIEKKLNLLQCNDQEKVAFATHQLQGPASVWWDNYMVTRPAGTEVTWAEFCKSFNKAQVPEGIVAQKKREFRSLQQGTRTVIEYLHEFNRLARYAPEDVRTDAERQEKFLSGLDDELTNQLISRDYEDFEKLVDKAIRQEEQCNKMNRKRKAAQLRTPQGKSQKPCFTMGHQGEPSTMIIRQHRPYHPGSFNKNYKSGSHSNSEQHSLNPTPSPLMIPAQSVQSALPAQPEQPKKFGEKPKLCFNCNEPGHMVGTCPKPRRARLKFVQAHVNHASAEEAQSAPEVILGTFPVNSTPAVILFDSGATHSFISKRFAGAHGLSLVKLKIPMRVHTPGGGMTTSHYCPSVTVEIQGLIFPANLILLESKDLDVILGMDWLTRHRGVIDCASRTIKLTNAKGEVVTVEKTTKKLEDIPIARDYPEVFPEDLTTMPPKWDIEFKIDLVPGTAPIHKRPYRMGANELAEVKKQVDEQLQKGYIRPSTSPWGAPVIFVEKKDKTKRMCIDYRALNEVTIKNKYPLSRIDDLFDQLKGAIMFSKIDLRSGYHQLRIREEDIPKTTFITRYGLFECTVMSFGLTNAPAFFMNLMNKSEEEHEQHLRLVLEKLKEHQLYAKFSKCDFWLKKVQFLGHVVSAQGVAMDPGNVESVTKWTLPRTVTQVRSFLGLAGYYRRFIENFSKIAKPMTQLLKKEEKFIWSAECNRVLKNSNDGNYLTHDLELAAVVHALKIWRHYLIGNRCERRWLELIKDYNMGIHYHPGKANVVADALSRKSYCNVAWVEKLCCEVQRDLEHLNLGIVEHGFVAALEAQPTQVEQVRIAQASDPEIAELKKNMRVGKARGFVEDEQGTIWMGERLCVPENKELKDLILTKAHQTQYSIHPGSTKMYQDLKEKFWWVSMRREIAEFVALCDVC

SEQ ID NO: 19498 - protein, 1721 aa, Oryza sativa
  Clone ID: TF_OSC900160j.C1.p4.fg
MEGMRWHRVVTVVCIPNELHPSSSRSTVSNVFPALESLKFRDMGAWEEWSEFKDEHFPQLKYLSIVRCAKLTVLPNFTSGPKQRIRSCEKLLQPLCQNIRRNLMKYIPPPSELSYACMAEGSTPSFFFLRDILRCMHSKKGKDPMLLNHRYHVKELPNGKIPINPKCVNIVFGIPRTGVTIKPNNPKHEFIKILKHLFRVSSGTQISVQQLQVHLKEIIAPTTSNQPSMQYANVCLDVNNIAKYNWAEDMLSTIRNAVLQLLYLDYIDASGCNVPWGEPRVAFWTDQAAKPLKNADMGSGLYAVYGSCKDSIYSLSIFSVTRTAAVEVETLRSSINGSIAGDITADKELEELARGRARERAERWAAAHLHGGGGGGGPRDRAPADGNPDGRGRAGGIPEPARGPRRQRGSLSPDRRHGHHGVQTVVRDFGPGGGWPTLTKTNYIEWDAVMRVRLQVRHMWEAVWYGDVDYDDDRRALDALIAAVPPEMQFSLFQKRIAKEAWDAIAAARIGSDRARKSTLQALRKEWDNLAFKPGEDKMVQYGDDTYDEERAVEKLFRCVRENYRQIARSIESLLDLSTMSIEEALGRLKVVDSDEPQPLSGPITIGGKLHLTQEQWEASQGDKRKGESSSPTGGRAQGGATGNHKPARDDACRNCGKLGHWAKDRRQPRRGQAHVARVEEEPALLLAHASIELPPAAPAAAAFLHLDEPKVLVSLCNGSSNNKADGWYLNTGATHHMTGRREFFTEFDSSVRGSVKFGDASGVEIKGVGSVTFTAKSGEHRLLTGVYYIPALRNSIISVGQLNENGSHVLVEDGLMRIWNRRRRLLAKVTRGTNRLYILSAQVAQPVCLAARRDDEAWQWHERFGHLHFEALKRLSAKEMVRDMPSLDHVEQLCDVSVVTKQRRLPFPQQTSFRAKERLKLVHGDLCGPVTPATPGGRRYFLLLVDDLSCYMWAECGRKLRVLRTDNGGEFTAAEFASYYADEGIQRHYTTPYSPQRNGVVECRNQTVVGKAQALLKQRGMPAIFWGKAVVTAVYILNRSSTKALDGRTPYEAWHGRKPAVSHLRVFGCLAFAKELGHIGKLDDRSTPGVFIGYAKGSKAYRILDPETACAHSARRSVRRRARVGMGQGGGRWFDSDVRRLHHQPATPRAPAPTATPPSTSTPTPARVERSSVEFATLLSHDGERIDAYHDGEQLRYRTMKDLLGDQPVPGLVPRDLEAQLHLACDDGEPRSFTEAEKHAAWRAAMQSEIDAVQENRTWELADLPRGHRAITLKWVFKLKRDEAKAIVKHKARLVERGFVQQEGIDYDDAFAPVAQMESVRLLALAAQEGWGVHHMDAKSVFLNDDLKEEVYVHQPPGFVIPGKKGKVLRLHKALYGLRQAPRAWNAKLDSTLKGMGFEQMEEMPCWWDVEVAAFKEEMKATFQMSDLGPLSSYLGIEVHQDDSRITLRQTAYAKRIVELARLTDCNPALTPMEERLKLNRNSMTEEVDATQYQRLVGSLRYLTHTRPDLAFSVGYVSRFMQRPTTEHQQAVKRIIRYVAGTLDHGLYYPRCPGKAHFVGYSDSDHAGDIDTSKSTSGILFFLGECLVSWQSVKQQVVALSSCEAEYMAASAASTQALWLARLLSDLLGRDTGAVELRVDSKSALALAKNPVFHERSKHIRVRYHFIRSYLEEGSIKASYINTKDQLADLLTKPLGRIKFLKRCSRIGMAQLPHKTTHKT

SEQ ID NO: 19499 - protein, 972 aa, Oryza sativa
  unsure (1)..(972): unsure at all Xaa locations
  Clone ID: TF_OSC15292j.C1.p1.np
LSNNYXCYNCRYSRACVPTDADITTSDTHNNPPTVIQGPITRARTMTMEGTRRHLEKDLEPWRIIWDVQVKVEAQTKSTSGAIRSPGPVCTKTGAQHYYLSLDCVPLIYIYLAFLAPHITSAQHRFLIPAIADYAFXVSFALLTQKDITEAVAKSVQDAFTKIGFLNHMERLDKRISTLSDQVAALETPSNEEVVSGDDDAHPEDTVYDSSGYIDALATRQAWLRHRLRTNRTGMGGTRHQQGNNNNHVPDDPYAKVKFKIPSFSGYYDAEKYLDWEMTVEQKFNAHLVPEQHRVRQASSEFKDFAIMWWAGLSDEGVLPTAWEELKVAMRDRFVPPSYHRDLRKKLMRLEQGDKSVQDYYGELQKGLFRFVMLAEKELQGCDHQGKSKASTYTPRTTPSAGLPKAISFRASFQPAGKRPAAFGASAAPKPSPPPRPAESGKGSSQVPAKSASYVASTGRIQCHRCXGFGHVQKDCPSQRAYVATEDGYITTSDVEEEEEEEEVEDEDGEFGRDDTTDYRTIIVQRVLSTQIFFVINNRRARVIIDGGSCNNFIFFVINNRRARVIIDGGSCNNFVVVKRFRKSKDSVDCDVVPMQACSLLLSVDCDVVPMQACSLLLGRPWNMIMMLHTMQVAKTVFPPKKDNLSPSSKAKGIKSKGGVMLATKCDIAENSDDDMCYFLICKQALVSLDDIASSIHLVVTNLLQEYEDVFPAEIPPGLPNRAAYRTNLEETKEIQRQVQDLLDHGYVRQRLSPCAVPVILVPKKDGSWRMCVNCRAINNITIXYRHPIPRLDDMLDELCGSIIFTKIDLRSGYHQIRMKLGDEWKTAFKTKFGLYEWLVMPFGLINAPSTFMRLMNEVLRPFIGRFVVVYFDDILIYSKSLNEHMDHLRAVFNALRDARLFATLEKCIFCTERVSFLGYVVTPQGIEVDESKIEAIRSWPVPETITQVRSFLALCDPSRSAATHGCRSNTS

SEQ ID NO: 19500 - protein, 2351 aa, Oryza sativa
  Clone ID: TF_OSC18058j.C1.p2.fg
MSWHRAGVLLLGAQSCLPVPGVPAVGGVGSVLLFMARMGWELCHVFRPYTVVMFNREKGKNVSGYASSNSSFQLNPPLASRELTRAHPWSIPSMLLSSQLPLVRSQDQNQCVFDRAFATQVNEPPMPKEHVPFCHDCREQGHYALNCPWVYAKEAPSFGLTGQTSLNQPPRTKSSLQPSVQSREPNGENPLNPGKCFPPSLSYHVGSRTKQAKGKKSKNQKRKASMRTEEEVRKMAISSTEWPPAGITIPRRQRGNTFRGARQLTQHLLSHGGRVSDSEGSDQVSSDDEDESPRHLGEEEMESKACTRCGEIGHIASRCLTLCPRCEEDHPPGECPTRKVSLKGSRLKYHIVTRSIHNSRSEKYLVDKGRKVIKMFNREKGKNVSGYASSNSSFQLNPPLASRELTRAHPWSIPSMLLSSQLPLVRSQDQNQCVFDRAFATQMDRQWMYADRRSKEFIDGVHYFLRVAEANRQRGFICCPCNKCKNQKEYSAYRTIHFHLFESGFMPSYNCWTSHGEQGVEMEEDEVEDDNIPDFAQYVGFEGNQTGEEEIAADGNDVADDLGQMLQDAKEVCESEKEAHKLDKMLEDHRTSLYPGCEQGHKKLDTTLEFLQWKAKNGVSDKAFGDLLKLVKNILPEGNKLPETTYEAKKIVCLLGLEVQKIHACPNDCILYRGEEYENLEACHVCKALRYKIRRDDPGKVDGNKGNARMMRWHTEERQQDGMLRHPADGSQWRNIDRKFKEFGKDARNIRFGLSTDGMNPFGEMSSGHSTWPVTMCIYNLPPWLCMKRKYIMMSIIIQGPKQPGNDIDVYLRPLVEDLKLLWKKEESTYLKHCRKVVYMGHRRFLAANHPVRKKGKHFEHKADHRTKPKHRSGKTVFGKGPGSQPIESEDGHAAMWKKNSIFWELPYWEFLDVRHAIDVMHLTKNLCVNLLGFLGVYGKSKDTLEARNDLKHMEQRGDLHPEPKEKGSHYLSAASYTLSKAEKESMFGCLESIKVPSGYSTNIKRIISTKEKKFTNLKSHDYHVLMTQLLPVVIRGILPDNVRATITKLCAFMNAISQKVIDPDRLEALQNEVVQCLVSFELIFPPSFFNIVTHLLCHLVKEISILGPVYLHNMFPFERYMGVLKKYVRNHARPEASIAKGYGTEEAIEFCIEFIEDLRPIGVPESRHEGRLRGKGTLGRKAIMTVDNNLFRKAHFTILQHSSLVAPYNEEHLALVRARNIAQDMKSTNQNSAVRVDAMGHDGTTATYYGAIEDIWEFDYGPLKVPLFRCQWVRLTGGGVMIDDSGMATVDLNKVGYSDEPFVLANDVTQVFFVKDMSSKGKKGRGPDEPKRQVVLPGKRKIVGVEDNTDEDYDQLDGQPPFTVTIDPSILLSIEDTPYSYSDHKEGTIVRRKWLTAMSNRYYTYLNEEGNVERDAEGNQQGHVERDVEGNQEEEASGSQPSVGQKRARGQRGAAKKLEGRHIITEVEEDGRPSAPAEAAKNYVRHSGWVVRDNVPISTVYWRRTRARGDHESFVLDSEKEMLWTTMLETFTLPAGTEDKVKRWTLKKMAEQFQSFKGDLYQKYILKGQTPNFDTFPKLRDHWDEFVVYKTGEQGQVMMERNKENAAKKKYHHHLGSGGYSVAMPKWEEMEASLLERGIEPATANWPKRSKFWYYAHGGTLNPADGSLVFGDQIREAARRLTDVVEASSQGTFQPDRDRDELTLALQTPEHLGRTRGKGVIPWKIGFKEDIQTYRSRMRSKRDTEAKIADLESWVSSYELNMQEEVARKVDERMAAHRSHDPQPTIPPAMLSPSGNHSSYASTGQVGSQSMDAMQTQDESTCPVDDITQRTPCELYIPFKNLSIKVASGMAIPTDPSGTYHCRPIPAGYSKVEVELVEGAYEDLELDYPGGDGGTSSSLGDKRRLMDHLLRLRHLLLRILHRLLLMLRQHRLHFRLQHRLLLRLLHRLLLGLLHLLLRKLLFRHLQSQGPPPAPPPAHTRATKKAKVDAAKNKDPGYDCTQEELDVYVASEVKRQFKPRSPEKKIPIDPSVRNFFRGMSAPVKEAIKLSDYERTLKKASSGKSKPVPQLGEQPNHDIEPLVTGEDMTIEEFITDTGLTTDQLLGVEPIEKAEVKYMYKLGKPLVKPELVQSLPTQMYKFHQLYMEMSATGREMIGARIRDPDFLQGDDILWINFKGIYELYQLDALDVSIMSCWILFHWVLLLFDLSACTVNVYDSMDKKESTFDKVFELIDRAWYQFRHLVRGNWRERLKRKFKFPCAKQKQGTNLCGYYVCEYCHCLVDQIITTRELDFIRMRDNLTTHKEFIAAVQEQLMGFINEEILDPKGEFYYDGNTIHRSLASELVTTTTSKS

SEQ ID NO: 19501 - protein, 971 aa, Oryza sativa
  unsure (1)..(971): unsure at all Xaa locations
  Clone ID: TF_OSC401958j.C1.p2.np
LSNNYXCYNCRYSRACVPTDADITTSDTHNNPPTVIQGPITRARTMTMEGTRRHLEKDLEPWRIIWDVQVKVEAQTKSTSGAIRSPGPVCTKTGAQHYYLSLDCVPLIYIYLAFLAPHITSAQHRFLIPAIADYAFXVSFALLTQKDITEAVAKSVQDAFTKIGFLNHMERLDKRISTLSDQVAALETPSNEEVVSGDDDAHPEDTVYDSSGYIDALATRQAWLRHRLRTNRTGMGGTRHQQGNNNNHVPDDPYAKVKFKIPSFSGYYDAEKYLDWEMTVEQKFNAHLVPEQHRVRQASSEFKDFAIMWWAGLSDEGVLPTAWEELKVAMRDRFVPPSYHRDLRKKLMRLEQGDKSVQDYYGELQKGLFRFVMLAEKELQGCDHQGKSKASTYTPRTTPSAGLPKAISFRASSQPAGKRPAASGASAAPKPSPPPRPAESGKGSSQVPAKSASYVASTGRIQCHRCXGFGHVQKDCPSQRAYVATEDGYITTSDVEEEEEEEEVEDEDGEFGRDDTTDYRTIIVQRVLSTQIFFVINNRRARVIIDGGSCNNFIFFVINNRRARVIIDGGSCNNFVVVKRFRKSKDSVDCDVVPMQACSLLLSVDCDVVPMQACSLLLGRPWNMIMMLHTMQVAKTVFPPKKDNLSPSSKAKGIKSKGGVMLATKCDIAENSDDDMCYFLICKQALVSLDDIASSIHLVVTNLLQEYEDVFPAEIPPGLPNRAAYRTNLEETKEIQRQVQDLLDHGYVRQRLSPCAVPVILVPKKDGSWRMCVNCRAINNITIXYRHPIPRLDDMLDELCGSIIFTKIDLRSGYHQIRMKLGDEWKTAFKTKFGLYEWLVMPFGLINAPSTFMRLMNEVLRPFIGRFVVVYFDDILIYSKSLNEHMDHLRAVFNALRDARLFATLEKCIFCTERVSFLGYVVTPQGIEVDESKIEAIRSWPVPETITQVRSFLAQAKPLRQTPPHRGDSIF

SEQ ID NO: 19502 - protein, 563 aa, Oryza sativa
  Clone ID: TF_OSC101997j.C1.p12.gm
MEQLCCPGRRVASASSRGEEGRPPAVAHQGGSSQAGSEQSTKAGGGEMRGQMNKGGKLQQYRPVQKEKNQTEEKIATSAVTPQTATQQPTPPPNSRTGMQTNPQRIFCHRCKGFGHMARDCSNVVFCINCAKPTHRTEDCIYDKQPRPMAKLVGYGAPGLGCILIQNTKPDPPKEHNNPLAMISTVFGGELTEAQLEQGFTQQFKWNWVWKAKAMPNGSFQMRFRNKIKFDELANFDYFNVKGTDVQVNVKEWTQKSEAVGKLHIVWVKITGIPEEMKGYQALYEIGSNLGPVLEVDMATFRASNVIRAKVGMMELVRERKQVLVPELMLGEHKIKCAQILRDMELAMQLQKGDWDKENRVSFDMGLNQEDKDKVDPGDSEDYMDSQESKGSFAKRLGINLTEEALGSQDEEMRRSKRLKDKEDKRMKAFEGQAELLRYITAFYKDLFGHSKLNNIKLDMGAEALTVLIQRAEDNKLIEGWWQDILRDKYLKNKNLAGISVKAGDSHFWQGLMEVKNIFYKFCSKKVGDGENTCFWEDNWIGEVGSKSKKIGTGSQTHKAGGK

SEQ ID NO: 19503 - protein, 129 aa, Oryza sativa
  Clone ID: TF_OSC3190j.C1.p1.np
SVVVEKLFSAVPDKFLHIVGTIEQWGDVSKMSVAEAIGRLRAFEESLKGRRREPEVEYLLLTRAQWENLYIKEKKGEDGSDSNSSERKVDRKKVKCYNYGIHGHYANECRKPKKEEALLATADDEPTLL

SEQ ID NO: 19504 - protein, 349 aa, Oryza sativa
  Clone ID: TF_OSC32359j.C1.p1.fg
MPRFDSNGSPQIHSPPTVGSPSPSSVGREPEKFRVERVWRRRSGLDWGSEVVNLGGEAQSKAISVDLQGWFVGEWRIKGIQAEGGVGVHRGEKGRPPAVAHQGGSSQAGSEQSTKAGGGEMRGQMNKGGKLQQYRPVQKEKNQSEEKIATSAVTPQTATQQPTPPPNSRIGMQTNPQRIFCHRCKGFGHMARDCSNVVFCINCAKPTHRTEDCIYDKQPRPMAKLVGYGAPGLGCILIQNTKPDPPKEHNNPLAMISTVFGGELTEAQLEQGFTQQFKWNWVWKAKAMPNGSFQMRFRNKIKFDELANFDYFNVKGTDVQVNVKEWTQKSEAVGSCILSGSKSLEFLSK

SEQ ID NO: 19505 - protein, 817 aa, Oryza sativa
  unsure (1)..(817): unsure at all Xaa locations
  Clone ID: TF_OSC417104j.C1.p2.np
KMRAKDTASKKVEXGSSAYLVXKKNPCASHNNKKVKPKATTNFKKKDKEKAKGNCFVCGKPVHWVKNCPDHKDKKSANMVISDGGGTSGYGDFLPTVLFVHSPDWWVHTGANIHVCANIFLFSSYQVGRGSSLLRGNGLLVAAHGVGTVNLKFTSGKTVQHVTSIKKNLVSGSLLCRDDFRLMFEFNKCVVSKGKGYDSGGLLHFYLDDMCNDVNHVSNDDESNEWHSRLCHMNFGCTRLANMSLILKFTLVKSSKCHTCVQAKQPRKPHKASEVRNLTPLELVYSDLCKMNSVLTKGKKYFMTLIEDCTRFCYVYFMKTKNKALQYFKIYKVEVENLLERKIKWSRSKRGEEYFPNEFISSCEESGFIHERTHTYSPXSNGVAKRKNHTLNVFVNAMLDTVELSTEWWGEAILTVCHVLNRIPTKNKQVTPFEKRKKKKLNLSYLRIWRCLAKISVSIVKKCKLGPKTIDCVFLGYAIHNVRYKLLRVNFGVSDMRVGTITQYREVTFFENEFPMKDTHSTSSQEPIYPSFVLIEHNDRTPEENPEEDNIVATRKSNRQRTTKSFGDDYIVYLVDDTPRTIEEAYSSPDANYWKEAVCDEMDSIMSNGTWEVVECLYGCNHVGCKLVFKKKLRPNGIIKNYKARLVAKGYTQKEGEDFFYTYSPVARLTTIRILLALGASHGLLVHRMDVKITFHSGVLEEKIYMDQPDGYVLKGQEGLMCKLLKSFHGYREAPKQWHEKFNKTLIFVGFVLNEANKCVYYXYGWGETVILCLYDDDILISRTSLNVVEEVKDFLSKCFQMKDLRMASVILNIKLQ

SEQ ID NO: 19506 - protein, 405 aa, Oryza sativa
  Clone ID: TF_OSC101188j.C1.p2.fg
MSFPDEEEDEAFLLAVAATEEAALASSDSSKRRRLSMTSSTSSSPTSATPPPAAVPEGPYLAALKGSHSSAWKQQQETLSQARKRPGGSQTLATPGSGSGSGGAQVARGGACFKCGDSCHWARECPQSVPATGGGGGGGAFGGSGGGGGGYGDAGGAVEEKACPCGAGSCLVLTSNTPRNPGRKFYRCPMRDNGGCNYFEWCDNPSPGPANVSGNTVFQSDTSVAHMLCPCGAGACLILTTKTGKNVGRQFYRCPANQGISYLFLNVRSGHISREVALVAISSGVMNNSLGQLLHCKLQHNIILMLLQVAKFPARGAPPPASNAGKRTIGQRTAQINLQILILTKVGEHLLLQALPMRVSSVVRAGTGPVIAPPQIVVLVPSPAMSSPLLLWAHGTATDTDSRYL

SEQ ID NO: 19507 - protein, 1049 aa, Oryza sativa
  Clone ID: TF_OSC400742j.C1.p1.fg
MAAPAPSSFNLRSILEKEKLTGTNIMDWYRNLRIVLRQEHKEFVLTQPFPADLPNNAPAAQRREHEKRCNDYLDISCLMLATMSPELQRQYEALDAHTIITGLRNMFEDQARAKRFNTSKSLFACRLAEGNPVSPHVIKMIGYNETLEKLGFPLSQELATDLILQSLPPSFEPFILNFNMNNMNRTLTKLPGMLKTAEESIKKNSNHVMVMHKRKPNNKKSGPAKDAECFFCKEAGHWKRNCKKYLEQLKQKQQDGKSSTSEGYGFRSVDNDCSVYYNDIFYFHAPMMSGLYIVNLNGYSVYNINAKRQRPNDLNPTFIWHCRLGHINEKRMEKIHRDGLLHSFDFESFETCESCLLGKMTKAPFTGQSERASELLALVHTDVCGPMSSTARGGFGYFFTFTDDFSRYGYVYLMRHKSESFEKFKEFHNEVQNHLGKTIKYLRSDRGGEYLSLEFGNHLKECGIVPQLTPPGTPQWNGVSEWRNRTLLDMVRSMMSQTNLLLSFWGYALETTAFTLNSVPSKSVDKTPYEIWTGKRPSLSFLKIWGCEVYVKRLQSDKLTPKSDKCFFVGYPKETKGYYFYNQEEGKVFVARHGVFLEKEFISRKDIGSMLWKHRFREDPKKKTDVDGNVHIYKARLVAKGFRQIQGVDYDETFSPVAMLKFIWIVLAIAAYFDYEIWQMYVKTAFLNGNLDEDVYMTQPKGFDDPQSAKKICKLHQSIYGLKQASRSWNIRFDEVVKALGFVRNEEEPCVYKKISGSALVFLILYVDDILLIGNDISMLESVKTSLKNSFSMKDLGEAAYILGIRIYRDRSKRLIGLSQSTYIDKVLKRFNMQDSKKGFLPMSHGINLGKNQCPQTTDERNKMSVIPYASAIGSIMYAMLCTRPDVSYALSATSRYQSDPGESHWIAVKNILKYLRRTKDMFLAYGGQEELVVNGYTDASFQIDKDDFRSQSGFVFCLNGGAVSWKSSKQDIVVDSTTEAEYIAASEAVWIKKFVSQLGVMTSASSSMDLYCDNSGAIAQAKEPRSHQKSKHILRQYHLIREKWVEEM

SEQ ID NO: 19508 - protein, 1371 aa, Oryza sativa
  unsure (1)..(1371): unsure at all Xaa locations
  Clone ID: TF_OSC26817j.C1.p2.np
MIISGGYCLMGCIKDIPTLKGDNYAEWKRKLDIAFILGEVDWVLTTPCPIEPAALVRVENESDADWQRRQRDNAPLIMSYYIEQKKWSLVNKKCLAVVKNTIEPTLLGSIPECDTISKYLERIKSQFTGSSKTYATQLIKQLVTERYHGGGVRDHILRMSNMASKLKPMDLGISDDFLVHLVMASLPKHFDNFVVNYNISPEKWNFEKLIANCVQEEERIKESNGDSINYVKDNKKKNYKSPSSKAKQPQHLPXQQQFTVEKDQCLHCKKTGHYKNDCPDFLKIIMAKKGENIITFVNESHYVGYSRSTWWIDSGATIHVSNCLKGFRSTRTTXRSESSIRVANGVEAKVEAVGDLRLELANGFTLLLRDDFYVPSLQRNLISVSKLDFGGXDCHFGNGKCKLWYNNACIGLAVLQDELYLLSLPENVNVVSSLTKENKKRKRTPDVSSKLWHCRLGHISRGRIERLVKNEILPPLELSDLEQCIECIKRKFVKSIKKCAKRSVGIFEIIHTDICGPFPVKSVDGYDSFITFTDDYSRYGYIYSIKERSEALDKFKIFKAEVENQHDIKIKVVRSDRGEYYGRHTPYGQFHGPFARFLLENGIVAQYSTPGEPQQNGSERCNRTLMDMVRSMMSYSTLPLGLWMEALKTSIHILNIVPSKLVPKTPYELWTGRVPSLAHLHVWGSPAEAKIFNPNLGKLDPKTVSCHFIGYPERSKGYRFYCPNSYTKFVEMRHAVFLEDEMIRRSSVVREIDLEERQVSVPAPSTQEPFFSLPADVVPAMHDVAVLAPIVTPPVATLNESEEPVLQDSTKIIAIQEEEVQQPQTENVPNVEAPRRSERVRRSAICDDYEVYNIDSHMEDDPTSYEEAMRSVRSSEXLEAMKDEMKSMKLNDVWDLEEIPKGAKTVGCKWVYKTKYESRGNIEKFKTRLVAKVFTQREEIDYNETFSPVSCKDSFRIIMALVAHYDLELHQMDIKTVFLNGDLKEKVYMAQPKGFVVKGNENMGCRLKRSIYGLKQASRQWYLKFDGTIKKFGFRENIEDNCIYTKFKNGRFIFLVLYVNDILLASSDVSVLQETKKFLSSNFDMKDLGEASYVLGIEIHRDKTKYVLGLSQKTYIEKVLKKFNMYRCSATPAPIVKGEKYGTWRCPKNQYELNEMKTKPYASAVGSLQYAXVCTRPDLAFITGLLGRFQSNPGPEHWKLVKKVLRYLQGTKGLMLSYRRSEPLRIVGYSGSDFAKDNTKSTSGYVFTLAGGAISWKSSKQTITAGSTMYAEFIACYEATGQVNXRKKFIPGLKVVDSIEKPLKLCCDNEPTVMYAHNNQSSGAAKHIDIKYYFVKDKVRDXTISLEHIRTERMLVDPLTKGLPPNVFKEH

SEQ ID NO: 19509 - protein, 1975 aa, Oryza sativa
  Clone ID: TF_OSC409754j.C1.p2.fg
MDRQWMYADRRSKEFIDGVHYFLRVAKANRHKGFICCPCNKCKNQKEYSASRTIHFHLFESGFMPSYNCWTSHGEQGVEMKKDKVEDDNIPDFAQYAGFEGNQTGEEERDADGNDVADDLGQMLQDTKEYCESEKGAHKLDKMLEDHRTSLYPGCEQGHKKLDPTLEFLQWKAKNSVSDKAFGDLLKLVKNILPEGNKLPKTTNKGNARMMRWHAEERQQDEMLRHPADDSQWRNINRKFKDFGKDARNIRFGLSTDGMNPFGEMSNGYSTWPVTMCIYNLPPWLCMKRKYIIMPIIIQGPKQPGNNIDVYLRPLVEDLKLLWKKEGVPELPYWEFLDVRHAIDVMHLTKNLCVNLLGFLGVYGKSKDTLEARNDLKHMEQRGDLHSEPKEKGSHYLSPASYTLSKAEKENMFECLESINVPSGYSTNIKRIISTKEKKFTNLKSHDCHVLMTQLLPVVIRGILPDNVRATIIKLCAFMNAISQNVIDPDILEALQNDVVQCLVSFELIFPPSFFNIMTHLLCHFVKEIGILGPVYLHNMFPFERYMGVLKKYVRNRAHPEASIAKGYGTEEVIEFCVEFIEDLRPIGGYEINGYTFYTRAQDIKCTNQNSVVRIDAMGHDGTTGTYYGAIEDIWELDYGPLKVPPFRCQWVRLTGGGVTIDDSGMTMVDLNKVGYSDEPFVLSNDVTQVFYVKDMSSKGKKGRGEASRPPLLILARPDQGRSDRPHSGGMTGVPWQSTSQYYKWYQSLVSLDWASPPRVKMLNEVNHVGKAPMFNGTNYSTWKIKMSTHLKAMSFHIWSIVDVGFAITGTHLTGIDHRNLQLNAQAMNALFNCLSQEECDRVSNLETAYENWNKLAEIHEGTSEYNDAKLHFLKIQYETFSMLPHESVNAMYGRLNASWGKINTNDMYKLKKKEMEETSPSKKCIAPQAEVEDKGKGKCFECGEKRHFASKCPSKDDDGDKSSMKKSGGYKLMKKLKKEGKKIEVFIGDWVTNEESSASSGSEEEGGDDASSKKKKMAVVAIKEAPSPFAPLCLMAKGSSKVTSLSDSESDDDCDYASYDELVSMFEELHAYSEKEIVKFKALKKDHASLEVLYEELKTSHERLTISHEKLKEAHDNLLSTYQHGALIDVGISCVLLDDSATCHIAHVASSSISTSCDDLVDMPSSSSSPCVSICDASLVENNELKEQVAKLNKSLERCFKGKNTLDKILSEQRCILNKEGLGFIPKKGKKPSHRATRFVKSNGRLMMVALLLDMWVLLYSVVNYRTGGSHWVLDSGCTQHMTGDRAMFTTFDVGGNEQEKGVRLTKFESRCDEGFLLGYVSNSKAYRVYNKNKGIVEETADVQFDETNGSQEGHENLDDVGDEGLMRAMKNMSIRDVKPIEVEDKPSTSTQDEPSTFATPSQAQVEVEEEKAQDPPMPQRIHTALSKDHPIDQVLGDISKDVQTRSRVASICEHYSFVSCLEPKHVDEALCDLDWMNAMHEELNNFARNKVWTLVERPRDHNVIGTKWVFRNKQDEKGLVVRSKARLVAQDFTQVEGLDFGETFAPVARLEAIRILLAFASCFDIKLFQMDVKSAFLNGEIAELVFVEQPPGFEDPKNPNHVYKLSKALYGLKPAPRAWYERLRDFLLPKDFKIGKVDTTLSTKIIDDDFVVCQIYVDDIIFGSTNEVFCKEFGDMMSREFEMSMVGELSFFLGLQIKQLKDGTFVSQTKYIKDLLKRFGLEDAKPIKTPMATNGHLDLDEGGKPVDLKLYHSMIGSLLYLTASRPDIMFSVCMCARFQAAPKKCHLVAVKRILRYLKHSSTIGLWYPKGAKFKIVSYSDLDYAVCKVDRKSTSGSCQMLGRSLVSWSSKKQNSVALSTAEAEYVSAGSCCAQLLWMKQTLLDYGISFTKTPLLCDNDSAIKIANNPVQHSRTKHIDIRYHFLKDHVVAKSDIVISHIRTENQLADIFTKPLDETRFCKLRNELNVIDFSNVA

SEQ ID NO: 19510 - protein, 1497 aa, Oryza sativa
  Clone ID: TF_OSC101289j.C1.p1.fg
MDISRANEGYTSCGPVVEMSWHRADVLLLGAQSCLPVPEVPAVGGVGSVLLCMARMGWKLCHVFHPYTVVMAGSINRRGLDLTGFVLELRGMCVVLGYPHGVDYQGKQLPEQEGDDAEPHAAWEVTAVILTGSPERTSLAVTAGGDSFSAACQNAALLAIGTLHQCYPDELQHSPYRYHPRRGGARDYATFRDASSEDDATIMHLARMVEAYDAARIDFHHMVRRGLVENNMKILELRQENLQLKKDLDTVEAQLCQLKIAQGEMVTTRRSAATGEGSHPEGSNHNKHGSPPPPPSPPPPPPPDTNSILTQILAQQANMMAAFLHHIQNPPQHNAPPPPPPPQHSKLAEFLRIRPPTFSSSNNPVDALDWLHAVGKKLDTVQCNDEEKVIFAAHQLQGPASLWWDHFQATQPKGQPITWARFTAAFRRTHVPAGVMALKKREFRELKQGNRSVMEYLHEFNNLARYTPEDVREDEEKQEKFLAGMDPELSVRLVSGDYPDFQRLVDKSIRLEAKHKELESHKRRLANFRNQQGANQRPSQGRKDAQGQQRLCFNCFEPGHFVDKCPKPRRQQGQAPPRPNNGGKDVIRGRVNHVTAEDVLTTPDVIVGTFLIHSIPATILFDSGASHSFISVPFMGRNQLGVERLRNPLLITTPGGVMTAKYYSPAVPIEIQGIPFPLDLILLDTNNLDVILGMNWLAQFQGVVDCARRTVTLYRGPEQPVVFFAPSTSVGSSELHQIGLSEIPIVREFGDVFPEELPGMLPKREIEFRIDLAPGTTPLYKRPYRMAANELAEKDKTKRMCVDYRALNEVTIKNKYPLPRIDDLFDQLKAATIFSKINLRSGYHQLRIREEDIPKTAFTTRYGLYEFTVMSFGLTNAPTLDKFVVVFIDDILVYSQSEEDHQQHLRLVLGKLREHQLYAKFSKCEFWLSEVKFLGHVISAKGVAVDPETVTAVTDWKQPKTVTQVRSFLGLAGYYRRFIENFSKIARPMTQLLKKEEKFVWSPQCEKAFQTLKEKLANVVADALSRKSRCNTLGVCGIPPELNQQMEALNLSIVGRGFLATLEAKPTLLDQIREAQKNDPDMHGLLKNMKQGKAAGFTEDEHGILWNGNRVCVPDDRELKQLILQEAHESPYSIHPGCTKMYLDLKEKYWWGGYDSIWVVVDRLTKVARFIPVKTTYGGNKLAELYFARIVSLHGIPKKIVSDRGSQFTSHFWKKLQEELGTRLNFSTAYHPQTDGQTERLNQILEDMLRACVLDFRKTWDKSLPYAEFSYNNSYQASIQMAPYEALYGRKCRTPLLWDQVGESQVFGTDILREAEAKVRTIRDNLKVAQSRQKSYADNRRRNLEFTVDDFVYLRVTPLRGVHRFQTKGKLAPRFMGPFRIIARRGEVAYQLELPASLGNVHDVFHVSQLKKCLRVPSEQADSEQIEVREDLTYVERPVKILDTMERRTRNRVIRFCKVQWSNHAEEEATWEREDELKAAHPDLFASSSESRGRDSV

SEQ ID NO: 19511 - protein, 709 aa, Oryza sativa
  Clone ID: TF_OSC400523j.C1.p2.fg
MSWHRAGVLLLGAQSCLPVPGVPAMAGSVTRRGLDMTGFVLELRGICVVLGYPHGVDYQARPLPEQEGDDAEPHAGWEVTAVILSGYPERTSLAVTAGGDSFPAACQNDALLAIVTLHQRYPDELQHSPYRYHPRRGGARDYATFRDASSEDDATIVHLARMVEAYDAARIDFHQMVHRGMVENNMKILELRQENLQLKKDLDVVEAQLHQLKIAQGEVCRPKRRRVCRSQKITARKSTSRPELVRQSLAWTCFVETPRAEPAPVVPQKGEASGVGSTEDALLLTFRPGPSQRRNAATGDGNQPEGSNHNHQGNPPPPPPPPPPPPPDTNAILTQILAQQANMMTAFLHHLQNPPQHNAPPPPPQHSKLAEFLRIRPPTFSSSNNPVDALDWLHAVGKKLDTVQCSDEEKVIFAAHQLQGPASLWWDHFQATQPEGQPITWARFTAAFRRTHVPAGVMALKKREFRELKQGNRFVMEYLHEFNNLARYAPEDVREDEEKQEKFLAGMDPELSVRLVSGDYPDFQRLVDKSIRLEAKHKELESHKRRLANFRNQQGANQRVRYTNPYPGGSSSQQQQQQQQPRSAPRPQFVVRVPQPQQQQNQQGTRAPRPPTPTVQPGQGRRDAQGQQRLCFNCFEPGHFVDKCPKPRRQQGQAPPRSNNGGKDVIRGRVNHVTAKDVLTTPDVIVGSSEMCFRKNYPVCRPSERLSSG

SEQ ID NO: 19512 - protein, 1357 aa, Oryza sativa
  Clone ID: TF_OSC400610j.C1.p9.fg
MSWHRAGVLLLGAQSCLPVPGVPAMAGSINRRGLDLTGFILELRGMCVVLGYPHGVDYQGKQLPEQEGDDAEPHAAWEVTAVILTGSPERTSLAVTAGGDSFSATCQNAALLAIGTPHQRYPDELQHSPYRYHPRRGGARDYATFRDASSEDDATIMHLARMVEAYDAPRIDFHQMSWVISFNSQLSLFAGSVWDFHMVTTRRSATTGDGNQPEGSNHNNHGSPPPPPPPPPPPPPDTNSILIQILAQQANMMAAFLHHIQNPPQHNAPPPPPPPQHSKLAEFLRIRPPIFSSSNNPVDALDWLHAVGKKLDTVQCNDEEKVIFAAHQLQGPASLWWDHFQAMQPEGQPITWARFTAAFRRTHVPAGIMALKKREFRELKQDNRSVMEYLHEFNNLARHAPEDVRMDPELSVRLVSGDYPDFQRLVDKSIRLEAKHKELESHKSRLANFRNQQGANQRVRYTNPYPGGSFSQQQQQQPRSAPRPQFVVRIPQPQQQQSQQGTRAPRPPTPAVQPGQGRRDIQVQQRLCFNCFEPGHFVDKCPKPRRQQGQAPPRPNNGGKDVIRGRVNHVTAEDVLTTPDVIVGTFLIHSTPATILFDSGASHSFISVPFVGRNQLGVERLRNPLLITTPGGVMTTKYYSPAVPIEIQGIPFPSDLILLDTKNLDVILGMDCEFGDVFPEELPGMPPKREIEFRIDLAPGTTPLYKRPYRMAANELAEVKKQLEELKEKGYIRPSTSPWGAPVIFVEKKDKTKRMCVDYRALNEVTIKNKYPLPRIDDLFDQLKGATVFSKIDLRSGYHQLRIREEDIPKTSFTTRYGLYEFTVMSFGLTNAPAFFMNLMNKVFMEYLDKFVVVFIDDILVYSQSEEDHQQHLRLVLGKLQEHQLYAKLSKCEFWLSEVKFLGHKQPKTVTQVRSFLGLAGYYRRFIENFSKIARPMTQLLKKEEKFVWSPQCEKAFQTLKEKLVSSPVLILPDTHKDFLVYCDASRQGLGCVLMQEGHVVAYASRQLRPHEGNYPTHDLELAAVVHALKIWRHYLIGNRCEIYTDHKSLKYIFTRSDLNLRQRRWLELIKDYDVGIHYHPEDEHGTLWNGNRVCIPDDRELKQLILQEAHESPYSIHPGSTKMYLDLKEKYWWVSMKREIAEFVALCDVCQRVKAEHQRPARLLQPLQVARFIPVKTTYGGNKLAELYFARIKKLQEELDTRLNFSTAYHPQTDGQTERLNQILEDMLCACVLDFGKTWDKSLPNAEFSYNNSYQASIQMAPYEALYGRKCRTPLLWDQVGENQVFGTDILREAEAKKCLRVPSEQADSEQIEVREDLTYVERPVKILDAMERRTRKRVISFCKVQWSNHAEEEAT

SEQ ID NO: 19513 - protein, 1788 aa, Oryza sativa
  Clone ID: TF_OSC400722j.C1.p34.fg
MSWHRAGVLLLGAQSCLPVPGVPAVGGIGSVLLSMARMGWKLCHVFRLYTVVMAGSVTRRGLDMTGFVLELRGMCVVLGYPHGVDYQARPLPEQEGEDAEPHAGWEVTAVILSGSPERTSLAVTAGGDSFPAACQNAALLAIGTLHQRYPDELQHSPYRYHPHRGGARDYATFRDASSEDDATIVHLARMVEAYDAARIDFHQMVRRGMVENNLKILELRQENLQLKKDLDAVEAQLHQLKIAQGEDCRPKRRRVCRSQKITARKSTSRPELVRQSLAWTCFVETPHAEPAPVVPQEGEASGVGSTEDALLLTFRPGPSQRRNVNTGDGNQPEGSNHNHQGNPPPPPPPPPPPPPDTNAILTQILAQQANMMTAFLHHLQNPPQQNAPPPPPQHSKLAEFLRIRPPTFSSSNNPVDALDWLHAVGKKLDTVQCSEEEKVIFAAHQLQGPASLWWDHFQATQPEGQPITWARFTAAFRRTHVPAGVVALKKREFRELKQGNRSVMEYLHEFNNLARYAPEDVREDEEKQEKFLAGMDPELSVRLVSGDYPDFQRLVDKSIRLEAKHKELESHKRRLANFHNQQGANQRVRYTNLYPGGSSSQQQQQQQQPRSAPRPQFVVRVPQPQQQQNQQGTRAPRPPTPTVQPGQGRRDAQGQQRLCFNCFEPGHFVDKCPKPRRQQGQAPPRSNNGGKDVIRGRVNHVTAEDVLTTPDVIVGTFLIHSIPATILFDSGASHSFISVPFVGRNQLGVERLRNPLLITTPGGVMTAKYYSPAVPIEIQGIPFPSDLILLDTKNLDVILGMNWLAQFQGVVDCAGRTVTLYRGPEQPVVFFAPPTSVRSSEVHQIGLSEIPIVREFGDVFPEELPGMPPKREIEFRIDLAPGTTPLYKRPYRMAANELAEVKKQLEELKEKGYIRLSTFPWGAPVIFVEKKDKTKRMCVDYRALNEVTIKNKYPLPRIDDLFDQLKGATVFSKIDLRSGYHQLRICEEDIPKTAFTTRYGLYEFTVMSFGLTNAPAFFMNLMNKVFMEYLDKFVVVFIDDILIYSQSEEDHQHHLRLVLGKLREHQLYAKLSKCEFWLPEVKFLGHVISAKGVAVDPETVTAVTDWKQPKTVTQVRSFLGLAGYYRRFIENFSKIARPMTQLLKKEEKFVWSPQCEKAFQTLKEKLVSSPVLILPDTRKDFMVYCDASRQGFGCVLMQDGHVVAYASRQLRPHEGNYPTHDLELAAVVHALKIWRHYLIGNRCEIYTDHKSLKYIFTQSDLNLRQRRWLELIKDYDVGIHYHPGKANVVADALSRKSHCNTLNVRDIPPELNQQMEALNLSIVGRGFLAALEAKPTLLDQIREAQKNDPDMHGLLKNMKQGKAAGFTEDEHGTLWNGKRVCVPDNRELKQLILQEAHESPYSIHPGSTKMYLDLKEKYCVSRQSTSDRPDFSNLSKYQNGNGMKLGWISSPDFQKPKVAQFIPVKTTYGGNKLAELYFARIVSLHGVPKKIVSDRGSQFTSHFWKKLQEELGTRLNFSTAYHPQTDGQTERLNQILEDMLRACVLDFGKTWDKSLPYAEFSYNNSYQASIQMAPYEALYGRKCRTPLLWDQVGESQVFGTDILREAEAKVRIFRDNLKVAQSRQKSYADNRRRDLEFAVGDFVYLRVTPLRGVHRFQTKGKLAPRYVGPFRILARRGEVTYQLELPASLGNVHDVFHVSQLKKCLRVPSEQADSEQIEVREDLTYVERPVKILDTMERWTRNRVIRFCKVQWSNHAEEEATWEREDELKAAHPDLFASSSESRGRDSV

SEQ ID NO: 19514 - protein, 662 aa, Oryza sativa
  Clone ID: TF_OSC900139j.C1.p9.fg
MSAPGAAAAAGATVAIPEDGAPGAGAAANVNVNGGSSASQSSGGTFSGSFSVVGFAAALKPHAFDGSNYKRCKARALLWLTAMQCFYVSRGIRSEPPLSPEEEVKFEASDCLFRGALISVLADNIVDVYMHMPSGKDMWDALEAKFGVSDTGSELYVMEQFYDYKMVDDHSVVEQAHEIQMLAKELENNNCELPDKFVAGGIIAKLPPSSSDFATSLKHKRQEFSVSDLIGSLGVEEKARAKDNRGKKVERGSSANMVQKKNPHASHNNKKVKPDVKSKATINFKKKGKGKAKGDCFVCGKSGYWAKDCPECKDRKSANMVGRGSSLLMGNGSLAAVHGVGTVDLKFTSGKTVQLKNMQHVPSIKKNLVSGSLLCREGFRLAFESNKCVVSKYGTFVGKGYDRGGLFRSSLDDMCNNHNVVNHISKNDESNVWHSQLCHDASLFTPIKLGGRRKSRTLTEMVNAMLDTAGLSMEWWGEAILTACHILNKIPMKHKEVTPFEEWKRKKLNLPYLRTWGCLAKVSVPIAKMRKLRPNTVDCVFLGYVIHSVGYRFLIVNSGVPNMRVGTIIESRDATFFENEFPMKHTPSTSSQETVIPHEHFAPIEHNDQTPEENPEEDNIVDTRKSKRQRVAKSFGDDYVVYLVDDTPRIIEEAYSSPNADY

SEQ ID NO: 19515 - protein, 267 aa, Oryza sativa
  unsure (1)..(267): unsure at all Xaa locations
  Clone ID: TF_OSC100123j.C1.p2.np
LVSMRDNLIRSRSQQFHGSTQCNPMGIPRQLHEDQLQPQVMANQTQTVEELLQQIRRRYEIYQMQQMQRQCXEPRQGHQPQMQVQVLAQNLNQSQSQEFPVSAPKTPVKMLSRSPKITSAKPPSNQREVSATCYDCGEXGHYVRNCPWKVFARSLEKDEKQCPGSNQAPSQPTDKKDEFTPEDAARIPKRQRRKNTFRGARQLTRHLIKYGPPRPEDDESGERFSADDDDDDDDDDNDATLDSFRERELKFKACTRCGVVGHTDSLC

SEQ ID NO: 19516 - protein, 420 aa, Oryza sativa
  unsure (1)..(420): unsure at all Xaa locations
  Clone ID: TF_OSC15733j.C1.p1.np
ILANRAIMMLPSPIQNPQNCSTHPPQHYLAEFRNRPTSFFSSNNPDALDWLHAVGKKLDTVQCSDEEKVIFAAHQLQGPASLWWDHFQATQPEGQPITWARFTAFGRTHVPAGVVALKKREFXELKQGNRSVMEYLHENNLARYAPEDVREDEEKQEKYLARMDPELSVRLVSGDYPDFQRLVDKSIRLEAKHKELESHKRRLANCRNQQGANQRVRYTNPYPGGSSSQQQQXQQQPRSAPRPQFVVRVPQPQQQQSQQGTRAPRPPTPTVQPGQGRRDASGPQHLCFNCFEPGHFADKCPKPRRQQGQAPPRSNNGGKDVIRGWVNHVTAEDVLTTPDVIGGTFLIHFIPATILFDSGASHSFIFVPFVGRNQFGIEKLRNPLLITTPGGVMTTKYYNPAGPIEIKGIPFSFPLSLFRA

SEQ ID NO: 19517 - protein, 797 aa, Oryza sativa
  unsure (1)..(797): unsure at all Xaa locations
  Clone ID: TF_OSC900144j.C1.p4.np
MSWHRAGVLLLGAQSCLPVPGVPAVGGIGSVLLSMARMGWKLCHVFRLYTVVMAGSVSRRGLDMTGFVLELRGMCVVLGYPHGVDYQARPLPEQEGDDAEPHAGWERTSLAVTAGGDSFPARTSLAVTAGGDSFPAACQSAALLAIGTLHQRYPDELQHSPYRYHPRRGGARDYATFRDASSEDDATLVHLGRMVEAYDAARIDFHQMVRRGMVENNMKILELRQENLQLKKDLDAVEAQLHQLKIAQGEVCHPKRRRVCRSQKITARKSTSRPELVRQSLAWTCFVETPRAEPAPVVPQEGEASGVGSTEDALLLTFRAGPSQRRSANTGDGNQPEGSNHHHQGSPPPPPPPPPPPPPHTNAILTQILAQQANMMTAFLHHIQNPPQHNAPPPPPQHSKLAEFLRIRPPTFSSSNNPMDALDWLHAVGKKLDTVQCSDEEKVIFAAHQLQGPASLWWDHFQATQPEGQPITWARFTAAFRRTHVPAGVVALKKREFXELKQGNRSVMEYLHEFNNLARYAPEDVREDEEKQEKYLARMDPELSVRLVSGDYPDFQRLVDKSIRLEAKHKELESHKRRLANCRNQQGANQRVRYTNPYPGGSSSQQQQXQQQPRSAPRPQFVVRVPQPQQQQSQQGTRAPRPPTPTVQPGQGRRDASGPQHLCFNCFEPGHFADKCPKPRRQQGQAPPRSNNGGKDVIRGWVNHVTAEDVLTTPDVIVGTFLIHSIPATILFDSGASHSFISVPFVGRNQLGIERLRNPLLITTPGGVMTAKYYSPAVPIEIQGIPFPSDKXRLHGL

SEQ ID NO: 19518 - protein, 1402 aa, Oryza sativa
  unsure (1)..(1402): unsure at all Xaa locations
  Clone ID: TF_OSC100588j.C1.p8.np
MEAYLQSQGHNVWNKVKSPYTMPDDADITPANVAQVDFNYRARNAIIGGISSGEFNRVQHHQSAHDMWTALCNFHEGNNDIQLVRQNQFHKEYQRFEMHPGESIDSYFKRFEEIVSKLRSVGKEFSDNDNARHLLNCLDYGVWEMKVTSITESAPLSDLTMDKLYSKLKTHEMDVFHRKGLKHSMALVADPSGSTSSNDLAFVCGGFSLAALHSVTEEQLEKIPEDDLALFTRKFSRAYKNVRDRKGGKTNEPFVCFECGEPNHIRVNCPKLKKKSDKTTKKLEGQGRKGKKDLIKKAIHKVLAALEEVQLSDIDSDDDDQEKGDKDFSGMYCLANNEDFINLCLMALEDKDDSSEHHEDFGVGRSNSWLVDSGCSRHMTGEAKWFTSLTRASGDETITFGDASSGRVMAKGTIKVNDKFMLKDVALVSKLKYILLSVLQLCDENLEVRFKKDRSRVLDASESPVFDISRVGRVFFANFDSSAPGPSRCLIASENRDLFFWHRRLGHIGFDHLSRISGMDLIRGLPKLKAPKDLVCAPCRHGKMTSSSHKPVTMVMTDGPGQLLHMDTVGPAQVQSVGGKWYVLVVVDDFSRYSWVYFLETKEETCGFFQSLARSLALQFPGALRAIRSDNGSEFKNSAFESFCDSSGVEHQFSSPYVPQQNGVVERKNRTLVEMARTMLDEFTTPRKFWTEAISTACFISNRVFLRTILHKTPYELRFGRRPKVSHLRVFGCKCFVLKSGNLDKFESRSLDGIFLGYATHSRAYRVYVLSTNKIVETCEVTFHEASPGARPEISGVPDESIFVDKDSDDDDDDSIPPPLDSTPPVQETGSPSTTSPSGDAPTTSSSAAEEINGGTSGPTAPRHIXNRHPGERVTRNRSYDLVNSAFVASFEPKNVCHALSDENWVNAMHEELENFERNKVWSLVEPPLGFNVIGTKWVFKNKLGEDGSIVRNKARLVAQGFTQVEGLDFEETFAPVARLEAIRILLAFAASKGFKLFQMDVKNAFLNGVIEEEVYVKQPPGFENPKFPNHVFKLDKALYGLKQAPRAWYERLKTFLLQNGFEMGAVDKTLFTLHSGIDFLLVQIYVDDIIFGGSSHALVAQFSDVMSREFEMIMMGELTFFLGLQIKQTKEGIFVHQTKYSKELLKKFDMADCKPIATPMATTSSLGPDEDGEEVDQREYRSMIGSLLYLTASRPDIHFSVCLCARFQASPRTSHRQAVKRIFRYIKSTLKYGIWYSCSSALSVRAFSDANFAGCKIDRKSTSGTCHFLGTSLVSWSSRKQSSIAQSTAEAEYVAAASTCSQVLWMISTLKDYGLSFSGVPLLCDNISAINIAKNPVQHSRTKHIEIRYHFLRDNVEKGTIVLEFVESEKQLADIFTKPLDRSRFEFLRSELGVIHPYGLI

SEQ ID NO: 19519 - protein, 1773 aa, Oryza sativa
  Clone ID: TF_OSC101237j.C1.p3.fg
MEEKYSAKPFVFDGHNFVIWKARMEAYLQSQGHNVWNKVKSPYTVPDDADITPANVAQVDFNYRARNAIIGGISSGEFNCVQHHKSAHDMWTALCNFHKGNNDIQLVRQNQFHKEYQRFEMHPGESIDSYFKRFGEIVSKLRSVGKEFSNNDNARHLLNCLDYGVWEMKVTSITESAPLSDLTMGKLYSKLKTHEMDIFHRKGLKHSMALVADPSGSTSSNDSAFVCGGFSLAALHSVTEEQLEKIPEEDLALFARKFSRAYKNVRDRKRGKTNEPFVCFECGEPNHIRVNCPKLKKKSDKTTKKPEGQGRKGNKDLMKKAIHKVLAALEEVQLSDIDSDDDDQEKGDKDFSGMCCLANNEDFINLCLMALEDKDDSSEHPEVCLDDIPSLDGSLCDDFCSDNDSVDDELSKERMAHLMIEISDKYRSSKYKIEKLKSENDGMALEIARLRSMIPEEDTCSTCASYLSEINLLKDKLKSCALGAGNPSSASVACSTCYEMKVDMGLLEMELKELKEKKFHDRIGRCENCPILTSDNDELRQQVAMLRTKNDLLESFATKEPIHSSCANCAILETELKDAKTVIDSIKSIDSCSSCISLKVDLESAKRENFYLQQSLERIGTHEILGVTDGMIELAQKPITFKSAGFIGNTSSSSPKTSEPKMVPMTSKSKPVELPRPKNPKQVEHKQNQKQTKPVEKTKYECTYCGKAGHLDFGVGRSNSWLVDSGCSRHMTGEAKWFTSLTRASGDETITFGDASSGRMMAKGTIKVNDKFMLKDVALVSKLKYNLLSVSQLCDENLEVRFKKDRSRVLDASESPVFNISQVGRVFFANFDSSAPGPSRCFIASENRDLFFWHRRLGHIGFDHLSRNSGMDLIRGLPKLKAPKDLVCAPCRHGKMTSSSHKPVTMVMTDGPGQLLHMDTVGPAQVQSVGGKWYVLVVVDDFSRYSWVYFLESKEETFGFFQSLARSLALEFPSALRAIRSDNGSEFKNSAFESFCDSSGVEHQFSSPYVPQQNGVVERKNRTLVEMARTMLDEFTTPRKFWTEAISAACFISNRVFLRTILHKTPYELRFGRRPKVSHLRVFSCKCFVLKPGNLDKFESRSVDGIFLGYATHSRAYRVYVLSTNKIVETCEVTFDEASPGARPEISGVPDESILVDEDSDDDDDDSISPPLDSTPPVQETGSPSTTSPSGDAPTTSSSAAEEIDGGTSGPTAPRHIQNRHPPDSMIGGLGERVTKNRSYELVNSAFVASFEPKNVCHALSDENWVNAMHEELENFERNKVWSLVEPSLGFNVIGTKWVFKNKLSEDGSIVRNKARLVAQGFTQVEGLDFEETFAPVARLEAIRILLAFAASKGFKLFQMDVKSAFLNGVIEEEVYVKQPPRFENPKFPNHVFKLDKTLYGLKQAPRAWYERLKTFLLQNGFEMGGVDKTLFTLHSGIDFLLVQIYVDDIIFGGSSHALVAQFSDVMSREFEMSMIGELTFFLGLQIKQTKEGIFVHQTKYSKELLKKFDMADCKPIATPMATTSSLGPDEDGEEVDQREYRSMIGSLLYLTASRPDIHFSVCLCARFQASPRTSHRQAVKCIFRYIKSTLEYGIWYPCSSALSVRAFSDADFAGCKIDRKSTSSTCHFLGTSLVSWSSRKQSSVAQSTAEAEYVAAASACSQVLWMISTLKDYGLSFSGVPLLCDNTSAINIAKIPVQHSRTKHIEIQYHFLRDNVEKGTIVLEFVESENQLADIFTKPLDRSHFEFLRTFICLSSLCDHVMLFKLVETCLN

SEQ ID NO: 19520 - protein, 339 aa, Oryza sativa
  unsure (1)..(339): unsure at all Xaa locations
  Clone ID: TF_OSC14140j.C1.p1.np
MTNKTLREFAAPSADNVTIGPQINLGDVDFDLKSSLITMQASPFCGPNENANAHLQXFLEICSTYTMKGVSPNNVRLRLFPFSLLGKAKKXFYANHATINTWDRCFTTFLSKFFPMEAREEARERLQEYVAACPHHGMDDWLILQNFYNGLTPMSHDHLDTAAGXDFFSKTVRGAIDLIEKMVSNMGWSEERLQTRQRGMHTVKEMEMLAAKMDLLMKXLDDHDKRPQGIVKALDSHVTCEVCGSTGHSGNDCPETHELAMYMGNNNNGYRPQGGQGWNQPCPYYQGANNNGNFSNQPSLKDLVFVQAKTTDALSKKLAANSQLAALVPANESGRIPGQ

SEQ ID NO: 19521 - protein, 676 aa, Oryza sativa
  unsure (1)..(676): unsure at all Xaa locations
  Clone ID: TF_OSC15762j.C1.p1.np
MTNKTLREFAAPSADNVTIGPQINLGDVDFDLKSSLITMQASPFCGPNENANAHLQXFLEICSTYTMKGVSPNNVRLRLFPFSLLGKAKKXFYANHATINTWDRCFTTFLSKFFPMEAREEARERLQEYVAACPHHGMDDWLILQNFYNGLTPMSHDHLDTAAGXDFFSKTVRGAIDLIEKMVSNMGWSEERLQTRQRGMHTVKEMEMLAAKMDLLMKXLDDHDKRPQGIVKALDSHVTCEVCGSTGHSGNDCPETHELAMYMGNNNNGYRPQGGQGWNQPCPYYQGANNNGNFSNQPSLKDLVFVQAKTTDALSKKLAANSQLAALVPANESGRIPGQDSSIENVKVITTRGGKSTCDLPYPNPVGTNKEAPSGTSADKKIQLEKVVPQAYYDTQLLPFPQRNRKPSVDEQFARFVEVIXKIHINMPXLDAIXVLTYARYLKDILNNKRPLPTMEVVKLMEQCNNAILHKFPEKKKDPGCPTITCSIGAQQFNQAFCDIGASVSVMPMDVFEKLNFTMLAPTPMHLQLADSLVRYPTGIAEDVPVKIRDSFIPDGFVVLDMETGKETLLILVHPFLKTAGANIDVGTGSIRFRINGKEEKFEFQPRTKHCSMVRIKYGPNLQNILVKFMQNFLEKETTFPRNRYWNTLVKPSVPAKKLEQPAXKKLSPAPKPKKV

SEQ ID NO: 19522 - protein, 766 aa, Oryza sativa
  Clone ID: TF_OSC19000j.C1.p1.fg
MSWHRAGVLLLGAQSCLPVPGVPAMAGSVSHRGLDMTGFVLELRGMCVVLGYPHGVDYQGRPLPEQEGDDAEPHAAWEVTAVILTGSPERTSLAVTAGGDSFPAACQNAALLAIGTLHQRYPDKLQHSPYRYHPRRGGARDYATFRDASSEDDATIMHLARMVEAYDAARIDFHQMVCRGMVENNLKILELRQENLQLKKDLDAVEAQLHQLKIAQGEVCRPKRRRVCRSQKITARKSTSRRELIRQSLAWTCFVETPRAEPAPVVPQEGEASGVGSTEDALLLTFRPGPSQRRSANTGDGNQPEGSNHNNHGSPPPPPPPPPPPPPDTNAILTQILAQQANMMTAFLHHLQNPPQQNAPPPPPQHSKLAEFLRIRPPTFSSSNNPVDALDWLHAVGKKLDTVQCSDEEKVIFAAHQLQGPASLWWDHFQATQPEGQPITWARFTAAFRRTHVPAGVMALKKREFRELKQGNRSVMEYLHEFNNLARYAPEDVREDEEKQEKFLAGMDPELSVRLVSGDYPDFQRLVDKSIRLEAKHKELESHKRRLANFRNQQGANQRIRYTNPYPGGSSSQQQQQQQPRSVPRPQFVVRVPQPQQQQSQQGTRAPRPPMPTVQPGQGRRDVQGPQRLCFNCFEPEHFADKCPKPRRQQGQAPPRSNKGGKDVIRGRVNHVTAEDVLTTPDVIVGVAVDPETVTAVTDWKQPKTVTQIRSFLGLAGYYWSVSRQSTNDRPDFSNLSKYRNGNGMKLGWISSPDFQKPKVDMILYG

SEQ ID NO: 19523 - protein, 1493 aa, Oryza sativa
  Clone ID: TF_OSC23329j.C1.p1.fg
MVKTRNGSRDSNNASGSEEPIDGPRASNAPNSSPSPPPENPTIAQVLDNQTQMMAMMMQQMQQQYHQVLQQVQQQAQQQQQNLQFGPPPPQSKLLESLRVKPPTFSSTTNPIEAHDWLHAIEKKLNLLQCNEQEKVAFATHQLQGPASVWWDNYMVTRPAWAEVTWTEFCHSFNKAQVPEGIVAQKKREFRSLQQGTRTVIEYLHEFNHLARYAPEDVRTDAERQEKFLSGLDDELINQLISRDYEDFEKLVDKAIRQEEHCNKINRKRKAAQFRTSQGKSQKPRFTMGHHGGPSTMIIRQYRPYHPGSFNKNHHSGSHNNSEQHSLNPTPSSLKIPAQSVQPALPEQPKRLGEKPKLCFNCNKPGHTVGKCPKPRRAGPKFVQARVNHASAEEAQSAPEVILGTFPVNSTLAVILFDSGATHSFISKRFAGAHGLSLVKLKIPMRVHTPGGGMTTTHYCPSVTVEIQGLIFPANLILLESKDLDVILGMDWLTRHRGVIDCASRTIKLTNAKGEEVTFQSPVPRKPGISLNQAAGEEQEVAVEKTTKKLEDIPIVREYPEVFPDDLTTMPPKRDIEFRIDLVPGTAPIHKRPYRMGANELAEVKKQVDEQLQKGYIRPSTSPWGAPVIFVEKKDKTKRMCVDYRALNEVTIKNKYPLPRIDDLFDQLKGATVFSKIDLRSGYHQLRIREEDISKTAFITRYGLFECTVMSFGLTNAPAFFMNLMNKVFMEFLDKFVVVFIDDILIYSKSEEEHEQHLRLVLEKLKEHQLYAKFSKCDFWLKEVQFLGHIVNAQGVAVDPANVESVTKWTPPRTVTQVRSFLGLAGYYRRFIENFSKIAKPMAQLLKKEEKFIWSAECNRSFEELKRRLDGKVVSYASRQLRPHEGNYPTHDLELAAVVHALKIWRHYLISIRCEVYTDHKSLKYIFTQPDLNLRQRRWLELIKDYDMGIHYHPGKANVVADALSRKSHCNVAWVEELCCEVQRDLEHLNLGIVEHGFVAALEAQPTLVEQVRIAQASDPEIAELKRNMRVGKARGFVEDEQGTIWTGERLCVPENKELKDLILTEAHQTQYSIHPGSTKMYQDLKEKFWWVSMRREIAEFVALCDVCQRVKAEHQRPAGLLQPLQIPEWKWEEIGMDFITGLPRTSSGHDSIWVVVDRLTKVAHFIPVHTTYSGKKLAELYLARIMCLHGVPKKIVSDRGSQFTSKFWQKLQEELGTRLNFSTAYHPQTDGQTERVNQILEDMLRACALDFGGAWDKSLPYAEFSYNNSYQASLQMAPFEALYGRRCRTPLFWDQTGERQLFGTEVLNEAEEKVRVVRERLRIAQSRQKSYADNRRRELAFETGDYVYLRVTPLRGVHRFQTKGKLAPRFVGPYRILERRGEVAYQLELPSNMLGIHNVFHVSQLKKCLRVPEEQASPDHIEIQEDLTYVEKPTRIPETSERRTRNKVIRFCKVQWSHHSEEEATWEREDELKATHPYLFASSSESRGRDSV

SEQ ID NO: 19524 - protein, 1115 aa, Oryza sativa
  Clone ID: TF_OSC23329j.C1.p2.gm
MVKTRNGSRDSNNASGSEEPIDGPRASNAPNSSPSPPPENPTIAQVLDNQTQMMAMMMQQMQQQYHQVLQQVQQQAQQQQQNLQFGPPPPQSKLLESLRVKPPTFSSTTNPIEAHDWLHAIEKKLNLLQCNEQEKVAFATHQLQGPASVWWDNYMVTRPAWAEVTWTEFCHSFNKAQVPEGIVAQKKREFRSLQQGTRTVIEYLHEFNHLARYAPEDVRTDAERQEKFLSGLDDELINQLISRDYEDFEKLVDKAIRQEEHCNKINRKRKAAQFRTSQGKSQKPRFTMGHHGGPSTMIIRQYRPYHPGSFNKNHHSGSHNNSEQHSLNPTPSSLKIPAQSVQPALPEQPKRLGEKPKLCFNCNKPGHTVGKCPKPRRAGPKFVQARVNHASAEEAQSAPEVILGTFPVNSTLAVILFDSGATHSFISKRFAGAHGLSLVKLKIPMRVHTPGGGMTTTHYCPSVTVEIQGLIFPANLILLESKDLDVILGMDWLTRHRGVIDCASRTIKLTNAKGEEVTFQSPVPRKPGISLNQAAGEEQEVAVEKTTKKLEDIPIVREYPEVFPDDLTTMPPKRDIEFRIDLVPGTAPIHKRPYRMGANELAEVKKQVDEQLQKGYIRPSTSPWGAPVIFVEKKDKTKRMCVDYRALNEVTIKNKYPLPRIDDLFDQLKGATVFSKIDLRSGYHQLRIREEDISKTAFITRYGLFECTVMSFGLTNAPAFFMNLMNKVFMEFLDKFVVVFIDDILIYSKSEEEHEQHLRLVLEKLKEHQLYAKFSKCDFWLKEVQFLGHIVNAQGVAVDPANVESVTKWTPPRTVTQDGKVVSYASRQLRPHEGNYPTHDLELAAVVHALKIWRHYLISIRYALSRKSHCNVAWVEELCCEVQRDLEHLNLGIVEHGFVAALEAQPTLVEQVRIAQASDPEIAELKRNMRVGKARGFVEDEQGTIWTGERLILERRGEVAYQLELPSNMLGIHNVFHVSQLKKCLRVPEEQASPDHIEIQEDLTYVEKPTRIPETSERRTRNKVGPTCRVVPNLQPCAHTGNRRCRPAFSAPRRAPHRARTPRPRRPPPPPFPLARAPTNGRDSLSNPTPLSLSPPHVAGEIGGFPGHVRLLPHH

SEQ ID NO: 19525 - protein, 1048 aa, Oryza sativa
  Clone ID: TF_OSC28109j.C1.p1.fg
MASKTLCEFAAPSAANVAVGPQVNIGDVDFDLKSSLITMAQASPFCGKPNEDANAHLQQFQEICTTYTIKGVSPDAVRLRLFPLSLLGRAKQWFYANRAAINTRDKCSTAFLSKFFPMGKTNALHGRISSFQQTRDESVPEAWERLQEHMAACPHHGMDDWLILQNFYNGLTPMSRDHLDAAAGGAFFSKTVQGAVELIEKMVSNMGWSEERLQTCQRGMHTVKETELLAAKLDLLMKRLDDHEKRPQGTVKALDSHVTCEVCGSTGHSGNDCPETREEAMYMGNNNGYRPQGGQGWNQLSPYYHEDLVFAQAKTIDVLSKKLAANDKILENINVKLDGFASAFQNQMSFNKMIETQLAQLESLVPANESGRIPGQPDPSIENVKAITTRRGTNEISKGAPSSDSVDKEVQPEKTMPQEKPSVDEQFTRFVEVIQKIHINVPLLDAMQVPTYARYLKEILNNKRPLPTTEVVKLMEQCSNVILHKLPEKEKDPGCPTITCSIRAQQLDQALCDLGASVSVVPKDVFDKLNFTVLAPKPMRLQLADSSVCYPARIAEDVPVKIRDFFIPVDFVDKVRAEPTEYSSGRSGATQDGQPREVYAEFPGGGNNDAQEPLLEDAGKITCTRQKVRAASLEEAVFRTEIKEGAEGKAKDTRSITSGDGWKIRELNQNDATFANSDRERQAYYMLSDREYAHTQEYSLELLKKIGLDVEFRSIWKAVGWQRFVVVDEPGSRLLTLQFLCTLKEIEDGISFRFFRKEFTLTWKGLSTLLGFHDSCKIDLQKGISGFEKNRFWEDISGAPICKKPRTNDIHNPTLGLMHKWIAMTLFPRSDLRPIRGDELIIMFAMVRKIKISPMKCMIRQWLESIKFSAPIECTSLITRIAKGLGVVSNQIAFISAARPHIYEAYLVQGHILKHGADGSLIYFFPGCTNEIPLPNVGYHLYNCHELTIPLQTIEESCAGGTYRETRNMTRNEQGSSSSSTPVQMRMDTLDVQMGEIQYDLTEHIAQTQEWQQSADAQFTNINNMMQQQHDDLQAYFRFQGFNPYQGP

SEQ ID NO: 19526 - protein, 1190 aa, Oryza sativa
  Clone ID: TF_OSC29791j.C1.p1.fg
MPDDKIGHKVAHGGRTPCKEVFATDFAREAKPIQPFLVAQDDGWISRQGGQAEQAQDKTTAHGIGTMRGQAREIARGTRAQWTRGGKEFGACGRGVHAVSSGSEAGVVLGPTRDFASMRGSSSAGRVEALDWMRADPASLIAAVLARMEAYLQSQGHNVWNKVKSPYTVPDDADITPANMAQVDFNYRARNAIIGGISSGEFNRVQHHKSAHDMWTALCNFHEGNNDIQLVRQNQFHKEYQRFEMHPGESIDSYFKRFGEIVSKLRSVGKEFSDNDNARHLLNCLDYGVWEMKVTSITESAPLSDLTMDKLYSKLKTHEMDVFHRKGLKHSMALVADPSGSTSSNDSAFVCGGFSLAALHSVTEEQLEKIPEDDLALFARKFSRAYKNVRDKKRGKTNEPFVCFECGEPNHIRVNCPKLKKKSDKTTKKPEGQGRKGKKDLMKKAIHKVLAALEEVQLSDIDSDDDDQEKGDKDFSGMCCLANNEDFINLCLMALEDKDDSSEHPEVCLDDIPSLDGSLCDDFCSDNDSVDDELSKERMAHLMIEISDKYRSSKYKIEKLKSENDGMALEIARLRSMIPEEDTCSTCASYLSKINLLKDKLKSCALGAGNSSSASAACSTCYEMKVDMGLLEMELKELKEKFVHDRIGRCENCPILTSDNNELRQQVAMLRTKNDLLESFATKEPIHSSCANCAILETELKDAKTVIDSIKSIDSCSSCISLKVDLESAKKENSYLQQSLERFAQGKKKLNMILDQSKVSINNQGIGYDFAESLRIGTHEILGVTDGMIELAQKPITFKSAGFIGNISSSTPKTSEPKMVSALERLEKSDKNVLGLEELLESLRGSSDFGVGRSNSWLVDSGCSRHMTGEAKWFTSLTRASGDETITFGDASSGRVMAKGTIKVNDKFMLKDVALVSKLKYNLLSVSQLCDENLEVRFKKDRSRVLDASESPVFDISRVGRVFFANFDSSAPGPSRCLIASENRDLFFWHRRLGHIGFDHLSRISGMDLIRGLPKLKAPKDLVCAPCRHGKMTSSSHKPVTMVMTDGPGQLLHMDTVGPARVQSVGGKWYVLVVVDDFSRYSWVYFLESKEETFGFFQSLARSLALEFPGALRAIRSDNGSEFKNSAFEFFCDSSGVEQQFSSPYVPQQNGVVERKNRTLVEMARTMLDEFTTPRKFWTEAISAACFISN

SEQ ID NO: 19527 - protein, 631 aa, Oryza sativa
  Clone ID: TF_OSC400128j.C1.p22.fg
MTGFNLPENFKENPEAFFRRVRPRVVAPQKTLPTEKPVVLAPPTFKIMASRTLREFAAPSTDNVAVGPQVNIGEVDFDFKSSLITMAQASPFCGKPNEDANAHLQQFLETCSMYTIKGVSPDAVRLRLFLFSLLGRAKQWFYANRAAINTWDKCSMAFLSKFFPMGKTNALRGRIFSFQQTRDESIPEAWERLQEYVAACPHHGMDDWLILQNFYNGLTPMSRDHLDAAAGGAFFSKMVQGAVDLIEKMDTELLAAKLDLLMKRLDDHEKRPQGTVKALDTHVTCEVCGSTGHSGNDCPETHEEAMYIGNKNNGYSPQGGQGWNQPRPHYQGETQLAQLASLVPANEIGRIPGQLDSSIENVKAITTRGGTSGMSKETPSNNSADKEIQPEKNVPQEYGDTRWLPFPQRSRKPSVDEQFARFVEVIQKIYINVPLLDAMQVPTYARYLKDILNNKRPLPTTEALCDLGASISVMPKDVFDKLNFTVLAPTPMRLQLADSSVRYPTGIAGGRASQESSTGQTRRIFKRLKWSHPRRIACMRRRLSRPFKGLGSSLSHHDEASTHLADVSMEDANTPRQLLNNADLDLVSDRERQAYYMLSDREYAQTREYSPELLKKIGMDVEFRSIWKAVG

SEQ ID NO: 19528 - protein, 1737 aa, Oryza sativa
  Clone ID: TF_OSC400850j.C1.p79.fg
MPGDKIGHKVAHGGRTPCEEVFATDFAREAKPIQPFLMAQDDGWISRQGGQAEQAQDKTTAHGIGTMRGQAREIARGTRAQWTRGGKEFGACGRGVHAVSSGSEAGVVLGPTRDFASMRGSSSAGHVEALDWMRAAMEEKYSAKPFVFDGHNFVIWKARMEAYLQSQGHNVWNKVKSPYTVPDDADITPANMAQVDFNYRARNAIIGGISSGEFNRVQHHKSAHDMWTALCNFHEGNNDIQLVRQNQFHKEYQRFEMHPGESIDSYFKRFGEIVSKLRSVGKEFSDNDNARHLLNCLDYGVWEMKVTSITESAPLSDLTMDKLYSKLKTHEMDVFHRKGLKHSMALVADPSGSTSSNDSAFVCGGFSLAALHSVTEEQLEKIPEDDLALFARKFSRAYKNVRNKKRGKTNEPFVCFECGEPNHIRVNCPKLKKKSDKTTKKPEGQGRKGKNDLMKKAIHKVLAALEEVQLSDIDSDDDDQEKGDKDFSGMCCLANNEDFINLCLMALEDKDDSSEHPEDFGVGRSNSWLVDSGCSRHMTGEAKWFTSLTRASGDETITFGDASSGRVMAKGTIKVNDKFMLKDVALVSKLKYNLLSVSQLCDENLEVRFKKDRSRVLDASESPVFDISRVGRVFFANFDSSAPGPSRCLVASENRDLFFWHRRLGHIGFDHLSRISGMDLIRGLPKLKAPKDLVCAPCRHGKMTSSSHKPVTMVMTDGPGQLLHMNTVGPARVQSVGGKWYVLVVVDDFSRYSWVYFLESKEETFGFFQSLARSLALEFPGALRAIRSDNGSEFKNSAFESFCDSSGVEHQFSSPYVPQQNGVVERKNRTLVEMARTMLDEFTTPRKFWTEAISAACFISNRVFLRTILHKTPYELRFGRRPKVSHLRVFGCKCFVLKSGNLDKFESRSLDGIFLGYATHSRAYRVYVLSTNKIVETCEVTFDEASPGARPEISGVLDESIFVDEDSDDDDDDSIPPPLDSTPPVQETGSPSTTSPSGDAPTTSSSAAEEIDGGTSGPTAPRHIQNRHPPDSMIGGLGERVTRNRSYDLVNSAFVASFEPKNVCHALSDENWVNAMHEELENFERNKVWSLVEPPLGFNVIGTKWVFKNKLGEDGSIVRNKARLVAQGFTQVEGLDFEETFAPVARLEAIRILLAFAASKGFKLFQMDVKSAFLNGVIEEEVYVKQPPGFENPKFPNHVFKLDKALYGLKQAPRAWYERLKTFLLQNGFEMGAVDKTLFTLHSGIDFLLVQIYVDDIIFGGSSHALVAQFSDVMSREFEMSMMGELTFFLGLQIKQTKEGIFVHQTKYSKELLKKFDMADCKPIATPMATTSSLGPDEDGEEVDQREYRSMIGSLLYLTASRPDIHFSVCLCARFQASPRTSHRQAVKRIFRYIKSTLEYGIWYSCSSALSVRAFSDADFAGCKIDRKSTSGTCHFLGTSLVSWSSRKQSSVAQSTAEAEYVAAASACSQVLWMISTLKDYGLSFSGVPLLCDNTSAINIAKNPVQHSRTKHIEIRYHFLRDNVEKGTIVLEFVESEKQLADIFTKPLDRSRFEFLRSELGITLKALKTLKFVIGVDLGQRRIGTRLREELRSKAIKDAGEAKPIQPFLMAQDDGWISRQGGQAEQAQDKTTAHGIGTMRGQAREIARGTRAQWTRGGKEFGACGRGVHAVSSGSEAGVVLGPTRDFASMRGSSSAGHVEALDWMRAVVAIEVAIYSSVKIHYRYNDRYKSYLLPRL

SEQ ID NO: 19529 - protein, 1773 aa, Oryza sativa
  Clone ID: TF_OSC401256j.C1.p18.fg
MEEKYSAKPFVFDGHNFVIWKARMEAYLQSQGHNVWNKVKSPYTVPDDADITPANVAQVDFNYRARNAIIGGISSGEFNCVQHHKSAHDMWTALCNFHKGNNDIQLVRQNQFHKEYQRFEMHPGESIDSYFKRFGEIVSKLRSVGKEFSNNDNARHLLNCLDYGVWEMKVTSITESAPLSDLTMDKLYSKLKTHEMDIFHRKGLKHSMALVADPSGSTSSNDSAFVCGGFSLAALHSVTEEQLEKIPEEDLALFARKFSRAYKNVRDRKRGKTNEPFVCFECGEPNHIRVNCPKLKKKSDKTTKKPEGQGRKGNKDLMKKAIHKVLAALEEVQLSDIDSDDDDQEKGDKDFSGMCCLANNEDFINLCLMALEDKDDSSEHPEVCLDDIPSLDGSLCDDFCSDNDSVDDELSKERMAHLMIEISDKYRSSKYKIEKLKSENDGMALEIARLRSMIPEEDTCSTCASYLSEINLLKDKLKSCALGAGNPSSASVACSTCYEMKVDMGLLEMELKELKEKKFHDRIGRCENCPILTSDNDELRQQVAMLRTKNDLLESFATKEPIHSSCANCAILETELKDAKTVIDSIKSIDSCSSCISLKVDLESAKRENFYLQQSLERIGTHEILGVTDGMIELAQKPITFKSAGFIGNTSSSSPKTSEPKMVPMTSKSKPVELPRPKNPKQVEHKQNQKQTKPVEKTKYECTYCGKAGHLDFGVGRSNSWLVDSGCSRHMTGEAKWFTSLTRASGDETITFGDASSGRMMAKGTIKVNDKFMLKDVALVSKLKYNLLSVSQLCDENLEVRFKKDRSRVLDASESPVFNISQVGRVFFANFDSSAPGPSRCFIASENRDLFFWHRRLGHIGFDHLSRNSGMDLIRGLPKLKAPKDLVCAPCRHGKMTSSSHKPVTMVMTDGPGQLLHMDTVGPAQVQSVGGKWYVLVVVDDFSRYSWVYFLESKEETFGFFQSLARSLALEFPSALRAIRSDNGSEFKNSAFESFCDSSGVEHQFSSPYVPQQNGVVERKNRTLVEMARTMLDEFTTPRKFWTEAISAACFISNRVFLRTILHKTPYELRFGRRPKVSHLRVFSCKCFVLKPGNLDKFESRSVDGIFLGYATHSRAYRVYVLSTNKIVETCEVTFDEASPGARPEISGVPDESILVDEDSDDDDDDSISPPLDSTPPVQETGSPSTTSPSGDAPTTSSSAAEEIDGGTSGPTAPRHIQNRHPPDSMIGGLGERVTKNRSYELVNSAFVASFEPKNVCHALSDENWVNAMHEELENFERNKVWSLVEPSLGFNVIGTKWVFKNKLSEDGSIVRNKARLVAQGFTQVEGLDFEETFAPVARLEAIRILLAFAASKGFKLFQMDVKSAFLNGVIEEEVYVKQPPRFENPKFPNHVFKLDKTLYGLKQAPRAWYERLKTFLLQNGFEMGGVDKTLFTLHSGIDFLLVQIYVDDIIFGGSSHALVAQFSDVMSREFEMSMIGELTFFLGLQIKQTKEGIFVHQTKYSKELLKKFDMADCKPIATPMATTSSLGPDEDGEEVDQREYRSMIGSLLYLTASRPDIHFSVCLCARFQASPRTSHRQAVKCIFRYIKSTLEYGIWYPCSSALSVRAFSDADFAGCKIDRKSTSSTCHFLGTSLVSWSSRKQSSVAQSTAEAEYVAAASACSQVLWMISTLKDYGLSFSGVPLLCDNTSAINIAKIPVQHSRTKHIEIQYHFLRDNVEKGTIVLEFVESENQLADIFTKPLDRSHFEFLRTFICLSSLCDHVMLFKLVETCLN

SEQ ID NO: 19530 - protein, 1662 aa, Oryza sativa
  Clone ID: TF_OSC401367j.C1.p83.fg
MEEKYSAKPFVFDGHNFVIWKARMEAYLQSQGHNVWNKVKSPYTVPDDADITPANMAQVDFNYRARNAIIGGISSGEFNRVQHHKSVHDMWTALCNFQGNNDIQLVRQNQFHKEYQRFEMHPGESIDSYFKRFGEIVSKLRSVGKEFSDNDNARHLLNCLYYGVWEMKVASITESAPLSDLTMDKLYSKLKTHEMDVFHRKGLKHSVALVADPFGSTSSNDSAFVCGGFSLAALHSVTEEQLEKIPKDDLALFARKFSRAYKNVRDRKRGKTNEPFVCFECGEPNHIRVNCPKLKKKSDKMTKKTEGQGRKGRKDLMKKAIHKVLAALEEVQLSDIDSDDDDQEKGDKDFSGMCCLANNEDFINLCLMALKDKDDSSEHPEVCLDDIPSLDGSLCDDSCSDNDSVDDELSKERMAHLMIEISDKYRSSKYKIEKLKSENDGMELEIARLRSMIPKEDTCSTCASYLSEIYLLKDKLKSCALGAGNPSSASATCSTCYEMKVDMGLLEMELKELKEKFVHDRIGRCENCPILTSDNDELRQQVDMLRTKNDLLESFATKEPVHSSCANCAILETEQKDAKTVIDSIKSIDSCSSCISLKVDLESAKRENSYLQQSLERFAQGKKKLNMILDQSKVSINNQGIGYDFAYDFAESLRIGTHEILGVRWDDRTSSKTYNLQVCSWLERLEKNDKNVLGLGELLESLGGSSVRVIVVQVVYLAFLAEMCTLDVTQQGWGKTDMDFGVGRSNSWLVDSGCSRHMTGEAKWFTSLTRASGDETITFRDASSGRVMAKGTIKVNDKFMLKDVALVSKLKYNLLSVSQLCDENLEVRFKKDRSRVLDASKSPVFDISRVGRVFFANFDSSAPGPSRCLIASENRDLFFWHHRLGHIGFDHLSRISGMDLIRGLPKLKAPKDLVCAPCRHGKMTSSSHKPITMVMTDGPGQLLHMDTVGPARVQSVGGKWYVLVVVDDFSRYSWVYFLESKEKTFGFFQSLVRRLALEFPGALQAIRSDNGSEFKNSAFEYFYDSSGVEHQFSSPYVPQQNGVVERKNRTLVEMARTILDEFTTPRKFWTEAISMACFISNRVFLRTILHKTPYELRFGHRPKVSHLRVFGCKCFVLKPGNLDKFESRSVDGIFLGYATHSRAYRVYVLSTNKIVETCEVTFDEASPGARPEISGVSDESIFVDEDSDDDDDDSFPPPLDSTPPVQETGSPSTTSPSGDAPTTSSSAAEEIDGGTSGPTAPRHIQNRHPPDLMIGGLGERVTRNRSYELVNSAFVASFEPKNVCHALSDENWVNAMHEELENFERNKVWSLVEPPLGFNVIGTKWVFKNKLGEDGSIVRNKARLVAQGFTQVKGLDFEETFAPVARLEAIRILLAFAASKGFKFFQMDVKSAFLNGVIEEEIYVDDIIFGGSSHALVAQFSYVMSREFEMSMMGELTFFLGLQIKQTKEGIFVHQTKYSKELLKFDMADCKPIATPMATTSSLGPDEDGEEVDQHEYRSMIGSLLYLTASRPDIHFSVCLCARFQASPRTSHHQAVKRIFRYIKSTLEYAEAEYVAAASACSQVLWMISTLKDYGLSFSGVPLLCDNTSAINIAKNPVQHSRTKHIEIRYHFLRDNVEKGTIVLEFVESEKQLADIFTKPLDRSRFEFLRSELGVIHPYGLI

SEQ ID NO: 19531 - protein, 2055 aa, Oryza sativa
  Clone ID: TF_OSC401864j.C1.p2.fg
MMSSSPYTRTCHVVPATNVHCISWHMMEVISSHSTTVIGVDLGQRRIGTRLREELRSKAIKDAGEAKPIQPFLVAQDDGWISRQGGQAEQAQDKTTAHGIGTMRGQAREIARGTRAQWTRGGKEFGACGRGVHAVSSGSEAGVVLGPTRDFASMRGSSSAGRVEALDWMRADPASLIAAVLARMEAYLQSQGHNVWNKVKSPYTMPDDADITPANMAQVDFNYRARNAIIGGISSGEFNRVQHHKSAHDMWTALCNFHEGNNDIQLVRQNQFHKEYQRFEMHPGESIDSYFKRFGEIVSKLRSVGKEFSDNDNARHLLNCLDYGVWEMKVTSITESAPLSDLTMDKLYSKLKTHEMDVFHRKGLKHSMALVADPSGSTSSNDSAFVCGGFSLAALHSVTEEQLEKIPEDDLALFARKFSRAYKNVRDKKRGKTNEPFVCFECGEPNHIRVNCPKLKKKSDKTTKKPEGQGRKGKKNLMKKAIHKVLAALEEVQLSDIDSDDDDQEKGDKDFSGMCCLANNEDFINLCLMALEDKDDSSEHPEVCLDDIPSLDGSLCDDFCSDNDSVDDELSKERMAHLMIEISDKYRSSKYKIEKLKSENDGMALEIARLRSMIPEEDTCSTCASYLSEINLLKDKLKSCALGAGNSSSASAACSTCYEMKVDMGLLEMELKELKEKFVHDRIGRCENCPILTSDNNELRQQVAMLRTKNDLLESFATKEPIHFSCANCAILETELKDAKTVIDSIKSIDSCSSCISLKVDLESAKKENSYLQQSLERFAQGKKKLNMILDQSKVSINNQGIGYDFAESLRIGTHEILGVTDGMIELAQKPITFKSAGFIGNISSSTPKTSEPKMVSALERLEKSDKNVLGLEELLESLRGSSDFGVGRSNSWLVDSGCSRHMTGEAKWFTSLTRASGDETITFGDASIGRVMAKGTIKVNDKFMLKDVALVSKLKYNLLSVSQLCDENLEVRFKKDRSRVLDASESPVFDISRVGRVFFANFDSSAPGPSRCLIASENRDLFFWHRRLGHIGFDHLSRISGMDLIRGLPKLKAPKDLVCAPCRHGKMTSSSHKPVTMVMTDGPGQLLHMDTVGPARVQSVGGKWYVLVVVDDFSRYSWVYFLESKEESFGFFQSLARSLALEFPGALRAIRSDNGSEFKNSAFEFFCDSSGVEHQFSSPYVPQQNGVVERKNRTLVEMARTMLDEFTTPRKFWTEAISAACFISNRVFLRTILHKTPYELRFGRRPKVSHLRVFGCKCFVLKSGNLDKFESRSLDGIFLGYATHSRAYRVYVLSTNKIVETCEVTFDEASPGARPEISGVLDESIFVDEDSDDDDDDSIPPPLDSTPPVQETGSPSTTSPSGDAPTTSSSAAEEIDGGTSGPTAPRHIQNRHPPDSMIGGLGERVTRNRSYDLVNLAFVASFEPKNVCHALSDENWVNAMHEELENFERNKVWSLVEPPLGFNVIGTKWVFKNKLGEDGSIVRNKARLVAQGFTQVEGLDFEETFAPVARLEAIRILLAFAASKGFKLFQMDVKSAFLNGVIEEEVYVKQPPGFENLKFPNHVFKLDKALYGLKQAPRACGIDFLLVEIYVDDIIFGGSSHALVAQFSDVMSREFEMSMMGELTFFLGLQIKQTKEGIFVHQTKYSKELLKKFDMADCKPIATPMATTSSLGPDEDGEEVDQREYRSMIGSLLYLTASRPDIHFSVCLCARFQASPRTSHRQAVKRIFRYIKSTLEYGIWYSCSSALSVRAFSDADFAGCKIDRKSTSGTCHFLGTSLVSWSSRKQSSVAQSTAEAEYVAAASACSQVLWMISTLKDYGLFFSGVPLLCDNTSAINIAKNPVQHSRTKHIEIRYHFLRDNVEKGTIVLEFVESEKQLADIFTKPLDRSRFEFLRSELGITLKALKTLKFVIGVDLGQRRIGTRLREELRSKAIKDAGEAKPIQPFLVAQDDGWISRQGGQAEQAQDKTTAHGIGTMRGQAREIARGTRAQWTRGGKEFGAVSSGSEAGVVLGPTRDFASMRGSSSAGRVEALDWMRAGERGIHAVERALSRAEA

SEQ ID NO: 19532 - protein, 1570 aa, Oryza sativa
  Clone ID: TF_OSC402311j.C1.p16.fg
MEEKYSAKPFVFDGHNFVIWKARMEAYLQSQGNNVWNKVKSPYTVPDDDDITPANVAQVDFNYRARNAIIGGISFEFSDNDNARHLLNCLDYGVWEMKVTSITDSAPLSDLTMDKLYSKLKTHEMDVFHRKGLKHSMALVADPSGSTSSNDSAFVCGGFSLAALHSVTEEQLEKIPEDDLALFARKFSRAYKNVRERERRKTNEPFVCFECGEPNHIRVNCPKLKKKSDKTTKKPEGQGRKGRKDLMKKAIHKVLATLEEVQLSDIDSDDDDQEKGDKDFSRMCYLANNEDFINLCLMALEDKDDSSEHLEVCLDDIPSLDGSPCDDSCSDNDSVDDELSKERMAHLMIEISDKYRSSKYKIEKLKSENDGMALEIARLRSMIPEEDTCSTCASYLSEINLLKNKLKSCALGAGNPSSASAACSTCYKMKVDMGLLEMELKELKEKFVHDRIGRCENCPIFTSDNDELRQQVAMLRTNNDLLESFATKEPVHSSCANCAILDTELKDAKTVIYSIKSIDSCSSCISLKVDLESAKRENSYLQQSLERFAQGKKKLNMILDQSKVSINNQGFIGNTSSSSPKTSEPKMVSALERLEKSDKNVLGLEELLESLRGSSDFGVGRSNSWLVDSGCSRHMTSEAKWFTSLTRASGDETITFGDASSGRVMAKGTIKVNDKFMLKDVALVSKLKYNSLSVSQLCDENLEVRFEKDRSRVLDASESPIFDISRVGRVFFANFDSSAPGPSRCLIASENRDLFFWHRRLGHIGFDYLSRISGMDLIRGSPKLKAPKGLIWTGITASHGYGWSCSGPVNWGEVSLARSLALEFPGALRAIRSDNGSEFKNSAFEFFCDSSGVEHQFSSPYVPQQNGVVERKNHTLVEMARTMLDEFTTPRKFWTEAISAACFISNRVFLRTILHKTPYELRFGHRPKVSHLRVFCCKCFVLKPGNLDKFESRSVDGIFLGYATHSRAYRVYVLSTNKIVETCEVTFEEASPRARPEISGVSDETIFVEDDSDEDDDDSIPPPLDSSPPVQETGSPSTTSPSGDAPTTSSSAAEEIDGGTSGPTAPRYIQNRHPPDLMIGGLGERVTRNRSYELVNLAFVAYFEPKNVCHALSDENWVNAMHEELENFERNKVCWSLVEPPLGFNVIGTKWVFKNKIGEDGSIVRNKARLVAQGFTQVEGLDFEETFAPVARLEAIRILLAFAASKGFKLFQMDVKSAFLNGVIEEEVYVKQPPGFENPKFPNHVFKLDKALYGLKQAPRAWYERLKTFLLQNGFEMGAIDKTLFTLHSGIDFLLVQIYVDDIIFGGSSRALVAQFSDVMSREFEMSMMGELTFFLGLQIKQTKEGIFVPQTKYSKELLKKFDMADCKPIATPMATTSSLGPDEDGEEVDQREYRSMIGSLLYLTASRPDIHFSVCLCARFQASPRASHRQAVKRIFRASSATSSLHLSTSSVAQSTAEAEYVAAASACSQVLWMILTLKDYGLSFSGVPLLCDNTSAINIAKNPVQHSRTKHIEIRYHFLRDNVEKGTIVLEFVESEKQLADIFTKPLDRSRFEFLRSELGVIHPYGLI

SEQ ID NO: 19533 - protein, 586 aa, Oryza sativa
  Clone ID: TF_OSC900064j.C1.p21.gm
MASKTLCEFAAPSAANVAVGPQVNIGDVDFDLKSSLITMAQASPFCGKPNEDANAHLQQFQEICTTYTIKGVSPDAVRLRLFPLSLLGRAKQWFYANRAAINTRDKCSTAFLSKFFPMGKTNALHGRISSFQQTRDESVPEAWERLQEHMAACPHHGMDDWLILQNFYNGLTPMSRDHLDAAAGGAFFSKTVQGAVELIEKMVSNMGWSEERLQTCQRGMHTVKETELLAAKLDLLMKRLDDHEKRPQGTVKALDSHVTCEVCGSTGHSGNDCPETREEAMYMGNNNGYRPQGGQGWNQLSPYYHESLQMNPGGFRGNPTPPLKMSRRSRRGEKIHINVPLLDAMQVPTYARYLKEILNNKRPLPTTEVVKLMEQCSNVILHKLPEKEKDPGCPTITCSIRAQQLDQALCDLGASVSVVPKDVFDKLNFTVLAPKPMRLQLADSSVCYPARIAEDVPVKIRDFFIPVDFVEVKFEFQPWTEQCSMVRIKYGPNPQNIQVVEVEPPKTDSLVKAASLEEAVFRTEIKEGAEGKAKDTRSITSGDGWKIRELNQNDATFANRWNIQGDAQHDKERTRKFIILDTRADV

SEQ ID NO: 19534 - protein, 1493 aa, Oryza sativa
  Clone ID: TF_OSC900185j.C1.p17.fg
MVKTRNGSRDSNNASGSEEPIDGPRASNAPNSSPSPPPENPTIAQVLDNQTQMMAMMMQQMQQQYHQVLQQVQQQAQQQQQNLQFGPPPPQSKLLESLRVKPPTFSSTTNPIEAHDWLHAIEKKLNLLQCNEQEKVAFATHQLQGPASVWWDNYMVTRPAWAEVTWTEFCHSFNKAQVPEGIVAQKKREFRSLQQGTRTVIEYLHEFNHLARYAPEDVRTDAERQEKFLSGLDDELINQLISRDYEDFEKLVDKAIRQEEHCNKINRKRKAAQFRTSQGKSQKPRFTMGHHGGPSTMIIRQYRPYHPGSFNKNHHSGSHNNSEQHSLNPTPSSLKIPAQSVQPALPEQPKRLGEKPKLCFNCNKPGHTVGKCPKPRRAGPKFVQARVNHASAEEAQSAPEVILGTFPVNSTLAVILFDSGATHSFISKRFAGAHGLSLVKLKIPMRVHTPGGGMTTTHYCPSVTVEIQGLIFPANLILLESKDLDVILGMDWLTRHRGVIDCASRTIKLTNAKGEEVTFQSPVPRKPGISLNQAAGEEQEVAVEKTTKKLEDIPIVREYPEVFPDDLTTMPPKRDIEFRIDLVPGTAPIHKRPYRMGANELAEVKKQVDEQLQKGYIRPSTSPWGAPVIFVEKKDKTKRMCVDYRALNEVTIKNKYPLPRIDDLFDQLKGATVFSKIDLRSGYHQLRIREEDISKTAFITRYGLFECTVMSFGLTNAPAFFMNLMNKVFMEFLDKFVVVFIDDILIYSKSEEEHEQHLRLVLEKLKEHQLYAKFSKCDFWLKEVQFLGHIVNAQGVAVDPANVESVTKWTPPRTVTQVRSFLGLAGYYRRFIENFSKIAKPMAQLLKKEEKFIWSAECNRSFEELKRRLDGKVVSYASRQLRPHEGNYPTHDLELAAVVHALKIWRHYLISIRCEVYTDHKSLKYIFTQPDLNLRQRRWLELIKDYDMGIHYHPGKANVVADALSRKSHCNVAWVEELCCEVQRDLEHLNLGIVEHGFVAALEAQPTLVEQVRIAQASDPEIAELKRNMRVGKARGFVEDEQGTIWTGERLCVPENKELKDLILTEAHQTQYSIHPGSTKMYQDLKEKFWWVSMRREIAEFVALCDVCQRVKAEHQRPAGLLQPLQIPEWKWEEIGMDFITGLPRTSSGHDSIWVVVDRLTKVAHFIPVHTTYSGKKLAELYLARIMCLHGVPKKIVSDRGSQFTSKFWQKLQEELGTRLNFSTAYHPQTDGQTERVNQILEDMLRACALDFGGAWDKSLPYAEFSYNNSYQASLQMAPFEALYGRRCRTPLFWDQTGERQLFGTEVLNEAEEKVRAVRERLRIAQSRQKSYADNRRRELAFETGDYVYLRVTPLRGVHRFQTKGKLAPRFVGPYRILERRGEVAYQLELPSNMLGIHNVFHVSQLKKCLRVPEEQASPDHIEIQEDLTYVEKPTRIPETSERRTRNKVIRFCKVQWSHHSEEEATWEREDELKATHPYLFASSSESRGRDSV

SEQ ID NO: 19535 - protein, 132 aa, Oryza sativa
  Clone ID: TF_OSC13261j.C1.p1.np
NEKRKCRVRRYLCFNCQGMGHFADKCPKPRNIAAGTSVHATLQSEACSSTNGHPCIKQCTNAPPAAPDSAINLSNHSLQRQPQQRIVVDGRSCVSPRPTPGRAKGNQPPEGDTKQKTVIRCNQQSEGSFSCE

SEQ ID NO: 19536 - protein, 510 aa, Oryza sativa
  Clone ID: TF_OSC25450j.C1.p1.fg
MSNEVNHVGKAPIFNGTNYSTWKIKMSTHLKAMSFHIWSIVYVGFAITGTPLTEIDHRNLQLNAQAMNALFNSLSQEEFDRVSNLETAYEIWNKLAEIHEGTSEYKDAKLHFLKIQYETFYMLPHESVNDMYGRLNVIVNDLKGLGANYTDLEVAQKMLRALPEKYETLVTMLINSDMSRMTPASLLGKINTNDMYKLKKKEMEEASPSKKCIALQAEVEDKSKSKVNEVNEDLEEEMILLARRFNDLLERRKERGRGSNSNRRRNRRLNKTLSNLRCFEYGEKGHFASKCPSKDDDGDKSSKKKSGGYKLMKKLKKEGKKIEAFIGEWDSNEESSASSGSEEEGGDDASSKKKKMVVVAIKEAPSLFAPLCLMAKGSSKVTSLSDSESDDDCDDVSYEELVSMFEELHAYSEKEIVKFKALNKDYASLDVLYEELKTSNERLTISHEKLKEAHDNLLSTTQHGAHIDVGISCDLLDDSATCHIAHVASSSISTSCDDLMDMPSPCSSSS

SEQ ID NO: 19537 - protein, 436 aa, Oryza sativa
  Clone ID: TF_OSC100511j.C1.p3.fg
MEMDEVGGRWTSLGQMKATRAAARISETNNTSARRVSSFKVLSLVLMFNREKGKNVSGYASSNLSFQLNPPLASRELTRAHPWSIPSMLLSSQLPLVGSQDQNRYVFDRAFATQVNELPMPEEHVPFCHDCREQGHYALNCPWVYAKEAPSFGLAGQTSLNQPPHTKSSLQPSVQSREPNGENPLNTGKCFPPSLSHHVGSRTKQAKGKKSKNQKRKAPMRTEEEVRKMTITNTEWPPAGITIPRRQRGNTFRGARQLTQHLLSHGGRVSDSEGSDQVSLDYEDESPRHVGRDEMESKACPHCGEIGHVASMCLTLCPHCEEDHPPGECPTRKVTCFLCEAPTILCTDGLSKELSSMEEVVSLPDLLQAEQRAINLRRAIPSRRPLSASNSNQKEASPVNDSNIQSYHIITEPIKDAVTRTMPAISLQNQNEYPCL

SEQ ID NO: 19538 - protein, 1294 aa, Oryza sativa
  Clone ID: TF_OSC409287j.C1.p3.fg
MADPARGSSGSAFLYPQLTSTNYTSWVIRVQAMMEDQGVWEAIEPAAGAAVDPRKDKKVKSHLLQSLPEDLLMQVAKKRTAKEVWDCLKTRFVGADKVRDARLQTLKGEFASMVMEAGESLDQYAGRITMMGVRHSALGATLNDAAMVKKLFDTVPEKFVSLVVGIEQFYNVDDMPFEEAVGRLKAYDERVRKKKAAASGVTADGQVLLTKAEWEARFKKGRGETSSPQKNKPSGEGANRGQARRSRGRGRGRGGTQSSGGGSGGGGRDKSHIKCFNYEEFGHYSTQCPHPKKKKAEAHLVQTDDAGPALLLAVTKAVQNAPGQGMDCGLVVHEERVWPRLMLAEKGAAAGDLWYLDNGASNHMTGDRRKFRELDETVTGVVRFGDASSVQIMGKGLILFACKNGDQWLLDDVYYIPSLCCNMVSLGQLTETGHRVVMDNDDLEVFDKNPWRLVIKVRRTSNRLYRIELQLASPVCLLTSLGDPAWLWHARLGHVNFQTLKLLVDKEMAAGVPQVHHPNQLCQACLMAKQIRQPFPAMANYRAEAPLELLHMDLCGPITPSTFAVNRYFLLIVDDFSRWMWVFVIKTKDQALEMFAKFKPLAENTADHSIKTLRTDHSGEFLSGEFARVCDEAGIERHLTAPYSPQQNGVVEHRNRSVMAMARSLLKGMSVPGRMWGEAVRHAVFLLNRLPTKSMGEHTPFEAWTGKKPHLGHLQVFGCTAHTKVTTPNLKKLDDRREENSTEFVVEEPVGEQQPALAEQSTTVEASLSTAGSDDGPLRYRSLADIMLEAPRVDLVDEEDGEALLAETEEPSSYREAAGEPAWVDAMQKELEAIEKNSTWSLCTLPVGHKAIGLKWVFELKKNTTGEVIKHKAWLVAKGYVQRHGVDFEEVFAPVARLDTVRTILAVAADRGWRVHHLDVKSAFLNGELEEEVYVAQLEGFIKKGQEHLVLKLSKALYGLRQAPRAWNICLDKSLKELGFMRCKQEQAVYTRGRGAEAMIVGVYVDDLIVTGENPARVEAFKKQMMGEFEMNDLGLLSYYLGIEVGQVPVDPKTQLQKDADGHPVDAIEYRRVIGCLRYLLHTRPDLSYAVGVASRFMEHPTMTHLKAVKQILRYLKGTIDCGLVYTAGIGEITITGYTDSDLAGDVDDRRSTGGMAFYINNSLVAWSSQKQKTVTLSSCEAEFMAATAAACHALWLRALLGELLGEEAKLVKLFVDNKSAIALMKNPVFRGRSKHIDTRYQFIRECIERRQILVEFVRSEEQRADALTKGLPAAKLVTARFLLRVRDLGERQA

SEQ ID NO: 19539 - protein, 1253 aa, Oryza sativa
  unsure (1)..(1253): unsure at all Xaa locations
  Clone ID: TF_OSC19560j.C1.p3.np
FQHLGLDLDVFFAHQVVSEAVVKSVQDAFTKIGFLNHMERLDKQISTLTDRVAALETPSNEEVVSGDDDAHSEDTVYDSSGYIDTPATRQARLXRRLRINRTGMGGTRHQQGNNNRVPDDPYAKVKFKIPSFSGYYDAEKYLDWEMAIEQKFNAHLVPEQHRVKQASSEFKDFAIMXWAGLSDEGVLPTTWEELKVAMHDRFVPPSYHRDLRKKLMRLEQGDKSVQDYYGELQKGVRRCGIVEGVEDAIFRFYSGLREEIQNIVDYKEFNSMNQLFWFAMLEEKELQGRDHQGKNKASTYTPRTMPSTGLPPASKRPAAFGASAAPASKRPAAFGASAAPKPSPPQPAESGNGSSQVPAKSASSVASTGRIQCHRCQGFGHVQKDCPIQRAYVATEDGYITTSDVEEEEEEEVEDEDGEVFGRDDTTDYRTIVVQRVLSMQVQQPERLQRHNLFQIFFVINNRRARVIIDGGSCNNLVSSDLVKKLGLTTRTHPHPYHIQWLNDFGRAKVTQVCRVSFSIGSYADSVDCDVVPMQACSLLQGHAWEHDNDYTLVHNGKKITLLPLTPAEIVEADKERAASLKLDESENQQSPSSKVEGIKLKGGVMLSPSSKVEGIKLKGGVMLATKCDIAEISDDDICYFLICKQALVSLDDIASSIPRVVTNLLQEYEDVFPAEIPPGLPPMRGIXHQINLIPGASLPNRAAYRTNPEETKGIQRQVQDLLDRGYVCXSLSPCVVLVILVPKKDSSXRMCVDCRAINNITIRYRHPIPRLDDMLDELCGSIIFTKIDLRSGYHQIRMKLGDEWKTSFKTKFGLYEWLVMTFGLTNAPSTFMRLMNEVLRPFIGRFVVVYFDDILIYSKSLDEHMDHLRAVFNALRDARLFANIEKCIFCTERDSFLGYVVTPQGIEVDESKIEAIKSWPVPXTITQVRSFLGLAGFYRRFVKDFSTFAAPLNELMKKGVVFHWEKTQEKSFDTLKDKLTHAPLLQLPNFGKTFELECDESGVGIGGVLMQDGKPVAYFSEKLHGPVLNYSTYDKELYALVRSLETWRHYLWPKEFCIHSDHESLKYFRSQNNLNRRHAKWVEFIESFPYVIKHKKGKDNVIANALSRRYTFLSQLDCRIFRLESIKEQYALDPDFNEVMLNCKEGRTWNKFVINGGFVYRANRLCIPVGSLRLLLIQEAHGGGLMGHFGAKKTVDVLAMHFFWPRMRKDVERFVARCTSCQKAKSRLNPHGLYMPLPVPSIPWTDISMDFV

SEQ ID NO: 19540 - protein, 849 aa, Oryza sativa
  Clone ID: TF_OSC19560j.C1.p5.fg
MGPTWAGVPNEVTSPKDHDSRWPNRIPAFGGLDLDVFLFIYDVSNGCIHSSYGHITKASGPHRMRRRLSQLFKGSGPSSSHHDGSSTRSSANISMEDAEAPRHDTDITTSDTHNNPPMVIQGLIARARARQLNLEVSSFLCSSLYEFEKRLLPNEYIVIRNNRGDKETLGEGLRAMEDHRGRPSQGGGPNQFDLGAIRSLGPVCTKTGAQVAYVLGLGRSLYEWKTKKITFPMVLVPHPNTFRVNGYRPNKLTSRICPGAVSPYLGLWAITFRKIGNPSAHQVVSEAVVKSVQDAFTKIGFLNHMERLDKQISTLTDRVAALETPSNEEVWAGLSDEGVLPTTWEELKVAMHDRFVPPSYHRDLRKKLMRLEQGDKSVQDYYGELQKGVRRCGIVEGVEDAIFRFYSGLREEIQNIVDYKEFNSMNQLFWFAMLEEKELQGRDHQGKNKASTYTPRTMPSTGLPRAVSFRAPSQPASKRPAAFGASAAPKPSPPQPAESGNGSSQVPAKSASSVASTGRIQCHRCQGFGHVQKDCPIQRAYVATEDGYITTSDVEEEEEEEEVEDEDGEVFGRDDTTDYRTIVVQRVLSMQIFFVINNRRARVIIDGGSCNNLVSSDLVKKLGLTTRTHPHPYHIQWLNDFGRAKILLIVMWFLCKLVHFCKEHHCQTVLLIEPTQRRLREFSGKFKISWTAGFYRRFVKDFSTFAAPLNELMKKGVVFHWEKTQEKSFDTLKDKLTHAPLLQLPNFGGKTEPQTKPYPLDMWKYGSALQQRPELNPDSTRGVLMQDGKPVAYFSEKLHGPVLNYSTYDKELYALEAHGGGLMGHFGAKKTVDVLAMHFFWPRMRKDVE

SEQ ID NO: 19541 - protein, 438 aa, Oryza sativa
  Clone ID: TF_OSC33342j.C1.p1.fg
MEDHRGRPSQGGGPNQFDLGAIRSLGPVCTKTGAQVAYVLGLGRSLYEWKTKKITFPMVLVPHPNTFRVNGYRPNKLTSRICPGAVSPYLGLWAITFRKIGNPSAHQVVSEAVVKSVQDAFTKIGFLNHMERLDKQISTLTDRVAALETPSNEEVWAGLSDEGVLPTTWEELKVAMHDRFVPPSYHRDLRKKLMRLEQGDKSVQDYYGELQKGVRRCGIVEGVEDAIFRFYSGLREEIQNIVDYKEFNSMNQLFWFAMLEEKELQGRDHQGKNKASTYTPRTMPSTGLPRAVSFRAPSQPASKRPAAFGASAAPKPSPPQPAESGNGSSQVPAKSASSVASTGRIQCHRCQGFGHVQKDCPIQRAYVATEDGYITTSDVEEEEEEEEVEDEDGEVFGRDDTTDYRTIVVQRVLSMQIFFVINNRRARVIIDGGSCNNL

SEQ ID NO: 19542 - protein, 419 aa, Oryza sativa
  Clone ID: TF_OSC401549j.C1.p27.fg
MAATVVSKFEVVKFDGTGNFVLWQMRLKDLLAQQGISKALEETMPEKMDAGKWEEMKAQAAATIRLSLSDSVMYQVMDEKSLKEIWDKLASLYMSKSLMSKLYLKQQLYGLQMQEESDLRKHVDVFNQLVVDLSKLDVKLDDEDKAIILLCSLPPSYEHVVTTLTHGKDTVKTDEIISSLLARDLRRSKKNEAMEASQAESLLVRAKHDHEAGVSKSKEKRARCYKCHEFGHIRRNCLLLKKRKGGIASLAARGDDSDSSSHEILTVSNEKSGEAWMLDLASSYHVTSKREWFSSYKSGDFGVVYLGDDTSYRVVGVGDVKFKMYDGNEVLLSNVRHVPGLRKSLISLGSLHETGWLYQVDSNRKTMNIMKDGKTVMTGERTSSCLYKLQGSAVAGGVMEDGYAGVVVHDPEGGKPGVG

SEQ ID NO: 19543 - protein, 624 aa, Oryza sativa
  Clone ID: TF_OSC417388j.C1.p2.gm
MAATVVSKFEVVKFDGTGNFVLWQMRLKDLLAQQGISKALEETMPEKMDAGKWEEMKAQAAATIRLSLSDSVMYQVMDEKSLKEIWDKLASLYMSKSLMSKLYLKQQLYGLQMQEESDLRKHVDVFNQLVVDLSKLDVKLDDEDKAIILLCSLPPSYEHVVTTLTHGKDTVKTDEIISSLLARDLRRSKKNEAMEASQAESLLVRAKHDHEAGVSKSKEKRARCYKCHEFGHIRRNCLLLKKRKGGIASLAARGDDSDSSSHEILTVSNEKSGEAWMLDLASSYHVTSKREWFSSYKSGDFGVVYLGDDTSYRVVGVGDVKFKMYDGNEVDSNRKTMNIMKDGKTVMTGERTSSCLYKLQGSAVAGGVMEDGYAGVVVHDPEGGKPGERDGVDVAGLAVGEEVGAVLRHDRVGTGSDRVGARNRRMEQAPELGLRGARACAHGEHLAPKLRHAVPSLARPGSGCFSALWSSCPRASRALAPATNLHKSRQQKRQQIGRRGRRRGEAHDGGIPDVPPQHGRRGGATAWEEPLAASTIVSAFWIHRRVPNLLRRVPSLLRCRRREERGEERPPAGRREKPPAGRGERRGHRRGERRSRRRGEGKCSVVEERRGQPVELEEGEGRGD

SEQ ID NO: 19544 - protein, 1172 aa, Oryza sativa
  Clone ID: TF_OSC418783j.C1.p5.fg
MVKTRNGSRESHNASGSEEQISRARASDASSNSSSPPPENPTIAQVLDNQTQMMTMMMQQIQQQYHQSKLLEFLRVKLPTFSRTTNPIEATDWLHAIEKKLKLLQCNDQEKVAFATHQLQGPASVWWDNYMVTRPAGTEVTWLEFCKSFNKAQVPERIVAQKKREFRSLQQGTRTVIEYLHKFNRLARYAPEDVRTDDERQEKFLSGIDDELTNQLISRDYEDFEKLVDKAIRQEEQCNKMNRKRQATQFRAPQGKNQKPHFTMGCQGGPSTMIIRQHRPYHPGNFNGINNSGNHSNSEHHSLNPTPSPLMNEAQSVQPALPAQSKQPKEFEGKPELCFNCNEPGHMVGTCPKPRRAGLKFVQAHVNHASAEEAQSAPEVILGTFPVNSTPAIILFDSGATHSFISKRFAGAHGLSLVKLKIPIRVHTPGGGMTTTHYCPSVTVEIKGLIFPANLILLESKDLDVILGMDWLTRNRGVIDCASRTIKLTKQEVAVEKTTKKLEDIPIVREYPEVFPEDLTSMPPKRDIEFRIDLAPGTAPIHKRLYRMGANELEEVKKQVDEQLQKGYIRPSTSPWGAPVVFVEKKDKTNRMCIDYRTLNEVTIKNKYHLPRIDDLFDQLKGATVFMEFLDKFAVVFIDDILIYSKSKEGHEQHLRLVLEKLKEHRLYAKFNKCDFWLKEVQFLGHVVNAQGVAMDPANVESVPKWTPPRTVTQIRSFRDLRAITADQTKDFQVYCDASCQGLGCVLMQDGKVVAYASRQLRPHEGNYPTHDLELAAVVHALKIWRHYLIGNYCERRWLELIKDYDMGIYYIPGKANVVADALSRKSYCNVVWVEELCCEVQRDLEHLNLGIVEHRFVAALEAQPTLVEQVRITQASDSEIEELKKNMRVGKARGFTEDENGTIWMGERLCVPENKELKDLILTEAHQTHYSIYPDSTKMYQDLKEKFYYQASLQMAPFEALYGRRCRTSLFWDQTGERQLFGTKVLNEAEEKVRAVRERLRIAQSRQKSYADNHRRELTFEAGDYVYLRVTPLRGVHCFQTKGKLAPCFVGPYRILERRGEVAYRLELPSSMLGIHNVFHVSQLKKCLRVPEEQASPDHIEIQEDLTYVEKPARILETSNRRTRNNVIRFCKVQWSHHSEEEATWEREDELKADHPHLFASSSESRGRDSV

SEQ ID NO: 19545 - protein, 199 aa, Oryza sativa
  Clone ID: TF_OSC28636j.C1.p1.gm
MHIVKETELLAAKLDLLMKRLDDHDKRPQDTVKALDSHVTCEVCGNTGHSRNDCRETREEAMYMGNNNNNGYRPQGGQGWNQPRLYYQGGNNNGNFSNQPSLKDLVIAQAKTTDALNKKLAANDKILENINVKLDVPAKETGRIPGQPDSSLENVKAITTMGENPHKRAVVGCYASTNICPLSQGHTQQQETTPNNGGG

SEQ ID NO: 19546 - protein, 442 aa, Oryza sativa
  Clone ID: TF_OSC25720j.C1.p1.fg
MSWHRAGVLLLGAQSCLPVPGVPAVGGIGSVLLSMARMGWKLCHVFRPYTVVMFNREKGKNVSGYASSNSSFQLNPPLASRELTRAHPWSIPSMLLSSQLPLVGSQDQNQYVFDRAFATQVNELSMPEEHVPFCHDCREQGHYALNCPWVYAKEAPSFGLAGQTSLNQPPRTKSSLQASVQSREPNGENPLNPRKCFPPSLSYHVGSRTKQAKGKKSKNQKRKALMRTEEEVRKMTITSTEWPPAGITIPRRQRGNTFRGARQLTQHLLSHGGRVSDSEGSDQVSSDDEDESPRHLGEEEMESKACTRCGEIGHVASRCLTLCPHCEEDHPPGECPTRKVTCFLCEAPTILYTDSLNKELSSMEEVVSLPDLLQAEQRAINLRRAIPSKRPSSASNSNQKEASPVNDSNMQSYHIITEPIKDAVTRTMPAISLQNQNEYPCL

SEQ ID NO: 19547 - protein, 1336 aa, Oryza sativa
  Clone ID: TF_OSC400775j.C1.p70.gm
MANDRDLPRVRRGTVLGPTQGCTTTLLPVEGTRLSLLAGAPSGRAVASSSIAVASPSPACPPFPAETPGAAFPPSPFPFLRAGRLQPPLSPCLSAGRRRHHLPRLRDATLIPGITSSSPEFRRNTVARAGLTFLLVDVSSGNPFRHARASAGAAVPSLGTVTGVEHAVLVSVQPLPAALVASSLVPVVVVVVLSSFPVSLVVAFVPPSSRSRPSSAFVQCAAAAPVVVFVLGSVSSSLVPAASRLRPRIAAEVVPSPSVSAAPVRRCRSHASSRGGKDLSSRCPVLVLSVSPRTRCAVVDPVTMVEVLEQEVVVRTPTPSGSDDASGSRDPRHRRQNSPTPLRRSPRRQEDPNRSGGSALSPPPGGGRPRRAGVRRHLTYGDGGSPQGALQAVGALLWHPLVNPEPETPVQRWLYDVANLVTAAQRTKESPSVSLDIEAIDSSNVVKALGQPKARRRPVWGTRRSDQHRAQQGQAPCCPHGEGAYSSGVSRLSARDARSPRPFPVGPGARPSCINPSEFLQIYTTIIMAAGGDDRVMANYFPMALKGVRHNRMLEKIASKEPKTTTELFELADKAVGQEEEQEAGPLRRRGLRPCCGRLADYRTVKNLVERYRKTDGERRQSRREGKAPATSASDRREEAKKKAPADDDDDSDNLEFQVPHGTVATLDGGACAHASRRSFKAMRRKVLAAVPTREAARQARWSENFYNGLTPMSRDHLDAAAGGAFFSKMVQGAIELIEKMVSNMGWSEERLQTRQRGMHTVKEMELLAAKLDLLMKRLDDHEKRPQGTVKPLDSHVTCEVCGGTGHSGNDCPETLTANESGRILGQPDSSIENVKAITTRGVIQKIHISIPLLDAMQVPTYAHNLKDILNNKRPLPTTEVVKLTEHCSNLILHKLPEKKKDPGCPTITCSIRAQQFDQALCDLGASISVMPKLTSLTSSTSRRKSLSFNQGRNNAPSSESKLPRKGNNNAQELLLEDASKITCTGQEVRAVGSEEAVSRTEIKEGVEEEAKDARSITSGDGWKIRELNRKEGSGSPSSRHDESSTRSSADVSMEDADAPRQLLSDDDLDLVSDRERQAYYMLSDWEYAHMREYSPELLKKISGTYRETRNMTRNEQESSSSSTPMQMYEAGWAPIGDAPGWTQAPRHSIGVSTWSSTSEDRWHAPHDIHWGNNQPSRSSGVPPAPSEWHSSSSRWDLGEITRRMDTLDMQTGEIRRAAPGLWSQSPLSVVAVGFARSRSTSAAPFQPPKTAGAPSLTLTRAEPPLEFVAGLRSSSSVVVFHTGCQTEKRREVRGVAGDSMPLVIFIEEWYTSGQSKTIRIAVPAVMGGLSNVFRD

SEQ ID NO: 19548 - protein, 1286 aa, Oryza sativa
  unsure (1)..(1286): unsure at all Xaa locations
  Clone ID: TF_OSC401354j.C1.p14.np
SXSSSKGERMEVWLAALPSTLTNQEISKDYADFERLVDRTIRXEDQRNKIDRKRKAMQFRFQQGGQQKHRCGYGQHSGSTIMIVRXHRPYQLGNFSRGNSGNQNNHNVPRAQSQALQPHQPKKKSEQKPLMCFNYGDTGHFANKCPKTMRNGPKVVQARVYHVSTKEAQAASEVVLGTFPVNSIPSTVLFDSGATHSFISKRFVWVHGLRKVXLSTPMKVNTPSNSLTLVSFCSSLMIEIQGSPFLANLILLECKDLDVILGMDWLTRHKGVIDCASRTITLVNXNGEVVVIQSPFIQKKEVSLNXVESEQQDEVMKDVPKLEDIPVVCEYSEVFLEESTAMLPKKDIEFRINLVLGTAPIYKRPYRMAAEEMAEVKKQVDEQLQKGYIRPSTSPWGALVIFVEKKDKTKRMSTDYRALNDVTIKNKYPLLRIDDMFHQLKGATVLSKIYLXSGYHQFRIREEDIPKTTFTTRYELFECIVMSFGLTNAPTFFMNLMNNVFMEYLDFVVVFIDDILVYSKSKEEHGNHLHVVLEKMKEHXLYPKFSKCDFWLKEVKFHVITTKRVAVDSXNVEAVTKWIPPKTVMQVRSFLGLTGYYCRFIENFSRIAKPMTQLLKKEEKFVRTSQCQESFEELKRRLVSALILILPNQRKDFEVYCDASRQGLGWVLIQEGRVVAYASRQLRTHEDNYPTHDLELAVVVHALKIWRHYLIGNRSEIYTDHKSMKYIFTQPDLNLRQCRLLELIKDYDVCIDYHPGKANVVADALSRKNYCNATCLEEVSTQLIQDLERLNLGIVEHGFVAALEAQPTLVAHAKYPEIAELKKNMRVDKARDFTEDEHGTIWMGERLCVPDNKELKELTLSEAHQIQYSIHPGSTKMYQYFKEKFWSVSMKREIAEFVALRDVCQRVKAEHXRPAGLQSIQIPEWKWEEIGMFITGLPRTSSGHDSIWVIVDRLMKVAHFLPVHTTYIGKRLAELYLSRIVCLHGVPKKIVSDRGSQFTSKFWHKLQEELGTRLNFSTAYHLQTDGQTEQVNQILEDMLRVCALDFGGSWDKNLLYAEFSYNNSYQASLYMAPFEALXGRKCRMPLFWDQTRERQLFGTEVLSXAEVKVRAIRERLTIAQSRQKSNADNHRRELSFEVVDQVYLTVMSLRGVHRFQTKKMVQRYIGSYRILERRGEVAYQFEIPPNMASIHDVFQVSQLKKCLSVLEEPASPDNVEIQEDLTYVEKPTCILETSERRTRNKVIRFCRLXWSHHSXDEATWEREDELKATHPHLFTSSSESRGQDSV

SEQ ID NO: 19549 - protein, 680 aa, Oryza sativa
  Clone ID: TF_OSC402891j.C1.p9.fg
MHTVKETKLLATKLNLLMKRLDDHEKRPRGTVKALDSHVTCEVCGGTGHSGNDCPETREEAMYMGNNNNGYRPQGGQGWNQPCPYYQGGNINGNFSNQPSLKDLVFAQAKTTDSLSKKLAANDKILDNINVKLDGFASTFQNQLSFNKMIETQLAQLASLVPANESGRIPGQPDSSIENVKAITRRGVIQKIHINVPLLDAMQVPTYARYLKDILNNKRLLPTTEVVKLTEQCSNQILHKFPEKKKDPGCPTITCSIGAQQFNGKEEKFEFQPRTEQCSMVREDLQKMRELVAGNERQRQGLEHRMSKLENHLSEICGSLWVTYTGLHQLAGECGVKATIPANPDEFSLTSLLAELATAMEHYDLEYFVVVCRDVDVKDVQQSGQPELPVIVPALASEPHVPRTKFEVAELERIMLEVKKDQAVETLGGREVWFNSYLKSCCTSMSRVCRELRVPRGDPEESAAGYISWLNGACAQLDSIGQRIDEAFKQECGRSSRYAEGHVLACIRDHRPQLHLEFLREGFSRSRRTPTEINGLAKSMAPLAEKEFANLRPSPSAILNAPGRRTCVIVSVGSMASEPYTRKKGVSLLDVVGVYYAVCPLDLSIALRVRNRGEADLDSQPDAVILEIGTDELGAVVRYDTVGQSESAEYPFDEFDGVVGLDFPRGCRFNPLSEFVGRHE

SEQ ID NO: 19550 - protein, 956 aa, Oryza sativa
  Clone ID: TF_OSC415111j.C1.p9.gm
MPAGNFWVRYARRFLGLQFKFTHDRWASHGAVDYVLRWKESYSDRTGSSMYRAGSGWCMTGFNLPKNFNENPEAFFRSVRPRVVAPQKTLPTEKPAIPVPPTFKTMASKTLREFAAPSADNVAIGPQVNIGDVDFDLKSSLITMAQASPFCGKPNEDANAHLQQFLEICSTYTIKGVSPDTIRLRLFLFSLLGRAKQWFYANHAAVNTWDKCYTAFLSKFFPMGKTNALRGRILSFQQTRDGSIPEAWECLQEYVAACPHYGMDDWLILQNFYNGLTPMSRDHLDTAAGGAFFSKTVQGAVELIEKMVSNMGWSEERLQTCQRGMHTVKETELLAAKLDLLMKCLDNHEKRPQGTVKALDSHVTCEVCGGTGHSGNDCPETREEAMYMGNNNGYHPQGGQGWNQPHPYYQGGNNNGNFSNQPSLKDLIFVQAKTTDALSKKLAANDKILENINVKLDGFASAFQNQLSFNKMIETQLAQLASLVPANETGRILGQPDSSIENVKAITMRGGKSTRDPPYPNPAGTNGMSKEAPSNDLADKEIQPDKTVPQEYCDTRLLPFLQRMRKPSADEQFARFVEVIQKIHINMSLLDAIVSVMPKDVFDKLNFTVLSPTPMCLQLADSSVRYPAGIEEDVPVKIQDFFISVDFVVLDMDTGKETPLILGRPFLSTAGANIDVGTGNIHFDINRKEEKFEFQPRTEQCSMPGEIYAELPGEGNNDAQEPLLKNAGKITRTGQEVRPAGSEEAVFRTKTKEGVEGKAKGARSITFGDGWKIRKLNRKEVRSCTSDFKRRDLRQQGFGRTPWFGLTGQANGRLPLSLRQWLVGPTADVSMKDAEAPRRLLNDTDLDLVSDRERQAYYMLSDQEYAHTREYSPELLKKIVRTGGMRLMTSNGGTINLPDQVTGEIQYNLMEHIAQTQEWQQSADAQFTNINNMMQQQRDDLQAYFRFQGFNPYQGP

SEQ ID NO: 19551 - protein, 461 aa, Oryza sativa
  Clone ID: TF_OSC6294j.C1.p3.fg
MAFLSKFFPMGKTNALRGRISNFQQTRDESIPEAWERPHHGMDNSLILQNFYNGLTTMSHDHLDAAAGGAFFSKTVRGAIDLIEKMVSNMGWSKERLQTRQQGIHTVKETELLAAKLDLLMKRLDDHDNRPQDTVKALDLHVTCEVCGGTGHSGNDCPETHEEAMYMGKNNNEYRPQGGQGWNQPRPYYQGENNNSNFSNQPSLKDLIFVQAKTTDALSKKLAANDKILENINVQLDGFTSSFQNQLIFNKMIETQLAQLASLVPANEIGRIPRRGGKSTRDRPYPNPAGTNGVAREAPSSDSANKEVQPEKAVPQEYYDTRLLSFPQRSRKPSVDEQFARFVEVIQKIHINVSLFDAMQVPTYARYLKDILNNKRPLPTTEVIELTEQCSNVILHKLSEKRKHPGCPTITCSIGAQQFNQALRDLGVSVSVIPMDVFDKLNFTVLAPTPMRLQLADSSVR

SEQ ID NO: 19552 - protein, 474 aa, Oryza sativa
  Clone ID: TF_OSC900064j.C1.p23.gm
MHTVKETELLAAKLDLLMKCLDDHEKRPQGTVKALDSHVTCEVCGGTGHSGNDCPETREEAMYMGNNNGNPKDPHQRAVVGRYASTNICPFLKDILNNKRPLPTTEVVKLTEHCSNLILHKLLEKKKDPGCPTITCSIGAQQFDQALCDLEASVSVMPKDVFDKLNFTVLAPTPMRLQLTDLSVRYPAEIAEDVPVKIRDFFIPVDFVVLDMDTGKETPLILGRPFLSTAGTNIDVGTGSIRFHINGKEEKFEFQPKTEQCSMVRIKYGPNPQNIQVVKVEPPKTDSLVRFMQNFLERETTMLRNRYWRTPVKAPVPAKKSEQPAQKKPSSAPKSKKTIEESRAGGTYRETRNMTRNEQGSSSSSTPVQMYEVGWAPTGMHLDGPKLHAIASESQPGQAPVRTGGMRLMTSTGGTTNPPDQVTGEIQYDLTEHIAQTQEWQQSADAQFTNINNMMQQQHDDLQAYFRFKGFNPP

SEQ ID NO: 19553 - protein, 565 aa, Oryza sativa
  Clone ID: TF_OSC900333j.C1.p23.fg
MANDLSQSLDLSIYRHEDYILLISTVDQASPFCGKPNEDANAHLQQFLEICSTYTIKGVSPDAVRLRLFPFSLLGRAKQWFYANRAAINTWDKCSMAFLSKFFPMGKTNALRGRISSFQQTRDESIPKAWERPQEHVAACPHHGMDDWLILQNFYNGLTPMSRDHLDAAAGGAFFSKTVQGAVELREKMVSNMGWSEERLQTRQRGMHTVKETELLAAKLDLLMKRLDDHEKRPQGTVKALDSHVTCEVCGGTGHSGNDCPETREEVMYMGNNNRYRPQGGQGWNQPRPYYQGVPANESGRIPGQPDSSIENVKAITTRGVIQKIHINVPLLDAMQVPTYARYLKDILNNKRPLPTMEVVKLTEHCNNLKLHKLPEKKKDPGCPTITCSIGAQQFDQALCDLGASVSVMPKDVFDKLNFTVLAPTPMRLQLADSSVCYPEMQLILGRSFLSTAGGNIDVGKGSICFHINGKEEKFEFQPRTEQCSMVRIKYGPNPQNIQVVEVEPPKTDSLVRFMQNFLEKETTMPRNRYWRTPVKSPVPAKKLEQPAQKKPSSAPKPKKVWKEK

SEQ ID NO: 19554 - protein, 138 aa, Oryza sativa
  Clone ID: TF_OSC11082j.C1.p1.fg
MESKACNRCGEIGHIASMCLTLCPHCGEDHPPGECPTRKVTCFLCEAPTILCTDSLSKELSSMEEVVSLPDLLQAEQRAINLRRAIPSRRPFSASNSNQKEASPVNDSNMQSYHIITEPIKDAVTRTMPAIPLQNQNE

SEQ ID NO: 19555 - protein, 1448 aa, Oryza sativa
  Clone ID: TF_OSC1509j.C1.p1.fg
MVGLGWLGTSWDPASGCQNAALLAIGTLHQRYPDELQHSPYRYHPRRGGARDYAIFRDASSEDDATIMHLARMVEAYDATRIDFHQMVRRGLVENSMKILELRQENLQLKKDLDAVEAQLHQLKIAQGEMVTTRRSAATGEGSHPEGSNHNNHGSPPPPPPPLPPPPPDTNAILTQILAQQANMMAAFLHHIQNPPQHNAPPPPPQHSKLAEFLRIRPPTFSSSNNPVDALDWLHAVGKKLDIVQCSDEEKVIFAAHQLQGPASLWWDHFQATQLEGQPITWARFTTSFRRTHVPAGVMALKKREFRELKQGNRSVMEYLHEFNNLAWYAPEDVREDEEKQEKFLAGMDPELSVRLVSGDYPDFQRLVDKSIRLEAKQKELESHKRRLANFRNQRGANQRVRYTNPYPGGSSSQQQQQQQPRSAPRPQFVVRVPQPQQQQSQQGTRAPRPPTPALQPGQGHRDAQGQQRLCFNYFEPGHFAAKCPKTRRQQGQAPPRSNNGGKDVIRGRVNHVTAEDVLTTPDIIVGVVYCARRTVTLYRGPEQPVVFFAPPTSVGSSELHQIRLSEIPIVREFGDVFPEELPGMPPKREIEFRIDLAPGTTPLYKHPYRMAANELAEVKKQLEELKEKGYIRPSTSPWGAPVIFVEKKDKTKRRCVDYRALNEVTIKNKYPLPRIDDLFDQLKGATFVVVFIDDILVYSQSEEDHQHHLRLVLGKLRQHQLYAKLSKCEFWLSEVKFLGHVISAKGVAVDPETVTAVTDWKQPKTVTQIRSFLGLAGYYRRFIENFSKIARPMTQLLKKEEKFVWSPQCEKAFQTLKEKLVSSPVLILPDTRKDFMVYCDASRQGLGCVLMQEGHVVAYASRQLRPHEGNYPTHDLELAAVVHALKIWRHYLIGNRCEIYTDHKSLKYIFTQSDLNLRQRRWLELIKDYDVGIHYHPGKANVVADALSRKSHCNTLEVRGIPPELNQQMEALNLSIVGRRFLATLEAKPTLLDQIREAQKNDPDMRELLKNMKQGKAAGFTEDEHGTLWNGNRICVPDDRELKQLILQEAHESPYSIHPGSTKMYLDLKGKYWWVSMKREIAEFVALCDVCQHVKAEHQRPAELLQPLQVPEWKWDEIGMDFITGLPKTQGGYDSIWTTYGGNKLAELYFARIVSLHGIPKKILSDRGSQFTSHIWKKLQEELGTRLNFSTAYHPQTDGQTERLNQVLEDMLRACVLDFRKTWDKSLPYAEFSYNNSYQASIQMAPYEALYGRKCRTLLLWDQVGESQVFGTDILREAEAKVRTIRDNLKVAQSRQKMDDFVYLRVTPLRGVHRFQTKGKLAPRFVGPFRIIARRGEVAYQLELPASLGNVHDVFHVSQLKKCLRVPSEQADSEQIEVREDLTYVERPVKMLDTMERRTRNWVIRFCKVQWSNHAEEETTWEREDEMKATHPDLFASSSESRGRDSV

SEQ ID NO: 19556 - protein, 1086 aa, Oryza sativa
  Clone ID: TF_OSC400628j.C1.p8.fg
MRQRRPEAEQWQQRHCCRWGCTSGGLRGKWTACRGRGGDCDAGGGDGTAGRRKARTCAAHAEGREGEEGGGLGRQVGWAGIGQGRPKRKRREERKLTLIHCPDAEKTNLAAEQLQGAAGDWWENFLAMQPAGRVVTWAQFRDAFHAAHVPKGIMDLKQREFLSLTQGNKSVMEYLREFNHLTRYAPDDVNTDTCKQNWFMNGLSAEMQLELVAHSFLDFQDLVNRSVVIESKMKNLEAECKRKRAAQISAAGGSQKPHGWQPPPPRFQAPPPPRPQGFVPCPPQQRVAPPVGGNQQAIRPPVRSNNCFNCGQAGHYINQCSYPHHAQLQGPRPAAPCPNPPLRSAPQGQQTQKRGRVNHVTAEEANDALDVLVGFRCYPRHGLAAQKSWVIDCGHRLITLKNNTGEPIFLALDDHSPQLHALSGAKTIDIAAVPVVCDYPDVFPEELPGMPPDRDVEFVIDLLPGTAPISKRPYRMPPNELEELKKQLTELQAKGFIKPSSSPWGCPALFVKKDLSLRMCVDYRPLNEVAVKNKYPLPRIDDLFDQLTGAHVFSKIDLRLGYHQIKIRPEDIPKIAFSTRFGLYEYTVMSFGLTNAPANFMSLINSVFMEYLDQFVVIFIDDILIYSKSEEEHEKNLYLVLEKLREHRLYAKFSKCEFWLKEVGFLGHVLSEGGVAVDPSNVQKVLDWGQPKNPSDIRSFLGLAGYYRRFIENFSKIAKPMTQLLKKNEKYVWSAECEQSFQTLKEKLTTAPVLILPDIHKSFDIYCDASRQGLGCVLMQEGRVVAYASRQLRPHEVNYPTHDLELASVVHALKIWRHYLIGNRCEIYTDHKSLKYILSQSDLNLRQRRWLELIKDYDMGLHYHPRKANVVADALSRKPQCNCLSVKPRSETLCSEIHKLGLEMVPHGSLAALEVKPTLYDQIKEAQKDDKALYGRRCRTPLNWSESGERPFFGPDLVKEADEQVRLIRERLQTAQSREKSYADRRRRELTFDVGDYVYLKVTPFKSTHRFGVKGKLAPQSLARSVTVHQEVLASIRDWKQPKTVTQIRSFLGLAGYYRRFIENFSKIARPMTQLLYKTFLTLFIS

SEQ ID NO: 19557 - protein, 1230 aa, Oryza sativa
  Clone ID: TF_OSC400732j.C1.p4.fg
MEQNNNNNNGTSQDGNNTSHGATGLIIPSASNQDPWANLLANILGKQQETQQRQMEILERITKSDANRNGLGEFQKLKPPTFSGTANPLEAEEWIVAMEKSFEAMGCTDKEKIIYATYMLQSSAFEWWDAHKKSYSERIFITWELFKEAFYKKYFPESVKRMKEKEFLELKQGNKSVAEYEIEFSRLARFAPEFVQTDGSKARRFESGLRQPLKRRVEAFELTIFREVVSKAQLLEKGYHEQRIEHGQPQKKFKTNNPQNQGRFRGNYSGQMQRKSSENQGRKCPICQGSHVPSICPNCWGRCFECGEAGHTRYQCPLLQKGKNRVSSTTQPNTKVLTPVPSLYLPGPSSANNHGPNQGKPLANTNTTRGMRSNNSQGGNHARVYNLTKSTAEESNTVVTGNVLICSYPGKVLFDSGATHSFISTNFVRKYTIPTSQLKERICIETPLDSQTTNLICKLCPITIDGWELTADLIPLDMHDFDIILGMDWLLPGTSPIYKAPYRMAPVELKELKLQLKELEDKGFIHPSVSPWGAPVLFVKKKDGSLRLCTDYRELNKVTIKNKYPLPRIDDLFDQLQGARVFSKIDLQSGYHQLKIKPSDIPKTAFRARYGHYEYLVMPFGLTNAPAAFMDLMNRIFKPYLDQFVVVFIDDILIYSKTKEDHANHLRIVLQTLRDHKLFAKLKKCDFWMDKVSFLGHVISGEAPLTRLTQKGVRYEWTQTCEESFQELKNRLTTAPILALPIMGEEFTIYCDASKIGLGCVLMQKDALSRKALCNMAIQITQDQHILRDLERLDVELKIHEPGVLLAVLQIKPTLEENILEKQRDDSELQKAKKNIEEGKRVKAEHQRPAGLLQPLSIPLWKWEEISMDFVQGLPTTPAGNDSIWVIVDRLTKSTHFLPVKRNFSLKKLAKLYVKEIVSLHGVPVRIVSDRDTRFLSKFWKSLHRAPGTKLDFSTAYHPQTDGQTERVNQIIEDMLRSCILEFKGSWEEFMPLAEFAYNNSYQSSIRMAPYEALYGRKCRTPVCWNEVGERKLLGPDIIQQTKETIRLIRKRLQTAQNRQKSYVDNRRRDLRFDIGDWVYLKVSPMKGVKRFGLGKKLSPRYVGPFAIVKRIGEVAYKVKLPDALIGVHDVFHISMIRKCLRRPSDQVEIPMAELRNDLTYQEYPVCILDTKDGKTRNRNIRFLKVQWSHHTQDEATWEKEDDLQKNYPQFFHHQGTTISRTKFLKEGSL

SEQ ID NO: 19558 - protein, 682 aa, Oryza sativa
  Clone ID: TF_OSC423363j.C1.p9.fg
MRGGPLMVTAQYGLTLFVFTFCCENRVVHDWFQPAGKLQRKSRSFLPERQAASRCSVENSTNRETSRTSATNFQDYGQQESREFVAPSTDNMAVGPQVNIGDMDFDLKSSLITMAQTSPFCGKPNEDANAHLQQFLEICSTYTIKEFFPMGKTNALRGRISSFQQTRDESIPEAWERLQEYVAACPHHKMDDWLILQNFYNGLTPMSRDHLDVAAGGAFFSKTVQGAVKLIEKMVSNMGWSEERLQTRQRGMHTVKETELLAAKLDLLMKRLDDHEKRPQGNVKALESHVTCEVCGGMGHSGNDCPETHEEAMYMGNNNGYRPQGGQGWNQPRPYYEGGNNNGNFSNQLLNKMTETQLTQLASLVPANESGRISGQPDSSIENVKAITTRGVIQKIHINVPLLDAMQVPTYARYLKDILNNKRPLPTTEVVKLTEHCSNVILNKFPEKKKDPGCPMITCSIGAQQFDQALCDLGASVSVMPKDVFDKLNFTVLAPTPMRLQLADSLVRYPAGIAEDVPVKIRDFFIPVDFVVLDMDTGKETPLILGRPFLSTAGANIDVGTGSIRFHINGKEEKFEFQPRTEQCSMVRIKYGPNPQNIQVVEVEPPKTDSLVKFMQNFLEKETTMPRNRYWRTPVKSPVPVKKLEHPAQKKPFFAPKSKKVWKEKPKTPAPSPLETGGKSAH

SEQ ID NO: 19559 - protein, 1105 aa, Oryza sativa
  Clone ID: TF_OSC33327j.C1.p1.fg
MWANICHDEDIPSNDTTTPIAQQGPMTRARARELNYQVQGCSWHGKNSNNVESVYRLLRRSTPVVVVVGPPTSYPSPNRSLPSSHRKIGNPRCCIKCCTLILLAATYSSTNFYLLYHRIVLVVGSGGSGEHPQHSPRMRGIIQHFERQVREHAEGLDEDVRVANDRLGQLEAAQIDTNSKLSSLERSLVAVNTSLAGILNTLERMGQEGHDGSARRNHNGHDANSSIAAREELEYAADTEHDEEVLGRPQRQQRRQRHGMGAPPRREVRDNDDSLGKIKFTIPCFDGKYDPDAYLTWELAIDQKFACHDFPENKRVRAATSEFTDFASIWWSEFVRSNPNNTPQTWDAMKRVMRARFVPSYHARDLLHKLQQLRQGNKSVEEYYQALQTGMLRCGLVENDDAGMARFMGGLNREIQDILAYKEYNSINRLFHLACKAEREVQGRRASFRTNISAGRASSWTSSNAAAPSTRAAAPSSSSNKLRPSTTNSTPCPSEPTRGVAATPSKSSSSVASSGRTRDIQCLRCRGYGHVRKDCPSTRVMIVRADGGYSSASDLDEETYALLATNNAGEGDASHQDEEHIGAEAAEHYESLVVQRVLSAQMERAEQNQRHTLFQTKCVIKERSCRVIIDGGSCNNLASAEMVEKLALSTQPHPQPYYIQWLNSSGKVKERTRSEHLIAANELEKHKKKPTNSVQNNKNEIKLKGSCFIATKSDLDEVDTDTVVCYDLEYADIFPKEVPPGLPPIRGIEHQIDLIPGASLPNRAPYRTNPEETKEIQRQVQELLDKGFVVVYFDDILIYSRSIEDHHGHLRAVFDALRDARLFGNLEKCTFCTDRVSFLGYVVTPQGIEVDQAKVEAIHSWPVPTTITQVRSFLGLAGFYRRFVKDFSTIAAPLHELTKKNVTFTWAAAQRNAFDTLKDKLTHAPLLQLPDFNKTFELECDASGIGLGGVLLQEGKPVAYFSEKLSGPSLNYSTYDKELFALVRTLETWQHYLWPKEFVIHSDHESLKHIRSQAKLNRRHAKWVEFIESFPYVIKHKKGKENVIADALSRRYAMLSQLDFKIFGLETIKEQYAHDDDFKDVLLNCKEGRTWNKFVLTNGKRMVEG

SEQ ID NO: 19560 - protein, 1513 aa, Oryza sativa
  Clone ID: TF_OSC400098j.C1.p17.fg
MLATESAPYLVDPTVTQPPAPEIVHTPLISTPSPQLGFSLETPIQVDSKTEGTDTEPEIEPDITDLSEDETPVLRITFLGGPRTLSTARKSTRPPGKKPKPDPEATTSEPWGLRVMATQTQLLQAIVNNQGNRGGSSFGEFMRTKPPTFATAEEPMDAEDWLRIIEKKLTLVRVRKADKVIFTANQLEGPAGDWWDTYKEAREEDAGEPNWEEFTTAFRDNFVPAAVMRMKKNEFRRLQQGNTTIQEYLNRFTQLARYATGDLADEEEKIDKFIEGLNDELRGPMIGQDHDSFQRLINKVVRLENDRKVVEHNHKRRLAMNRPPQVAPQRPKGAASSVWKPTVVTTNRPAASSNFHRTVTIQNRAPAPHQAATGSVRPGSYFNCGEYGHFANKCPHPNKTPIRTRANVMAIHGTTTPAAGRGLFRTPQTNRTATGFGRGQVNHVRAEEAQEDQGVLMGTFSIHFTPVKVLFDLGASHSFISLKASQRHNLTRVKLRQPMLVHSPGGEIAVDTACIDVPIRLRDVVFPSNLMVLVPQTLDVILGMDWLTKNRGVIDCRRREVTLTTPWGSGMRATMDQDPRLTERAGGIFTMLPMKGMPIVQQFPDVFPEDLPGMPPDRDIEFIIDLIPGTAPISKRPYRMPVNELEELKKQIRELQEKGFVRPSSSPWGAPVLFVKKKDGSMRMCVDYRSLNEVTIKNKYPLPRIDDLFDQLKGAKVFSKIDLRSGYHQLKIRTGDIPKTAFSTRYGLYKFTVMSFGLTNAPAYFMNLMNKVFMDYLDKFMVVFIDDILIYSKDEEEHAEHLRLVLEKLRKHKLYAKFSKCEFWLKEVAFLGHVISAGGVAVDPTKVEAVTEWKAPKSVTEIRSFLGLAGYYRRFIEGFSMIARPMTQLLKKEKKFVWSEQCQESFEQLKEKLTSAPILVLPDIRKDFVIYCDASRQGLGGVLMQDGKVVAYASRQLRPHEENYPTHDLELAAVVHALKIWRHYLIGNHCDIYTDHKSLKYIFTQSDLNLRQRRWLELIKDYDLEVHYHPGKTNVVADALSQKSHCNHLRTEGMAPELKEEIAQLNLHIIPYGQINTLDIQPLMRTQIEEAQKDNEEIREVKECLAAGFAKEFSTDEKDVLWYKKRIYVPEQGGQRGLILMEAHESAYSLHPGSTKMYQDLKEGYWWPNIKRDVAEYVALCDVCQKVKAEHQRPAGLLQPLRIPEWKWNEIGMDFIVGLPKTTTGYDSIWVIVDRLTKTARFIPVKTNYSSAKLAELYMTRIEKVHEALGSYLAFSTAYHPQTDGQTERTNQVLDDMLRACALDFSKDWERCLSYAEFSYNNSFQASLKMSPNEALFGRRCRTPLMWSETGERAVFGLDIIQEAEEKSYADTRRRNLEFKEGDYVYLKVSPLRGTKRFKVKGKLAPRYVEPFQINARRGEVAYQLQLPENIADVHPVFHVSELKKCLRVLEEQATLEEIHISNDLTYPEHPVRILDEAEKRTRMKVWRMYKVQWSNHTKDEATWESEEFLKTE

SEQ ID NO: 19561 - protein, 1276 aa, Oryza sativa
  Clone ID: TF_OSC400773j.C1.p68.gm
MATQTQVLQAIANNQGDRGGSSFGEFMRTKPPTFATAEEPMDAEDWLRIIEKKLTLVRVREADKVIFAANQLEGPAGDWWDTYKEAREEDAGEPNWEEFTTAFRDNFVPAAVMRMKKNEFRRLQQGNTTVQEYLNRFTQLARYATRDLADEEEKIDKFIEGLNDKLRGPMIGQDHDSFQSLINKVVRLENDRKVVEHNRKRRLAMNRSPQTAPQRPKGTTSSAWRPTVVTTSRPAASSNFHRPVTIQNRAPAPNQAATGSVRPGSYFNCGEYGHFANKCPHPNKTPIRTGANATAIHGTATPAAGRAKHRGIIDCRHREVTLTTPWGSDMRATMDQDPRLTERAGGIFTMLPLKGMPVVQRFPDVFPEDLPGMPPDRDIEFIIDLIPGTAPISKRPYRMPVNELEELKKQIRELQEKGFVRPSSSPWGAPVLFVKKKDGSMRMCVDYRSLNKVTIKNKYPLPWIDDLFDQLKGAKVFSKIDLRSGYHQLKIRTGDIPKTAFSTRYGLYEFTVMSFGLTNAPAYFMNLMNKVFMDYLDKFVVVFIDDILIYSKDEEEHAEHLRLVLEKLRKHKLYAKFSKCEFWLKEVAFLGHVISAGGVAVDSAKVEAVTEWKAPKYVTEIQSFLGLAGYYRRFIEGFSKIARPMTQLLKKEKKFVWSEQCQESFEQLKEKLTSAPILVLPDIKKDFVIYCDASRQGLGGVLMQDGKVVAYASRQLRPHEENYPTHDLELAAVVHALKIWRHYLIGNHCDIYTDHKSLKYIFTQSDLNLRQRRWLELIKDYDLEVHYHPGKANVVADALSRKSHCNHVRMEGMVPELREEIAQLNLHIVRRGRINTLDIQPLLRTQIEEAQKDNEEVREVSPMRGTKRFKVKGKLAPRYVGPFQIIAKRGEVAYQLQLPENIADVHPVFHVSQLKKCLRVPEEQAPLEEIHISNDLTYPEHPIRILDEAEKRTRSKPLLCRVALAPRAPRAVRRSASPLPSPSPSPRVPPSPRRPPVAIAACRRADVTEPPRARADIATPVPRVLPSRCRVASSPAPPSLRHVAARRRQARAAPRRAVLSLLSRRAVVSPPIASRPEPRATAVAVAIDVPSPRASHRRCRAARRLVASRREPAASRPAPPSFHPSSSFPSLYSPLPYKDPGPIPPFSTPLHSHLFSLFPFSTRRRRRAAAPPLSCRRAATFEAAAPSPRSRRAVRRRLAPPSPSSPPPPPPSPRELRIQAKAKTRKTLSKVRYDGTAVEVGPRSVPYIGVAIEAGDEASEDPYAYYQEGDEDDGAQ

SEQ ID NO: 19562 - protein, 797 aa, Oryza sativa
  Clone ID: TF_OSC401834j.C1.p22.fg
MTSLASSATGRENNPLEFYSLPISPNIEQRSFSVVGFAAALKPHAFDGSNYKRWKTRALLWLTVMQCFYVSRGKRSEPPLSPEEEVKFEASDCLFRGALISVLADNIVDVYMHMPSGKDMWDALEAKFGVSDAGSELYVMEQFYDYKMFVVGGIIAKLPTSWSDFATSLKHKRQEFSVSDLISSLGVEENARAKDNRDKKVEGGSSANMVQKKNPHASHNNKKFKPDVKPMATTNFKKKGKGKAKGDCFVCGKSGYWAKDCPKRKDRKSANMVTSEGRGTSGYDWWVDTGANIHVGRGSSLLMGNGSLTAVHGVDEALHYFKTYKAEVENQLERKIKRLRSNRGGEYFSNEFTSFCEEFGIIHERTPPYSPQSNGVAERKNRTLTEMVNAMLDTTDFPRNGGHKEVTPFEKWERKKLNLSYLRTWGCLAKVNVPIAKKRKLVPNTVDCVFLGYAIHSVGYRFLIVNSRVPNMRVGTIIESRDATFFENEFPMKNTPSTSSQETVISYEHFAPIEHNDQTPEGNREEDSIVDTRRSKRQRVAKSFGDDCIIYLVDDTPRTIEEAYSSPDADYWKEAVHSEMDSIMSNGTWEVVEHPYGCKPVGCKWVFKKKLRPDGTIEKYKARLVAKASHGLLVHQMDVKTAFLNGELEEIYMDQPDCLNVIEVVKDFLSKSFEMKDLGEADVILNIKLLRGDEGGITLVQSHYVDKVLSRFGYSDCMPDPTPYDPSVLLRKNRRIARDQLRYSQIIGSLMYLASTTRPDISFADGLYLNVIQVAFLSRDVDLKNISEGTHLYEFDC

SEQ ID NO: 19563 - protein, 259 aa, Oryza sativa
  Clone ID: TF_OSC6577j.C1.p3.fg
MAASTSKGKGSWREKIEIALALSNIDLALTEPCPTAPVAPKYDTDHAKWESSNRKCLMVIKSSIVEAVRGAIPVCTTATEYLQRVENQFTISSKAYASSLIKSLVTMKYHGGDVREYILKMSGITSKLKKIDLVLPDDFLVHLIFASLPSEFESFAVNYNSLPENWNIEKLIAMCVQEEDRPKTRGDSANYVKNKKRNNHSQNVASPKARGKAPQVDPNPRQEVERDACRWCKQKGHFQKDCPEFLKHLLKKGETSLHS

SEQ ID NO: 19564 - protein, 509 aa, Oryza sativa
  Clone ID: TF_OSC11374j.C1.p1.fg
MAVKDRFTGNPGRLTVLTTSGSGDLMHIQLRNSGSRISGRDKLVSEPTLTMEIRNGSRDSNNASGSEEPNNGARANGASDNSPSPPPENPTIAQVLDNQTQMMTMMMQQMQQQYHQVLQQVQQQAQLQQQNLQFGPPPPQSKLLEFLRVKPPTFSSTTNPIEAHDWLHAIEKKLNLLQCNEQEKVAFATHQLQGPASIWWDNYMVTRPAGAEVTWTEFRHSFNKAQVPEGIVAQKKREFRSLQQGTRTVIEYLHEFNRLARYAPEDVRTDAEKQEKFLSGLDDELTNQLISRDYEDFEKLVDKAIRQEEHGNKINRKRKAAQFRTPQGKSQKPRFTMGRHGGPSTMIIRQHRPYHPGSFNKNHHNGSHNNSEQHSLNPTPSSLKIPAQSVQPALPEQPKRLGEKPELCFNCNKPGHTVGKCPKPRRAGPKFVQARVNHASAEEAQSAPEVILGTFPVNSTPAVILFDSGATHSFISKRFAGAHGLSLVKLACLQVDSRGSPGTELEFAL

SEQ ID NO: 19565 - protein, 498 aa, Oryza sativa
  Clone ID: TF_OSC11376j.C1.p1.fg
MAVKDRFTGNPGRLTVLTTSGSGDLMHIQLRNSGSRISGRDKLVSEPTLTMEIRNGSRDSNNASGSEEPNNGARANGASDNSPSPPPENPTIAQVLDNQTQMMTMMMQQMQQQYHQVLQQVQQQAQLQQQNLQFGPPPPQSKLLEFLRVKPPTFSSTTNPIEAHDWLHAIEKKLNLLQCNEQEKVAFATHQLQGPASIWWDNYMVTRPAGAEVTWTEFRHSFNKAQVPEGIVAQKKREFRSLQQGTRTVIEYLHEFNRLARYAPEDVRTDAEKQEKFLSGLDDELTNQLISRDYEDFEKLVDKAIRQEEHGNKINRKRKAAQFRTPQGKSQKPRFTMGRHGGPSTMIIRQHRPYHPGSFNKNHHNGSHNNSEQHSLNPTPSSLKIPAQSVQPALPEQPKRLGEKPELCFNCNKPGHTVGKCPKPRRAGPKFVQARVNHASAEEAQSAPEVILGTFPVNSTPAVILFDSGATHSFISKRFAGAHGLSLVKLEYSIVSPK

SEQ ID NO: 19566 - protein, 460 aa, Oryza sativa
  unsure (1)..(460): unsure at all Xaa locations
  Clone ID: TF_OSC11376j.C1.p2.np
MEIRNGSRDSNNASGSEEPNNGARANGASDNSPSPPPENPTIAQVLDNQTQMMTMMMQQMQQQYHQVLQQVQQQAQLQQQNLQFGPPPPQSKLLEFLRVKPPTFSSTTNPIEAHDWLHAIEKKLNLLQCNEQEKVAFATHQLQGPASIWWDNYMVTRPAGAEVTWTEFRHSFNKAQVPEGIVAQKKREFRSLQQGTRTVIEYLHEFNRLARYAPEDVRTDAEKQEKFLSGLDDELTNQLISRDYEDFEKLVDKAIRQEEHGNKINRKRKAAQFRTPQGKSQKPRFTMGRHGGPSTMIIRQHRPYHPGSFNKNHHNGSHNNSEQHSLNPTPSSLKIPAQSVQPALPEQPKRLGEKPELCFNCNKPGHTVGKCPKPRRAGPKFVQARVNHASAEEAQSAPEVILGTFPVNSTPAVILFDSGATHSFISKRFAGAHGLSLVKLEYSIKVXSLGWKVXSLGWGC

SEQ ID NO: 19567 - protein, 1491 aa, Oryza sativa
  Clone ID: TF_OSC14967j.C1.p1.fg
METRNGSRDSNNASGSEEPINGARANGASDNSPSPPPENPTIAQVLDNQTQMMTMMMQQMQQQYHQVLQQVQQQAQLQQQNLQFGPPPPQSKLLEFLRVKPPTFSSTTNPIEAHDWLHAVEKKLNLLQCNEQEKVAFATHQLQGSRGNRGTKKREFRSLQQGPRPVIEYLHEFNRLARYAPEDVRTDAERQEKFLSGLDDELTNQLISRDYEDFEKLVDKAIRQEEHCNKINRKRKAAQFRTPQGKSQKPRFTMGHHGGPSTMIIRQHRPYHPGNFNKNHHSDSHNNSEQHSLNPTPSSLKIPAQSVQPALTEQPKRLGEKPELCFNCNKPGHTVGKCPKPRRAGPKFVQARVNHASAEEAQSAPEVILGTFPVNSTPAVILFDSGATHSFISKRFAGAHGLSLVKLKIPMRVHTPGGGMTTTHYCPSVTVEIQGLIFPANLILLESKDLDVILGMDWLARHRGVIDCASRTIKLTNAKGEVVIFQSPVPQKPGISLNQAAGEEQEVAVEKTTKKLEDIPIVREYPEVFPDDLTTMPPKRDIEFRIDLVPGTAPIHKRPYRMGANELAEVKKQVDEQLQKGYIRPSTSPWGAPVIFVEKKDKTKRMCVDYRALNEVTIKNKYPLPRIDDLFDQLKGATVFSKIDLRSGYHQLRIREEDIPKTAFITRYGLFECTVMSFGLTNAPAFFMNLMNKVFMEFLDKFVVVFIDDILIYSKSEEEHEQHLRLVLEKLKEHQLYAKFSKCDFWLKEVQFLGHIVNAQGVAVDPANVESVTKWTPPRTVTQVRSFLGLAGYYRRFIENFSKIAKPMTQLLKKEEKFIWSAECNRSFEELKRRLVSAPVLILPDQTKDFQVYCDASRQGLGCVLMQDGKVVSYASRQLRPHEGNYPTHDLELAAVVHALKIWRHYLIGNRCEVYTDHKSLKYIFTQPDLNLRQRRWLELIKDYDMGIHYHPGKANVVADALSRKSYCNVAWVEELCCEVQHDLEHLNLGIVEHGFVAALEAQPTLVEQVRIAQASDPEIAELKKNMRVGKARGFVEDEQGTIWMGERLCVPENKELKDLILTEAHQTQYSIHPGSTKMYQDLKEKFWWVSMRREIAEFVALCDVCQRVKAEHQRPAGLLQPLQIPEWKWEEIGMDFITGLPRTSSGHDSIWVVIDRLTKVAHFIPVHTTYSGKKLAELYLARIMCLHGVPKKIVSDRGSQFTSKFWQKLQEELGTRLNFSTAYHPQTDGQTERVNQILEDMLRACALDFGGAWDKSLPYAEFSYNNSYQASLQMAPFEALYGRRCRTPLFWYQTGERQLFGTEVLNEAEEKVRAVRERLRIAQSRQKSYADNRRRELAFETGDYVYLRVTPLRGVHRFQTKGKLAPRFVGPYRVLERRGEVAYQLELPSNMLGIHNVFHVSQLKKCLRVPEEQASPDQIEIQEDLTYVEKPTRILETSERKTRNKVIRFCKVQWSHHSEEEATWEREDELKATHPHLFASSSESRGRDSV

SEQ ID NO: 19568 - protein, 1505 aa, Oryza sativa
  Clone ID: TF_OSC17627j.C1.p1.fg
METRNGSRDSNNASGSEEPINGARANGASDNSPSPPPENPTIAQVLDNQTQMMTMMMQQMQQQYHQVLQQVQQQAQLQQQNLQFGPPPPQSKLLEFLRVKPPTFSSTTNPIEAHDWLHAVEKKLNLLQCNEQEKVAFATHQLQGPASIWWDNYMVTRPAGAEVTWTEFCHSFNKAQVPEGIVAQKKREFRSLQQGTRTVIEYLHEFNRLARYAPEDVRTDAERQEKFLSGLDDELTNQLISRDYEDFEKLVDKAIRQEEHCNKINRKRKAAQFRTPQGKSQKPRFTMGHHGGPSTMIIRQHRPYHPGNFNKNHHSDSHNNSEQHSLNPTPSSLKIPAQSVQPALTEQPKRLGEKPELCFNCNKPGHTVGKCPKPRRAGPKFVQARVNHASAEEAQSAPEVILGTFPVNSTPAVILFDSVKLKIPMRVHTPGGGMTTTHYCPSVTVEIQGLIFPANLILLESKDLDVILGMDWLARHRGVIDCASRTIKLTNAKGEVVIFQSPVPQKPGISLNQAAGEEQEVAVEKTTKKLEDIPIVREYPEVFPDDLTTMPPKRDIEFRIDLVPGTAPIHKRPYRMGANELAEVKKQVDEQLQKGYIRPSTSPWGAPVIFVEKKDKTKRMCVDYRALNEVTIKNKYPLPRIDDLFDQLKGATVFSKIDLRSGYHQLRIREEDIPKTAFITRYGLFECTVMSFGLTNAPAFFMNLMNKVFMEFLDKFVVVFIDDILIYSKSEEEHEQHLRLVLEKLKEHQLYAKFSKCDFWLKEVQFLGHIVNAQGVAVDPANVESVTKWTPPRTVTQVRSFLGLAGYYRRFIENFSKIAKPMTQLLKKEEKFIWSAECNRSFEELKRRLVSAPVLILPDQTKDFQVYCDASRQGLGCVLMQDGKVVSYASRQLRPHEGNYPTHDLELAAVVHALKIWRHYLIGNRCEVYTDHKSLKYIFTQPDLNLRQRRWLELIKDYDMGIHYHPGKANVVADALSRKSYCNVAWVEELCCEVQHDLEHLNLGIVEHGFVAALEAQPTLVEQVRIAQASDPEIAELKKNMRVGKARGFVEDEQGTIWMGERLCVPENKELKDLILTEAHQTQYSIHPGSTKMYQDLKEKFWWVSMRREIAEFVALCDVCQRVKAEHQRPAGLLQPLQIPEWKWEEIGMDFITGLPRTSSGHDSIWVVIDRLTKVAHFIPVHTTYSGKKLAELYLARIMCLHGVPKKIVSDRGSQFTSKFWQKLQEELGTRLNFSTAYHPQTDGQTERVNQILEDMLRACALDFGGAWDKSLPYAEFSYNNSYQASLQMAPFEALYGRRCRTPLFWYQTGERQLFGTEVLNEAEEKVRAVRERLRIAQSRQKSYADNRRRELAFETGDYVYLRVTPLRGVHRFQTKGKLAPRFVGPYRVLERRGEVAYQLELPSNMLGIHNVFHVSQLKKCLRVPEEQASPDQIEIQEDLTYVEKPTRILETSERKTRNKVIRFCKVQWSHHSEEEATWEREDELKATHPHLFASSSESRGRDSV

SEQ ID NO: 19569 - protein, 659 aa, Oryza sativa
  Clone ID: TF_OSC2469j.C1.p1.gm
MPPPSARASPRFGHAPPPFGRRRRFPRHRSPPSVVVPRRRLAPVGLEAELSPADASLPLPFLPSTRAPPPLAVPPLRPSAAAFRAVRRRLPAPPAVVRRRRLAMAGRPVLKPSRVVPSRRRAVRSVSRPIWTVGPVDRRWTTRVVPVHGGPTPFEPLPSTGGEGGRDGVGSAGVSGCPAAGFTAAQEGTAHCLLRGGELKIFLVGAVLSKLVSSLPSRIACGVESLAAEMEIRNGSRDSNNASGSEEPINGARANGASDNSPSPPPENPTIAQVLDNQTQMMTMMMQQMQQQYHQVLQQVQQQAQLQQQNLQFGPPPPQSKLLEFLRVKPPTFSSTTNPIEAHDWLHAIEKKLNLLQCNEQEKVAFATHQLQGPASVWWDNYMVTRPAGAEVTWTEFCHSFNKAQVPEGIVAQKKREFRSLQQGTRTVIEYLHEFNRLARYTPEDVRTDAERQEKFLSGLDDELTNQLISRDYEDIEKLVDKAIRQEEHCNKINRKRKAAQFRTPQGKSQKPRFTMGRHGGPSTMIIRQHRPYHPGSFNKNHHSGSHNNSEQHSLNPTPSSLKIPAQSVQPALPEQPKRLGEKPELCFNCNKPGHTVGKCPKPRRAGPKFVQARVNHASAEEAQSAPEVILGTFPVNSTPAVILFDSGATHSFISKRFA

SEQ ID NO: 19570 - protein, 386 aa, Oryza sativa
  Clone ID: TF_OSC2478j.C1.p1.fg
YHPGSFTKNHHSGSHNNSEQHSLNPTPSSLKIPAQSVQPALPEQPKRLGEKPELCFNCNKPGHTVGKCPKPRRAGPKFVQARVNHASAEEAQSAPEVILGTFPVNSTPAVILFDSGATHSFISKRFAGAHGLSLVKLKIPMRVHTPGGGMTTTHYCPSVTVEIQGSIFPANLILLESKDLDVILGMDWLTRHRGVIDCASRTIKLTNAKGEVVTFQSPVPRKPGISLNQAAGEEQEVAVEKTTKKLEDIPIVREYREVFPDDLTTMPPKRDIEFRIDLVPGTAPIHKRPYRMGANELAEVKKQKKDKTKRMCVDYRALNEVTIKNKYPLPRIDDLFDQLKGAIVFSKIDLRSGYHQLRIREEDIPKTAFIGDPLESTCRHASLSIL

SEQ ID NO: 19571 - protein, 254 aa, Oryza sativa
  Clone ID: TF_OSC2964j.C1.p1.fg
MGRHGGPSTMIIRQHRPYHPGSFNKTHHSDSHNNSEQHSLNPTPSSLKIPAQSVQPALPEQPKRLGEKPELCFNCNKPGHTVGKCPKPRRAGPKFVQARVNHASAEEAQSAPEVILGTFPVNSTPAVILFDSGATHSFISKRFAGAHGLSLVKLKIPMRVHTPGGGMTTTHYCPSVTVEIQGLIFPANLILLESKDLDVILGMDWLARHRGVIDCASRTIKLTMQKERWYLPVSSAAEGDPLESTCRHASLSIL

SEQ ID NO: 19572 - protein, 1139 aa, Oryza sativa
  Clone ID: TF_OSC32576j.C1.p1.fg
MVKTRNGSRDSSNVSGSEEQISGARANSASDNSPSPPPENPTITQVLDNQTQMMSMIMQQMQQQYHQPPTFSSTTNPIEANDWLRAIEKKLNLLQCNDQEKVAFAIHQLQGPASVWWDNYVVTRPAGTKVTWAEFCQSFNKAQVPEGIMAQKKREFRSLQQGTKTVIEYLHEFNRLAHYAPEDHRPYHPGSFGRIYHSGSHGNSEKHSLNLTPSPLMFLAQSVQPALPAQSKQPKEFEGKPELCFNCNKPGHTVGKCPKPRHAGPKFVQAHVNHASAEEAQSAPEVILGTFPVNSTPAVILFDSGATHSFISKRFAGAHGLSLVKLKIPMRVHTPGGGMTTTHYCPSVTVEIQGLIFPANLILLESKDLDVILRMDWLTRHRGVIDCTSHTIKLTNAKGEVAAGEEQEVAVEKTTKKLEDIPIDREYPEVFPDDLTTMPPKRDIEFRIDLAPGTAPIHKRPYRMGANELAEVKKQVDEQLQKGYIRPSTLPWGAPVIFVEKKDKTKRMCVDYRALNVVTVKNKYPLPRIDDLFDQLKGATVFSKIDLRSGYHQLRIREEDIPKTAFITRYDKFVVVFIDDILIYSKSEEEHKQHLRLVLEKLKEHQLYAKFSKCDFWLKEVQFLGHIVNAQGVAVDPANVESVTKWTPPRTVTQVRSFLRLAGYYRRFIENFSKIAKPMTQLLKKEEKFIWSAECNRSFEELKGRLVSAPVLILPNQTKDFQDGKVVSYASRQLRPHEGSYPTHDLELAAVVHALKIWRHYLIGNRCERRWLELIKDYDMGIHYHPGKANVVADALSRKSYCNVTWVEQLCCEVQRDLEHLNLGIVEHGFVVALEAQPTLVEQRVKAEHQRPAGLLQPLQIPEWKWEEIGMDFIMGLPRTLSGHDSIWVVIDRLTKVAHFIPVHTIYSGKKLAELYLARIMCLHGVPKKIVSDRGSQFTSKFWQKLQEELGTRLKFSTAYHPQTDGQTERVNQILEDMLRACALDFGGAWDKSLPYAEFSYNNSYQASLQMEPFEALYGRKCRTLLFWDQTEERQLFGTEVLNEAEEKVRAVRESLRIAQSRQKSYVDNRRRELVFETGDYVYLRVTPLREYIASKPKENWNHALWDHTGSWNVEVKLLTSLSFPPTCLASTMCSTSLS

SEQ ID NO: 19573 - protein, 1355 aa, Oryza sativa
  Clone ID: TF_OSC32846j.C1.p1.fg
METRNGSRDSNNASGSEEPINGARANGASDNSPSPPPENPTIAQVLDNQTQMMTMMMQQMQQQYHQVLQQVQQQAQLQQQNLQFGPPPPQSKLLEFLRVKPPTFSSTTNPIEAHDWLHAIEKKLNLLQCNEQEKVAFATHQLQGPASIWWDNYMVTRPAGAEVTWTEFRHSFNKAQVPEGIVGQKKREFRSLQQGTRTVIEYLHEFNRLARYAPEDVRTDAEKQEKFMSGLDDELTNQLISRDYEDFEKLVDKAIRQEEQCNKMTRKRKAAQFRTPQGKCQKPRYTMGRHGGPSTMIIRQHRPYHPGSFNKTHHSDSHNNSGSHSSLNPTPSPLMIPAQSDQPALPEQPKRLVEKPELCFNCNKPGHTVGKCPKPRRAGPKFVQARVNHASAEEAQSAPEVILGTFPVNSTPAVILFDSGATHSFISKRFAGAHGLSLVKLKIPMRVHTPGGGMTTTHYCPSVTVEIQGSIFPANLILLESKDLDKDKTKRMCVDYRALNEVTIKNKYPLPRIDDLFDQLKGATVFSKIDLRSGYHQLRIREEDIPKTAFITRYGLFECTVMSFGLTNAPAFFMNLMNKSEEEHKQHLRLVLEKLKEPQLYAEFSKCDFWLKEVQFLGHIVNAQGVAVDPANVQSVTKWTPPRTVTQVRSFLGLAGYYRRFIENFSKIAKPMTQLLKKEEKFIWSAECNRSFEELKRRLVSAPVLILPDQTKDFQVYCDASRQGLGCVLMQDGKVVSYASRQMRPHEGNYPTHDLELAAVVHALKIWRHYLISNRCEVYTDHKSLKYIFTQADLNLRQRRWLELIKDYDMGIHYHPGKANVVADALSRKSYCNVAWVEQLCCEVQRDLEHLNLGIVEHGFVAALEAQPTLVEQVRIAQASDPEIAELKKNMRVGKARGFVEDEQGTIWMGERLCVPENKELKDLILTEAHQTQYSIHPGSTKMYQDLKEKFWWVSMRREIAEFVALCDVCQRVKAEHQRPAGLLQPLQIPEWKWEEIGMDFVTGLPRTSSGHDSIWVVRDRLTKVAHFHSVHTTYSGKKLAELYLARIMCLHGVPKKIVSDRGSQFTSKFWQKLQEELGTRLNFSTAYHPQTDGQTERVNQILEDMLRACALDFGGAWDKSLPYAEFSYNNSYQASLQMAPFEALYGRRCRTPLFWDQTGERQLFGTEVLNEAEEKVRAVRERLRIAQSREKSYADNRRRELVFQVGDYVYLRVTPLRGVHRFQTKGKLAPRFVGPYRILERRGEVAYQLELPSNMLGIHNVFHVSQLKKCLRVPEEQASPDQIEIQEDLTYVEKPTRILETSERKTRNKVIRFCKVQWSHHSEEEATWEREDELKATHPHLFASSSESRGRDSV

SEQ ID NO: 19574 - protein, 1340 aa, Oryza sativa
  Clone ID: TF_OSC400061j.C1.p1.fg
MAAKSRSMEHVPTVHLTTVRLPPPENPTICSGVGQSDSDDDNDDATDAATVPSGVDSRDYEDFEKLVDKAIRQEEHCNKINRKRKAAQFRTPQRKSQKPRFTMGHHGGPSTMIIRQHRPYHPGRFFKNHHSGSHNNSEQHSLNPTPSSLKIPAQSVQPALPEQPKRLVEKPELCFNCNKPGHTVGKCPKPRRAGPKFVQARVNHASAEEAQSAPEVILGTFPVNSTPAVILFDSGATHSFISKRFAGAHGLSLVKLKIPMRVHTPGGGMTTTHYCPSVTVEIQGSIFPANLILLESKDLDVILGMDWLTRHRGVIDCASRTIKLTNAKGEVVTFQSPVPQKPRISLNQAAGEEQEVAVEKTTKKLEDIPIVREYPEVFPDDLTTMPPKRDIEFRIDLVPGTAPIHKRPYRMGANELAEVKKQVDEQLQKGYIRPSTSPWGAPVIFVEKKDKTKRMCVDYRALNEVTIKNKYPLPRIDDLFDQLKGATVFSKIDLRSGYHQLRIREEDIPKTAFITRYGLFECTVMSFGLTNAPAFFMNLMNKVFMEFLDKFVVVFIDDILIYSKSEEEHEQHLRLVLEKLKEHQLYAKFSKCDFWLKEVQFLGHIVNAQGVAVDPANVESVTKWTPPRTVTQVRSFLGLAGYYRRFIENFSKIAKPMTQLLKKEEKFIWSAECNRSFEELKRRLVSAPVLILPDQTKDFQVYCDASRQGLGCVLMQDGKVVSYASRQLRPHEGNYPTHDLELAAVVHALKIWRHYLIGNRCEVYTDHKSLKYIFTQPDLNLRQRRWLELIKDYDMGIHYHPGKANVVADALSRKSHCNVAWVEELCCEVQRDLGHLNLGIVEHGFVAALEAQPTLVEQVRIAQASDPEIAELKKNMRVGKARGFVEDEQGTIWMGERLCVPENKELKDLILTEAHQTQYSIHPGSTKMYQDLKEKFWWVSMRREIAEFVALCDVCQRVKAEHQRPAGLLQPLQIPEWKWEEIGMDFITGLPRTSSGHDSIWVVVDRLTKMAHFIPVHTTYSGKKLAELYLARIMCLHGVPKKIVSDRGSQFTSKFWQKLQEELGTRLNFSTAYHPQTDGQTERVNQILEDMLRACALDFGGAWDKSLPYAEFSYNNSYQASLQMAPFEALYGRRCRTPLFWDQTGERQLFGTEVLNEAEEKVRAVRERLRIAQSRQKSYADNRRRELAFETGDYVYLRVTPLRGVHRFQTKGKLAPRFVGPYRILERRGEVAYQLELPSNMLGIHNVFHVSQLKKCLRVPEEQASPDHIEIQEDLTYVEKPTRILETSERKTRNKVIRFCKVQWSHHSEEEATWEREDELKATHPHLFASPSESRGRDSV

SEQ ID NO: 19575 - protein, 604 aa, Oryza sativa
  Clone ID: TF_OSC400219j.C1.p1.fg
MEIRNGSRDSNNASGSEEPINGARANGASDNSPSPPPENPTIAQVLDNQTQMMTMMMQQMQQQYHQVLQQVQQQAQQQQQNLQFGPPPPQSKLLEFLRVKPPTFSSTTNPIEAYDWLHAIEKKLNLLQCNEQEKVAFATHQLQGPASIWWDNYMVTRPAGAEVTWTEFRHSFNKAQVPEGIVAQKKREFRSLQQGTRTVIEYLHEFNRLARYAPEDVRTDAERQEKFLSGLDDELTNQLISRDYEDFEKQVHKAIRQEEQCSKMNRKRKAAQFRTPQGKCQKPRFTMGRQGGPSTMIIRQHRPYHPGNFNKNNNSGSHSSLNPTPSLLMIPAQSDQPAQPALPEQPKRLGEKPELCFNCNQPGHTVGKCPKPRRAGPKFVQARVNHASAEEAQSAPEVILGTFPVNSTPAVILFDSGATHSFISKRFAGAHGLSLVKLKIPMRVHTPGGGMTTTHYCPAVTVEIQGLIFPANLILLESKDLDVILGMDWLTRHRGVIDCASRTIKLTNAKGEVVTFQSPVLQKPRISLNQAAGEEQEVAVEKTTKKLEDIPIVREYPEVFPDDLTTMPPKRDIEFRIDLVPGTAPIHKRPYRMGASELAEVKKQ

SEQ ID NO: 19576 - protein, 1522 aa, Oryza sativa
  Clone ID: TF_OSC400221j.C1.p7.fg
MEIRNGSRDSNNASGSEEPINGARANGASDNSPSPPPENPTIAQVLDNQTQMMTMMMQQMQQQYHQVLQQVQQQAQQQQQNLQFGPPPPQSKLLEFLRVKPPTFSSTTNPIEAYDWLHAIEKKLNLLQCNEQEKVAFATHQLQGPASIWWDNYMVTRPAGAEVTWTEFRHSFNKAQVPEGIVAQKKREFRSLQQGTRTVIEYLHEFNRLARYAPEDVRTDAERQEKFLSGLDDELTNQLISRDYEDFEKQVHKAIRQEEQCSKMNRKRKAAQFRTPQGKCQKPRFTMGRQGGPSTMIIRQHRPYHPGNFNKNNNSGSHSSLNPTPSLLMIPAQSDQPAQPALPEQPKRLGEKPELCFNCNQPGHTVGKCPKPRRAGPKFVQARVNHASAEEAQSAPEVILGTFPVNSTPAVILFDSGATHSFISKRFAGAHGLSLVKLKIPMRVHTPGGGMTTTHYCPAVTVEIQGLIFPANLILLESKDLDVILGMDWLTRHRGVIDCASRTIKLTNAKGEVVTFQSPVLQKPRISLNQAAGEEQEVAVEKTTKKLEDIPIVREYPEVFPDDLTTMPPKRDIEFRIDLVPGTAPIHKRPYRMGASELAEVKKQVDEQLQKGYIRPSTSPWGAPVIFVEKKDKTKRMCVDYRALNEVTIKNKYPLPRIDDLFDQLKGATVFSKIDLRSGYHQLRIREEDIPKTAFITRYGSFECTVMSFGLTNAPAFFMNLMNKVFMEFLDKFVVVFIDDILIYSKSEEEHEQHLRLVLEKLKEHQLYAKFSKCDFWLKEVQFLGHIVNAQGVAVDPANVESVTEWTPPRTVTQVRSFLGLAGYYRRFIENFSKIAKPMTQLLKKEEKFIWSAECNRSFEELKRRLVSAPVLTLPDQTKDFQVYCDASRQGVGCVLMQDGKLVSYASRQLRPHEGNYPTHDLELAAVVHALKIWRHYLIGNRCEVYTDHKSLKYIFTQPDLNLRQRRWLELIKDYDMGIHYHPGKANVVADALSRKSYCNVAWVEQLCCEVQRDLEHLNLGIVEHGFVAALEAQPTLVEQVRIAQASDPEIAELKKNMRVGKARGFVEDEQGTIWMGERLCVPENKELKDLILTEAHQTQYSIHPGSTKMYQDLKEKFWWVSMRREIAEFVALCDVCQRVKAEHQRPAGLLQPLQIPEWKWEEIGMDFITGLPRTSSGHDSIWVVVDRLTKVAHFIPVHTTYSGKKLAELYLARIMCLHGVPKKIVSDRGSQFTSKFWQKLQEELGTRLNFSTAYHPQTDGQTERVNQILEDMLRACALDFGGAWDKSLPYAEFSYNNSYQASLQMAPFEALYGRRCRTPLFWDQTGERQLFGTEVLNEAEEKVRAVRERLRIAQSRQKSYADNRRRELAFETGDYVYLRVTPLRGVHRFQTKGKLAPRFVGPYRILERRGEVAYQLELPSNMLGIHNVFHVSQLKKCLRVPEEQASPDHIEIQEDLTYVEKPIRILETSERRTRNKVIRFCKVQWSHHSEEEATWEREDELKATHPHLFASSSESRGRDSV

SEQ ID NO: 19577 - protein, 1261 aa, Oryza sativa
  Clone ID: TF_OSC400271j.C1.p5.fg
MAVKYWFTGNPGRLTVLTTSGTVLPFSTTGFKCLLYANEPLAFFGYTLHHTSSSELKIFLVGAVLLRFVACGLVGGRYHVSVMVKTRNGSHDSNNASGSEERISGPCASDTFDNSSSPSPENPTIAQVLENQTQMMTMMMQQMQQQYHQVLQQVQQQAAAELAAWSSASLLGQKLLGQSFARVLIRHRFPRESWHKRRESSVPCNKKPEQLEYLHEFNRLARYAPKDVRTDAERQEKFLSGLDDELTNQLIPRDYEDFEKLVDKAIRQEELCNKMNRKRKAAQFRTPQGESQKPCFTMGHQGGPSTMIIRQHRPYHPGSFNKNHHNGSHNNSEQHSLNPTPSSLMILAQSVQPALPEQPKRLGEKPELCFNCNKPGHTVGKCPKPRHAGPKFVQARVNHASAEEAQSAPEVILGTFPINSTPAVILFDSGATHSFISKRFAGAHGLSFVKLKIPMRVHTPGGGMTTTHYCPSVTVEIQGLIFPANLILLESKDLDVILGMDWLTRHKGVIDCASRIIKLTNAKGEVVTFQSPVPQKPGISLNQAVGEGQEVAVEKTTKKLEDIPIVREYPEVFLDDLTTMPPKRDIEFRIDLAPGTAPIHKRPYIMGANELAEDKFVVVFIDDILIYSKSQEEHEQHLRLELEKLKEHQLYAKFGKCDFWLKEVQFLGHIVNAQGVAVDPANVESVTKWTSPKTVTQIRSFLGLAGYYRRFIENFSKIAKPMTQLLKKEEKFIWSAEWNRSFEELKRRLGLGCVLMQDGKVVSYASRQLRPHEGNYPTHDLELAAVVHALKIWRHYLIGNRCEVRIAQASDPEIAELKKNMRVGKARGFVEDEQGTIWMGERLCVPKNKELKDLILTEAHQTRYSIHPGSTKMYQDLKEKFWWVSMRREIAEFVALCDVCQRVKAEHERPAGLLQPLQIPEWKWEEIGMDFITGLPRTSSGHDSIWVVVDRLTKVAHFIPVHTTYSGKKSQFTSKFWQKLQEELGTRLNFSTAYHPQTDGQTERVNQILEDMLRACALDFGGAWDKSLPYAEFSYNNSYQASLQMATFEALYGRRCRTPLFWNQTGERQLFGTEVLNEAEEKVRAVMERLRIAQSRQKSYADNRQRELTFEAGDYVYLRVTPLRGVHRFQTKGKLAPRFVGPYRVLERRGEVAYQLELPSNMFGIHNVFHVSQLKKCLRVPEEQASPDQIEIQEDLTYVEKPTRILEISERRTRNKVIRFCKVQWSHHSEKEATWKREDELKATHPHLFASSSESRGRDSV

SEQ ID NO: 19578 - protein, 1441 aa, Oryza sativa
  Clone ID: TF_OSC400535j.C1.p1.fg
METRNGSRDSNNASGSEKPINGARANSASDNSPSPPPENPTIAQVLDNQTQMMTMMMQQMQQQYHQVLQQVQQQAQLQQQNLQFGPPPPQSKLLEFLRVKPPTFSSTTNPIEAHDWLHAIEKKLNLLQCNEQEKVAFATHQLQGPASIWWDNYMVTRPAGAEVTWTEFRHSFNKAQVPEGIVAQKKREFRSLQQGTRTVIEYLHEFNRLARYAPEDVRTDAERQEKFLSGLDDELTNQLISRDYEDFEKLVDKAIRQEEQCNKMNRKRKAAQFRTPQGKCQKPRFTMGHQGGPSTMIIRQHRPYHPGNFNKNNNSGSHSSLNPTPSPLMIPAQSDQSDQLAQPALPEQPKRLGEKPELCFNCNKPGHTVGKCPKPRRAGPKFVQARVNHASAEEAQSAPEVILGTFPVNSTPAVILFDSGATHSFISKRFAGAHGLSLVKLKIPMRVHTPGGGMTTTHYCPSVTVEIQGLIFPANLILLESKDLDVILGMDWLTRHRGVIDCASRTIKLTNAKGEVVTFQSLVPRKPGISLNQVAGEEQEVAVEKTTKKLEDIPIVREYPEVFPDDLTTMPPKRDIEFRIDLVPGTAPIHKRPYRMGASELAEVKKQVDEQLQKGYIRPSTSPWGAPVIFVEKKDKTKRMCVDYRALNEVTIKNKYPLPRIDDLFDQLKGATVFSKIDLRSGYHQLRIREEDIPKTAFITRYGLFECTVMSFGLTNAPAFFMNLMNKVFMEFLDKFVVVFIDDILIYSKSEEEHEQHLRLVLEKLKEHQLYAKFSKCDFWLKEVQFLGHIVNAQGVAVDPANVESVTKWTPPRTVTQDGKVVSYASRQLRPHEGNYPTHDLELAAVVHALKIWRHYLIGNRCEVYTDHKSLKYIFTQPDLNLRQRRWLELIKDYDMGIHYHPGKANVVADALSRKSYCNVAWVEQLCCEVQRDLEHLNLGIVEHGFVAALEAQPTLVEQVRIAQASDPEIAELKKNMRVGKARGFVEDEQGTIWMGERLCVPENKELKDLILTEAHQTQYSIHPGSTKMYQDLKEKFWWVSMRREIAEFVALCDVCQRVKAEHQRPAGLLQPLQIPEWKWEEIGMDFITGLPRTSSGHDSIWVVVDRLTKVAHFIPVHTTYSGKKLAELYLSRIMCLHGVPKKIVSDRGSQFTSKFWQKLQEELGTRLNFSTAYHPQTDGQTERVNQILEDMLRACALDFGGAWDKSLPYAEFSYNNSYQASLQMAPFEALYGRRCRTPLFWDQTGERQLFGTEVLNEAEEKVRAVRERLRIAQSRQKSYADNRRRELVFQVGDYVYLRVTPLRGVHRFQTKGKLAPRFVGPYRILERRGEVAYQLELPSNMLGIHNVFHVSQLKKCLRVPEEQASPDQIEIQEDLTYVEKPTRILETSERKTRNKVIRFCKVQWSHHSEEEATWEREDELKATHPHLFASSSESRGRDSV

SEQ ID NO: 19579 - protein, 1524 aa, Oryza sativa
  Clone ID: TF_OSC400563j.C1.p6.fg
MEIRNGSRDSNNASGSEEPINGARANGASDNSPSPPPENPTIAQVLDNQTQIMTMMMQQMQQQYHQVMQQVQQQAQLQQQNLQFGPPPPQSKLLEFLRVKPPTFSSTTNPIEAHDWLHAIEKKLNLLQCNEQEKVAFATHQLQGPASIWWDNYMVTRPAGAEVTWTEFRHSFNKAQVPEGIVGQKKREFRSLQQGTRTVIEYLHEFNRLARYAPEDVRTDAEKQEKFMSGLDDELTNQLISRDYEDFEKLVDKAIRQEEQCNKMNRKRKAAQFRTPQGKCQKPRYTMGRHGGPSTMIIRQHRPYHPGSFNKTHHSDSHNNSEQHSLNPTPSSLKIPAQSVQPALPEQPKRLGEKPELCFNCNKPGHTVGKCPKPRRAGPKFVQARVNHASAEEAQSAPEVILGTFPVNSTPAVILFDSGATHSFISKRFAGAHGLSLVKLKIPMRVHTPGGGMTTTHYCPSVTVEIQGLIFPANLILLESKDLDVILGMDWLARHRGVIDCASRTIKLTNAKGEVVIFQSPVPQKPGISLNQAAGEEQEVAVEKTTKKLEDIPIVREYPEVFPDDLTTMPPKRDIEFRIDLVTGTAPIHKRPYRMGASELAEVKKQVDEQLQKGYIRPSTSPWGAPVIFVEKKDKTKRMCVDYRALNEVTIKNKYPLPRIDDLFDQLKGATVFSKIDLRSGYHQLRIREEDIPKTAFITRYGLFECTVMSFGLTNAPAFFMNLMNKVFMEFLDKFVVVFIDDILIYSKSEEEHEQHLRLVLEKLKEHQLYAKFSKCDFWLKEVQFLGHIVNAQGVAVDPANVESVTKWTPPRTVTQVRSFLGLAGYYRRFIENFSKIAKPMTQLLKKEEKFIWSAECNRSFEELKRRLVSAPVLILPDQTKDFQVYCDASRQGLGCVLMQDGKVVSYASRQLRPHEGNYPTHDLELAAVVHALKIWRHYLISNRCEVYTDHKSLKYIFTQPDLNPRQRRWLELIKDYDMGIHYHPGKANVVADALSRKSYCNVAWVEELCCEVQRDLEHLNLGIVEHGFVAALEAQPTLVEQVRIAQASDPEIAELKKNMRVGKARGFVEDEQGTIWMGERLCVPENKELKDLILTEAHQTQYSIHPGSTKMYQELKEKFWWVSMRREIAEFVALCDVCQRVKAEHQRPAGLLQPLQIPEWKWEEIGMDFITGLPRTSSGHDSIWVVVDRLTKVAHFIPVHTTYSGKKLAELYLARIMCLHGVPKKIVSDRGSQFTSKFWQKLQEELGTRLNFSTAYHPQTDGQTERVNQILEDMLRACALDFGGAWDKSLPYAEFSYNNSYQASLQMAPFEALYGRRCRTPLFWDQTGERQLFGTEVLNEAEEKVRAVRERLRIAQSRQKSYADNRRRELAFETGDYVYLRVTPLRGVHRFQTKGKLAPRFVGPYRILERRGEVAYQLELPSNMLGIHNVFHVSQLKKCLRVPEEQASPDQIKIQEDLTYMEKPTRILETSERRTRNKVIRFCKVQWSHHSEEEATWEREDELKATHPHLFASSSESRGRDSV

SEQ ID NO: 19580 - protein, 494 aa, Oryza sativa
  Clone ID: TF_OSC400719j.C1.p30.fg
MAVKDRFTGNPGRLTVLTTSGSGVEVLLSWSRLREVGFVAAVKMEIRNGSRDSNNASGSEELINGARANSASDNSPSPPPENPTIAQVLDNQTQMMTMMMQQMQQQYHQVLQQVQQQAQQQQQNLQFGPPPPQSKLLEFLRVKPPTFSCTTNPIEAHDWLHAIEKKLNLLQCNEQEKVAFATHQLQGPASVWWDNYMVTRLAGAEVTWTEFCHSFNKAQVPEGIVAQKKREFRSLQQGTRTVIEYLHEFNRLARYAPEDVRTDDGRQEKFLSGLDDELTNQLISRDYEDFEKLVDKAIRQEEHCNKINRKRKAAQFRTPQGKSQKPRFTMGRHGGPSTMIIRQHRPYHPGSFNKNHHSGSHNNSEQHSLNPTPSSLKIPTQSVQPALPEQPKRLGEKPELCFNCNKPGHTVGKCPKPRRAGPKFVQARVNHASAEEAQSAPKVILGTFPVNSTPAVILFDSGATHSFISKRFAGAHGLSLVKLKIPMRVHTPEA

SEQ ID NO: 19581 - protein, 1525 aa, Oryza sativa
  Clone ID: TF_OSC400746j.C1.p1.fg
MEIRNGSRDSNNASGSEEPINGARANGASDNSPSPPPENPTIAQVLDNQTQMMTMMMQQMQQQYHQVLQQVQQQAQLQQQNLQFGPPPPQSKLLEFLRVKPPTFSSTTNPIEAHDWLHAIEKKLNLLQCNEQEKVAFATHQLQGPASIWWDNYMVTRPAGAEVTWTEFRHSFNKAQVPEGIVAQKKREFRSLQQGTRTVIEYLHEFNRLARYAPEDVRTDAERQEKFLSGLDDELTNQLISRDYEDFEKLVDKAIRQEEQCNKMNRKRKAAQFRTPQGKCQKPRFTMGHQGGPSTMIIRQHRPYHPGNFNKNNNSGSHSSLNPTPSPLMIPAQSDQSDQLAQPALPEQPKRLGEKPELCFNCNKPGHTVGKCPKPRHAGPKFVQARVNHASAEEAQSAPEVILGTFPVNSTPAVILFDSGATHSFISKRFAGAHGLSLVKLKIPMRVHTPGGGMTTTHYCPSVTVEIQGLIFPANLILLESKDLDVILGMDWLTRHRGVIDCASRTIKLTNAKGEVVTFQSLVPRKPGISLNQAAGEEQEVAVEKTTKKLEDIPIVREYPEVFPDDLTTMPPKRDIEFRIDLVPGTAPIHKRPYRMGANELAEVKKQVDEQLQKGYIRPSTSPWGAPVIFVEKKDKTKRMCVDYRALNEVTIKNKYPLPRIDDLFDQLKGATVFSKIDLRSGYHQLRIREEDIPKTAFITRYGLFECTVMSFGLTNAPAFFMNLMNKVFMEFLDKFVVVFIDDILIYSKSEEEHEQHLRLVLEKLKEHQLYAKFSKCDFWLKEVQFLGHIVNAQGVAVDPANVESVTKWTPPRTVTQVRSFLGLAGYYRRFIENFSKIAKPMTQLLKKEEKFIWSAECNRSFEELKRRLVSAPVLILPDQTKDFQVYCDASRQGLGCVLMQDGKVVSYASRQLRPHEGNYPTHDLELAAVVHALKIWRHYLIGNRCEVYTDHKSLKYIFTQPDLNLRQRRWLELIKDYDMGIHYHPGKANVVADALSRKSYCNVAWVEELCCEVQRDLEHLNLGIVEHGFVAALEAQPTLVEQVRIAQASDPEIAELKKNMRVGKARGFVEDEQGTIWMGERLCVPENKELKDLILTEAHQTQYSIHPGSTKMYQDLKEKFWWVSMRREIAEFVALCDVCQRVKAEHQRPAGLLQPLQIPEWKWEEIGMDFITGLPRTSSGHDSIWVVVDRLTKVAHFIPVHTTYSGKKLAELYLARIMCLHGVPKKIVSDRGSQFTSKFWQKLQEELGTRLNFSTAYHPQTDGQTERVNQILEDMLRACALDFGGAWDKSLPYAEFSYNNSYQASLQMAPFEALYGRRCRTPLFWDQTGERQLFGTEVLNEAEEKVRAVRERLRIAQSRQKSYADNRRRELVFQVGDYVYLRVTPLRGVHRFQTKGKLAPRFVGPYRILERRGEVAYQLELPSNMLGIHNVFHVSQLKKCLRVPEEQASPDQIEIQEDLTYVEKPTRILETSERRTRNKVIRFCKVQWSHHSEEEATWEREDELKATHPHLFTSSSESRGRDSV

SEQ ID NO: 19582 - protein, 2013 aa, Oryza sativa
  unsure (1)..(2013): unsure at all Xaa locations
  Clone ID: TF_OSC400770j.C1.p18.np
MAAGSRAYSFPTGRSLPLPTLYKPSPHLLRPFPPLAALPPRRNRARAVALSLRRRRRAPVRRRRRPGPPPTSAPPPSASPHPRRPRPPLRFARRPPERRRPRRPEPRRRLPPLRPPFSSPSTXGEPWTAASFPPFPPFSRPPLRHAYGRRRRPXGRGRAASRWPCRRGRLRAHRAAAAWGPAVSRSRPRVRLTRGAHGAGRCEPGAPGPPWTHLGHIRTGLRASVAKRYRFHMSSGTNEGYTSYGLVAKMSWHRAGVLLLGAQSCLPVPGVPAVGGVGSMYTSDQSIIYSNSRALGYGQAEQCTQMAGSINRRGLDLTGFVLELRGMCVVLGYPHGVDYQGKQLPEQEGDDAEPHAAWEVTAVILTGSPERTSLAVTAGGDSFSAACQNAALLAIGTLHQRYPDELQHLPYRYHPRRGGARDYATFRDASSEDDATIMHLAHMVEAYDAARIDFHQMVRRGLVKNNMKILELRQENLQLKKDLDAVEAQLRQLKIAQGEVCRPKRRRVCRSLKITARKSTSRPELVRQSLAWTCFVETPRAEPAPVVPQEDGASGVGSTEDALLLTFHGETRRSAATGEGSHPEGSNHNNHVSPPPPPSPPPPPPPDTNAILTQIVAQXANMMAAFLHHIQNPPQHNAPPPPPQHSKLAEFLRICPPTFSSSNNPVDALDWLHAVEKKLDTVQCSDEEKVIFAAHQLQGPASLWWNHFQATQLEGQPITWARFTAAFQRTHVPAGVMALKKREFRELKQGNRSVMEYLHEFNNLAWYAPEDVREDEEKXEKFLAGMDPELSVRLVSGDYSDFQRLVDKSIRLEAKHKELESHKRRLANFRNQQGANQRVRYTNPYPGGSSSQQQQQQQPRSAPRPQFVVRIPQPQQQQSQQGTRAPRPPTPAVQPGQGRRDVQGQQRLCFNCFEHGHFADKCPKPRRQQGQAPPRSNNGGKDVIRGRVNHVTAEDVLTTPDIIVGTFLIHSIPATILFDSGASHSFISVPFVGRNRLGIERLRNPLLITTPGGVMTAKYYSPAIPIEIQGIPFPSDLILLDTKNLDVILGMNWLAQFQGVVDCARRTVTLYRGPEQPVVFFAPPTSVGSSELHQIGLSEIPIVREFGDVFPEKLPGMLPKREIEFRIDLAPGTTPLYKRPYRMAANELAEVKKQLEELKEKGYIRPSTSPWGAPVIFVEKKDKTKRMCVDYRALNEVTIKNKYPLPRIDDLFDQLKGATVFSKIDLRSGYHQLRIREEDIPKTAFTTRYGLYEFTVMSFGLTNAPAFFMNLVNKVFMEYLDKFVVVFINDILVYSQSEEDHQHHLRLVLGKLREHQLYAKLSKCEFWLSEVKFLGHVISAKGVAVDPETVTAVIDWKQPKTVTQIRSFLGLAGYYRRFIENFSKIARPMTQLLKKEEKFVWSPQCEKAFQTLKERLVSSPVLVXPDTRKDFMVYCDASRQGLGCVLMQEGHVVAYASRQLRPHEGNYPTHDLELAAVVHALKIWRHYLIGNRCEIYTDHKSLKYIFTQSDLNLRXRRWLELIKDYDVGIHYHPGKANVVADALSRKSHCNTLDVRGIPPELNQQMEALNLSIVGRGFLATLEAKPTLLDQIREAQKNDPDMHGLLKNMKQGKAAGFTEDEHGTLWNGNRRVKAEHQRPAGLLQPLQVPEWKWDEIGMDFITGLPKTQGGYDSIWVVVDRLTKVARFIPVKTTYGGNKLAELYFARIVSLHGVPKKIVSDRGSQFTSHFWKKLQEELGTRLNFSTAYHPQTDGQTERLNQILEDMLRSCVLDFGKTWDKSLPYAEFSYNNSYQASLXMAPYEALYGRKCRTPLLWDQVGESQVFGTDILREAEAKVRTIRDNLKVAQSRQKSYADNRRRNLEFAVDDFVYLRVTPLRGVHMFQTKGKLAPRFVGPFRIIARRGEVAYQLELPASLGNVHDVFHVSQLKKCLRVPSEQADSEQIEVREDLTYVERPVKILDTMERRTRNWVIRFCKVQWSNHAEEEATWEREDELKAAHPNLFGSSSESRGRDSV

SEQ ID NO: 19583 - protein, 1524 aa, Oryza sativa
  Clone ID: TF_OSC400903j.C1.p71.fg
MEIRNGSRDSNNASGSEEPINGARANGASDNSPSPPPENPTIAQVLDNQTQMMTMMMQQMQQQYHQVLQQVQRQAQQQQQNLQFGPPPPQSKLLEFLRVKPPTFSSTTNPIEAHDWLHAIEKKLNLLQCNEQEKVAFATHQLQGPASVWWDNYMVTRPAGAEVTWTEFRHSFNKAQVPEGIVAQKKREFRSLQQGTRTVIEYLHEFNLLARYAPEDVRTDAEKQEKFMSGLDDELTNQLISRDYEDFEKLVDKAIRQEEHCNKINRKRKAAQFRTPQGKSQKPRFTMGHHGGPSTMIIRQHRPYHPGNFNKNHHNGSHNNSEQHSLNPTPSSLKIPAQSVQPALPEQPKRLGEKPELCFNCNKPGHTVGKCPKPRRAGPKFVQARVNHASAEEAQSAPEVILGTFPVNSTPAVILFDSGATHSFISKRFAGAHGLSLVKLKIPMRVHTPGGGMTTTHYCPSVTVEIQGLIFPANLILLESKDLDVILGMDWLTRHRGVIDCASRTIKLTNAKGEEVTFQSLVPRKPGVSLNQAAGEEQEVAVEKTTKKLEDIPIVREYPEVFPDDLTTMPPKRDIEFRIDLVPGTAPIHKRPYRMGANELAEVKKQVDEQLQKGYIRPSTSPWGAPVIFVEKKDKTKRMCVDYRALNEVTIKNKYPLPRIDDLFDQLKGATVFSKIDLRSGYHQLRIREEDIPKTAFITRYGLFECTVMSFGLTNAPAFFMNLMNKVFMEFLDKFVVVFIDDILIYSKSEEEHEQHLRLVLEKLKEHQLYAKFSKCDFWLKEVQFLGHIVNAQGVAVDPANVESVTKWTPPRTVTQVRSFLGLAGYYRRFIENFSKIAKPMTQLLKKEEKFIWSAECNRSFVELKRRLVSAPVLILPDQTKDFQVYCDASRQGLGCVLMQDGKVVSYASRQLRPHEGNYPTHDLELAAVVHALKIWRHYLIGNRCEVYTDHKSLKYIFTQPDLNLRQRRWLELIKDYDMGIHYHPGKANVVADALSRKSYCNVAWVEQLCCEVQRDLEHLNLGIVEHGFVAALEAQPTLVEQVRIAQASDPEIAELKKNMRVGKARGFVEDEQGTIWMGERLCVPENKELKDLILTEAHQTQYSIHPGSTKMYQDLKEKFWWVSMRREIAEFVALCDVCQRVKAEHQRPAGLLQPLQIPEWKWEEIGMDFITGLPRTSSGHDSIWVVVDRLTKVAHFIPVHTTYSGKKLAELYLARIMCLHGVPKKIVSDRGSQFTSKFWQKLQEELGTRLNFSTAYHPQTDGQTERVNQILEDMLRACALDFGGAWDKSLPYAEFSYNNSYQASLQMAPFEALYGRRCRTPLFWDQTGERQLFGTEVLNEAEEKVRAVRERLRIAQSRQKSYADNRRRELAFETGDYVYLRVTPLRGVHRFQTKGKLAPRFVGPYRILERRGEVAYQLELPSNMLGIHNVFHVSQLKKCLRVPEEQASPDQIEIQEDLTYVEKPTRILETSERKTRNKVIRFCKVQWSHHSEEEATWEREDELKATHPHLFASSSESRGRDSV

SEQ ID NO: 19584 - protein, 1562 aa, Oryza sativa
  Clone ID: TF_OSC401058j.C1.p66.fg
MAVKDRFTGNPGRLTVLTTSGSGFVACGLVGGRYHVSVMEIRNGSRDSNNASGSEEPINGARANGASYNSPSPPPENPTIAQVLDNQTQMMTMMMQQMQQQYHQVLQQVQQQAQPQQQNLQFGPPPPQSKLLEFLRVKPPTFSSTTTPIEAHDWLHAIEKKLNLLQCNEQEKVAFATHQLQGPASIWWDNYMVTRPAGAEVTWTEFCHSFNKAQVPEGIVAQKKREFRSLQQGTRTVIEYLHEFNRLARYAPEDVRTDAERQEKFMSGLDDELTNQLISRDYEDFEKLVDKAIRQEEQCNKMNRKRKAAQFRTPQGKCRKPRFTMGRHGGPSTMIIRQHRPYHPGSFNKNHHSGSYNNSEQHSLNPTPSSLKIPAQSVQPALPEQPKRLGEKPELCFNCNKPGHTVGKCPKPRRAGPKFVQARVNHASAEEAQSAPEVILGTFPVNSTPAVILFDSGATHSFISKRFAGAHGLSLVKLKIPMRVHTPGGGMTTTHYCPSVTVEIQGLIFPANLILLESKDLDVILGMDWLARHRGVIDCASRTIKLTNAKGEVVIFQSPVPQKPGISLNQAAGEEQEVAVEKTTKKLEDIPIVREYPEVFPDDLTTMPPKRDIEFRIDLVPGTAPIHKRPYRMGANELAEVKKQVDEQLQKGYIRPSTSPWGAPVIFVEKKDKTKRMCVDYRALNEVTIKNKYPLPRIDDLFDQLKGATVFSKIDLRSGYHQLRIREEDIPKTAFITRYGLFECTVMSFGLTNAPAFFMNLMNKVFMEFLDKFVVVFIDDILIYSKSEEEHEQHLRLVLEKLKEHQLYAKFSKCDFWLKEVQFLGHIVNAQGVAVDPANVESVTKWTPPRTVTQVRSFLGLAGYYRRFIENFSKIAKPMTQLLKKEEKFIWSAECNRSFEELKRRLVSAPVLILPDQTKDFQVYCDASRQGLGCVLMQDGKVVSYASRQLRPHEGNYPTHDLELAAVVHALKIWRHYLIGNRCEVYTDHKSLKYIFTQPDLNLRQRRWLELVKDYDMGIHYHPGKANVVADALSRKSYCNVAWVEQLCCEVQRDLEHLNLGIVEHGFVAALEAQPTLVEQVRIAQASDPEIAELKKNMRVGKARGFVEDEQGTIWMGERLCVPENKELKDLILTEAHQTQYSIHPGSTKMYQDLKEKFWWVSMRREIAEFVALCDVCQRVKAEHQRPAGLLQPLQIPEWKWEEIGMDFITGLPRTSSGHDSIWVVVDRLTKVAHFIPVHTTYSGKKLAELYLARIMCLHGVPKKIVSDRGSQFTSKFWQKLQEELGTRLNFSTAYHPQTDGQTERVNQILEDMLRACALDFGGAWDKSLPYAEFSYNNSYQASLQMAPFEALYGRRCRTPLFWDQTGERQLFGTEVLNEAEEKVRAVRERLRIAQSRQKSYADNRRRELVFQVGDYVYLRVTPLRGVHRFQTKGKLAPRFVGPYRILERRGEVAYQLELPSNMLGIHNVFHVSQLKKCLRVPEEQASPDQIEIQEDLTYVEKPTRILETSERKTRNKVIRFCKVQWSHHSEEEATWEREDELKATHPHLFASSSESRGRDSV

SEQ ID NO: 19585 - protein, 1567 aa, Oryza sativa
  Clone ID: TF_OSC401064j.C1.p47.fg
MAIKDRFTGNPGRLTVLTTSGSGVEVLLSWSRLREVGFVAAVKMEIRNGSRDSNNASGSEEPINGARANGASDNSPSPPPENPTIAQVLDNQTQMMTMMMQQMQQQYHQVLQQVQQQAQLQQQNLQFGPPPPQSKLLEFLRVKPPTFSSTTNPIEAHDWLHAIEKKLNLLQCNEQEKVAFATHQLQGPASIWWDNYMVTRPAGAEVTWTEFRHSFNKAQVPEGIVAQKKREFRSLQQGTRTVIEYLREFNLLARYAPEDVRTDAERQEKFLSGLDDELTNQLISRDYEDFEKLVDKAIRQEEHCNKINRKRKAAQFRTPQGKSQKPRFTMGHHGGPSTMIIRQHRPYHPGNFNKNHHSDSHNNSEQHSLNPTPSSLKIPAQSVQPALPEQPKRLGEKPELCFNCNKPGHTVGKCPKPRRAGPKFVQARVNHASAEEAQSAPEVILGTFPVNSTPAVILFDSGATHSFISKRFAGAHGLSLVKLKIPMRVHTPGGGMTTTHYCPSVTVEIQGLIFPANLILLESKDLDVILGMDWLARHRGVIDCASRTIKLTNAKGEVVIFQSPVPQKPGISLNQAAGEEQEVAVEKTTKKLEDIPMVREYPEVFPDDLTTMPPKRDIEFRIDLVPGTAPIHKRPYRMGANELAEVKKQVDEQLQKGYIRPSTSPWGAPVIFVEKKDKTKRMCVDYRALNEVTIKNKYPLPRIDDLFDQLKGATVFSKIDLRSGYHQLRIREEDIPKTAFITRYGLFECTVMSFGLTNAPAFFMNLMNKVFMEFLDKFVVVFIDDILIYSKSEEEHEQHLRLVLEKLKEHQLYAKFSKCDFWLKEVQFLGHIVNAQGVAVDPANVESVTKWTPPRTVTQVRSFLGLAGYYRRFIENFSKIAKPMTQLLKKEEKFIWSAECNRSFEELKRRLVSAPVLILPDQTKDFQVYCDASRQGLGCVLMQDGKVVSYASRQLRPHEGNYPTHDLELAAVVHALKIWRHYLIGNRCEVYTDHKSLKYIFTQPDLNLRQRRWLELIKDYDMGIHYHPGKANVVADALSRKSYCNVAWVEELCCEVQHDLERLNLGIVEHGFVAALEAQPTLVEQVRIAQASDPEIAELKKNMRVGKARGFVEDEQGTIWMGERLCVPENKELKDLILTEAHQTQYSIHPGSTKMYQDLKEKFWWVSMRREIAEFVALCDVCQRVKAEHQRPAGLLQPLQIPEWKWEEIGMDFITGLPRTSSGHDSIWVVVDRLTKVAHFIPVHTTYSGKKLAELYLARIMCLHGVPKKIVSDRGSQFTSKFWQKLQEELGTRLNFSTAYHPQTDGQTERVNQILEDMLRACALDFGGAWDKSLPYAEFSYNNSYQASLQMAPFEALYGRRCHTPLFWDQTGERQLFGIEVLNEAEEKVRAVRERLRIAQSRQKSYADNRRRELVFQVGDYVYLRVTPLRGVHRFQTKGKLAPRFVGPYRILERRGEVAYQLELPSNMLGIHNVFHVSQLKKCLRVPEEQASPDQIEIQEDLTYVEKPTRILETSERKTRNKVIRFCKVQWSHHSEEEATWEREDELKATHPHLFASPSESRGRDSV

SEQ ID NO: 19586 - protein, 1829 aa, Oryza sativa
  Clone ID: TF_OSC401065j.C1.p27.gm
METRNGSRDSNNASGSEEPINGARANGASDNSPSPPPENPTIAQVLDNQTQMMTMMMQQMQRQYHQVLQQVQQQAQQQQQNPQFGPPPPQSKLLEFLRVKPPTFSSTTNPIEAHDWLHAIEKKLNLLQCNEQEKVAFATHQLQGPASIWWDNYMVTRPTGAEVTWTEFRHSFNKAQVPEGIVGQKKREFRSLQQGTKTVIEYLHEFNRLARYAPEDVRTDAEKQEKFMSGLDDELTNQLISRDYEDFEKLVDKAIRQEEQCNKMNRKRKAAQFRTPQGKCQKPRYTMGRHGGPSTMIIRQHRPYHPAQSVQPALPEQPKRLGEKPELCFNCNKPGHTVGKCPKPRRAGPKFVQARVNHASAEEAQSAPEVILGTFPVNSTPAVILFDSGATHSFISKRFAGAHGLSLVKLKIPMRVHTPGGGMTTTHYCPSVTVEIQGLIFPANLILLESKDLDVILGMDWLTRHRGVIDCASRTIKLTNAKGEVVIFQSPVPQKPGISLNQAAGEGQEVAVEKTTKKLEDIPIVREYPEVFPDDLTTMPPKRDIEFRIDLVPGTASIHKRPYRMGASELAEVKKQVDEQLQKGYIRPSTSPWGAPIIFVEKKDKTKRMCVDYRALNEVTIKNKYPLPRIDDLFDQLKGATVFSKIDLRSGYHQLRIREEDIPKTAFITRYGLFECTVMSFGLTNAPAFFMNLMNKVFMEFLDKFVVVFIDDILIYSKSEEEHEQHLRLVLEKLKEHQLYAKFSKCDFWLKEVQFLGHIVNAQGVAVDPANVESVTKWTPPRTVTQVRSFLGLAGYYRRFIENFSKIAKPMTQLLKKEEKFIWSAECNRSFEELKRRLVSAPVLILPDQTKDFQVYCDASRQGLGCVLMQDGKVVSYASRQLRPHEGNYPTHDLELAAVVHALKIWRHYLIGNRCEDYDMGIHYHPGKANVVADALSRKSYCNVAWVEQLCCEVQRDLEHLNLGIVEHGFVAALEAQPTLVEQMAPFEALYGRRCRTPLFWDQTGERQLFGTEVLNEAEEKVRAVRERLRIAQSRQKSYADNRRRELAFETGDYVYLRVTPLRGVHHFQTKGKLAPRFVGPYRILERRGEVAYQLELPSNMLGIHNVFHVSQLKKCLRVPEEQASPDHIEIQEDLTYVEKPTRILETSERRTRNKVIRFCKVQWSHHSEEEATWEREDELKATHPHLFASSSESRAPPLAAAFGREPPPLESPPRQTAAAVSFAAARAFPAAASRRRNPTGAPLPSRAGCRRRPSVPPRRRSSPLVSSHAGRRHRLGEESPFLLPFLSPVSAAALRACAVVFGCRRRLRAGRRRLPAPPVTAGGTGGEGGRDGVGSAGVSGCPAAGFTAAQEGTAHCLLRGGELEIFLVGAVLSKLVSSLPSRIACGVESPAAEVKLPGQTSKSANVTIGNTGNGSGYGNLPTVARRSTVLIGNGSHASVHGVGTVDLKFNSGKIVQLKNGQHVPSIDMNLVSGSRLTRDGFKLVFESNKVVVSKHGYFIGKGYECGGLFHFSLSDFCNNEAPRRSKRQRTAKSFGDDFTVYLMDDTPKSISEAYASPDADYWKEAVRSEMDSIITNGTWEVTERPCGCKPVGCKWVFKKKLRPDASHGLLVHQMDVKTAFLNGELDEEIYMDQPNGFVVEGFAVNEADKCVYYRHGGGEGVILCLYVDDVLIFGTNLEVINESHYVEKILNRFGYIDSKPSPTPYDPSLLLRKNKRIARNQLEYSQIIGSLMYLASATRLDISFAGLPPTLYRASLVDYSIPLAGMHRRSGEQVSGTSAFDVLHREKAAIRFLGSASLDCSLFVRDGSASSPLACFAPSSTLATASSS

SEQ ID NO: 19587 - protein, 1524 aa, Oryza sativa
  Clone ID: TF_OSC401242j.C1.p1.fg
METRNGSRDSNNASGSEEPINGARANGASDNSPSPPPENPTIAQVLDNQTQMMTMMMQQMQQQYHQVLQQVQQQAQLQQQNLQFGSPPPQSKLLEFLRVKPPTFSSTTNPIEAHDWLHAIEKKLNLLQCNEQEKVAFATHQLQGPASIWWDNYMVTRPTGAEVTWTEFRHSFNKAQVPEGIVGQKKREFRSLQQGTRTVIEYLHEFNRLARYAPEDVRTDAERQEKFLSGLDDELTNQLISRDYEDFEKLVDKAIRQEEHCNKINRKRKAAQFRTPQGKSQKPRFTMGHHGGPSTMIIRQHRPYHPGNFNKNHHSDSHNNSEQHSLNPTPSSLKIPAQSVQPALPEQPKRWGEKPELCFNCNKPGHTVGKCPKPRRAGPKFVQARVNHASAEEAQSAPEVILGTFPVNSTPAVILFDSGATHSFISKRFAGAHGLSLVKLKIPMRVHTPGGGMTTTHYCPSVTVEIQGLIFPANLILLESKDLDVILGMDWLARHRGVIDCASRTIKLTNAKGEVVIFQSPVPQKPGISLNQAAGEEQEVAVEKTTKKLEDIPIVREYPEVFPDDLTTMPPKRDIEFRIDLVPGTAPIHKRPYRMGANELAEVKKQVDEQLQKGYIRPSTSPWGAPVIFVEKKDKTKRMCVDYRALNEVTIKNKYPLPRIDDLFDQLKGATVFSKIDLRSGYHQLRIREEDIPKTAFITRYGLFECTVMSFGLTNAPAFFMNLMNKVFMEFLDKFVVVFIDDILIYSKSEEEHEQHLRLVLEKLKEHQLYAKFSKCDFWLKEVQFLGHIVNAQGVAVDPANVESVTKWTPPRTVTQVRSFLGLAGYYRRFIENFSKIAKPMTQLLKKEEKFIWSAECNRSFEELKRRLVSAPVLILPDQTKDFQVYCDASRQGLGCVLMQDGKVVSYASRQLRPHEGNYPTHDLELAAVVHALKIWRHYLIGNRCEVYTDHKSLKYIFTQPDLNLRQRRWLELIKDYDMGIHYHPGKANVVADALSRKSYCNVAWVEELCCEVQHDLEHLNLGIVEHGFVAALEAQPTLVEQVRIAQASDPEIAELKKNMRVGKARGFVEDEQGTIWMGERLCVPENKELKDLILTEAHQTQYSIHPGSTKMYQDLKEKFWWVSMRREIAEFVALCDVCQRVKAEHQRPAGLLQPLQIPEWKWEEIGMDFITGLPRTSSGHDSIWVVVDRLTKVAHFIPVHTTYSGKKLAELYLARIMCLHGVPKKIVSDRGSQFTSKFWQKLQEELGTRLNFSTAYHPQTDGQTERVNQILEDMLRACALDFGGAWDKSLPYAEFSYNNSYQASLQMAPFEALYGRRCRTPLFWDQTGERQLFGTEVLNEAEEKVRAVRERLRIAQSRQKSYADNRRRELAFETGDYVYLRVTPLSGVHRFQTKGKLAPRFVGPYRILERRGEVAYQLELPSNMLGIHNVFHVSQLKKCLRVPEEQASPDQIEIQEDLTYVEKPTRILETSERKTRNKVIRFCKVQWSHHSEEEATWEREDELKATHPHLFASSSESRGRDSV

SEQ ID NO: 19588 - protein, 1229 aa, Oryza sativa
  Clone ID: TF_OSC401246j.C1.p16.fg
MIIRQHRPYHPGNFNKNHHSDSHNNSEQHSLNPTPSSLKIPAQSVQPALPEQPKRLGEKPELCFNCNKPGHTVGKCPKPRRAGPKFVQARVNHASAEEAQSAPEVILGTFPVNSTPAVILFDSGATHSFISKRFAGAHGLSLVKLKIPMRVHTPGGGMTTTHYCPSVTVEIQGLIFPANLILLESKDLDVILGMDWLARHRGVIDCASRTIKLTNAKGEVVIFQSPVPQKPGISLNQAAGEEQEVAVEKTTKKLEDIPIVREYPEVFPDDLTTMPPKRDIEFRIDLVPGTAPIHKRPYRMGANELAEVKKQVDEQLQKGYIRPSTSPWGAPVIFVEKKDKTKRMCVDYRALNEVTIKNKYPLPRIDDLFDQLKGATVFSKIDLRSGYHQLRIREEDIPKTAFITRYGLFECTVMSFGLTNAPAFFMNLMNKVFMEFLDKFVVVFIDDILIYSKSEEEHEQHLRLVLEKLKEHQLYAKFSKCDFWLKEVQFLGHIVNAQGVAVDPANVESVTKWTPPRTVTQVRSFLGLAGYYRRFIENFSKIAKPMTQLLKKEEKFIWSAECNRSFEELKRRLVSAPVLILPDQTKDFQVYCDASRQGLGCVLMQDGKVVSYASRQLRPHEGNYPTHDLELAAVVHALKIWRHYLIGNRCEVYTDHKSLKYIFTQPDLNLRQRRWLELIKDYDMGIHYHPGKANVVADALSRKSYCNVAWVEELCCEVQHDLEHLNLGIVEHGFVAALEAQPTLVEQVRIAQASDPEIAELKKNMRVGKARGFVEDEQGTIWMGERLCVPENKELKDLILTEAHQTQYSIHPGSTKMYQDLKEKFWWVSMRREIAEFVALCDVCQRVKAEHQRPAGLLQPLQIPEWKWEEIGMDFITGLPRTSSGHDSIWVVVDRLTKVAHFIPVHTTYSGKKLAELYLARIMCLHGVPKKIVSDRGSQFTSKFWQKLQEELGTRLNFSTAYHPQTDGQTERVNQILEDMLRACALDFGGAWDKSLPYAEFSYNNSYQASLQMAPFEALYGRRCRTPLFWDQTGERQLFGTEVLNEAEEKVRAVRERLRIAQSRQKSYADNRRRELAFETGDYVYLRVTPLRGVHRFQTKGKLAPRFVGPYRVLERRGEVAYQLELPSNMLGIHNVFHVSQLKKCLRVPEEQASPDQIEIQEDLTYVEKPTRILETSERKTRNKVIRFCKVQWSHHSEEEATWEREDELKATHPHLFASSSESRGRDSV

SEQ ID NO: 19589 - protein, 1827 aa, Oryza sativa
  unsure (1)..(1827): unsure at all Xaa locations
  Clone ID: TF_OSC401339j.C1.p12.np
MSWHRAGVLLLGAQSCLPVPEVPAVGRVGSVLLSMARMGWKLCHVFRSYAVVMADTLNRRGLDLTGFVLELRGLCVVLGYPHGVDYQCKKLPEQDGDDAEPRAAWEVTAVILTGSPERTSLAITTDGDSFPAACQNAALLAIGTLHQRYPDELXHSPYRYHPRRGGARDYATFRDASSEDDATIMYLARMVEEYDAARIDFHHMVRRGLVENNMKILELRQENLQLKKDLDAVEAQLCQLKIAQGEVCRPKRRRVCRSLKITAHKSTSRPELVRQSLAWTCFVETPRAEPAPLVPQEEEASGVGSTEDLSLFASSVWDFQMVTTRRSAATGDWXGSHPEGSNHNNHGSPPPPPPQPPPPPQDTNPILTQILAQQANMMVAFLHHIQNPPQHNAPPPPPPPQHSKLAEFLRIRPPTFSSSHNPVDALDWLHAVGKNLDTVQCNDEEKVIFAAHQLQGPASLWWDHFQATQPEGQPIIWARFAAAFRRTHVPAGVMALKKREFRELKQGNCSVMEYLHEFNNLARYAPEDVREDEEKQEKSLAGMDPELSMRLVSGDYPDFQRLVDKSIRLEAKHKELESHKRRLANFRNQQGANQRIRYTNPYPGGSSSQQQQQPRSAPRPQFVVRVLQPQQQQNQQGTRAPHPPAPAVQPGQGRRDAQGQQRLCFNCFEHGHFADKCPKPRRQQGQAPPRPNNGGKDVTRGRVNHVTAEDMLTTPDVIVGTFLIHSIPATILFDSGASHSFISVPFVGRNQLGVERLRNPLLITTPGGVMTAKYYSPAVPIEIQGIPFPSDLILLDTKNLDVILGMNWLAQFQGVVDCARRTVTLYRGPDQPVVFFAPPTSAGSSVLHQLGLPEIPIVSEFGDVFPEELPGMPPKREIEFRIDLAPGTTPLYKRPYHMAANELAEVKRQLEELKEKGYIRPSTSPWGAPVIFVEKKDKTKRMCVDYRALNEVTIKNKYPLPRIDDLFDQLKGATVFSKIDLRSGYHQLRIREEDIPKTAFTTRYGLYEFMVMSFGLTNAPAFFMNLMNKVFMEYLDKFVVVFIDDILVYSQSEADHQQHLRLVLGKLREHQLYAKLSKCEFXLSEVKFLGHVISAKGVAVDPETVTAVTDWKQPKTVTQVRSFLGLAGYYQRFIENFSKIARPMTQLLKKEEKFVWSPQCEKAFQTLKEKLVSSPVLILPDTRKEFLVYCDASRQGLGCVLMQEGHVVAYASRQLRPHEGNYPTHDLELAAVVHALKIWRHYLIGNRCEIYTDHKSLKYIFTQSDLNLRQRRWLELIKDYDVGIHYHPCKANVVADALSRKSRCNTLGVRGIPPELNQXLEALNLSIVSHGFLATLEAKPTLLDQIREAQKNDPDMHGILKNMKQGKAVGFIEDEHGTLWNGNRVCVPNDKELKQLILQEAHESPYSIHPGSTKMYLDLKEKYWWVSMKREIAEFVALCDVCQRVKAKHQRPAGLLQPLQVPEWKWDEIGMDFITGVPKSQDGYDSIWVVVDRLTKVARFIPVKTTYGGNKLTEVYFARIVSLHGVPKKIVSDRGSQFTSHFWKKLQEELGTRLNFSTAYHPQTDGQTERLNQILEDMLRACVLDFGKTWDKSLPYAEFSYNNSYQSSIQMAPYEALYGRKCRTPLLWDQVGESQVFGTDILREVEAKVRTIRDNLKVAQSRQKSYADNRRRNLEFAVDDFVYLRVTPLRGVHRFQTKGNLAPRFVGPFRIIARRGEVAYQLELPASLGNVHDVFHVSQLKKCLRVPSEQADSEQIEVREDLTYVEKPVKVLDTMERRTRNRVIRFCKVQWSNHAEEEATWEREDKLKAAYPDLFASSSESQGRDSV

SEQ ID NO: 19590 - protein, 1525 aa, Oryza sativa
  Clone ID: TF_OSC401513j.C1.p9.fg
METRNGSRDSNNASGSEEPINGARANGASDNSPSPPPENPTIAQVLDNQTQMMTMMMQQMQQQYHQVLQQVQQQAQLQQQNLQFGSPPPQSKLLEFLRVKPPTFSSTTNPIEAHDWLHAIEKKLNLLQCNEQEKVAFATHQLQGPASIWWDNYMVTRPTGAEVTWTEFRHSFNKAQVPEGIVAQKKREFRSLQQGTRTVIEYLHEFNRLARYAPEDVRTDAERQEKFLSGLDDELTNQLISRDYEDFEKLVDKAIRQEEQCNKMNRKRKAAQFRTPQGKCQKPRFTMGHQGGPSTMIIRQHRPYHPGNFNKNNNSGSHSSLNPTPSPLMIPAQSDQSDQLAQPALPEQPKRLGEKPELCFNCNKPGHTVGKCPKPRRAGPKFVQARVNHASAEEAQSAPEVILGTFPVNSTPAVILFDSGATHSFISKRFAGAHGLSLVKLKIPMRVHTPGGGMTTTHYCPSVTVEIQGLIFPANLILLESKDLDVILGMDWLTRHRGVIDCASRTIKLTNAKGEVVTFQSQVPQKPGISLNQAAGEEQEVAVEKTTKKLEDIPIVREYPEVFPDDLTTMPPKRDIEFRIDLVPGTAPIHKRPYRMGANELAEVKKQVDEQLQKGYIRPSTSPWGAPVIFVEKKDKTKRMCVDYRALNEVTIKNKYPLPRIDDLFDQLKGATVFSKIDLRSGYHQLRIREEDIPKTAFITRYGLFECTVMSFGLTNAPAFFMNLMNKVFMEFLDKFVVVFIDDILIYSKSEEEHEQHLRLVLEKLKEHQLYAKFSKCDFWLKEVQFLGHIVNAQGVAVDPANVESVTKWTPQRTVTQVRSFLGLAGYYRRFIENFSKIAKPMTQLLKKEEKFIWSAECNRSFEELKRRLVSAPVLILPDQTKDFQVYCDASRQGLGCVLMQDGKVVSYASRQLRPHEGNYPTHDLELAAVVHALKIWRHYLIGNRCEVYTDHKSLKYIFTQPDLNLRQRRWLELIKDYDMGIHYHPGKANVVADALSRKSYCNVAWVEQLCCEVQRDLEHLNLGIVEHGFVAALEAQPTLVEQVRIAQASDPEIAELKKNMRVGKARGFVEDEQGTIWMGERLCVPENKELKDLILTEAHQTQYSIHPGSTKMYQDLKEKFWWVSMRREIAEFVALCDVCQRVKAEHQRPAGLLQPLQIPEWKWEEIGMDFITGLPRTSSGHDSIWVVVDRLTKVAHFIPVHTTYSGKKLAELYLARIMCLHGVPKKIVSDRGSQFTSKFWQKLQEELGTRLNFSTAYHPQTDGQTERVNQILDDMLRACALDFGGAWDKSLPYAEFSYNNSYQASLQMAPFEALYGRRCRTPLFWDQTGERQLFGTEVLNEAEEKVRAVRERLRIAQSRQKSYADNRRRELAFETGDYVYLRVTPLRGVHRFQTKGKLAPRFVGPYRILERRGEVAYQLELPSNMLGIHNVFHVSQLKKCLRVPEERASPDQIEIQEDLTYVEKPTRILETSERKTRNKVIRFCKVQWSHHSEEEATWEREDELKATHPHLFASSSESRGRDSV

SEQ ID NO: 19591 - protein, 1553 aa, Oryza sativa
  Clone ID: TF_OSC401564j.C1.p13.fg
MAVKDRFTGNPGRLTVLTTSGSGCFTAFNYCFEMPALCKRTPSFLWLYPASYLLFRFVACGLVSGRYHVSVMGTRNGSRNSNNASGSEEPINGARANGASDNSPSPPPENPTIAQVLDNQTQMMTMMMQQMQQQYNQVLQQVQQQAQQQQQNLQFGPPPPQSKLLEFLRVKPPTFSSTTNPIEAHDWLHAIEKKLNLLQCNEQEKVPEGIVAQKKREFRSLQQGTRTVIEYLHEFNRLARYAPEDVRTDDRRQEKFLSGLDDELTNQLISRDYEDFEKLVNKAIRQEEHCNKINRKRKAAQFRTPQGKSQKPRFTMGHHGGPSTMIIRQHRPYHPGSFNKNHHSGSHNNSEQHSLNPTPSSLKIPAQSVQPALPEQPKRLGEKPELCFNCNKPGHTVGKCPKPRRAGPKFVQARVNHASAEEAQSAPEVILGTFPVNSTPAVILFDSGATHSFISKCFAGAHGLSLVKLKIPMRVHTPGGGMTTTHYCPSVTVEIQGLIFPAHLILLESKDLDVILGMDWLTRHRGVIDCASRTIKLTNAKGEVVTFQSPVPQKPGISLNQAAGEEQEVAVEKTTKKLEDIPIVREYPEVFPDDLTTMPPKRDIEFRIDLVPGTAPIHKRPYRMGANELAEVKKQVDEQLQKGYIRPSTSPWGAPVIFVEKKDKTKRMCVDYRALNEVTIKNKYPLPRIDDLFDQLKGATVFSKIDLRSGYHQLRIREEDIPKTAFITRYGLFECTVMSFGLTNAPAFFMNLMNKVFMEFLDKFVVVFIDDILIYSKSEEEHEQHLRLVLEKLKEHQLYAKFSKCDFWLKEVQFLGHIVNAQGVAVDPANVESVTKWTPPRTVTQVRSFLGLAGYYRRFIENFSKIAKPMTQLLKKEEKFIWSAECNRSFEELKRRLVSAPVLILPDQTKDFQVYCDASRQGLGCVLMQDGKVVSYASRQLRPHEGNYPTHDLELAAVVHALKIWRHYLIGNHCEVYTDHKSLKYIFTQPDLNLRQRRWLELIKDYDMGIHYHPGKANVVADASSRKSYCNVAWVEQLCCEVQRNLEHLNLGIVEHGFVVALEAQPTLVEQVRIAQASDPEIAELKKNMRVGKARGFVEDEQGTIWMGERLCVPENKELKDLILTEAHQTQYSIHPGSTKMYQDLKEKFWWISMRREIAEFVALCDVCQRVKAEHQRPAGLLQPLQILEWKWEEIGMDFITGLPRTSLGHDSIWVVVDRLTKVAHFIPVHTTYSGKKLAELYLARIMCLHGVPKKIVSDRGSQFTSKFWQKLQEELGTRLNFSTAYHPQTDGQTERVNQILEDMLRACALDFGGAWDKSLPYAEFSYNNSYQASLQMAPFEALYGRRCRTPLFWDQTGERQLFGTEVLNEAEEKVRAVRERLRIAQSRQKSYADNRRRELAFETRDYVYLRVTPLRGVHRFQTKGKLAPRFVGPYRILERRGEVAYQLELPSNMLGIHNVFHVSQLKKCLRVPEEQASPDHIEIQEDLTYVEKPTRILETSERKTRNKVIRFCKVQWSHHSEEEATWEREDELKATHPHLFASSSESRGRDSV

SEQ ID NO: 19592 - protein, 2039 aa, Oryza sativa
  Clone ID: TF_OSC401577j.C1.p9.gm
METRNGSRDSNNASGSEEPINGARANSASDNSPSPPPENPTIAQVLDNQTQMMTMMMQQMQQQYHQVLQQVQQQAQQQQQNLQFGPPPPQSKLLEFLRVKPPTFSSTTNPIEAHDWLHAIEKKLNLLQCNEQEKVPEGIVAQKKREFRSLQQGTRTVIEYLHEFNRLARYAPEDVRTDDGRQEKFLSGLDDELTNQLISKDYEDFEKLVDKAIRQEEHCNKINRKRKAAQFRTPQGKSQKPRFTMGRHGGPSTMIIRQHRPYHPGSFNENHHSGSHNNSEQHSLNPTPSSLKIPAQSVQLALPEQPKRLGEKPELCFNCNKPGHTVGKCPKPRCAGPKFVQACVNHASAEEAQSAPEVILGTFPVNSTPAVILFDSGATHSFISKRFAGAHGLSLVKLKIPMRVHTPGGGMTTTHYCPSVTVEIQGLIFPTNLILLESKDLDVILGMDWLTRHRGVIDCASRTIKLTNAKGEVVTFQSPVPQKPGISLNQAAGEEQEVAVEKTTKKLEDIPIVREYPEVFPDDLTTMPPKRDTEFRIDLVPGTAPIHKRPYRMGANELAEVKKQVDEQLQKGYIRPSTSPWGAPVIFVEKKDKTKRMCVDYRALNEVTIKNKYPLPRIDDLFDQLKGATVFSKIDLRSGYHQLRIREEDIPKTTFITRYGLFECTVMSFGLTNAPVFFMNLMNKVFMEFLDKFVVVFIDDILIYSKSEEEHEQHLWLVLEKLKEHQLYAKFSKCDFWLKEVQFLGHIVNAQGVAVDPANMESVTKWTPPRTVTQVRSFLGLAGYYRRFIENFSKIAKPMTAIEEGRKVYLDGKVVSYASRQLRPHEGNYPTHDLELAAVVHALKIWRHYLIGNRCEVYTYHKSLKYIFTQPDLNLRQRRWLELIKDYDMRIHYHPGKANVVADALSRKSYCNVAWVEQLCCEVQRDLEHLNLGIVEHGFVVALEAQPTLVEQVRIAQASNPEIAELKKNMRVGKARGFVEDEQGTIWMGERLCVPENKELKDLILTEAHQTQYSIHPGSTKMYQDLKEKFWWVSMRREIAEFVALCDVCQRVKAEHQRPAEVLNEAEEKVRAIRERLRIAQSRQKSYADNRRRELAFETGDYVILERRGEVAYQLELPSNMLGIHNVFHVSQLKKCLRVPEEQASPDHIEIQEDLTQPVVNCDVYAICGPFTICNDNKDPFCDCMKGYSIRSPKDWELDDRTGGCMRNTPLSCGAGKDRTGLTDKFYPVQSIRLPHNAENLQAPTSREECSQQLSDASPNGDEGVLYIRLAAKELQNSQRKMSGKIIGVAIDFGMAKMLGREFSRAMTTMRGTIGYIAPEWISGTVVTSKVDVYSYGMVLFEIISGRRNRSHEHFMDGDYSFYFPMQVARKLLKGEIGCLVDANLEGDVNLMEVERACKIACWCIQDHEFDRPTMAEVVQSLEDRDKPIDDPTAVELTISRMNVRVIHRAEWGGLRDRLANHNTGHVFLLHHSSPVFIFCFPMLLPCHVLLGLLLLSLHTPASSAAATDTVSPGHSLAGSDRLVSNNSKFALGFFKPGNESSYTNHNSYLGIWFNKVSKLTPLWTANGENPVVDPTSPELAISGDGNLAILDHATKSIIWSTRANITTNDTIAVLLNNGNLVLRSSSNSSNIFWQSFDYPTDTLFAGAKIGWDKVTGMNRRLVSRKSSVDQAPGIFSLELGLNGEGHLLWNSTVAYWSSGDWNGRYFGLAPEMIGDVMPNFTFVHNDKEAYFTYTLYDDTAIVHAGLDVFGIGFVGMWLEGNQEWFKNYRQPVVHCDVYAVCGPFTICDDNKDLFCDCMKGFSVRSPKDWELDDQTGGCIRNTPLSCGSSKDRTSLTDKFYPMQNFGMAKILGREFSRAMTTMRGTIGYMAPEWISGTVVTSKVDVYSYGMVLFEIISGRRNSSHECFRDGDYSFFFPMQVARKLLNGDIGSLVDASLKGDMNLVEVERACKIACWCIQDNEFDRPTMAEVVQALEGLLELDMPPLPRLLSAITGDSHSVTPQYFDSVPIVFITVAEEAHHSPPNLRTTGQCRDRSSDT

SEQ ID NO: 19593 - protein, 1514 aa, Oryza sativa
  Clone ID: TF_OSC401766j.C1.p14.fg
MEIRNGSRDSNNASGSEELINGACANSASDNSPSPPPENPTIAQVLDNQTQMMTVMMQQMQQQYHQVLQQVQQQAQQQQQNLQFGPPPPQSKLLEFLRVKPPTFSSTTNPIEAHDWLHAIEKKLNLLQCNEQEKVAFATHQLQGPASVWWDNYMVTRPTGAEVTWTEFCHSFNKAQVPEGIVAQKKREFRSLQQGTRTVIEYLHEFNRLARYAPEDVRTDDGRREKFLSGLDDELTNQLISRDYEDFEKLVDKAIRQEEHCNKINRKRKTAQFRTPQGKSQKPRFTMGHHGGPSTMIIRQHRPYHPGSFNKNHHSGSHNNSEQHSLNPTPSSLKIPAQSVQPALPEQPKRLGEKPELCFNCNKPGHTVGKCPKPRRAGPKFVQARVTHASAEEAQSAPEVILGTFPVNSTPAVILFDSGATHSFISKRFAGAHGLSLVKLKIPMRVHTPGGGMTTTHYCPSVTVEIQGLIFPANLILLESKDLDVILGMDWLTRHRGVIDCASRTIKLTNAKGEVVTFQSLVPQKPGISLNQAAGEEQEVAVEKTTKKLEDIPIVREYPKVFPDDLTTMPPKRDIEFRIDLVPGTAPIHKRPYRMGANELAEVKKQVDEQLQKGYIHPSTSPWGAPVIFVEKKDKTKRMCVDYRAFNEVTIKNKYPLPRIDDLFDQLKGATVFSKIDLRSGYHQLRIHEEDIPKTAFITRYGLFECTVMSFGLTNTPAFFMNLMNKVFMKFLDKFVVVFIDDILIYSKSEEEHEQHLRLVLEKLKEHQLYAKFSKCDFWLKEVQFLGHIVNAQGVAMDPANVESVTKWTPPRTVTQVRSFLGLAGYYRRFIENFSKIAKPMTQLLKKEEKFIWSAKCNRSFEELKRRLVSAPVLILPDQTKDFQVYCDASRQGLGCVLMQDGKVVSYASRQLRPHEGNYPTHDLELAAVVHALKIWRHYLIGNRCEVYTDHKSLKYIFTQPDLNLRQRRWLELIKDYDMGIHYHPGKANVVADALSRKSYCNVAWVEQLCCEVQRDLEHLNLGIVEHGFVVALEAQPTLVEQVRIAQASDPEVAELKKNMRVGKARGFVEDEQGTIWMGERLCVPENKELKDLILTEAHQTQYSILSGSTKMYQDLKEKFWWVSMRREIAEFVALCDVCQRVKAEHQRPAGLLQPLQIPEWKWEEIGMDFITGLPRTSSGHDSIWVVVDRLTKVAHFIPVHTTYSGKKLAELYLARIMCLHGVPKKIVSDRGSQFTSKFWQKLQEELGTRLNFSTAYHPQTDGQTERVNQILEDMLRACALDFGGAWDKSLPYAEFSYNNSYQASLQMAPFEALYGRRCRTPLFWDQTGERQLFGTEVLNEAEEKVRAVRERLRIAQSRQKSYADNRRRELAFETGDYVYLRVTPLRGVHRFQTKGKLAPRFVGPYRILERRGEVAYQLELPSNMLGIHNVFHVSQLKKCLRVPEEQASPDHIEIQEDLTYVEKPTRILETSERRTRNKVIRFCKVQWSHHSEEEATHPHLFASSSESRGRDSV

SEQ ID NO: 19594 - protein, 1238 aa, Oryza sativa
  Clone ID: TF_OSC401774j.C1.p5.fg
MGRHGGPSTMIIRQHRPYHPGSFNKNHHSGSHNNSEQHSLNPTPSSLKIPAQSVQPALPEQPKRLGEKPELCFNCNKPGHTVGKCPKPRCAGPKFVQARVNHASAEEAQSAPEVILGTFPVNSTPAVILFDSGATHSFISKRFAGAHGLSLVKLKIPMRVHTPGGGMTTTHYCPSVTVEIQGLIFPANLILLESKDLDVILGMDWLTRHRGVIDCASRTIKLTNAKGEVVTFQSPVPQKPGISLNQAAGEEQEVAVEKTTKKLEDIPIVREYPKVFPDDLTTMPPKRDIEFRIDLVPGTAPIHKRPYRMGANELAEVKKQVDEQLQKGYIRLSTSPWGAPVIFVEKKDKTKRMCVDYRTLNEVTIKNEYPLPRIDDLFDQLKGATVFSKIDLQSGYHQLRIREEDIPKTAFITRYGLFECTVMSFGLTNAPDFFMNLMNKVFMEFLDKFVVVFIDDILIYSKSEEEHEQHLRLVLEKLKEHQLYAKFSKCDFWLKEVQFLGHIVNAQGVAVDPANVESVTKWTPPRTVTQVRSFLGLAGYYRRFIQNFSKIAKPMTQLLKKEEKFIWSAECNRSFEELKRWLVSAPVLILPDQTKDFQVYCDASRQGLGCVLMQDGKVVSYASRQLRSHEGNYPTHDLELAAVVHALKIWRHYLIGNRCEVYTDHKSLKYIFTQPDLNLRQQRWLELIKDYDMGIHYHPGKANVVADALSRKSYCNVAWVEQLCCEVQRDLEHLNLGIVEHGFVVALEAQPTLVEQVRIAQASDPEIAELKKNMRVGKARGFVEDEQGTIWMGERLCVPENKELKDLILTEAHQTQYSIHPGSTKMYQDLKEKFWWVSMRREIAEFVALCNVYQRVKAEHQRPAGLLQPLQIPEWKWEEIGMDFITGLPRTSSGHDSIWVVVDRLTKVAHFIPVHTTYSGKKLAELYLARIMCLHGVPKKIVSDRGSQFTSKFWQKLQEELGTRLNFSTTYHPQTDGQTERVNQILEDMLRACALDFGGAWDKSLPYAEFSYNNSYQASLQMAPFEALYGRRCPTPLFWDQTGERQLFGTEVLNEAEEKVRAVRERLRIAQSRQKSYADNRRRELAFETGDYVYLRVTPLRGVHRFQTKGKLAPRFVGPYRILERRGEVAYQLELPSNMLGIHNVFHVSQLKKCLRGPEEQASPDHIKIQEDLTYLEKPTRILETSERRTRNKVIRFCKVQWSHHSEEEATWEREDELKATHPHLFASTSESRGRDSV

SEQ ID NO: 19595 - protein, 747 aa, Oryza sativa
  Clone ID: TF_OSC401854j.C1.p6.fg
MEIRNGSRDSNNASGSEEPINGARANGASDNSPSPPPENPTIAQVLDNQTQIMTMMMQQMQQQYHQVMQQVQQQAQLQQQNLQFGPPPPQSKLLEFLRVKPPTFSSTTNPIEAHDWLHAIEKKLNLLQCNEQEKVAFATHQLQGPASIWWDNYMVTRPAGAEVTWTEFRHSFNKAQVPEGIVGQKKREFRSLQQGTRTVIEYLHEFNRLARYAPEDVRTDAEKQEKFMSGLDDELTNQLISRDYEDFEKLVDKAIRQEEQCNKMNRKRKAAQFRTPQGKCQKPRYTMGRHGGPSTMIIRQHRPYHPGSFNKTHHSDSHNNSEQHSLNPTPSSLKIPAQSVQPALPEQPKRLGEKPELCFNCNKPGHTVGKCPKPRRAGPKFVQARVNHASAEEAQSAPEVILGTFPVNSTPAVILFDSGATHSFISKRFAGAHGLSLVKLKIPMRVHTPGGGMTTTHYCPSVTVEIQGLIFPANLILLESKDLDVILGMDWLARHRGVIDCASRTIKLTNAKGEVVIFQSPVPQKPGISLNQAAGEEQEVAVEKTTKKLEDIPIVREYPEVFPDDLTTMPPKRDIEFRIDLVTGTAPIHKRPYRMGASELAEVKKQVDEQLQKGYIRPSTSPWGAPVIFVEKKDKTKRMCVDYRALNEVTIKNKYPLPRIDDLFDQLKGATVFSKIDLRSGYHQLRIREEDIPKTAFTQPDHKSLKCLTSIVVSLGRTKSSANLGAVTGGEIIFGRSTKFDNSPGSI

SEQ ID NO: 19596 - protein, 1562 aa, Oryza sativa
  Clone ID: TF_OSC401858j.C1.p23.fg
MAVKDRFTGNPGRLTVLSTSGSGFDACGLVGGRYHVSVMETRNGSRDSNNASGSEKPINGARANSASDNSPSPPPENPTIAQVLDNQTQMMTMMMQQMQQQYHQVLQQVQQQAQLQQQNLQFGSPPPQSKLLEFLRVKPPTFSSTTNPIEAHDWLHAIEKKLNLLQCNEQEKVAFATHQLQGPASIWWDNYMVTRPAGAEVTWTEFRHSFNKAQVPEGIVAQKKREFRSLQQGTRTVIEYLHEFNLLARYAPEDVRTDAERQEKFLSGLDDELTNQLISRDYEDFEKLVDKAIRQEEHCNKINRKRKAAQFRTPQGKSQKPRFTMGRHGGPSTMIIRQHRPYHPGSFNKNHHNGSHNNSEQHSLNPTPSSLKIPAQSVQPALPEQPKRLGEKPELCFNCNKPGHTVGKCPKPRRAGPKFVQARVNHASAEEAQSAPEVILGTFPVNSTPAVILFDSGATHSFISKRFAGAHGLSLVKLKIPMRVHTPGGGMTTTHYCPSVTVEIQGLIFPANLILLESKDLDVILGMDWLTRHRGVIDCASRTIKLTNAKGEVVTFQSLVPRKPGISLNQAAGEEQEVAVEKTTKKLEDIPIVREYPEVFPDDLTTMPPKRDIEFRIDLVPGTAPIHKRPYRMGASELAEVKKQVDEQLQKGYIRPSTSPWGAPVIFVEKKDKTKRMCVDYRALNEVTIKNKYPLPRIDDLFDQLKGATVFSKIDLRSGYHQLRIREEDIPKTAFITRYGLFECTVMSFGLTNAPAFFMNLMNKVFMEFLDKFVVVFIDDILIYSKSEEEHEQHLRLVLEKLKEHQLYAKFSKCDFWLKEVQFLGHIVNAQGVAVDPANVESVTKWTPPRTVTQVRSFLGLAGYYRRFIENFSKIAKPMTQLLKKEEKFIWSAECNRSFEELKRRLVSAPVLILPDQTKDFQVYCDASRQGLGCVLMQDGKVVSYASRQLRPHEGNYPTHDLELAAVVHALKIWRHYLIGNRCEVYTDHKSLKYIFTQPDLNLRQRRWLELIKDYDMGIHYHPGKANVVADALSRKSYCNVAWVEQLCGEVQRDLEHLNLGIVEHGFVAALEAQPTLVEQVRIAQASDPEIAELKKNMRVGKARGFVEDEQGTIWMGERLCVPENKELKDLILTEAHQTQYSIHPGSTKMYQDLKEKFWWVSMRREIAEFVALCDVCQRVKAEHQRPAGLLQPLQIPEWKWEEIGMDFITGLPRTSSGHDSIWVVVDRLTKVAHFIPVHTTYSGKKLAELYLSRIMCLHGVPKKIVSDRGSQFTSKFWQKLQEELGTRLNFSTAYHPQTDGQTERVNQILEDMLRACALDFGGAWDKSLPYAEFSYNNSYQASLQMAPFEALYGRRCRTPLFWDQTGERQLFGTEVLNEAEEKVRAVRERLRIAQSRQKSYADNRRRELVFQVGDYVYLRVTPLRGVHRFQTKGKLAPRFVGPYRILERRGEVAYQLELPSNMLGIHNVFHVSQLKKCLRVPEEQASPDQIEIQEDLTYVEKPTRILETSERKTRNKVIRFCKVQWSHHSEEEATWEREDELKATHPHLFASSSESRGRDSV

SEQ ID NO: 19597 - protein, 1413 aa, Oryza sativa
  Clone ID: TF_OSC403689j.C1.p1.fg
MEIRNGSRDSNNASGSEEPINGARANGASDNSPSPPPENPTIAQVLDNQTQMMTMMMQQMQQQYHQVMQQVQQQAQLQQQNLQFGPPPPQSKLLEFLRVKPPTFSSTTNPIEAHDWLHAIEKKLNLLQCNEQEKVAFATHQLQGPASIWFPRELWHKRREFRSLQQGTRTVIEYLHEFNRLARYAPEDVRTDAERQEKFLSGLDDELTNQLISRDYEDFEKLVDKAIRQEEHGNKINRKRKAAQFRTPQGKSQKPRFTMGRHGGPSTMIIRQHCPYHPGSFNKNHHSGSHNNSEQHSLNPTPSSLKIPAQSVQPALPEQPKRLGEKPELCFNCNKPGHTVGKCPKPRRAGPKFVQARVNHASAEEAQSAPEVILGTFPVNSTPAVILFDSGATHSFISKRFAGAHGLSLVKLKIPMRVHTPGGGMTTTHYCPSVTVEIQGLIFPANLILLESKDLDVILGMDWLARHRGVIDCASRTIKLTNAKGEVVTSQSLVPRKPGISLNQAAGEEQEVAVEKITKKLEDIPIVREYPEVFPDDLTTMPPKRDIEFRIDLVPGTAPIHKRPYRMGANELAEVKKQVDEQLQKGYIRPSTSPWGAPVIFVEKKDKTKRMCIDYRALNEVTIKNKYPLPRIDDLFDQLKGATVFSKIDLRSGYHQLRIREEDIPKTAFITRYGLFECTVMSFGLTNAPAFFMNLMNKVFMEFLDKFVVVFIDDILIYSKSEEEHEQHLRLVLEKLKEHQLYAKFSKCDFWLKEVQFLGHIVNAQGVAVDPANVESVTKWTPPRTVTQVRSFLGLAGYYRRFIENFSKIAKPMTQLLKKEEKFIWSAECNRSFEELKRRLVSAPVLILPDQTKDFQRRWLELIKDYDMGIHYHPGKANVVADALSRKSYCNVAWVEELCCEVQRDLEHLNLGIVERGFVAALEAQPTLMEQVRIAQASDPEIAELKKNMRVGKARGFVEDEQGTIWMGERLCVPENKELKDLILTEAHQTQYSIHPGSTRMYQDLKEKFWWVSMRREIAEFVALCDVCQRVKAEHQRPAGLLQPLQIPEWKWEEIGMDFITGLPRTSSGHDSIWVVVDRLTKVAYFIPVHTTYSGKKLAELYLARIMCLHGVPKKIVSDRGSQFTSKFWQKLQEELGTRLNFSTAYHPQTDGQTERVNQILEDMLRACALDFGGAWDKSLPYAEFSYNNSYQASLQMAPFEALYGRRCRTPLFWDQTGERQLFGTEVLNEAEEKVRAVRERLRIAQSRQKSYADNRRRELAFETGDYVYLRVTPLRGVHRFQTKGKLAPRFVGPYRILERRGEVAYQLELPSNMLGIHNVFHVSQLKKCLRVPEEQASPDHIEIQEDLTYVEKPTRILETSERRTRNKVIRFCKVQCSHHSEEEATWEREDELKATHPHLFASSSESRGRDSV

SEQ ID NO: 19598 - protein, 1524 aa, Oryza sativa
  Clone ID: TF_OSC404799j.C1.p1.fg
MEIRNGSRDSNNASGSEEPTNGARANGASDNSPSPPPENPTIAQVLDNQTQMMTMMMQQMQQQYHQVLQQVQQQAQLQQQNLQFGSPPPQSKLLEFLRVKPPTFSSTTNPIEAHDWLHAIEKKLNLLQCNEQEKVAFATHQLQGPASIWWDNYMVTRPAGAEFTWTEFRHSFNKAQVPEGIVAQKKREFRSLQQGTRTVIEYLHEFNLLARYAPEDVRTDAEKQEKFLSGLDDELTNQLISRDYEDFEKLVDKAIRQEEHCNKINRKRKAAQFRTPQGKSQKPRFTMGHHGGPSTMIIRQHRPYHPGNFNKNHHSDSHNNSEQHSLNPTPSSLKIPAQSVQPALPEQPKRLGEKPELCFNCNKPGHTVGKCPKPRRAGPKFVQARVNHASAEEAQSAPEVILGTFPVNSTPAVILFDSGATHSFISKRFAGAHGLSLVKLKIPMRVHTPGGGMTTTHYCPSVTVEIQGLIFPANLILLESKDLDVILGMDWLARHRGVIDCASRTIKLTNAKGEVVIFQSPVPQKPGISLNQAAGEEQEVAVEKTTKKLEDIPIVREYPEVFPDDLTTMPPKRDIEFRIDLVPGTAPIHKRPYRMGANELAEVKKQVDEQLQKGYIRPSTSPWGAPVIFVEKKDKTKRMCVDYRALNEVTIKNKYPLPRIDDLFDQLKGATVFSKIDLWSGYHQLRIREEDIPKTAFITRYGLFECTVMSFGLTNAPAFFMNLMNKVFMEFLDKFVMVFIDDILIYSKSEEEHEQHLRLVLEKLKEHQLYAKFSKCDFWLKEVQFLGHIVNAQGVAVDPANVESVTKWTPPRTVTQVRSFLGLAGYYRRFIENFSKIAKPMTQLLKKEEKFIWSAECNRSFEELKRRLVSAPVLILPDQTKDFQVYCDASRQGLGCVLMQDGKVVSYASRQLRPHEGNYPTHDLELAAVVHALKIWRHYLISNRCEVYTDHKSLKYIFTQPDLNLRQRRWLELIKDYDMGIHYHPGKANVVADALSRKSYCNVAWVKQLCCEVQRDLEHLNLGIVEHGFVAALEAQPTLVEQVRIAQASDPEIAELKKNMRVGKARGFVEDEQGTIWMGERLCVPENKELKDLILTEAHQTQYSIHPGSTKMYQDLKEKFWWVSMRREIAEFVALCDVCQRVKAEHQRPAGLLQPLQIPEWKWEEIGMDFITGLPRTSSGHDSIWVVVDRLTKVAHFIPVHTTYSGKKLAELYLARIMCLHGVPKKIVSDRGSQFTSKFWQKLQEELGTRLNFSTAYHPQTDGQTERVNQILEDMLRACALDFGGAWDKSLPYAEFSYNNSYQASLQMAPFEALYGRRCRTPLFWDQTGERQLFGTEVLNEAEEKVRAVRERLRIAQSRQKSYADNRRRELAFETGDYVYLRVTPLRGVHRFQTKGKLAPRFVGPYRILERRGEVAYQLELPSNMLGIHNVFHVSQLKKCLRVPEEQASPDQIEIQEDLTYVEKPTRILETSERKTRNKVIRFCKVQWSHHSEEEATWEREDELKATHPHLFASSSESRGRDSV

SEQ ID NO: 19599 - protein, 1524 aa, Oryza sativa
  Clone ID: TF_OSC404802j.C1.p1.fg
MEIRNGSRDSNNASGSEEPINGARANGASDNSPSPPPENPTIAQVLDNQTQMMTMMMQQMQQQYHQVLQQVQQQAQLQQQNLQFGPPPPQSKLLEFLRVKPPTFSSTTNPIEAHDWLHAIEKKLNLLQCNEQEKVTFATHQLQGPASIWWDNYMVTRPAGAEVTWTEFRHSFNKAQVPEGIVAQKKREFRSLQQGTRTVIEYLHEFNRLARYAPEDVRTDAERQEKFLSGLDDELTNQLISRDYEDFEKLVDKAIRQEEHCNKINRKRKAAQFRTPQGKSQKPRFTMGHHGGPSTMIIRQHRPYHPGNFNKNHHSDSHNNSEQHSLNPTPSSLKIPAQSVQPALPEQPKRLGEKPELCFNCNKPGHTVGKCPKPRRAGPKFVQARVNHASAEEAQSAPEVILGTFPVNSTPAVILFDSGATHSFISKRFAGAHGLSLVKLKIPMRVHTPGGGMTTTHYCPSVTVEIQGLIFPANLILLESKDLDVILGMDWLARHRGVIDCASRTIKLTNAKGEVVIFQSPVPQKPGISLNQAAGEEQEVAVEKTTKKLEDIPIVREYPEVFPDDLTTMPPKRDIEFRIDLVPGTAPIHKRPYRMGANELAKVKKQVDEQLQKGYIRPSTSPWGAPVIFVEKKDKTKRMCVDYRALNEVTIKNKYPLPRIDDLFDQLKGATVFSKIDLRSGYHQLRIREEDIPKTAFITRYGLFECTVMSFGLTNAPAFFMNLMNKVFMEFLDKFVVVFIDDILIYSKSEEEHEQHLRLVLEKLKEHQLYAKFSKCDFWLKEVQFLGHIVNAQGVAVDPANVESVTKWTPPRTVTQVRSFLGLAGYYRRFIENFSKIAKPMTQLLKKEEKFIWSAECNRSFEELKRRLVSAPVLILPDQTKDFQVYCDASRQGLGCVLMQDGKVVSYASRQLRPHEGNYPTHDLELAAVVHALKIWRHYLISNRCEVYTDHKSLKYIFTQPDLNLRQRRWLELIKDYDMGIHYHPGKANVVADALSRKSYCNVAWVKQLCCEVQRDLEHLNLGIVEHGFVAALEAQPTLVEQVRIAQASDPEIAELKKNMRVGKARGFVEDEQGTIWMGERLCVPENKELKDLILTEAHQTQYSIHPGSTKMYQDLKEKFWWVSMRREIAEFVALCDVCQRVKAEHQRPAGLLQPLQIPEWKWEEIGMDFITGLPRTSSGHDSIWVVVDRLTKVAHFIPVHTTYSGKKLAELYLARIMCLHGVPKKIVSDRGSQFTSKFWQKLQEELGTRLNFSTAYHPQTDGQTERVNQILEDMLRACALDFGGAWDKSLPYAEFSYNNSYQASLQMAPFEALYGRRCRTPLFWDQTGERQLFGTEVLNEAEEKVRAVRERLRIAQSRQKSYADNRRRELVFQVGDYVYLRVTPLRGVHRFQTKGKLAPRFVGPYRILERRGEVAYQLELPSNMLGIHNVFHVSQLKKCLRVPEEQASPDQIEIQEDLTYVEKPTRILETSERKTRNKVIRFCKVQWSHHSEEEATWEREDELKATHPHLFASSSESRGRDSV

SEQ ID NO: 19600 - protein, 1561 aa, Oryza sativa
  Clone ID: TF_OSC405598j.C1.p1.fg
MAGCECMVLLVAPIAVKDRFTGNPGRLTVLTTSGSGSFTAFNYCFEMPALCKRTPSFLWLYPASYLLFRVEVLLSWSCLREVGFLAAVKMEIRNGSRDSNNASGSEELINGACANSASDNSPSPPPENPTIAQVLDNQTQMMTVMMQQMQQQYHQVLQQVQQQAQQQQQNLQFGPPPPQSKLLEFLRVKPPTFSSTTNPIEAHDWLHAIEKKLNLLQCNEQEKVAFATHQLQGPASVWWDNYMVTRPTGAEVTWTEFCHSFNKAQVPEGIVAQKKREFRSLQQGTRTVIEYLHEFNRLARYAPEDVRTDDGRREKFLSGLDDELTNQLISRDYEDFEKLVDKAIRQEEHCNKINRKRKTAQFRTPQGRHRPYHPGSFNKNHHSGSHNNSEQHSLNPTPSSLKIPAQSVQPALPEQPKRLGEKPELCFNCNKPGHTVGKCPKPRRAGPKFVQARVTHASAEEAQSAPEVILGTFPVNSTPAVILFDSGATHSFISKRFAGAHGLSLVKLKIPMRVHTPGGGMTTTHYCPSVTVEIQGLIFPANLILLESKDLDVILGMDWLTRHRGVIDCASRTIKLTNAKGEVVTFQSLVPQKPGISLNQAAGEEQEVAVEKTTKKLEDIPIVREYPKVFPDDLTTMPPKRDIEFRIDLVPGTAPIHKRPYRMGANELAEVKKQVDEQLQKGYIHPSTSPWGAPVIFVEKKDKTKRMCVDYRAFNEVTIKNKYPLPRIDDLFDQLKGATVFSKIDLRSGYHQLRIHEEDIPKTAFITRYGLFECTVMSFGLTNTPAFFMNLMNKVFMKFLDKFVVVFIDDILIYSKSEEEHEQHLRLVLEKLKEHQLYAKFSKCDFWLKEVQFLGHIVNAQGVAMDPANVESVTKWTPPRTVTQVRSFLGLAGYYRRFIENFSKIAKPMTQLLKKEEKFIWSAKCNRSFEELKRRLVSAPVLILPDQTKDFQVYCDASRQGLGCVLMQDGKVVSYASRQLRPHEGNYPTHDLELAAVVHALKIWRHYLIGYRCERRWLELIKDYDMGIHYHPGKANVVADALSRKSYCNVAWVEQLCCEVQRDLEHLNLGIVEHGFVVALEAQPTLVEQVRIAQASDPEVAELKKNMRVGKARGFVEDEQGTIWMGERLCVPENKELKDLILTEAHQTQYSILSGSTKMYQDLKEKFWWVSMRREIAEFVALCDVCQRVKAEHQRPAGLLQPLQIPEWKWEEIGMDFITGLPRTSSGHDSIWVVVDRLTKVAHFIPVHTTYSGKKLAELYLARIMCLHGVPKKIVSDRGSQFTSKFWQKLQEELGTRLNFSTAYHPQTDGQTERVNQILEDMLRACALDFGGAWDKSLPYAEFSYNNSYQASLQMAPFEALYGRRCRTPLFWDQTGERQLFGTEVLNEAEEKVRAVRERLRIAQSRQKSYADNRRRELAFETGDYVYLRVTPLRGVHRFQTKGKLAPRFVGPYRILERRGEVAYQLELPSNMLGIHNVFHVSQLKKCLRVPEEQASPDHIEIQEDLTYVEKPTRILETSERRTRNKVIRFCKVQWSHHSEEEATHPHLFASSSESRGRDSV

SEQ ID NO: 19601 - protein, 1458 aa, Oryza sativa
  Clone ID: TF_OSC406439j.C1.p14.fg
METRNGSRDSNNASGSEEPINGARANGASDNSPSPPPENPTIAQVLDNQTRMMTMMMQQMQQQYHQVLQQVQQQAQLQQQNLQFGPPPPQSKLLEFLRVKPPTFSSTTNPIEAHDWLHAIEKKLNLLQYNEQEKVAFATHQLQGPASIWWDNYMVTRPTGAEVTWTEFCHSFNKAQVPEGIVAQKKREFRSLQQGTRTVIEYLHEFNRLAHYAPEDVRTDAERQEKFLSGLDDELTNQLVSRDYEDFEKLVDKAIRQEEQCNKMNRKRKAAQFRTPQGKCQKPRFTMGHHGGPSTMIIRQHRPYHPGNFNKNHHSDSHNNSKQHSLNPTPSSLKIPAQSVQPALPEQPKRLGEKPELCFNCNKPGHTVGKCPKPRRAGPKFVQARVNHASAEEAQSAPEVILGTFPVNSTPAVILFDSGATHSFISKRFAGAHGLSLVKLKIPMRVHTPGGGMTTTHYCPSVTVEIQGLIFPANLILLESKDLDVILGMDWLARHRGVIDCASRTIKLTNAKGEVVIFQSPVPQKPGISLNQAAGEEQEVAVEKTTKKLEDIPIVREYPEVFPDDLTTMPPKRDIEFRIDLVPGTAPIHKRPYRMGANELAEVKKQVDEQLQKGYIRPSTSPWGAPVIFVEKKDKTKRMCVDYRALNEVTIKNKYPLPRIDDLFDQLKGATVFSKIDLRSGYHQLRIREEDIPKTAFITRYGLFECTVMSFGLTNAPAFFMNLMNKVFMEFLDKFVVVFIDDILIYSKSEEEHEQHLRLVLEKLKEHQLYAKFSKCDFWLKEVQFLGHIVNAQGVAVDPANVESVTKWTPPRTVTQVRSFLGLAGYYRRFIENFSKIAKPMTQLLKKEEKFIWSAECNRSFEELKRRLVSAPVLILPDQTKDFQVYCDASRQGLGCVLMQDGKVVSYASRQLRPHEGNYPTHDLELAAVVHALKIWRHYLIGNRCEVQRDLEHLNLGIVEHGFVAALEAQPTLVEQVRIAQASDPEIAELKKNMRVGKARGFVEDEQGTIWMGERLCVPENKELKDLILTEAHQTQYSIHPGSTKMYQDLKEKFWWVSMRREIAEFVALCDVCQRVKAEHQRPAGLLQPLQIPEWKWEEIGMDFITGLPRTSSGHDSIWVVVDRLTKVAHFIPVHTTYSGKKLAELYLARIMCLHGVPKKIVSDRGSQFTSKFWQELQEELGTRLNFSTAYHPQTDGQTERVNQILEDMLRACALDFGGAWDKSLPYAEFSYNNSYQASLQMAPFEALYGRRCRTPLFWDQTGERQLFGTEVLNEAEEKVRAVRERLRIAQSRQKSYADNRRRELVFQVGDYVYLRVTPLRGVHRFQTKGKLAPRFVGPYRILERRGEVAYQLELPSNMLGIHNVFHVSQLKKCLRVPEEQASPDQIEIQEDLTYVEKPTRILETSERKTRNKVIRFCKVQWSHHSEEEATWEREDELKATHPHLFASSSESRGRDSV

SEQ ID NO: 19602 - protein, 1517 aa, Oryza sativa
  Clone ID: TF_OSC411372j.C1.p3.fg
MAGCECMVLLVAPIAVKDRFTGNPGRLTVLTTSGSGCFTAFNYCFEMPALCKRTPSFLWLYPASYLLFRVEVLLSWSRLREVGFVAAVKMETRNGSRDSNNASGSEEPINGARANGASDNSPSPPPKNPTIAQVLDNQTQMMTMMMQQMQQQYHQVLQQVQQQAQQQQQNLQFGPPPPQSKLLEFLRVKPPTFSSTTNPIEAHDWLHAIEKKLNLLQCNEQEKVAFATHQLQGPASIWWDNYMVTCPTGAEVTWTEFRHSFNKAQIPEGIVAQKKREFRSLQQGTRTVIEYLHEFNRLARYAPEDVRTDDGRQEKFLSGLDDELTNQLISRDYEDFEKLVDKAIRQEEQCNKMNRKRKAAQFRTPQGKSQKPRFTMGRHGGPSTMIIRQHRPYHPGSFNKNHHSDSHNNSEQHSLNPTPSSLKIPAQSVQPALPEQPKRLGEKPELCFNCNKPGHTVGKCPKPRRAGPKFVQARVNHTSAEEAQSAPEVILGTFPVNSTPAVILFDSGATHSFVSKRFAGAHGLSLVKLKIPMRVHTPGGGMTTTHYCPSVTVEIQGLIFPANLILLESKDLDVILGMDWLTRHRGVIDCASRTIKLTNAKGEVVIFQSPVPQKPGISLNQAAGEEQEVAVEKTTKKLEDIPIVREYPEVFPDDLTTMPPKRDIEFRIDLVPGTAPIHKRPYRMGANELVEVKKQVDEQLQKGYIRPSTSPWGAPVIFVEKKDKTKRMCVDYRALNEVTIKNKYPLPRIDDLFDQLKGATVFSKIDLRSGYHQLRIREEDIPKTAFITRYGLFECTVMSFGLTNAPAFFMNLMNKVFMEFLDKFVVVFIDDILIYSKSEEEHEQHLRLVHEKLKAHQLYAKFSKCVFWLKEVQFLGHIVNAQGVAVDPANVESVTKWTPPRTVTQVRSFLGLAGYYRRFIENFSKIAKPMTQLLKKEEKFIWSAECNRSFEELKRRLVSAPVLILPDQTKDFQVYCDASRQGLGCVLMQDGKVVSYASRQLRPHEGNYPTHDLELAAIVHALKIWRHYLIGNRCEVYIDHKSLKYIFTQPDLNLRQRRWLELIKDYDMGIHYHPGKANVVADALSRKSYCNVAWVEQLCCEVQRDLEHLNLGIVEHGFVVALEAQPTLVEQVRIAQASDPEIAELKKNMRVGKARGFVEDEQGTIWRGERFTKMYQDLKEKFWWVSMRREIAEFVALCDVCQRVKAEHQRPAGLLQPLQIPEWKWEEIGMDFITGLPRTSSGHDSIWVVVDRLTKVAHFIPVHTTYSGKKLAELYLARIMCLHGVPKKIVSDRGSQFTSKFWQKLQEELGTRLNFSTAYHPQTDGQTERVNQILEDMLRACALDFGGAWDKSLPYAEFSYNNSYQASLQMAPFEALYGRRCRTPLFWDQTGERQLFGTEVLNEAEEKVRAVRERLRIAQSRQKSYADNRRRELAFETGDYVYLRVTPLRGVHRFQTKGKLAPRFVGPYRILERRGEVAYQLELPSNMLGIHNVFHVSQLKKCLRVPEEQASPDHIEI

SEQ ID NO: 19603 - protein, 1524 aa, Oryza sativa
  Clone ID: TF_OSC412783j.C1.p1.fg
MEIRNGSRDSNNANGSEEPINGARANGASDNSPSPPPENPTIAQVLDNQTQMMTMMMQQMQQQYHQVLQQVQQQAQLQQQNLQFGPPPPQSKLLEFLRVKPPTFSSTTNPIEAHDWLHAIEKKLNLLQCNEQEKVAFATHQLQGPASIWWDNYMVTRPTGAEVTWTEFCHSFNKAQVPEGIVAQKKREFRSLQQGTRTVIEYLHEFNRLARYAPEDVRTDAERQEKFLSGLDDELTNQLISRDYEDFEKLVDKAIRQEEHCNKINRKRKAAQFRTPQGKSQKPRFTMGHHGGPSTMIIRQHRPYHPGSFNKNHHSGSHNNSEQHSLNPTPSSLKIPAQSVQPALPEQPKRLVEKPELCFNCNKPGHTVGKCPKPRRAGPKFVQARVNHASAEEAQSAPEVILGTFPVNSTPAVILFDSGATHSFISKRFAGAHGLSLVKLKIPMRVHTPGGGMTTTHYCPSVTVEIQGSIFPANLILLESKDLDVILGMDWLTRHRGVIDCASRTIKLTNAKGEVVTFQSPVPQKPRISLNQAAGEEQEVAVEKTTKKLEDIPIVREYPEVFPDDLTTMPPKRDIEFRIDLVPGTAPIHKRPYRMGANELAEVKKQVDEQLQKGYIRPSTSPWGAPVIFVEKKDKTKRMCVDYRALNEVTIKNKYPLPRIDDLFDQLKGATVFSKIDLRSGYHQLRIREEDIPKTAFITRYGLFECTVMSFGLTNAPAFFMNLMNKVFMEFLDKFVVVFIDDILIYSKSEEEHEQHLRLVLEKLKEHQLYAKFSKCDFWLKEVQFLGHIVNAQGVAVDPANVESVTKWTPPRTVTQVRSFLGLAGYYRRFIENFSKIAKPMTQLLKKEEKFIWSAECNRSFEELKRRLVSAPVLILPDQTKDFQVYCDASRQGLGCVLMQDGKVVSYASRQLRPHEGNYPTHDLELAAVVHALKIWRHYLIGNRCEVYTDHKSLKYIFTQPDLNLRQRRWLELIKDYDMGIHYHPGKANVVADALSRKSHCNVAWVEELCCEVQRDLGHLNLGIVEHGFVAALEAQPTLVEQVRIAQASDPEIAELKKNMRVGKARGFVEDEQGTIWMGERLCVPENKELKDLILTEAHQTQYSIHPGSTKMYQDLKEKFWWVSMRREIAEFVALCDVCQRVKAEHQRPAGLLQPLQIPEWKWEEIGMDFITGLPRTSSGHDSIWVVVDRLTKMAHFIPVHTTYSGKKLAELYLARIMCLHGVPKKIVSDRGSQFTSKFWQKLQEELGTRLNFSTAYHPQTDGQTERVNQILEDMLRACALDFGGAWDKSLPYAEFSYNNSYQASLQMAPFEALYGRRCRTPLFWDQTGERQLFGTEVLNEAEEKVRAVRERLRIAQSRQKSYADNRRRELAFETGDYVYLRVTPLRGVHRFQTKGKLAPRFVGPYRILERRGEVAYQLELPSNMLGIHNVFHVSQLKKCLRVPEEQASPDHIEIQEDLTYVEKPTRILETSERKTRNKVIRFCKVQWSHHSEEEATWEREDELKATHPHLFASPSESRGRDSV

SEQ ID NO: 19604 - protein, 1526 aa, Oryza sativa
  Clone ID: TF_OSC416334j.C1.p3.fg
MAVKDRFTGNPGRLTVLSTSGSGFDACGLVGGRYHVSVMETRNGSRDSNNASGSEKPINGARANSASDNSPSPPPENPTIAQVLDNQTQMMTMMMQQMQQQYHQVLQQVQQQAQLQQQNLQFGSPPPQSKLLEFLRVKPPTFSSTTNPIEAHDWLHAIEKKLNLLQCNEQEKVAFATHQLQGPASIWWDNYMVTRPAGAEVTWTEFRHSFNKAQVPEGIVAQKKREFRSLQQGTRTVIEYLHEFNLLARYAPEDVRTDAERQEKFLSGLDDELTNQLISRDYEDFEKLVDKAIRQEEHCNKINRKRKAAQFRTPQGKSQKPRFTMGRHGGPSTMIIRQHRPYHPGSFNKNHHNGSHNNSEQHSLNPTPSSLKIPAQSVQPALPEQPKRLGEKPELCFNCNKPGHTVGKCPKPRRAGPKFVQARVNHASAEEAQSAPEVILGTFPVNSTPAVILFDSGATHSFISKRFAGAHGLSLVKLKIPMRVHTPGGGMTTTHYCPSVTVEIQGLIFPANLILLESKDLDVILGMDWLTRHRGVIDCASRTIKLTNAKGEVVTFQSLVPRKPGISLNQAAGEEQEVAVEKTTKKLEDIPIVREYPEVFPDDLTTMPPKRDIEFRIDLVPGTAPIHKRPYRMGASELAEVKKQVDEQLQKGYIRPSTSPWGAPVIFVEKKDKTKRMCVDYRALNEVTIKNKYPLPRIDDLFDQLKGVTVFSKIDLRSGYHQLRIREEDIPKTAFITRYGLFECTVMSFGLTNAPAFFMNLMNKVFMEFLDKFVVVFIDDILIYSKSEEEHEQHLRLVLEKLKEHQLYAKFSKCDFWLKEVQFLGHIVNAQGVAVDPANVESVTKWTPPRTVTQVRSFLGLAGYYRRFIENFSKIAKPMTQLLKKEEKFIWSAECNRSFEELKRRLVSAPVLILPDQTKDFQVYCDASRQGLGCVLMQDGKVVSYASRQLRPHEGNYPTHDLELAAVVHALKIWRHYLIGNRCEVYTDHKSLKYIFTQPDLNLRQRRWLELIKDYDMGIHYHPGKANVVADALSRKSYCNVAWVEQLCGEVQRDLEHLNLGIVEHGFVAALEAQPTLVEQVRIAQASDPEIAELKKNMRVGKARGFVEDEQGTIWMGERLCVPENKELKDLILTEAHQTQYSIHPGSTKMYQDLKEKFWWVSMRREIAEFVALCDVCQRVKAEHQRPAVVDRLTKVAHFIPVHTTYSGKKLAELYLSRIMCLHGVPKKIVSDRGSQFTSKFWQKLQEELGTRLNFSTAYHPQTDGQTERVNQILEDMLRACALDFGGAWDKSLPYAEFSYNNSYQASLQMAPFEALYGRRCRTPLFWDQTGERQLFGTEVLNEAEEKVRAVRERLRIAQSRQKSYADNRRRELVFQVGDYVYLRVTPLRGVHRFQTKGKLAPRFVGPYRILERRGEVAYQLELPSNMLGIHNVFHVSQLKKCLRVPEEQASPDQIEIQEDLTYVEKPTRILETSERKTRNKVIRFCKVQWSHHSEEEATWEREDELKATHPHLFASSSESRGRDSV

SEQ ID NO: 19605 - protein, 1525 aa, Oryza sativa
  Clone ID: TF_OSC416668j.C1.p19.fg
MEIRNGSRDSNNASGSEEPINGARANGASDNSPSPPPENPTIAQVLDNQTQMMTMMMQQMQQQYHQVLQQVQQQAQLQQQNLQFGPPPPQSKLLEFLRVKPPTFSSTTNPIEAHDWLHAIEKKLNLLQCNEQEKVAFATHQLQGPASIWWDNYMVTRPAGAEVTWTEFRHSFNKAQVPEGIVAQKKREFRSLQQGTRTVIEYLHEFNRLARYAPEDVRTDAERQEKFLSGLDDELTNQLISRDYEDFEKLVDKAIRQEEQCNKMNRKRKAAQFRTPQGKCQKPRFTMGHQGGPSTMIIRQHRPYHPGNFNKNNNSGSHSSLNPTPSPLMIPAQSDQSDQLAQPALPEQPKRLGEKPELCFNCNKPGHTVGKCPKPRHAGPKFVQARVNHASAEEAQSAPEVILGTFPVNSTPAVILFDSGATHSLISKRFAGAHGLSLVKLKIPMRVHTPGGGMTTTHYCPSVTVEIQGLIFPANLILLESKDLDVILGMDWLTRHRGVIDCASRTIKLTNAKGEVVTFQSLVPRKPGISLNQAAGEEQEVAVEKTTKKLEDIPIVREYPEVFPDDLTTMPPKRDIEFRIDLVPGTAPIHKRPYRMGANELAEVKKQVDEQLQKGYIRPSTSPWGAPVIFVEKKDKTKRMCVDYRALNEVTIKNKYPLPRIDDLFDQLKGATVFSKIDLRSGYHQLRIREEDIPKTAFITRYGLFECTVMSFGLTNAPAFFMNLMNKVFMEFLDKFVVVFIDDILIYSKSEEEHEQHLRLVLEKLKEHQLYAKFSKCDFWLKEVQFLGHIVNAQGVAVDPANVESVTKWTPPRTVTQVRSFLGLAGYYRRFIENFSKIAKPMTQLLKKEEKFIWSAECNRSFEELKRRLVSAPVLILPDQTKDFQVYCDASRQGLGCVLMQDGKVVSYASRQLRPHEGNYPTHDLELAAVVHALKIWRHYLIGNRCEVYTDHKSLKYIFTQPDLNLRQRRWLELIKDYDMGIHYHPGKANVVADALSRKSYCNVAWVEELCCEVQRDLEHLNLGIVEHGFVAALEAQPTLVEQVRIAQASDPEIAELKKNMRVGKARGFVEDEQGTIWMGERLCVPENKELKDLILTEAHQTQYSIHPGSTKMYQDLKEKFWWVSMRREIAEFVALCDVCQRVKAEHQRPAGLLQPLQIPEWKWEEIGMDFITGLPRTSSGHDSIWVVVDRLTKVAHFIPVHTTYSGKKLAELYLARIMCLHGVPKKIVSDRGSQFTSKFWQKLQEELGTRLNFSTAYHPQTDGQTERVNQILEDMLRACALDFGGAWDKSLPYAEFSYNNSYQASLQMAPFEALYGRRCRTPLFWDQTGERQLFGTEVLNEAEEKVRAVRERLRIAQSRQKSYADNRRRELVFQVGDYVYLRVTPLRGVHRFQTKGKLAPRFVGPYRILERRGEVAYQLELPSNMLGIHNVFHVSQLKKCLRVPEEQASPDQIEIQEDLTYVEKPTRILETSERRTRNKVIRFCKVQWSHHSEEEATWEREDELKATHPHLFTSSSESRGRDSV

SEQ ID NO: 19606 - protein, 1562 aa, Oryza sativa
  Clone ID: TF_OSC418722j.C1.p18.fg
MAVKDRFTGNPGRLTVLTTSGSGFVACGLVGGRYYVSVMEIRNGSRDSNNASGSEEPINGARANGASDNSLSPPPENPTIAQVLDNQTQMMTMMMQQMQQQYHQVMQQVQQQAQLQQQNLQFGPPPPQSKLLEFLRVKPPTFSSTTNPIEAHDWLHAIEKKLNLLQCNEQEKVAFATHQLQGPASVWWDNYMVTRPAGAEVTWTEFRHSFNKAQVPEGIVAQKKREFHSLQQGTRTVIEYLHEFNRLARYAPEDVRTDAERQEKFLSGLDDELTNQLISRDYEDFEKLVDKAIRQEEHCNKINRKRKAAQFRTPQGKSQKPRFTMGHHGGPSTMIIRQHRPYHPGNFNKNHHSDSHNNSEQHSLNPTPSSLKIPAQSVQPALPEQPKRLGEKPELCFNCNKPGHTVGKCPKPRRAGPKFVQVRVNHASAEEAQSAPEVILGTFPVNSTPAVILFDSGATHSFISKRFAGAHGLSLVKLKIPMRVHTPGGGMTTTHYCPSVTVEIQGLIFPANLILLESKDLDVILGMDWLARHRGVIDCASRTIKLTNAKGEVVIFQSPVPQKPGISLNQAAGEEQEVAVEKTTKKLEDIPMVREYPEVFSDDLTTMPPKRDIEFRIDLVPGTAPIHKRPYRMGANELAEVKKQVDEQLQKGYIRPSTSPWGAPVIFVEKKDKTKRMCVDYRTLNEVTIKNKYPLPRIDDLFDQLKGATVFSKIDLRSGYHQLRIREEDIPKTAFITRYGLFECTVMSFGLTNAPAFFMNLMNKVFMEFLDKFVVVFIDDILIYSKSEEEHEQHLRLVLEKLKEHQLYAKFSKCDFWLKEVQFLGHIVNAQGVAVDPANVESVTKWTPPRTVTQVRSFLGLAGYYRRFIENFSKIAKPMTQLLKKEEKFIWSAECNRSFEELKRRLVSAPVLILPDQTKDFQVYCDASRQGLGCVLMQDGKVVSYASRQLRPHEGNYPTHDLELAAVVHALKIWRHCLIGNRCEVYTDHKSLKYIFTQPDLNLRQRRWFELIKDYDMGIHYHPGKANVVADALSRKSYCNVAWVEELCCEVQHDLEHLNLGIVEHGFVAALEAQPTLVEQVRIAQASDPEIAELKKNMRVGKARGFVKDEQGTIWMGERLCVPENKELKDLILTEAHQTQYSIHPGSTKMYQDLKEKFWWVSMRREIAEFVALCDVCQRVKAEHQRPAGLLQPLQIPEWKWEEIGMDFITGLPRTSSGHDSIWVVVDRLTKVAHFIPVHTTYSGKKLAELYLARIMCLHGVPKKIVSDRGSQFTSKFWQKLQEELGTRLNFSTAYHPQTDGQTERVNQILEDMLRACALDFGGAWDKSLPYAEFSYNNSYQASLQMAPFEALYGRRCRTPLFWDQTGERQLFGTEVLNEAEEKVRAVRERLRIAQSRQKSYADNRRRELVFQVGDYVYLRVTPLRGVHRFQTKGKLAPRFVGPYRILERRGEVAYQLELPSNMLGIHNVFHVSQLKKCLRVPEEQASPDQIEIQEDLTYVEKPTRILETSERKTRNKVIRFCKVQWSHHSEEEATWEREDELKATHPHLFASSSESRGRDSV

SEQ ID NO: 19607 - protein, 1557 aa, Oryza sativa
  Clone ID: TF_OSC420229j.C1.p1.fg
MAIKDRFTGNPGTLTVLTTSASGCFTAFNYCFEMPALCKRTPSFLWLYPASYLLFRFVACGLVGGRYHVSVMEIRNGSRDSNNASGSEEPINGARANGASDNSPSPPPENPTIAQVLDNQTQMMTMMMQQMQQQYHQVLQQVQQQAQLQQQNLQFGSPPHQSKLLEFLRVKPPTFSSTTNPIEAHDWLHAIEKKLNLLQCNEQEKVAFATHQLQGPASVWWDNYMVTRPTGAEVTWTEFRHSFNKAQVPEGIVAQKKREFRSLQQGTRTVIEYLHEFNRLARYAPEDVRTDAERQEKFLSGLDDELTNQLISRDYEDFEKLVDKAIRQEEHCNKINRKRKAAQFRTPQGKSQKPRFTMGHHGGPSTMIIRQHRPYHPGNFNKNHHSDSHNNSEQHSLNPTPSSLKIPAQSVQPALPEQPKRLGEKPELCFNCNKPGHTVGKCPKPRRAGPKFVQARVNHASAEEAQSAPEVILGTFPVNSTPAVILFDSGATHSFISKRFAGAHGLSLVKLKIPMRVHTPGGGMTTTHYCPSVTVEIQGLIFPANLILLESKDLDVILGMDWLTRHRGVIDCASRTIKLTHAKGEVAVGEEQEVAVEKTTKKLEDIPIVREYPGVFPDDLTTMPPKRDIEFRIDLVPGTAPIHKRPYRMGANELAEVKKQVDEQLQKGYIRPSTSPWGAPVIFVEKKDKTKRMCVDYRAHNEVTIKNKYPLPRIDDLFDQLKGATVFSKIDLRSGYHQLRIREEDIPKTAFITRYGLFECTVMSFGLTNAPAFFMNLMNKVFMEFLDKFVVVFIDDILIYSKSEEEHEQHLRLVLEKLKEHQLYAKFSKCDFWLKEVQFLGHIVNAQGVAVDPANVESVTKWTPPRTVTQVRSFLGLAGYYRRFIENFSKIAKPMTQLLKKEEKFICSAECNRSFEELKRRLVSAPVLILPDQTKDFQVYCDASRQGLGCVLMQDGKVVSYASRQLRPHEGNYPTHDLELAAVVHALKIWRHYLIGNRCEVYTDHKSLKYIFTQPDLNLRQRRWLELIKDYDMGIHYHPGKANVVADALSRKSYCNVAWVEQLCCEVQRDLEHLNLGIVEHGFVAALEAQPTLVEQVRIAQASDPEIAELKKNMRVGKARGFVEDEQGTIWMGERLCVPENKELKDLILTEAHQTQYSIHPGSTKMYQDLKEKFWWAEHQRPAGLLQPLQIPEWKWEEIGMDFITGLPRTSSGHDSIWVVVDRLTKVAHFIPVHTTYSGKKLAELYLARIMCLHGVPKKIVSDRGSQFTSKFWQKLQEELGTRLNFSTAYHPQTDGQTERVNQILEDMLRACALDLGGAWDKSLPYAEFSYNNSYQASLQMAPFEALYGRRCRTPLFWDQTGERQLFGTEVLNEAEEKVRAVRERLRIAQSRQKSYADNRRRELVFQVGDYVYLRVTPLRGVHRFQTKGKLAPRFVGPYRILERRGEVAYQLELPSNMLGIHNVFHVSQLKKCLRVPEEQASPDQIEIQEDLTYVEKPTRILETSERKTRNKVIRFCKVQWSHHSEEEATWEREDELKATHPHLFASSSESRGRDSV

SEQ ID NO: 19608 - protein, 1406 aa, Oryza sativa
  Clone ID: TF_OSC420231j.C1.p1.fg
MAVKDRFTGNPGRLTVLTTSGSGDLMHIQLRNSGSRISGRDKLVSEPTLTMEIRNGSRDSNNASGSEEPNNGARANGASDNSPSPPPENPTIAQVLDNQTQMMTMMMQQMQQQYHQVLQQVQQQAQLQQQNLQFGPPPPQSKLLEFLRVKPPTFSSTTNPIEAHDWLHAIEKKLNLLQCNEQEKVAFATHQLQGPASIWWDNYMVTRPAGAEVTWTEFRHSFNKAQVPEGIVAQKKREFRSLQQGTRTVIEYLHEFNRLARYAPEDVRTDAEKQEKFLSGLDDELTNQLISRDYEDFEKLVDKAIRQEEHGNKINRKRKAAQFRTPQGKSQKPRFTMGRHGGPSTMIIRQHRPYHPGSFNKNHHNGSHNNSEQHSLNPTPSSLKIPAQSVQPALPEQPKRLGEKPELCFNCNKPGHTVGKCPKPRRAGPKFVQARVNHASAEEAQSAPEVILGTFPVNSTPAVILFDSGATHSFISKRFAGAHGLSLVKLKIPMRVHTPGGGMTTTHYCPSVTVEIQGLIFPANLILLESKDLDVILGMDWLTRHRGVIDCASRTIKLTHAKGEVVTFQSLVPRKPGISLNQAAGEEQEVAVEKTTKKLEDIPIVREYPEVFPDDLTTMPPKRDIEFRIDLVPGTAPIHKRPYRMGANELAEVKKQVDEQLQKGYIRPSTSPWGAPVIFVEKKDKTKRMCVDYRALNEVTIKNKYPLPRIDDLFDQLKGATVFSKIDLRSGYHQLRIREEDIPKTAFITRYGLFECTVMSFGLTNAPAFFMNLMNKVFMEFLDKFVVVFIDDILIYSKSEEEHEQHLRLVLEKLKEHQLYAKFSKCDFWLKEVQFLGHIVNAQGVAVDPANVESVTKWTPPRTVTQVRSFLGLAGYYRRFIENFSKIAKPMTQLLKKEEKFIWSAECNRSFEELKRRLVSAPVLILPDQTKDFQVYCDASRQGLGCVLMQDGKVVSYASRQLRPHEGNYPTHDLELAAVVHALKIWRHYLISNRCEVYTDHKSLKYIFTQADLNLRQRRWLELIKDYDMGIHYHPGKANVVADALSRKSYCNVAWVEQLCCEVQRDLEHLNLGIVEHGFVAALEAQPTLVEQVRIAQASDPEIAELKKNMRVGKARGFVEDEQGTIWMGERLCVPENKELKDLILTEAHQTQYSIHPGSTKMYQDLKEKFWWVSMRREIAEFVALCDVCQRVKAEHQRPAGLLQPLQIPEWKWEEIGMDFITGLPRTSSGHDSIWVVVDRLTKVAHFIPVHTTYSGKKLAELYLARIMCLHGVPKKIVSDRGSQFTSKFWQKLQEELGTRLNFSTAYHPQTDGQTERVNQILEDMLRACALDFGGAWDKSLPYAEFSYNNSYQASLQMAPFEALYGRRCRTPLFWDQTGERQLFGTEVLNEAEEKVRAVRERLRIA

SEQ ID NO: 19609 - protein, 2022 aa, Oryza sativa
  unsure (1)..(2022): unsure at all Xaa locations
  Clone ID: TF_OSC420276j.C1.p1.np
MAAGSRTYSFPAGRSLPLPTLYKPSLHLLRPFPPLAALPPRRNRARAVALSLRRRRRAPVHRRCRPGPPPTSAPPPSASPHPRRPRPPLRFARRPPERRRPRRPEPRRRLPPLRPPFSSPSTXGEPWTAASFPPFPPFSRPPLRRAYGRRRRPXGRGRAASRRPRRRGRLRAHRAASAWGPAVSRSRPRVWLTRGAHGAGRCEPGAPGPPWTHLGHIRTGLRASVAKRYRFHMSSGTNEGYTSYGTNEGYTSYGLVAKMSWHRAGVLLLGAQSCLPVPGVPAVGGVGSMYTSDQSIIYSNSRALGYGQAEQCTQMAGSINRRGLDLTGFVLELRGMCVVLGYPHGVDYQGKQLPEQEGDDAEPHAAWEVTAVILTGSPERTSLAVTAGGDSFSAACQNAALLAIGTLHQRYPDELQHLPYRYHPRRGGARDYATFRDASSEDDATIMHLAHMVEAYDAARIDFHQMVRRGLVKNNMKILELRQENLQLKKDLDAVEAQLRQLKIAQGEVCRPKRRRVCRSLKITARKSTSRPELVRQSLAWTCFVETPRAEPAPVVPQEDGASGVGSTEDALLLTFHGETRRSAATGEGSHPEGSNHNNHVSPPPPPSPPPPPPPDTNAILTQIVAQXANMMAAFLHHIQNPPQHNAPPPPPQHSKLAEFLRICPPTFSSSNNPVDALDWLHAVEKKLDTVQCSDEEKVIFAAHQLQGPASLWWNHFQATQLEGQPITWARFTAAFQRTHVPAGVMALKKREFRELKQGNRSVMEYLHEFNNLAWYAPEDVREDEEKXEKFLAGMDPELSVRLVSGDYSDFQRLVDKSIRLEAKHKELESHKRRLANFRNQQGANQRVRYTNPYPGGSSSQQQQQQQPRSAPRPQFVVRIPQPQQQQSQQGTRAPRPPTPAVQPGQGRRDVQGQQRLCFNCFEHGHFADKCPKPRRQQGQAPPRSNNGGKDVIRGRVNHVTAEDVLTTPDIIVGTFLIHSIPATILFDSGASHSFISVPFVGRNRLGIERLRNPLLITTPGGVMTAKYYSPAIPIEIQGIPFPSDLILLDTKNLDVILGMNWLAQFQGVVDCARRTVTLYRGPEQPVVFFAPPTSVGSSELHQIGLSEIPIVREFGDVFPEKLPGMLPKREIEFRIDLAPGTTPLYKRPYRMAANELAEVKKQLEELKEKGYIRPSTSPWGAPVIFVEKKDKTKRMCVDYRALNEVTIKNKYPLPRIDDLFDQLKGATVFSKIDLRSGYHQLRIREEDIPKTAFTTRYGLYEFTVMSFGLTNAPAFFMNLVNKVFMEYLDKFVVVFINDILVYSQSEEDHQHHLRLVLGKLREHQLYAKLSKCEFWLSEVKFLGHVISAKGVAVDPETVTAVIDWKQPKTVTQIRSFLGLAGYYRRFIENFSKIARPMTQLLKKEEKFVWSPQCEKAFQTLKERLVSSPVLVXPDTRKDFMVYCDASRQGLGCVLMQEGHVVAYASRQLRPHEGNYPTHDLELAAVVHALKIWRHYLIGNRCEIYTDHKSLKYIFTQSDLNLRXRRWLELIKDYDVGIHYHPGKANVVADALSRKSHCNTLDVRGIPPELNQQMEALNLSIVGRGFLATLEAKPTLLDQIREAQKNDPDMHGLLKNMKQGKAAGFTEDEHGTLWNGNRRVKAEHQRPAGLLQPLQVPEWKWDEIGMDFITGLPKTQGGYDSIWVVVDRLTKVARFIPVKTTYGGNKLAELYFARIVSLHGVPKKIVSDRGSQFTSHFWKKLQEELGTRLNFSTAYHPQTDGQTERLNQILEDMLRSCVLDFGKTWDKSLPYAEFSYNNSYQASLXMAPYEALYGRKCRTPLLWDQVGESQVFGTDILREAEAKVRTIRDNLKVAQSRQKSYADNRRRNLEFAVDDFVYLRVTPLRGVHMFQTKGKLAPRFVGPFRIIARRGEVAYQLELPASLGNVHDVFHVSQLKKCLRVPSEQADSEQIEVREDLTYVERPVKILDTMERRTRNWVIRFCKVQWSNHAEEEATWEREDELKAAHPNLFGSSSESRGRDSV

SEQ ID NO: 19610 - protein, 1473 aa, Oryza sativa
  Clone ID: TF_OSC421431j.C1.p24.fg
METRNGSRDSNNASGSEEPINGARANGASDNSPSPPPENPTIAQVLDNQTQMMTMMMQQMQQQYHQSKLLEFLRVKPPTFSSTTNPIEAHDWLHAIEKKLNLLQCNEQEKVAFATHQLQGPASVWWDNYMVTRPTGAEVTWTEFRHSFNKAQVPEGIVAQKKREFRSLQQGTRTVIEYLHEFNRLARYAPEDVRTDAEKQEKFLSGLDDELTNQLISRDYEDFEKLGKSQKPRFTMGHHGGPSTMVIRPHRPYHPGSFNKNHHSGSHNNSEQHSLNPTPSSLKIPAQSVRPALPEQPKRLGEKPELCFNCNKPGHTVGKCPKPRRTGPKFVQARVNHASAEEARSAPEVILGTFPVNSTPAVILFDSGATHSFISKRFAGAHGLSLVKLKIPMRVHTPGGGMTTTHYCPSVTVEIQGLIFPANLILLESKDLDVILGMDWLTRHRGVIDCASRTIKLTNAKGEVVTFQSPVPRKPGISLNQAAGEEQEVAVEKTTKKLEDIPIVREYPEVFPDDLTTMPPKRDIEFRIDLVPGTAPIHKRPYRMGANELAEVKKQVDEQLQKGYIRPSTSPWGAPVIFVEKKDKTKRMCVDYRALNEVTIKNKYPLPRIDDLFDQLKGATVFSKIDLRSGYHQLRIREEDIPKTAFITRYGLFECTVMSFGLTNAPAFFMNLMNKVFMEFLDKFVVVFIDDILIYSKSEEEHEQHLRLVLEKLKEHQLYAKFSKCDFWLKEVQFLGHIVNAQGVAVDPANVESVTKWTPPRTVTQVRSFLGLAGYYRRFIENFSKIAKPMTQLLKKEEKFIWSAECNRSFEELKRRLVSAPVLILPDQTKDFQVYCDASRQGLGCVLMQDGKVVSYASRQLRPHEGNYPTHDLELAAVVHALKIWRHYLIGNRCEVYTDHKSLKYIFTQPDLNLRQRRWLELIKDYDMGIHYHPGKANVVADALSRKSYCNVAWVEQLCCEVQRDLEHLNLGIVEHGFVAALEAQPTLVEQVRIAQASDPEIAELKKNMRVGKARGFVEDEQGTIWMGERLCVPENKELKDLILTEAHQTQYSIHPGSTKMYQDLKEKFWWISMRREIAEFVALCDVCQRVKAEHQRPAGLLQPLQIPEWKWEEIGMDFITGLPRTSSGHDSIWVVVDRLTKVAHFIPVHTTYSGKKLAELYLARIMCLHGVPKKIVSDRGSQFTSKFWQKLQEELGTRLNFSTAYHPQTDGQTERVNQILEDMLRACALDFGGAWDKSLPYAEFSYNNSYQASLQMAPFEALYGRRCRTPLFWDQTGERQLFGTEVLNEAEEKVRAVRERLRIVQSRQKSYADNRRRELAFETGDYVYLRVTPLRGVHRFQTKGKLAPRFVGPYRILERRGEVAYQLELPSNMLGIHNVFHVSQLKKCLRVPEEQASPDHIEIQEDLTYVEKPTRILETSERRTRNKVIRFCKVQWSHHSEEEATWEREDELKATHPHLFASSSESRGRDSV

SEQ ID NO: 19611 - protein, 1565 aa, Oryza sativa
  Clone ID: TF_OSC422389j.C1.p1.fg
MAVKDRFTGNPGRLTVLTTSGSGQKNPELPLVISCIIPPLPMETRNGSRDSNNASGSEKPINGARANSASDNSPSPPPENPTIAQVLDNQTQMMTMMMQQMQQQYHQVLQQVQQQAQQQQQNLQFGPPPPQSKLLEFLRVKPPTFSSTTNPIEAHDWLHAIEKKLNLLQCNEQEKVAFATHQLQGPASVWWDNYMVTRPTGAEVTWTEFCHSFNKAQVPEGIVAQKKREFRSLQQGTRTVIEYLHEFNRLARYAPEDVRTDDGRQEKFLSGLDDELTNQLISRDYEDFEKLVDKAIRQEEHCNKINRKRKAAQFRTPQGKSQKPRFTMGHHGGPSTMIIRQHRPYHPGNFNKNHHSDSHNNSEQHSLNPTLSSLKIPAQSVQPALPEQPKRLGEKPELCFNCNKPGHTVGKCPKPRRAGPKFVQARVNHASAEEAQSAPEVILGTFPVNSTPAVILFDSGATHSFISKRFAGAHGLSLVKLKIPMRVHTPGGGMTTTHYCPSVTVEIQGLIFPANLILLESKDLDVILGMDWLTRHRGVIDCASRTIKLTNAKGEVVTFQSPVPRKPGISLNQAAGEEQEVAVEKTTKKLEDIPIVREYPEVFPDDLTTMPPKRDIEFRIDLVPGTAPIHKRPYRMGANELAEVKKQVDEQLQKGYIRPSTSPWGAPVIFVEKKDKPKRMCVDYRALNEVTIKNKYPLPRIDDLFDQLKGATVFSKIDLRSGYHQLRIREEDIPKTAFITRYGLFECTVMSFGLTNAPAFFMNLMNKVFMEFLDKIVVVFIDDILIYSKSEEEHEQHLRLVLEKLKEHQLYAKFSKCDFWLKEVQFLGHIVNAQGVAVDPANVESVTKWTPPRTVTQVRSFLGLAGYYRRFIENFSKIAKPMTQLLKKEEKFIWSAECNRSFEELKRRLVSAPVLILPDQTKDFQVYCDASRQGLGCVLMQDGKVVSYASRQLRPHEGNYPTHDLELAAVVHALKIWRHYLISNRCEVYTDHKSLKYIFTQPDLNLRQRRWLELIKDYDMGIHYHPGKANVVADALSRKSYCNVAWVEQLCCEVQRDLEHLNLGIVEHGFVAALEAQPTLVEQVRIAQASDPEIAELKKNMRVGKARGFVEDEQGTIWMGERLCVPENKELKDLILTEAHQTQYSIHPGSTKMYQDLKEKFWWVSMRREIAEFVALCDVCQRVKAEHQRPAGLLQPLQIPEWKWEEIGMDFITGLPRTSSGHDSIWVVVDRLTKVAHFIPVHTTYSGKKLAELYLARIMCLHGVPKKIVSDRGSQFTSKFWQKLQEELGTRLNFSTAYHPQTDGQTERVNQILEDMLRACALNFGGAWDKSLPYAEFSYNNSYQASLQMAPFEALYGRRCRTPLFWDQTEERQLFGTEVLNEAEEKVRAVRERLRIAQSRQKSYADNRRRELVFQVGDYVYLRVTPLRGVHRFQTKGKLAPRFVGPYRILERRGEVAYQLELSSNMLGIHNVFHVSQLKKCLRVPEEQASPDQIEIQEDLTYVEKPTRILETSERKTRNKVIRFCKVQWSHHSEEEATWEREDELKATHPHLFASSSESRGRDSV

SEQ ID NO: 19612 - protein, 1169 aa, Oryza sativa
  Clone ID: TF_OSC5662j.C1.p1.fg
MAVKDRFTGNPGRLTVLTTSGSGCFTAFNYCFEMPALCKRIPSFLWLYPASYLLFRYDLLSTVGSTQSCSLFPHTRVEVLLSGAVSERLASLLPSRWRQGMVHATPTTPVAAKSRSMEHVPTVHLTTVRPHRPGVGQSDSDDDNDDVTDAATVPSGVAAGAAASTAAAAEPAVWSSTSSVQTLHAIEKKLNLLQCNEQEKVAFATHQLQGPASVWWDNYMVTRPTGAEVTWTEFCHSFNKAQVPEGIVAQKKREFRSLQQGTRTVIEYLHEFNRLARYAPEDVRTDDGRQEKFLSGLDDELTNQLISRDYEDFEKLVDKAIRQEEHCNKINRKRKAAQFRTPQGKSQKPRFTMGRHGGPSTMIIRQHRPYHPGSFNKNHHSGSHNNSEQHSLNPTPSSLKIPAQSVQPALPEQPKRLGEKPELCFNCNKPGHTVGKCPKPRRAGPKFVQARVNHASAEEAQSATEVILGTFPVNSTPAVILFDSGATHSFISKRFAGAHGLSLVKLKIPMRVHTPGGGMTTTHYCPSVTVEIQGLIFPANLILLESKDLDVILGMDWLTRHRGVIDCASRTIKLTNAKEEVVTFQSPVPQKPGISLNQAAGEEQEVAVEKTTKKLEDIPIVREYPEVFPDDLTTMPPKRDIEFRIDLVPGTAPIHKRPYRMGANELAEVKKQVDEQLQKGYIRPSTSPWGAPVIFVEKKDKTKRMCVDYRALNEVFMEFLDKFVMVFIDDILIYSKSEEEHEQHLRLVLEKLKKHQLYAKFSKCDFWLKEVQFLGHIVNAQGVAVDPANVESVTKWTPPRTVTQDGKVVSYASRQLRPHEGNYPTHDLELAAVVHALKIWRHYLIGNRCERRWLELIKDYDMGIHYHPGKANVVADALSRKSYCNVVWVEQLCCEVQRDLEHLNLGIVEHGFVVALEAQPTLVEQYSIHPGSTKMYQDLKEKFWWVNMRREIAEFVALCDVCQRVRAEHQRPAGERQLFGTEVLNEAEEKVRAVRERLRIAQSRQKSYADNRRRELAFETGDYVYLRVTPLRGVHHFQTKGKLAPRFVGPYRILERRGEAAYQLELPSNMLGIHNVFHVSKLKKCLRVPEEQASPDHIEIQEDLTYVEKPTRILETSERRTRNKVIRFCKVQWSHHSEEVATWEREDELKATHPHLFASHSESRGRDSV

SEQ ID NO: 19613 - protein, 572 aa, Oryza sativa
  Clone ID: TF_OSC5662j.C1.p5.gm
MEHVPTVHLTTVRPHRPGVGQSDSDDDNDDLQGPASVWWDNYMVTRPTGAEVTWTEFCHSFNKAQVPEGIVAQKKREFRSLQQGTRTVIEYLHEFNRLARYAPEDVRTDDGRQEKFLSGLDDELTNQLISRDYEDFEKLVDKAIRQEEHCNKINRKRKAAQFRTPQGKSQKPRFTMGRHGGPSTMIIRQHRPYHPGSFNKNHHSGSHNNSEQHSLNPTPSSLKIPAQSVQPALPEQPKRLGEKPELCFNCNKPGHTVGKCPKPRRAGPKFVQARVNHASAEEAQSATEVILGTFPVNSTPAVILFDSGATHSFISKRFAGAHGLSLVKLKIPMRVHTPGGGMTTTHYCPSVTVEIQGLIFPANLILLESKDLDVILGMDWLTRHRGVIDCASRTIKLTNAKEEVVTFQSPVPQKPGISLNQAAGEEQEVAVEKTTKKLEDIPIVREYPEVFPDDLTTMPPKRDIEFRIDLVPGTAPIHKRPYRMGANELAEVKKQVDEQLQKGYIRPSTSPWGAPVIFVEKKDKTKRMCVDYRALNEVTIKNKYPLPRIDDLFDQLKGATVFSKIDLRSGYH

SEQ ID NO: 19614 - protein, 1135 aa, Oryza sativa
  Clone ID: TF_OSC6239j.C1.p4.gm
MEIRNGSRDSNNACGSEEPIDGARANSASGNSPSPPPENPTIAQVLDNQTQMMTMMMQQMQQQYHQSKLLEFLRVKPPTFSSTTNPIEAHDWLHAIEKKLNLLQCNEQEKVAFATHQLQGPASIWWDNYMVTRPAGAEVTWTEFRHSFNKAQVPEGIVAQKKREFRSLQQGTRTVIEYLHEFNRLARYAPEDVRTNAERQEKFLSGLDDELTNQLISRDYEDFEKLVDKAIRQEEHGNKINRKRKAAQFRTPQGKSQKPRFTMGRHGGPSTMIIRQHRPYHPGSFNKNHHNGSHNNSEQHSLNPTPSSLKIPAQSVQPALPEQPKRLGEKPELCFNCNKPGHTVGKCPKPRRAGPKFVQARVNHASAEEAQSAPERFAGAHGLSLVKLKIPMRVNTPGGGMTTTHYCPSVTVEIQGLIFPANLILLESKDLDVILGMDWLTRHRGVIDCASRTIKLTHAKGEVVTFQSLVPRKPGISLNQAAGEEQEVAVEKTTKKLEDIPIVREYPEVFPDDLTTMPPKRDIEFRIDLVPGTAPIHKRPYSMGANELAEVKKQVDEQLQKGYIRPSTSPWGAPVIFVEKKDKTKRMCVDYRALNEVTIKNKYPLPRIDDLFDQLKGATVFSKIDLRSGYHQLRIREEDIPKTAFITRYGLFECTVMSFGLTNAPAFFMNLMNKVFMEFLDKFVVVFIDDILIYSKSEEEHEQHLQLVLEKLKEHQLYAKFSKCDFWLKEVQFLGHIVNAQGVAVDPANVESVTKWTPPRTVTQVRSFLGLAGYYRRFIENISKIAKPMTQLLKKEEKFIWSAECNRSFEELKRRLVSAPVLILPDQTKDFQVYCDASRQGLGCVLMQDGKVVSYASRQLRPHEGNYPTHDLELAAVVHALKIWQHYLISNRCEVYTDHKSLKYIFTQADLNLRQRRWLELIKDYDMGIHYHPGKANVVADALSRKSYCNVAWVEQLCCEVQRDLEHLNLGIVEHGFVAALEAQPTLVEQVRIAQASDPEIAELKKNMRVGKARGFVEDEQGTIWMGERFTVWTKVSYSALLGSDRVTELVAPHRETAQAPLCQSGRGLREEGGHLTLGPDVPEGARPRGRLRLPQASGHDTPGPISPTVAPGVMPEQFPFPREAVRCDATPKAW

SEQ ID NO: 19615 - protein, 1562 aa, Oryza sativa
  Clone ID: TF_OSC7720j.C1.p1.fg
MAVKDRFTGNPGRLTVLTTSGSGFVACGLVGGRYHVSVMEIRNGSRDSNNASGSEEPINGARANGASDNSPSPPPENPTIAQVLDNQTQMMTMMMQQMQQQYHQVLQQVQQQAQLQQQNLQFGPPPPQSKLLEFLRVKPPTFSSTPNPIEAHDWLHAIEKKLNLLQCNEQEKVAFATHQLQGPASIWWDNYMVTRPAGAEVTWTEFCHSFNKAQVPEGIVAQKKREFRSLQQGTRTVIEYLHEFNRLARYAPEDVRTDAERQEKFMSGLDDELTNQLISRDYEDFEKLVDKAIRQEEQCNKMNRKRKAAQFRTPQGKCQKPRFTMGRHGGPSTMIIRQHRPYHPGSFNKNHHSGSHNNSEQHSLNPTPSSLKIPAQSVQPALPEQPKRLGEKPELCFNCNKPGHTVGKCPKPRRAGPKFVQARVNHASAEEAQSAPEVILGTFPVNSTPAVILFDSGATHSFISKRFAGAHGLSLVKLKIPMRVHTPGGGMTTTHYCPSVTVEIQGLIFPANLILLESKDLDVMLGMDWLARHRGVIDCASRTIKLTNAKGEVVIFQSPVPQKPGISLNQAAGEEQEVAVEKTTKKLEDIPIVREYPEVFPDDLTTMPPKRDIEFRIDLVPGTAPIHKRPYRMGANELAEVKKQVDEQLQKGYIRPSTSPWGAPVIFVEKKDKTKRMCVDYRALNEVTIKNKYPLPRIDDLFDQLKGATVFSKIDLQSGYHQLRIREEDIPKTAFITRYGLFECTVMSFGLTNAPAFFMNLMNKVFMEFLDKFVVVFIDDILIYSKSEEEHEQHLRLVLEKLKEHQLYAKFSKCDFWLKEVQFLGHIVNAQGVAVDPANVESVTKWTPPRTVTQVRSFLGLAGYYRRFIENFSKIAKPMTQLLKKEEKFIWSAECNRSFEELKRRLVSAPVLILPDQTKDFQVYCDASRQGLGCVLMQDGKVVSYASRQLRPHEGNYPTHDLELAAVVHALKIWRHYLIGNRCEVYTDHKSLKYIFTQPDLNLRQRRWLELIKDYDMGIHYHPGKANVVADALSRKSYCNVAWVEQLCCEVQRDLEHLNLGIVEHGFVAALEAQPTLVEQVRIAQASDPEIAELKKNMRVGKARGFVEDEQGTIWMGERLCVPENKELKDLILTEAHQTQYSIHPGSTKMYQDLKEKFWWVSMRREIAEFVALCDVCQRVKAEHQRPAGLLQPLQIPEWKWEEIGMDFITGLPRTSSGHDSIWVVVDRLTKVAHFIPVHTTYSGKKLAELYLARIMCLHGVPKKIVSDRGSQFTSKFWQKLQEELGTRLNFSTAYHPQTDGQTERVNQILEDMLRACALDFGGAWDKSLPYAEFSYNNSYQASLQMAPFEALYGRRCRTPLFWDQTGERQLFGTEVLNEAEEKVRAVRERLRIAQSRQKSYADNRRRELVFQVGDYVYLRVTPLRGVHRFQTKGKLAPRFVGPYRILERRGEVAYQLELPSNMLGIHNVFHVSQLKKCLRVPEEQASPDQIEIQEDLTYVEKPTRILETSERKTRNKVIRFCKVQWSHHSEEEATWEREDELKATHPHLFASSSESRGRDSV

SEQ ID NO: 19616 - protein, 606 aa, Oryza sativa
  Clone ID: TF_OSC900109j.C1.p5.fg
MADKTLSEFAAPSTDNVAIGPQINMGDMDFDLKSSLMTMAQASLFCGKPNEDANAHLQQFLEICSTYTIKGVSPDAIRLRLFPFSLLGRVKQWFYANRATINTWDKCSTAFLSKFFPMGNFYNGLTPVSRNHLDAAAGGTFFSKTVRGAVDLIEKMVSNMGWSEERLQTRQRGMHTVKETELLAAKPDLLMKRLDDHEKRPQGTIKALDSHVTCEVCGNTGHTRNNCPETREEAMYMGNNSSGYRPQGGQGWNQPHPYYQGGRILRQPDSSVENVKAIMMRGGINRTAKEAPSSDSADKEVQPEKTVPPEYYDTRLLPFPQRSRKPSVDEQFAHFVEVIQKIHINVPLLDAMQVVKLTEQCSNIILHKLPEKKKDPGYPTITCSIGAQQFDQALCDLGASVSVMPKDVFNKLNFTVLAPTPMRLQLADSSVRYPAGIAEDVLVKIRDFFIPVDFIVLDMDTGKETPLILGRPFLSTVGANIDMGTGSIRFHINGKEEKFEFQPRTEQSSMVRIKYEPNTQNIQVVEVEPTKMDSLLKFMQNFLEKETTMPRNRYWKTPVKTNTPDKKLEQPAQRKPFSAPKPKKVWKEKPKTPAPSPREMGGKSTN

SEQ ID NO: 19617 - protein, 1524 aa, Oryza sativa
  Clone ID: TF_OSC900229j.C1.p20.fg
METRNGSRDSNNASGSEEPINGARANGASDNSPSPPPENPTIAQVLDNQTQMMTMMMQQMQQQYHQVLQQVQQQAQLQQQNLQFGPPPPQSKLLEFLRVKPPTFSSTTNPIEAHDWLHAVEKKLNLLQCNEQEKVAFATHQLQGPASIWWDNYMVTRPAGAEVTWTEFCHSFNKAQVPEGIVAQKKREFRSLQQGTRTVIEYLHEFNRLARYAPEDVRTDAERQEKFLSGLDDELTNQLISRDYEDFEKLVDKAIRQEEHCNKINRKRKAAQFRTPQGKSQKPRFTMGHHGGPSTMIIRQHRPYHPGNFNKNHHSDSHNNSEQHSLNPTPSSLKIPAQSVQPALTEQPKRLGEKPELCFNCNKPGHTVGKCPKPRRAGPKFVQARVNHASAEEAQSAPEVILGTFPVNSTPAVILFDSGATHSFISKRFAGAHGLSLVKLKIPMRVHTPGGGMTTTHYCPSVTVEIQGLIFPANLILLESKDLDVILGMDWLARHRGVIDCASRTIKLTNAKGEVVIFQSPVPQKPGISLNQAAGEEQEVAVEKTTKKLEDIPIVREYPEVFPDDLTTMPPKRDIEFRIDLVPGTAPIHKRPYRMGANELAEVKKQVDEQLQKGYIRPSTSPWGAPVIFVEKKDKTKRMCVDYRALNEVTIKNKYPLPRIDDLFDQLKGATVFSKIDLRSGYHQLRIREEDIPKTAFITRYGLFECTVMSFGLTNAPAFFMNLMNKVFMEFLDKFVVVFIDDILIYSKSEEEHEQHLRLVLEKLKEHQLYAKFSKCDFWLKEVQFLGHIVNAQGVAVDPANVESVTKWTPPRTVTQVRSFLGLAGYYRRFIENFSKIAKPMTQLLKKEEKFIWSAECNRSFEELKRRLVSAPVLILPDQTKDFQVYCDASRQGLGCVLMQDGKVVSYASRQLRPHEGNYPTHDLELAAVVHALKIWRHYLIGNRCEVYTDHKSLKYIFTQPDLNLRQRRWLELIKDYDMGIHYHPGKANVVADALSRKSYCNVAWVEELCCEVQHDLEHLNLGIVEHGFVAALEAQPTLVEQVRIAQASDPEIAELKKNMRVGKARGFVEDEQGTIWMGERLCVPENKELKDLILTEAHQTQYSIHPGSTKMYQDLKEKFWWVSMRREIAEFVALCDVCQRVKAEHQRPAGLLQPLQIPEWKWEEIGMDFITGLPRTSSGHDSIWVVIDRLTKVAHFIPVHTTYSGKKLAELYLARIMCLHGVPKKIVSDRGSQFTSKFWQKLQEELGTRLNFSTAYHPQTDGQTERVNQILEDMLRACALDFGGAWDKSLPYAEFSYNNSYQASLQMAPFEALYGRRCRTPLFWYQTGERQLFGTEVLNEAEEKVRAVRERLRIAQSRQKSYADNRRRELAFETGDYVYLRVTPLRGVHRFQTKGKLAPRFVGPYRVLERRGEVAYQLELPSNMLGIHNVFHVSQLKKCLRVPEEQASPDQIEIQEDLTYVEKPTRILETSERKTRNKVIRFCKVQWSHHSEEEATWEREDELKATHPHLFASSSESRGRDSV

SEQ ID NO: 19618 - protein, 1562 aa, Oryza sativa
  Clone ID: TF_OSC900288j.C1.p23.fg
MAVKDRFTGNPGRLTVLSTSGSGFDACGLVGGRYHVSVMETRNGSRDSNNASGSEKPINGARANSASDNSPSPPPENPTIAQVLDNQTQMMTMMMQQMQQQYHQVLQQVQQQAQLQQQNLQFGSPPPQSKLLEFLRVKPPTFSSTTNPIEAHDWLHAIEKKLNLLQCNEQEKVAFATHQLQGPASIWWDNYMVTRPAGAEVTWTEFRHSFNKAQVPEGIVAQKKREFRSLQQGTRTVIEYLHEFNLLARYAPEDVRTDAERQEKFLSGLDDELTNQLISRDYEDFEKLVDKAIRQEEHCNKINRKRKAAQFRTPQGKSQKPRFTMGRHGGPSTMIIRQHRPYHPGSFNKNHHNGSHNNSEQHSLNPTPSSLKIPAQSVQPALPEQPKRLGEKPELCFNCNKPGHTVGKCPKPRRAGPKFVQARVNHASAEEAQSAPEVILGTFPVNSTPAVILFDSGATHSFISKRFAGAHGLSLVKLKIPMRVHTPGGGMTTTHYCPSVTVEIQGLIFPANLILLESKDLDVILGMDWLTRHRGVIDCASRTIKLTNAKGEVVTFQSLVPRKPGISLNQAAGEEQEVAVEKTTKKLEDIPIVREYPEVFPDDLTTMPPKRDIEFRIDLVPGTAPIHKRPYRMGASELAEVKKQVDEQLQKGYIRPSTSPWGAPVIFVEKKDKTKRMCVDYRALNEVTIKNKYPLPRIDDLFDQLKGVTVFSKIDLRSGYHQLRIREEDIPKTAFITRYGLFECTVMSFGLTNAPAFFMNLMNKVFMEFLDKFVVVFIDDILIYSKSEEEHEQHLRLVLEKLKEHQLYAKFSKCDFWLKEVQFLGHIVNAQGVAVDPANVESVTKWTPPRTVTQVRSFLGLAGYYRRFIENFSKIAKPMTQLLKKEEKFIWSAECNRSFEELKRRLVSAPVLILPDQTKDFQVYCDASRQGLGCVLMQDGKVVSYASRQLRPHEGNYPTHDLELAAVVHALKIWRHYLIGNRCEVYTDHKSLKYIFTQPDLNLRQRRWLELIKDYDMGIHYHPGKANVVADALSRKSYCNVAWVEQLCGEVQRDLEHLNLGIVEHGFVAALEAQPTLVEQVRIAQASDPEIAELKKNMRVGKARGFVEDEQGTIWMGERLCVPENKELKDLILTEAHQTQYSIHPGSTKMYQDLKEKFWWVSMRREIAEFVALCDVCQRVKAEHQRPAGLLQPLQIPEWKWEEIGMDFITGLPRTSSGHDSIWVVVDRLTKVAHFIPVHTTYSGKKLAELYLSRIMCLHGVPKKIVSDRGSQFTSKFWQKLQEELGTRLNFSTAYHPQTDGQTERVNQILEDMLRACALDFGGAWDKSLPYAEFSYNNSYQASLQMAPFEALYGRRCRTPLFWDQTGERQLFGTEVLNEAEEKVRAVRERLRIAQSRQKSYADNRRRELVFQVGDYVYLRVTPLRGVHRFQTKGKLAPRFVGPYRILERRGEVAYQLELPSNMLGIHNVFHVSQLKKCLRVPEEQASPDQIEIQEDLTYVEKPTRILETSERKTRNKVIRFCKVQWSHHSEEEATWEREDELKATHPHLFASSSESRGRDSV

SEQ ID NO: 19619 - protein, 1458 aa, Oryza sativa
  Clone ID: TF_OSC900332j.C1.p23.fg
MVKTRNGSCDSNNASGSKEQISGACASDAPNSSSSPLPENLTIAQVLDNQTQMMTMMMQQMQQQYHQVLQQVQQQAQQQQQNLQFGLQPPQSKLLEFLRIKPPTFSSTTNPIEANDWLYAIEKKLNLLQCNEQEKVAFATHQLQGPASVWWDNYMVTRPAGTEVTWESWHRRREFRSLQQGTRTVIEYLHEFNRLARYAPEDVRTDDERQEKFLSGLDDELTNQLISRDYEDFEKLVDKAIRQEEHCNKINRKRKAAQFRTPQGKSQKPRFTMGRQGGPSTMIIRQHRPYHPGSFNKNHHSGSHNNSEQHSLNPSPSSLKIPAQSVQPALPKQPKRLGEKPELCFNCNKPGHTVGKCPKPRRAGPKFVQARVNHASAEEAQSAPERFAGAHGLSLVKLKIPMRVHTPGGGMTTTHYCPSVIVEIQGLIFPANLILLESKDLDVILGMDWLTRHRGVIDCASRTIKLTNAKGEVVTFQSPVPQKPGISLNQAAGEEQEVAVEETTKKLEDIPIVREYPELFPNDLTTMPPKRDIEFRIDLVPGTAPIHKRPYRMGANELAEVKKQVDEQLQKGYIRPSTSPWGAPVIFVEKKDKTKRMCVDYRALNEVTIKNKYPLPRIDDLFDQLKGATVFSKIDLRSGYHQLRIREEDIPKTAFITRYGLFECTVMSFGLTNAPAFFMNLMNKVFMEFLDKFAVVFIDDILIYSKSEEEHEQHLQLVLEKLKEHQLYAKFSKCDFWLKEVQFLGHIVNAQGVAVDPANMESVTKWTPPRTVTQVQSFLGLAGYYRWFIENFSKIAKPMTQLLKKEEKFIWSAECNRSFEELKRRLVSAPVLILPDQTKNFQVYYDASRQGLGCVLMQDGKVVSYASRQLRPHEGNYPTHDLELAAVVHALKIWRHYLIGNRCEVYTDHKSLKYIFTQPDLNLRQRRWLELIKDYDMGIHYHPSKANVVADALSRKSYCNVAWAQPTLVEQVRIAQASDPEIAELKKNMRVGKARGFVEDEQGTIWMGERLCVPKNKELKDLILIEAHQTQYSIHPGSTKMYQDLKEKFWWVSMRREIAEFVALCDVCQRVKAEHQRPAGLLQPLQIPEWKWEEIGMDFITGLPRTSSGHDSIWVVVDRLTKVAHFIPVHTTYSGKKLAELYLARIMCLHGVPKKIVSDRRSQFTSKFWQKLQEELGTRLNFSTAYHPQTDGQTERVNQILEDMLRACALDFGGAWDKSLPYAEFSYNNSYQASLQMAPFEALYGRKCRTPLFWDQTGERQLFGTEVLNEAEEKVRAVRERLRIAQSRQKSYADNRRRELVFQAGDYVYLCVTPLRGVHRFQTKGKLAPRFVGPYRILERRGEVAYQLELPSNMLGIHNVFHVSQLKKCLRVPEEQASPDQIEIQEDLTYVEKPTRILETSERRTRNKVIRFCKVQWSHHSEEEATWEREDELKATHPHLFASSFESRGRDSVCHTLK

SEQ ID NO: 19620 - protein, 1600 aa, Oryza sativa
  Clone ID: TF_OSC900357j.C1.p5.fg
MAVKDRFTGNPGRLTVLTTSGSGCFTAFNYCFEMPALCKRTPSFLWLYPASYLLFRAEDLPSWSCFIEVGFVAAVKMEIRNGSRDSNNASGSEEPINGARANGASDNSPSPPPENPTIAQVLNNQTQMMTMMMQQMQQQYHQVLQQVQQQAQPQQQNLQFGPPPPQSKLLEFLRVKPPTFSSTTNPIEAHDWLHAIEKKLNLLQCNEQEKVAFATHQLQGPASVWWDNYMVTRPTGAEVTWTEFRHSFNKAQVPEGIVAQKKREFRSLQQGTRTVIEYLHEFNRLARYAPEDVRTDAERQEKFLSGLDDELTNQLISRDYEDFEKLVDKAIRQEEHCNKINRKRKAAQFRTPQGKSQKPRFTMGHHGGPSTMIIRQHRPYHPGNFNKNHHSDSHNNSEQHSLNPTPSSLKIPAQSVQPALPEQPKRLGEKPELCFNCNKPGHTVGKCPKPRRAGPKFVQARVNHASAEEAQSAPEVILGTFPVNSTPAVILFDSGATHSFISKRFAGAHGLSLVKLKIPMRVHTPGGGMTTTHYCPSVTVEIQGLIFPANLILLESKDLDVILGMDWLARHRGVIDCASRTIKLTNAKGEVVIFQSPVPQKPGISLNQAAGEEQEVAVEKTTKKLEDIPIVREYPEVFPDDLTTMPPKRDIEFRIDLVPGTAPIHKRPYRMGANELAEVKKQVDEQLQKGYIRPSTSPWGAPVIFVEKKDKTKRMCVDYRALNEVTIKNKYPLPRIDDLFDQLKGATVFSKIDLRSGYHQLRIREEDIPKTAFITRYGLFECTVMSFGLTNAPAFFMNLMNKVFMEFLDKFVVVFIDDILIYSKSEEEHEQHLRLVLEKLKEHQLYAKISKCDFWLKEVQFLGHIVNAQGVAVDPANVESVTKWTPPRTVTQVRSFLGLAGYYRRFIENFSKIAKPMTQLLKKEEKFIWSAECNRSFEELKRRLVSAPVLILPDQTKDFQVYCDASRQGLGCVLMQDGKVVSYASRQLRPHEGNYPTHDLELAAVVHALKIWRHYLIGNRCEVYTDHKSLKYIFTQPDLNLRQRRWLELIKDYDMGIHYHPGKANVVADALSRKSYCNVAWVEELCGEVQRDLEHLNLGIVEHGFVAALEAQPTLVEQVRIAQASDPEIAELKKNMRVGKARGFVEDEQGTIWMGERLCVPENKELKDLILTEAHQTQYSIHPGSTKMYQDLKEKFWWVSMRREIAEFVALCDVCQRVKAEHQRPAGLLQPLQIPEWKWEEIGMDFVTGLPRTSSGHDSIWVVVDRLTKVAHFIPVHTTYSGKKLAELYLARIMCLHGVPKKIVSDRGSQFTSKFWQKLQEELGTRLNFSTAYHPQTDGQTERVNQILEDMLRACALDFGGAWDKSLPYAEFSYNNSYQASLQMAPFEALYGRRCRTPLFWDQTGERQLFGTEVLNEAEEKVRAVRERLRIAQSRQKSYADNRRRELAFETGDYVYLRVTPLRGVHRFQTKGKLAPRFVGPYRVLERRGEVAYQLELPSNMLGIHNVFHVSQLKKCLRVPEEQASPDHIEIQEDLTYVEKPTRILETSERRTRNKVIRFCKVQWSHHSEEEATWEREDELKATHPHLFASSSESRGRDSV

SEQ ID NO: 19621 - protein, 892 aa, Oryza sativa
  Clone ID: TF_OSC14567j.C1.p1.fg
MASGNDMWDALEAKFGVSDASSELYVMEKFYDYKMVDDRSVVEQAHEIQMLAKELENNNCELPDKFVAGGIIAKLPPFWSDFVTSLKHKRQEFSVSDLIGSLGVEENARAKDNLGKKVERGSSANMVQKKNPQASHNNKKVKPDVKPKATTNFKKKGKGKAKGDCFVSRKSGHWAKDCPERKDRKSANMVISKGGGTSGYGKILPTVLSFFHSPNWWVDIGANIHVGRGFSLLMRKGSLAAVHGVGSKCHTCVQSKQPRKPHKASEARDLAPLELVHSDLREMNGVLTKGGKKYFMTLIDDCTRFCYVYLLKTKDEALHYFKTYKAEVETQVERKIKRLSSDRSGEYFSNEFTSFCEEFGIIHERTPPYSPQSNGVAERKNHTLTKLHKEVTPFEEWEMKKLNLSYLRTWDCLAKSRDATFFENEFPMKNTPSTSSQEIVIPHQHFAPIKHNDQTPEGNPEEDKIVDTRKRCKWVFKKKLRPDGTIEKYKARLVAKGYTQKEGEEFFDTYSPVARLTTIRVLLALAASHGLLVHQMDVKTAFLNRELEEEIYMDQLDEYVLEGQEGIVCKLLKSLCGLKQASKQWHEKFDTTLISAGFVVNEADKCVYYRYGGGEEVILCLYVDDILIFGTSLNVIEEVKDFLSKSFEMKDLGEADVILNIKLLRGDEGMITLVKSYYMDKILSRFGYSDCKPAATPYDPSALERVMRYLNDTISYGIHTTGYPKVLEGYSDSNWIYDADEIKATSGYVFTLGGGAVSWKSCKQIILTRSTMEAELTALDTATVEAEWLRELLMDLPVVEKPVPAILMNCDNQTVIIKVISSKDNMKSSRHIKRRLKYVRKQKNSGVIALDYVQTAKNLDGLCLNVVQVAFLSRDIDLQNISEGTHLYEFDC

SEQ ID NO: 19622 - protein, 232 aa, Oryza sativa
  Clone ID: TF_OSC17650j.C1.p1.fg
MSVTEYLHEFNRLARYAPDDVRTDAEKQEKFLFGLDDELTNQLISGVYEDFEKLVDKAIRQEEQRNKIDRKRKTAQISFPQGNNQKPRFMTGQLGGPSTLIVCQHHPYHPSNFDNDYNGGSHNNSKQHNHNSTPPPLMAPAQSDPPAVSAQSEQPKKGAVGKPGHCFNCGKHGHFAGKCPKLNRTGPRLIQARANHVSAEEAQAAPEVVLGTFPVNSYPATVLFDSGSYPWK

SEQ ID NO: 19623 - protein, 207 aa, Oryza sativa
  unsure (1)..(207): unsure at all Xaa locations
  Clone ID: TF_OSC400321j.C1.p36.np
MSPLALRHFLVKWFKILLPVPLILLAVKPRTSHQLCACLEVKSSXASSFVQRARQMVSMRDNFIESGPCQFHGATQCNSNSIPHQPLEDQPQPQVMANQTQTVEELLQQMRRRYQIYQMQRQCQESRQCHQPQVQVQMPAQNPNQSQSQEFPILAPKTPVKMLSRSPKITTAKSSSDQRKVSATCYDCGEQGHYVRNCPWKVFARSP

SEQ ID NO: 19624 - protein, 1303 aa, Oryza sativa
  Clone ID: TF_OSC401128j.C1.p12.fg
MAQSMVPVFAGENYDIWSIKMRTLLLSQGLWDIVENGYQEYSAGETLTAEQKKSLAEDRMSDAKALFLIQQGVAESLFPRIIGAKKSKEAWDKLKEEFQGSQKVLAVKLQTLRRQFQNLLMKESEKVKDYFSRVIEIVNQMRLYGEDINDQKVVEKILISLPEKYEYIVAAIEESKDLSTLTIQQLMSSLESHEERKLQREGSSIENAFQSKLSFRPQNSRFRGNFQKNGFPMRDRGYFQKNGFSRQKEDGQERREKGTSSSNLWCDICQKSSHTTDMCWKKMTCNKCKRKGHIAKYCRTREINRANFSQEKEKSEEMVFSCHTAQEEKDDVWVIDSGCTNHMAADPNLFREMDSSYHAKIHMGNGSIAQSEGKGTVAVQTADGPKFIKDVLLVPDLKQNLLSIGQLLEHGYAVYFEDFSCKILDRKNNRLVAKINMEKNRNFLLRMNHTTQMALRSEVDISDLWHKRMGHLNYRALKLLRTKGMVQGLPFITLKSDPCEGCVFGKQIRASFPHSGAWRASAPFELVHTDIVGKVPTMSEGGNWYFITFIDDYTRMIWVYFLKEKSAALETFKKFKVMVENQSNRKIKVLRSDQGGEYISKEFEKYCENAGIRRQLTTGYSAQQNGVAERKNRTINDMANSMLQDKGMPKSFWAEAVNTAVYILNRSPTKAVPNRTPFEAWYGKKPVIGHMRVFGCICYAQVPAQKRVKFDNKSDRCIFVGYADGIKGYRLYNLEKKKIIISRDVIFDESATWNWKSPEASSTPLLPTTTITLGQPHMHGTHEVEDHTPSPQPSSPMSSSSASSDSSPSSEEQISTPESAPRRVRSMVELLESTSQQRGSEQHEFCNYSVVEPQSFQEAEKHDNWIKAMEDEIHMIEKNNTWELVDRPRDREVIGVKWVYKTKLNPDGSVQKYKARLVAKGFKQKPGIDYYETYAPVARLETIRTIIALAAQKRWKIYQLDVKSAFLNGYLDEEIYVEQPEGFSVQGGENKVFRLKKALYGLKQAPRAWYSQIDKYFIQKGFAKSISEPTLYVNKTGTDILIVSLYVDDLIYTGNSEKMMQDFKKDMMHTYEMSDLGLLHYFLGMEVHQSDEGIFISQRKYAENILKKFKMDNCKSVTTPLLSNEKQKARDGADKADPTIYRSLVGSLLYLTATRPDIMFAASLLSRYMSSPSQLNFTAAKRVLRYIKGTADYGIWYKPVKESKLIGYTDSDWAGCLDDMKSTSGYAFSLGSAEAEYVAASKAVSQVVWLRRIMEDLGEKQYQPTTIYCDSKSAIAISENPVSHDRTKHIAIKYHYIREAVDR

SEQ ID NO: 19625 - protein, 1055 aa, Oryza sativa
  Clone ID: TF_OSC412754j.C1.p1.fg
MAQSMVPVFARENYDIWSIKMRTLLLSQGLWDIVENGYQEYSAGETLTAEQKKSLVEDRMSDAKALFLIQQGVAESLFPRIIGAKKSKEAWDKLKEEFQASQKVLAVKLQTLRRQFQNLQMKESEKVKDYFSRVIEIVNQMRLYGEDINDQKVVKKILISLPEKYEYIVAAIEESKDLSTLTIQQLMSSLESHEERKLQREGSSVENAFQSKLSFRPQNSRFRGNFQKNGFPMRDRGFQKNGFSRQNEYGQERREKGTSSSNLWCDICQKSSHTTYMCWKKMTCNKCKRKGHIAKYCRTREINRANFSQEKEKSEEMVFSCHTAQEEKDDVWVIDSGCTNHMAADPNLFREMDSSYHAKIHMGNGSIAQSKGKALEIFKKFKAMVENQSNRKIKVLRSDQGGEYISKEFEKYCENAGIRRQLTAGYSAQQNGVAERKNRTINDMANSMLQDKEVLPRQYQTVHLLKLGMANHICKVLMKWNIILQVHSHQVQGQAQVLVQIQAQAVKSKFLTPESAPRRVRSMVELLESTSQQRGSEQHEFCNYSVVEPQSFQEAEKHDNWIKAMEDEIHMIEKNNTWELVDRPRDREVIGVKWVYKTKLNPDGSVQKYKARLVAKGFKQKPGIDYYETYAHVARLETIHTIIALAAQKRWKIYQLDVKSAFLNGYLDEEIYVEQPERFSVQGGENKVFRLKKALYGLKQAPRAWYSQIDKYFIQKGFAKSISEPILYVKKTGTDILIVSLYVDDLIYTGNSEKLMQDFKKDMMHTYEMSDLGLLHYFLGMEVHQSDEGIFISQRKYAENILKKFKMDNCKSVTTPLLPNEKQKARDGADKADPTIYRSLVGSLLYLTATRPDIMFAASLLSRYMSSPSQLNFTAAKRVLRYIKGTAYYGIWYKPVKESKLIGYTDSDWAGCLDDMKSTSGYAFSLGSGMWSWSTKKQNIVALSSAEAEYVAASKAVSQVVWLRRIMEDLGEKQYQPTTIYCDSKSAIAINENPVSHDRTKHIAIKYHYIREAVDRQEVKLEFCRTDEQLADIFTKALSKEKFICDRELIGVCKK

SEQ ID NO: 19626 - protein, 1441 aa, Oryza sativa
  unsure (1)..(1441): unsure at all Xaa locations
  Clone ID: TF_OSC416742j.C1.p2.np
SSATSSCTISSPPPPTPAPSGAGTGAPGAGAPIDNTNGGSSASQSSGGTFTGYNSLLLLRFLLFRLVTMLLRSMYMMVLIISEACSCMFDFITRSTHIVHAMIIVLIFWIKICXYMTISPTIQKPDRSFSVVGFAAALKPHAFDGSNYKRWKARILLWLTAMQCFYVSRGKRSEPPLSPKEEVMFEASDCLFRGALINVLADNIVDMYMHMPLGKDMWDALEAKFGVSDASSELYVMEQFFDYKMVDDRSVVEQAHEIQMLAKELENNNCELPDKFVARGIIAKLPPSWSDFATSLKRKRQEFSVSDLIGSLGVEEKARAKDNRGKKVEGGSSANMVQKKNPHASHNNKKVKPDVKPKATTNFKKKGKGKAKGDCFMCGKSGYWAKDCPERKDRKSANMVISEGGGTWGYDKILPTVLSVFHSPDWWIDIGANIHVCVDISLFSSYQVGRGSFLLMGNGSLAAVHGVGTVDLKFTSGKTVQLKNVQHIPSIKKNLVSGSLLCREDFRLVFESNKCVVSKYGTFIGKGYDSGGLFRFSLDDMCNNNNVVNHISENDESNVWHSLLCHVNFGCMTRLANMSLIPKFTLVKCFKCHTCVQSKQPRKPHKASEARDLAPLELVHSDLCEMNGVLTKGGKKYFMTLIDNCTRFCYVSLLKTKDEALHYFKTYKAKVENQLERKIKRLRSDRGGEYFSNEFTSFYEEFGIIHERTSPYSPQSNGIAERKNRTLTEMVNAMLDTAGLSKEWWGEAVLIACHVLNKIPMKHKEVTPFEEXERKKLNLSYLRTWGCLAKVNVPIAKKRKLGPNTVDCVFLGYAIHSVGYIFLIVNSGVPDMRVGTIIESRDATFFENEFPMKNTPSTSSQETVIPHEHFAPIEHNDQTPEGNPEEDNIVDTRKSKRQRVAKSFGDDYILYLVDDTPRTIEEAYSSPDADXWKEAVRSEIDSIMSNGTXEVVEHPYGCKPVGCKWVFKKKLRPDGTIEMYKARLVAKGYTQKEGKFFDTYSPVARLTTIQVLLALAASHGLLVHQMDVKTAFLNGKLEEEIYMDQPDWYVLEGQEGMVCKLLKSLYGLKQAPKQWHEKFDTTLTSAGFVVNKADECVYYRYGGGEGVILCLYVDDILIFGTSLNVIEEIKDFLSKSFEMKDLRESDIILTMKLLRGDEGGITLVQSHYVDKVLTLTPYDPSVLLRKNRRIARDQLRHYVDKVLTLTPYDPSVLLRKNRRIARDQLRYSQIIGSLMYLASAMRPDISFAASKLSRFVSNPGDDHWQALERVMRYLKGTMSYGIHYTXYPKVLEGYSDSNWISDADEIKATSGYVFTLGGGVVSWKTCKQTILTRSTMEAXLTALDTTTVEADXLRELLMDLLVVEKPVPAILMNCDNQTSKDNMKSSRHIKRRLKSVRKQKNSAVIALDYVQTARNPRWRSLRKQSKNRLESRSAESELDED

SEQ ID NO: 19627 - protein, 1060 aa, Oryza sativa
  Clone ID: TF_OSC8881j.C1.p1.fg
MTCNKCKRKGHIAKYCRTREINRANFSQEKEKSEEMVFSCHTAQEEKDDVWVIDSGCTNHMAADPNLFREMDSSYHAKIHMGNGSIAQSEGKGTVAVQTADGPKFIKDVLLVPDLKQNLLSIGQLLEHGYAVYFEDFSCKILDRKNNRLVAKINMEKNRNFLLRMNHPTQMALRSEIDISDLWHKRMGHLNYRALKLLRTKGMVQGLPFITLKSDPCEGCVFGKQIRASFPHSGAWRASAPLELVHTDIVGKVPTISEGGNWYFITFIDDYTRMIWVYFLKEKSAALEIFKKFKAMVENQSNRKIKVLRSDQGGEYISKEFEKYCENAGIRRQLTAGYSTQQNGVAERKNRTINDMANSMLQDKGMPKSFWAEAVNTAIYILNRSPTKAVPNRTPFEAWYGKKPVIGHMRVFGCICYAQVPAQKRVKFDNKSDRCIFVGYADGIKGYRLYNLEKKKIIIIRDVIFDESATWNWKSPEASSTPLLPTTTITLGQPHMHGTHEVEDHTPSPQPSSPMSSSSASSDSSPSSEEQISTPESAPRRVRSMVELLESTSQQRGSEQHEFCNYSVVEPQSFQEAEKHDNWIKAMEDEIHMIEKNNTWELVDRPRDREVIGVKWVYKTKLNLDGSVQKYKARLVAKGFKQKPGIDYYETYAPVARLETIRTIIALAAQKRWKIYQLDVKSAFLNGYLDEEIYVEQPEGFSVQGGENKVFRLKKALYGLKQAPRVWYSQIDKYFIQKGFAKSISEPTLYVNKTGTDILIVSLYVDDLIYTGNSEKMMQDFKKDMMHTYEMSDLGLLYYFLGMEVHQSDEGIFISQRKYAENILKKFKMDNCKSVTTPLLPNEKQKARDGADKVDPTIYRSLVGSLLYLTATRPDIMFAASLLSRYMSSPSQLNFTAAKRVLRYIKGTADYGIWYKPVKESKLIGYTDSDWAGCLDDMKGTSGYAFSLGSAEAEYVAASKAVSQVVWLRRIMEDLGEKQYQPTTIYCDSKSAIAISENPVSHDRTKHIAIKYHYIREAVDRQEVKLEFCRTDEQLADIFTKALSKEKFVRDRELIGVCKK

SEQ ID NO: 19628 - protein, 1198 aa, Oryza sativa
  Clone ID: TF_OSC900080j.C1.p8.fg
MAQSMVPVFAGENYDIWSIKMRTLLLSQGLWDIVENGYQEYSAGETLTAEQKKSLAEDRMSDAKALFLIQQGVAESLFPRIIGAKKSKEAWDKLKEEFQGSQKMRLYGEDINDQKVVEKILISLPEKYEYIVAAIEESKDMLTLTIQQLMSSLESHEERKLQREGSSIENAFQSKLSFRPQNSRFRGNFQKNEFPMRDRGYFQKNGFSRQKEDGQERREKDMCWKKMTCNKCKRKGHIAKYCRTREINRANFSQEKEKSEEMVFSCHTAQEEKDDVWVIDSGCTNHMAADPNLFREMDSSYHAKIHMGNGSIAQSEGKGTVAVQTADGPKFIKDVLLVPDLKQNLLSIGQLLEHGYAVYFEDFSCKILDRKNNRLVAKINMEKNINFLLRMNHPTQMALRSEIDISDLWHKRMGHLNYRALKLLRTKGMVQGLPFITLKSDPCEGCVFGKQIRASFPHSGAWRASAPLELVHTDIVGKVPTISEGGNWYFITFIDDYTRMIWVYFLKEKSAALEIFKKFKAMVENQSNRKIKVLRSDQGGEYISKEFEKYCENAGIRRQLTAGYSAQQNGVAERKNRTINDMANSMLQDKGMPKSFWAEAVNTAIYILNRSPTKAVPNRTPFEAWYGKKPVIGHMRVFGCICYAQVPAQKRVKFDNKSDRCIFVGYADGIKGYRLYNLEKKKIIISRDVIFDESATWNWKSPEASIVEPQSFQEAEKHDNWIKAMEDEIHMIEKNNTWELVDRPRDREVIGVKWVYKTKLNPDGSVQKYKARLVAKGFKQKPGIDYYETYAPVARLETIRTIIALAAQKRWKIYQLDVKSAFLNGYLDEEIYVEQPEGFSVQGGENKVFRLKKALYGLKQAPRAWYSQIDKYFIQKGFAKSISEPTLYVNKTGTDILIVSLYVDDLIYTGNSEKMMQDFKKDMMHTYEMSDLGLLHYFLGMEVHQSDEGIFISQRKYAKNILKKFKMDNCKSVTTPLLPNEKQKARYGADKADPTIYRSLVGSLLYLTATRPDIMFAASLLSRYMSSPSQLNFTAAKRVLRYIKGTADYGIWYKPVKESKLIGYTDSDWAGCLDDMKSTSSYAFSLGSAEAEYVAASKAVSQVVWLRRIMEDLGEKQYQPTTIYCDSKSAIAISENPVSHDRTKHIAIKYHYIREAVDRQEVKLKFCRTDEQLADIFTKALSKEKFVRDRELIGVCKK

SEQ ID NO: 19629 - protein, 1335 aa, Oryza sativa
  Clone ID: TF_OSC900089j.C1.p25.fg
MAQSMVPVFAGENYDIWSIKMRTLLLSQGLWDIVENGYQEYSAGETLTAEQKKSLAEDRMSDAKALFLIQQGVAESLFPRIIGAKKSKEAWDKLKEEFQGSQKVLAVKLQTLRRQFQNLLMKESEKVKDYFSRVIEIVNQMRLYGEDINDQKVVEKILISLPEKYEYIVAATEESKDLSKDSLESHEERKLQREGSSIENAFQSKLSFRPQNSRFRGNFQKNGFPMRDRGYFQKNGFSRQKEDGQERREKGTSSSNLWCDICQKSSHTTDMCWKKMTCNKCKRKGHIAKYCRTREINRANFSQEKEKSEEMVFSCHTAQEEKDDVWVIDSGCTNHMAADPNLFREMDSSYHAKIHMGNGSIAQSEGKGTVAVQTADGPKFIKDVLLVPDLKQNLLSIGQLLEHGYAVYFEDFSCKILDRKNNRLVAKINMEKNRNFLLRMNHTTQMALRSEVDISDLWHKRMGHLNYRALKLLRTKGMVQGLPFITLKSDPCEGCVFGKQIRASFPHSGAWRASAPLELVHADIVGKVPTISEGGNWYFITFIDDYTRMIWVYFLKEKSAALEIFKKFKAMVENQSNRKIKVLRSDQGREYISKEFEKYCENAGIRRQLTAGYSAQQNGVAERKNRTINDMANSMLQDKGMPKSFWAEAVNTAVYILNRSPTKAVTNRTPFEAWYGKKPVIGHMRVFGCICYAQVPAQKRVKFDNKSDRCIFVGYADGIKGYRLYNLEKKKIIISRDAIFDESATWNWKSPEASSTPLLPTTTITLGQPHMHGTHEVEDHTPSPQPSSPMSSSSASSDSSPSSEEQISTPESAPRRVRSMVELLESTSQQRGSEQHEFCNYSVVEPQSFQEAEKHDNWIKAMEDEIHMIEKNNTWELVDRPRDREVIGVKWVYKTKLNPDGSVQKYKARLVAKGFKQKPGIDYYETYAPVARLETIRTIIALAAQKRWKIYQLDVKSAFLNGYLDEEIYVEQPEGFSVQGGENKVFRLKKALYGLKQAPRAWYSQIDKYFIQKGFAKSISEPTLYVNKTGTDILIVSLYVDDLIYTGNSEKMMQDFKKDMMHTYEMSDLGLLHYFLGMEVHQSDEGIFISQRKYAENILKKFKMDNCKSVTTPLLPNEKQKARDGADKADPTIYRSLVGSLLYLTATRPDIMFAASLLSRYMSSPSQLNFTAAKRVLRYIKGTADYGIWYKPVKESKLIGYTDSDWAGCLDDMKSTSGYAFSLGSAEAEYVAASKAVSQVVWLRRIMEDLGEKQYQPTTIYCDSKSAIAISENPVSHDRTKHIAIKYHYIREAVDRQEVKLEFCRTDEQLADIFTKALSKEKFVRDRELIGVCKK

SEQ ID NO: 19630 - protein, 1515 aa, Oryza sativa
  unsure (1)..(1515): unsure at all Xaa locations
  Clone ID: TF_OSC900147j.C1.p12.np
MVKTRNDPRDSNDTSGSEEQIDGAHTSGASGSSSSPPPENPTVTQMMTMMMQQMQQHYHQMLQQAQQNQQFGPPPSRLSRLLEFLRIQPPTFSSTTNPMEANDWLRAIEKKLNLLQCNDQEKVAFATHQLQGSASAWWDNYVVTRPATMEVTWAEFCQSFRKAQILEGIMAQRKREFRALXQGTRTVTEYLHEFNRLARYAPEDVRTDAEKQEKFLFGLDDELTNQLISGVYEDFEKLVDKAICLEEQRNKMDCKRKAAQIRTPQGNNQKPRFMMGQLGGPSTLIVRQHHPYNPGNFNNDYNGGSHNNSEQHHHNLTPPPLMAPAESELPAMSAQLEQLKKESAGKPRPYFNCGKLGHFAGKCPKRKRAGPRFVQARVNHASAEEAQAAPEVVLGTFLVNLFLATILFDSGASHSFISKRFAGTHGLSVVELKIPMRVHTPGNDMNTAHYCPATIEIKRSQFQSNLILLESKDLDVILGMDWLTRHKGVIDCASRTITLTNDKGEKITFRSPVPQKSVASLNQAAIEDQTEIAEKSPQKLEDIPIVQEYPEVFPEDLTTMPPKREIEFRIDLAPGTAPIYKRPYRMAANELAEVKKQVDEQLQKGYIRPSTSPWGAPVIFVEKKDKTKRMCVDYRALNEVTIKNKYPLPRIDDLFDQLKGAKVFSKIDLRSGYHQLRIQEEDIPKTAFTTRYGLFECTVMSFGLTNAPVFFMNLMNKVFMEFLDKFVVVFIDDILIYSKSEEEHEQHLRLVLEKLKEHQLYTKFSKCDFWLSEVKFLGHVITTQGVAVDPSNVESVTKWTPPKTVSQIRSFFGLAGYYRRFIENFSKIARPMTQLLKKDEKFKWSAECNQSFEELKKKLVSAPVLILPDQTKDFQVYYDASRQGLGCLLLXEGRVVAYASRQLRPHETNYPTHDLELAPVVHALKIWRHYLIGNRCEVYTDHKSLKYIFTQSDLNLRQRRWLELIKDYDMGIHYHPGKANVVADALSRKSYCNAVCTEGMCDKLQQDLEHINLGIVEHGFAAALEARPTLVDQVRAAQVNDPEIAELKKNMRFGKARDFHEDEHDTIWLGERLCVPDDKELKDLILTEAHQTQYSIHPGSTKMYQDLKEKFWWASMRREIAEFVALCDICQRVKAEHQRPVGLLQPLQIPEWIWEEIGMDFITGLPRTSSGHDSIWVVVDRLTKVAHFIPVNTTYTGKSLAELYLARIMCLHGVPKKIVSDRGSQFTSKFWQKLQEELGTRLNFSTAYHPQTDGQTERVNQILDDMLRACALDFGGAWDKSLPYAEFSYNNSYQASLQMTPFEALYGRKCRTLLFWDQTGERQLFGTEVLTEAEEKVRTVRERLRITQSRQKSYADNRRRELSFEAGDYVYLHVTPLRGVHRFQTKGKLAPRFVGPYRILERRGEVTYQLKLPSNMAGIHDVFHVSQLKKCLRVPEEQADSEHIDIQEDLTYVVKPIGILETSERRTRNKVIRFCKVQRSHHSEEEATXEREDELKAAHPHLFASSFESRGRDSV

SEQ ID NO: 19631 - protein, 1364 aa, Oryza sativa
  unsure (1)..(1364): unsure at all Xaa locations
  Clone ID: TF_OSC900329j.C1.p22.np
TWAEFCQSFRKAQILEGIMAQRKREFRALXQGTRTVTEYLHEFNRLARYAPEDVRTDAEKQEKFLFGLDDELTNQLISGVYEDFEKLVDKAICLEEQRNKMDCKRKAAQIRTPQGNNQKPRFMMGQLGGPSTLIVRQHHPYNPGNFNNDYNGGSHNNSEQHHHNLTPPPLMAPAESELPAMSAQLEQLKKESAGKPRPYFNCGKLGHFAGKCPKRKRAGPRFVQARVNHASAEEAQAAPEVVLGTFLVNLFLATILFDSGASHSFISKRFAGTHGLSVVELKIPMRVHTPGNDMNTAHYCPATIEIKRSQFQSNLILLESKDLDVILGMDWLTRHKGVIDCASRTITLTNDKGEKITFRSPVPQKSVASLNQAAIEDQTEIAEKSPQKLEDIPIVQEYPEVFPEDLTTMPPKREIEFRIDLAPGTAPIYKRPYRMAANELAEVKKQVDEQLQKGYIRPSTSPWGAPVIFVEKKDKTKRMCVDYRALNEVTIKNKYPLPRIDDLFDQLKGAKVFSKIDLRSGYHQLRIQEEDIPKTAFTTRYGLFECTVMSFGLTNAPVFFMNLMNKVFMEFLDKFVVVFIDDILIYSKSEEEHEQHLRLVLEKLKEHQLYTKFSKCDFWLSEVKFLGHVITTQGVAVDPSNVESVTKWTPPKTVSQIRSFFGLAGYYRRFIENFSKIARPMTQLLKKDEKFKWSAECNQSFEELKKKLVSAPVLILPDQTKDFQVYYDASRQGLGCLLLXEGRVVAYASRQLRPHETNYPTHDLELAPVVHALKIWRHYLIGNRCEVYTDHKSLKYIFTQSDLNLRQRRWLELIKDYDMGIHYHPGKANVVADALSRKSYCNAVCTEGMCDKLQQDLEHINLGIVEHGFAAALEARPTLVDQVRAAQVNDPEIAELKKNMRFGKARDFHEDEHDTIWLGERLCVPDDKELKDLILTEAHQTQYSIHPGSTKMYQDLKEKFWWASMRREIAEFVALCDICQRVKAEHQRPVGLLQPLQIPEWIWEEIGMDFITGLPRTSSGHDSIWVVVDRLTKVAHFIPVNTTYTGKSLAELYLARIMCLHGVPKKIVSDRGSQFTSKFWQKLQEELGTRLNFSTAYHPQTDGQTERVNQILDDMLRACALDFGGAWDKSLPYAEFSYNNSYQASLQMTPFEALYGRKCRTLLFWDQTGERQLFGTEVLTEAEEKVRTVRERLRITQSRQKSYADNRRRELSFEAGDYVYLHVTPLRGVHRFQTKGKLAPRFVGPYRILERRGEVTYQLKLPSNMAGIHDVFHVSQLKKCLRVPEEQADSEHIDIQEDLTYVVKPIGILETSERRTRNKVIRFCKVQRSHHSEEEATXEREDELKAAHPHLFASSFESRGRDSV

SEQ ID NO: 19632 - protein, 1450 aa, Oryza sativa
  Clone ID: TF_OSC900402j.C1.p15.fg
MAGMSAFRVYFSEGEIMENESGVNLSNFRQCTLYHPNPDTLTMPEVWYWLTCTFSLDPGIYSVNVRVMWSRSANNIRWELKNVTRSKAWQDWLAGCRRRGYEYVMLVQACQGRVPTESAAGQSSNREELGSSSHEEDEVVAPHHGGDVGPDIQNLSIQGDEVVNRHPTGEADEGEDIPAIVEEIERVDRHAIEDEENLAAEENDDEDEQEVEEVPMPASWNLEDPGYIAENSCHDSIWFYGDGQINLGAMFRDKTGLQDAVKSWSFKTQRQFRVVKSNKTEYTVVFRLHGHVPKYESYWILSKLQEHSCLIRNTRESHRNLTAAYVANKYYKEIIEGDDLPVRHIIKLVEKGEQYTISYHKAWRAKQKAMEKRYGTFEEAYDTLSQMLNILKIRNPRTYVAVQDRESIRPPNYLVMQRAFFAFGACILAFQCSRPVLCVDGTFLTGKYRGQILTAVGADANNQIIPVAFAFVESENYESWLWFLQHLKWGVVQKRTSICIIHDRNAGLLKAIKELQEDGDGAYYWPDMHSRWCMRHMGANFFKQFNNRRLMNMFKRLCKANQSTKFDELWKQLDEVTRTHIRSKQTNINLLDVHVPQALEPMDDLIPSNGKKRRSSKNIKCFTHWIECEPNDKWALLHDTNGARHGIMTTNLAEAYNVVLSKLRPLPLTAIVEGIMHRTTMWMRTRRAAALQQMSNAQTPFCKKMAEYLQEKANKARFHTVITTGNVRRRWEVTCRTKGDFGSSTGVITHEVTLGHESDNTCSCSCNKPKLLHKPCSHVLAACAKIKLDSTSYVSTFYLKDRVLNAWSAEILGWRSLQHLVETGGDNRIYVPDLDLLKAGKGRRQTRRLRNDMDASEAGGPVRRCENCLQYGHRTRDCKNNKEGLLTFVQMTQARMHYDAREPKQKQMGAHRKRRQNIDKSLLMALVDRWRPETHTFHLPCGEMTITLQDVSMLMGLPLAGQAIVLPDPPKDWRDDIVSRYACILPWYATGDTDDDEDKIFFSEKETHGPTLKWLSQFEVRYMPDDVQEYQLTLYLEAYLLWLFGWVMFTGSHGNTVDAKLIPLAHQIAEDRAKRFSFGRPYMSVAVAHKDDYTNAIDDRPTFGTRWCYGPPQWARIQVHNVYEYFTEAFESLRENEVRWTPYTNEEAILRAPHGGYNVQRVMRQMGLYQQVPVPVGLHLPPDVHTQKRQADNRRPGHTTTTLTNNTWPGELVRDAKTLWEKLRDGMAGTNQEVMAAVDSLRRKGKRIMRLASCRHSSDVYNPATSTRTFEPMPECPSTSSRPSTSVRPSASARRSSDGRAGVRSTSFRDPPTIPTIPEITEISERLGGFGSTQEGTRMVRPVPHMPPARPQMIPQMALDVPTSHWQGGFAPFAGPTQSVPLHAPTYGTNPWQGQSIDYGGSFRPEIMSGFSPYTTSYDDMSSFGGGSSSVPNELRTSQTNDAPHVTQPT

SEQ ID NO: 19633 - protein, 476 aa, Oryza sativa
  Clone ID: TF_OSC400683j.C1.p15.fg
MSWHRAGVLLLGAQSCLPVPEVPAVDGAGSVLLFMARMGWELCDVFRPYAVVMDNTGNKGYVNDGSDDSRTQANGNEKSINETSPELIQIVVNQTNMLATAFQLLQNWNNPAGATNVQVPTVQQQCKLSEFLKTKPPTFAIAVDPMEASDWLRTVEKKLGLIQCTDQERVVFATHQLVGPASEWWDSYEASRPEGHTITWDEFSAVLKRSHVPAGMITLRKREFRYLKQEDLTVTEYLHEFHRLAHYGLKDEIAVQLLLEEYEDFEKLVDKTIQLESEHNRMKNCKRRIVSIPTFPCGNQRQRTEPLQITGSSIAHQEFLPQEDGHNADNNISNTNDDDTTNNHASCPISDHSNQACNVNIIHQGVDDSINDGTQNDNPRNCDSNYGTTDANVSKDFQPPIPTPSQNDRPQTDSSIKKTLICYNCKEPGHDLRDCLQPRQSRPPHYRQFTRSRHPNRIVVTGANAIPVRPRVNHNP

SEQ ID NO: 19634 - protein, 1113 aa, Oryza sativa
  Clone ID: TF_OSC401051j.C1.p8.fg
MSTTGDNNNTGDKEKEPLVNTNGGNTASNSSRGPFSGYNVSLLPFVLRFLQLSVAVLLRSLIYVDAYSILSMLMLYTSSTVTRSTQITNVMWKARALLWLTVMQCFFVSRGKPSEPPLSPEEEAKFEVADCLFRGALISVLADSIVDVYMHMPSRKDMWDALQAKFRVSDAGSELYVMEQFYDYNMVDDRSVVEQFVAGGIIAKLPPSWSDFATSLKHKRQEFSVTDLIGSLGVEEKARAKDNRGKKKNDGGSSANLVQKKNPHASHNNKKKVKPDVKPKATTNFKKKGQGKAKVDFFVCGKPGHWAKDCLDRKDKKSANMIISEGGGTSGRGSSLLMGNGSLAAVHDVGTVDLKFTSGKIVQLKNMQHVLSIKKNLVSGSLLCKGGFRLVFESNKCVVSKYGTFIGKGYDCGGLFRFSMDDMCNKVVNHVSDDDDESNVWHSRHCHVNFGCMTRLANMSLIPKFTLVKGSKCHTCVQSKQPRKPHRASEVRNLAPLELVHSDLCEMNGVLTKGGKKYFMRVIDNCTRFCYMYLLKTKDEALHYFKIDKAEVENHLERKIKRLRSDRGGEYFSNEFNSFCEEYEIIHERTPPYSPQSNGVAERKNRTLTEMVNAMLDTAGFSKEWWGEAILTVCHVLNRIPTKHKEVTPFKEWERKKLNLSHLHTWGCLVKVNVPIAKKCKLGQKTVDCVFLGYAIHSVGYRFLIVNSRVPNMRVGTITESRDATFFENEFPMKNALSTSSQEPILSPEHFVPIEHIDQMLEENPEEDNIVATRKSKRQRTAKSFGDDYIVYLVDDTPRTIEEAYSSLDADYWKEAVCSEMDSIMSNGTWEVAERPYGCKPVGCKWVFKKKLRSDGTIEKYKARLVAKGYTQKEGDDFFDTYSPVARLTTIRVLLALAASYGLLVHQMDVKDSFPQWRVGGRDLYGSTRWLKQWHEKFDNTLTSAGFIVNEADKCVYYRYGGGEGVILCLYVDDILIFGTSLNVIGEVKDFLSKSFEMKDLEVADVILNIKLLRGDEGRITLVQSHYMDKVLSRFGYSDCKAAPTPYHPSVLLRKNQRIGKDQLRYSQIIGSLMYLASATRPDISFVVSKLSRFISNPGDDHWHALERVMRAI

SEQ ID NO: 19635 - protein, 515 aa, Oryza sativa
  unsure (1)..(515): unsure at all Xaa locations
  Clone ID: TF_OSC413055j.C1.p5.np
LSTVLGQELELLLRRILGAMSWLKEQGCKWRFHASTIITLLYVQVKVNRPAHSCCSINKTGAAMATNSWVAERVIDWLKEIPTLGASALKVKLEKKYKFTIGYDKVFRGKEKALEKIFGKWEDSFALLPTFREELLKAQPGSIVDIDTEIHEDQVCFRRLFIALKPCIDGFLQGCRPYIAMDSTHLTGKHRGQLAAAVAIDGNNWLFPVAFGVIEAKTTERWTWFVQNLKNAIGNPPGLAISTDAGKGLERAVSDVYPTAEHRECMRHLWKNFKKQYHGPLFGENMWHAAKCYTSQQYNYHMNKIAEKSPEAIAYLKTNHPFFWSRSKFSELSKVDYINNNLSESFNNWVMKIKELHIVDLFDTLRQMIIDKFHLQLASKMEGRIIPSIIKTLNEQSKNLKDYNVVRSNCDDLAEVSMVSNKGVVWRHAVNLKAHTCFKLMRPKLRRKPGRPRTHRIKASDEPGCRKKRTCPECGDKGHFAKTCKQSRAAXSRGQVPAIFAKQGNGGLHPFVSDY

SEQ ID NO: 19636 - protein, 1174 aa, Oryza sativa
  Clone ID: TF_OSC409246j.C1.p6.fg
MVKTRNDPRDSNDASGSEEQIDGAHTSGASSNIPSPLPENPTVTQMMTMMMQQMQQHYHQMLQQAQQNQQFGPPPSHLSKLLDFLRIKPPTFSSTTNPMEANDWLRAIEKKLNLLQCNDQEKVAFATHQLQGPASTWWDNYVVTRPDATEVTWAEFCQSFRKAQIPEGIMAQRKREFRALQQGTMSVTEYLHEFNRLARYAPEDVRTDAEKQEKFLFGLDDELTNQLISGVYEDFEKLVDKAICQEEQHNKMDRKRKATQFRAPQGNNQKPRFMTGQQAQLDLPAVLAQSEQLKKESAGKPGPCFSCGKHGHFAGKCPKLKRAGPRFIQARVNHASAEEAQAAPEVVLGTFPVNSYLATVLFDSGASHSFISKRFAGTHGLSVVELKIPMRVHTPGNNMKTAHYCPSVTIEIKRSQFLSNLILLESKDLDVILGMDWLTRHKGVIDCASRTITLTNDKGEKITFRSPVSQKSVVSLNQAAIEDQTEIVKKSLKELEDIPKVQEYPKVFPEDLTTMPPKREIEFRIDLAPGTAPIYKRPYRMATNELAEVKKQVDEQLQKGYIRPSTSPWGAPVIFVEKKDKTKRMCVDYRALNEVTIKNKYPLPRIDDLFDQLKGAKVFSKIDLRSSYHQLRIQEEDLPKTAFTTRYGLFECTVMSFGLTNAPAFFMNLMNKVFMEFLDKFVVVFIDDILIYSKSEEQHEQHLCLVLEKLKEHQLYAKFSKCDFWLSEVKFLGHVITAQGVAVDPSNVESVTKWTPPKTISQIRSFLGLAGYYRQFIENFSKIARPMTQLLKKDEKFKWSAECNQSFEELKKKLVSAPVLILPDQMKDFQVYCDASRQGLGCVLMQEGRVVAYASRQLRPHETNYPTHDLELAAVVHALKIWRHYLIGNRCEVYTDHKSLKYIFTQPDLNLRQRRWLELIKDYDMGIHYHPGKANVVADALSRKSYCNLVCTEGICDKLQQDLEHLNLGIVEHGYVATLESRPTLVDQVRAAQEKVRTVRERLRIAQSRQKSYADNCRRELTFEAGDYVYLRVTPLRGVHRFQTKGKLAPRFVGPYRILERRGEVAYQLELLSNMAGIHDVFHVSQLKKCLRVPEEQASSKHIDIQEDLTYVEKPICILETSERRTRNKVIRFCKVQWSHHSDEEATWEREDELKAAHPHLFAGSSESRGRDSV

SEQ ID NO: 19637 - protein, 668 aa, Oryza sativa
  unsure (1)..(668): unsure at all Xaa locations
  Clone ID: TF_OSC414373j.C1.p37.np
SSVSCLLQREQHREGERQGAAVSVADGRNASSEDDATIMHLARMVEAYDTGRINFHHMVRRGLVEDNMKILELRXENLQLKDLDAVEAQLCQLKIAQGEICRPKRRRVCRSQKITARKSTSRPELVRQFLAWTCFVETPCVEPAPLVPXEEGASGVGSTEDVLLLTFRPGPSQKRSAATGEGSHPEGSNHNNHGSPPPPPPPPPPPPPDTNPILTQILAQQANMMAAFLHHIQTPPQHNAPPPPPPPPQHSKLAEFLHIRPPTFSSSNNPVDALDWLHAVGKKLDTVQCNDEEKVIFATHQLQGPASLWWDHFQAMQPEGQPITWARFTAAFQRTHVPAGVMALKKREFRELKQGNRSVMEYLHEFNNLAWYALEDVREDEEKQEKFLVGMDPELSVRLVSGDYPDFQLVVDKSIRLEAKHKELESHKRRLANFRNQQGANQRIRYTNPYPGGSSSQQQQQQPRPVPXPQFVVRVPQPQQQQNQQGNRAPRPPAPAVQPSHGRRDVQGQPRLCFNCLEPGHFADKFPKPRRXEGQAPPRPNNGGKDATRGRVNHVTAEDVQTTPDVIIGTFFIHSIPATILFDSGASHSFISVQFVGRNQLGLERLRNSLLITTPGGAMTAKYYSPAVPIEIQGIPFPSDLILIDTKDLDVILGMNLTQFRGVVDXAR

SEQ ID NO: 19638 - protein, 361 aa, Oryza sativa
  Clone ID: TF_OSC423123j.C1.p13.fg
MAPTGMKFDLVKFDGSGNFGLWQTRVKDLLAQQGASKALKGVKPAKMEDDDWEEMQLQVAATIRLCLSDQKLYGLKMQEGVDLTAHVNVFNQLVTDLVKMDVEVDDEDKAIVLLCSLPESYEHVMRKNKEGETSQAEGLLVKEDHAGHKVKKNKKKKVVQCFRCDEWGHISKKCPILKGKAKANAATSSNDSDSDGCDLLKMSSAQSKDAEAWILDSASSFHVTPRKEWFFSYKSSEFGFVYLGDDTSYPAVGVGEVKIKLEDGGEHVLQGVRHVPGLKRNLISLGTLHEEGLIFRGNRNKKTMEIMKGKTTVMTGEKVESQLYKLRGCTIAGGVQEEAVAGIAIAFGGGGSGADSSGGLR

SEQ ID NO: 19639 - protein, 1691 aa, Oryza sativa
  Clone ID: TF_OSC18587j.C1.p4.fg
MADYTTRGHEIKLDETQTIVATSSSISADNKAKQKQCHNLFLARFMVKHRSCRVIFDSGGSCNNLVSSDLVENLGLPIKPHPHRYYIQLFNSFHKNEGNDNGARFTQDKFNRFNDKVKPKTVSNQEGEDDEDTTSSDMTMPILCINQQKELAFSMAGSINRRGLDLTGFVLELRGMCVVLGYPHGVDYQGKQLPEQEGDDAEPHATWEVTAVILTGSPERTSLAVTNAALLAIGTLHQRYLDELQHSPYRYHPRRGGARDYATFRDASSEDDATIMHLARMVEAYDAARIDFHHMVRRGLVENNMKILELRQENLQLKKDLDAVEAQLCQLKIAQGEVCRPKRRRVCRSLKITARKSTSRPELVRQSLAWTCFVETPRAEPAPVVPQEEGASGVGSTEDALLLTFRPGPSQKVVWGMVIPMVTTRRSATTGDGNQPEGSNHNNHGSPPPPPPPPPPPPPDTNSILTQILAQQANMMAAFLHHIQNPPQHNAPPPPPPPQHSKLAEFLRIRPPTFSSSNNPVDALDWLHAVGKKLDTVQCNDEEKVIFAAHQLQGPASLWRDHFQATQPEGQPITWARFTAAFRRTHVPAGVMALKKREFQELKQGNRSVMEYLHEFNNLARYAPEDVREDEEKQEKFLAGMDPELSVRLVSGDYPDFQRLVDKSIRLEAKHKKLESHKHRLANFCNQQGANQRVRYTNPYPGGSSSQQQQQQQPHSAPRAQFVVRVPQLQQQQSQQGTRAPRPPTPAVQPGQGRRDVQGQQRLCFNCFKPRHFADKCPKPRRQQGQAPPRPNNGGKDVIRGRVNHVTAEDVLTTPDVIVGTFLIHSIPATILFDSGASHSFISVPFVGRNQLGVERLRNPLLITTPGGVMTAKHEELGCDPWDELVGSIPRSSGLRKRTVTLYRGPEQPVVFFAPPTSVGSSELHQIGLSETPIVSEFGDVFPEELPGMPPKREIEFRIDLAPGTTPLYKQPYRMAANELAEVKKQLEELKEKGYIRPSTSPWGAPVIFVEKKDKTKRMCVDYRALNEVTIKNKYPLPRTDDLFDQLKGATVFSKIDLRSGYHQLRIREEDIPKTAFTTRYGLYEFTVMSFGLTNAPAFFMNLMNKVFMEYLDKFVVVFIDDILVYSQSEEDHQQHLRRVLGKLREHQLYAKLSKCEFWLSEVKFLGHVISAKGVAVDPKTVTAVTDWKQPKTVTQIHSFLGLAGYYRKFIENFSKIARPMTQLLKKEEKFVWSPQCEKAFQTLKEKLVSSPVLILPDTRKDFLVYCDASRQGLGCVLMQEGHVVAYASRQLRPHEGNYPTHDLELAAVRRWLELIKDYDVGIYYHPGKANVVADALSRKSRCNTLGVHDIPPELNQQMEALNLSIVSRGSLAMLEAKPTLLDQIREAQKNDPDMHGILKNMKQEFVALCDVCQRVKAEHQRPAGLLQPLQVPEWKWDEIGMDFITGLPKTQGGYDSIWVVMDRLTKVARFIPVKTTYGGNKLAELYFARIVSLHGVPKKIVSDRGSQFTSHFWKKLQEELGTRLNFSTAYHLQTDGQTERLNQILEDMLRACVLDFGKTWDKSLPYAEFSYNNSYQASLQMAPYEALYGRKCRTPLLWDQVGESQVFRTDILREAEAKVRTIRENLKVAQSRQKSYADNRCRDLEFAVDDFVYLRVMPLRGVHRFQTKGKLAPRFMGPFRIIAQRGEVAY

SEQ ID NO: 19640 - protein, 546 aa, Oryza sativa
  unsure (1)..(546): unsure at all Xaa locations
  Clone ID: TF_OSC401453j.C1.p7.np
MAKKTLCEFAAPSADNVPVGPVNIGDTDFDLKSSLITMAQASPFFGKPNEDASVHLQQFLEICTTYTVKGVSLDAERLCLFPFSLLGKAKQWFYVNRMIVNTRDRCSTAFLSKFFPMEAWEEAWECLQEYVAACPNHGMDDWLILQSFYNRLTPSSMDHQDAATGVAFFSKIVRAAIDIIEKMVSNMGWSEERLQTSHRGMHTVKETEMLAAKLDVLMKRRDDQEKSKPQDTVKALDSHITCEVCGNTGHSGNDCPETHEEAMFMGNNGYRQQGGQGWNQLRPFYQGGNNSNNNGNFDQPSLKDLVFTQAKTTVAVKKLSINDKVAALVPTVAALVPTKETGRILRQPITTRGRKSTRDPPYPNTAGTRQAGEGGIAEPKEDEEAQLDKIPPQEYYDSTLLPFPPCQKKPSVDXQFARFMDVIQKIHINILLVDAMRVPIYARYLKDILNNKRPLPTMEMVKLTEECSNAILHXLPEKKKNPGCPTISCSIGTLHFNQALCDLGASVSVMRKDVFDKLNYTILIPTPMRLQLADFSICYQAILGGD

SEQ ID NO: 19641 - protein, 1804 aa, Oryza sativa
  Clone ID: TF_OSC407182j.C1.p1.fg
MDEVGGRWTFSRANEGYTSCGPMAGSVTRRGLGMTGFVLELRGMCVVLGYPHGVDYQARPLPEQEGEDAEPHAGWEVTAVILSGSPERTSLAVTAGGDSFPAACQNAALLAIGTLHQRYPDELQHSPYRYHPRRGGARDYATFRDASSEDDATVVHLARMVEAYDAARIDFHQMVRRGMVENNMKILELRQENLQLKKDLDALEAQLHQLKIAQGEDSRPKRRRVCRSQKITARKSTSRPELVRQSLAWTCFVETPRAEPAPVVPQEGEASGVGSSEGALLLTFRPGPSQRSPSLFAGSVWGFQMVTTRRNVNTGEGNQPEGSNPNPQGNPPPPPPPDTNAILTQILAQQANMMNAFLHHLQNPPQQNAPPPPPQHSKLAEFLRIRPPTFSSSNNPVDALDWLHAVGKKLDTVQCSDEEKVIFAAHQLQGPASLWWDHFQATQPEGQPITWARFTAAFRRTHVPAGVVALKKREFRELKQGNRSVMEYLHEFNNLARYAPEDVREDEEKQEKFLAGMDPELSVRLVSGDYPDFQRLVDKSIRLEAKHKELESHKRRLANFRNQQGANQRVRYTNPYPGGSSSQQQQQQQPPRPAPRPQFVVRVPQPQQQQNQQGTRAPRPPTPAVQPVQGRRDASGPQRLCFNCFEPGHFTDKCPKPRRQQGQAPPRSNNGGKDVIRGRVNHVTAEDVLTTPDVIVGTFLVHSIPATILFDSGASHSFISVPFVGRNQLGVERLRNPLLITTPGGVMTAKYYSPAVPIEIQGIPFPSDLILLDTKNLDVILGMNWLAQFQGVVDCARRTVTLYRGPEQPVVFFAPPTSVRSSELHQIGLSEIPIVREFGDVFPEELPGMPPKREIEFRIDLAPGTTPLYKRPYRMAANELAEVKKQLEELKEKGYIRPSTSPWGAPVIFVEKKDKTKRMCVDYRALNEVTIKNKYPLPRIDDLFDQLKGATVFSKVDLRSGYHQLRIREEDIPKTAFTTRYGLYEFTVMSFGLTNAPAFFMNLMNKVFMEYLDKFVVVFIDDILIYSQSEEDHQHHLRLVLGKLREHQLYAKLSKCEFWLSEVKFLGHVISAKGVAVDPETVTAVTDWKQPKTVTQVRSFLGLAGYYRRFIENFSKIARPMTQLLKKEEKFVWSPQCEKAFQTLKEKLVSSPVLILPDTRKDFMVYCDASRQGLGCVLMQDGHVVAYASRQLRPHEGNYPTHDLELAAVVHALKIWRHYLIGNRCEIYTDHKSLKYIFTQSDLNLRQSRWLELIKDYDVGIHYHPGKANVVADALSRKSHCNTLNVRGIPPELNQQMEALNLNIVGRGFLAALEAKPTLLDQIREAQKNDPDMHGLLKNMKQGKAAGFTEDEHGTLWNGKRVCVPDNRELKQLILQEAHESPYSIHPGSTKMYLDLKEKYWWVSMKREIAEFVALCDVCQRVKAEHQRPAGLLQPLQVPEWKWDEIGMDFITGLPKTQGGYDSIWVIVDRLTKVARFIPVKTTYGGNKLAELYIARIVSLHGIPKKIVSDRGSQFTSHFWKKLQEELGTRLNFSTAYHPQTDGQTERLNQILEDMLRACVLDFGKTWDKSLPYAEFSYNNSYQASIQMAPYEALYGRKCRTPLLWDQVGESQVFGTDILREAEAKVRIIRDNLKVAQSRQKSYADNRRRDLEFAVDDFVYLRVTPLRGVHRFQKKGKLAPRYVGPFRIIARRGEVAYQLELPASWGNVHDVFHVSQLKKCLRVPSEQANSEQIEVREDLTYVEKPVKILDTMERRTRNRVIRFCKVQWSNHAEEEATWEREDELKAAHPDLFASSSESRGRDSV

SEQ ID NO: 19642 - protein, 1516 aa, Oryza sativa
  unsure (1)..(1516): unsure at all Xaa locations
  Clone ID: TF_OSC900010j.C1.p10.np
NEVGARWTSRTNECYTSRGPVVEMSWHRAGVLLLGAQPWLPVSGILAVARVGSMYTSDQSIYSNSCALGYGQAXQCTQMADNLNRRGLDLTGFALELWGMCVVLGYSHGVDYQGKKLPEQDDDDAEPGAAWEVTTVILTGSPERTSLAVTAGGDSFPAACQNAALLATGTLHQRYPDGELQHSPYRYHPRRGGARDYAAFRDASSEDDATIMHLALMVEAYDTAHIDFHHMVRRGLVEKNMKVLELRQENLXLKKDLDAVEAQLCXLKIAQGQVCHPKRRRVCRSQKITARKSTSRPELVRXSLAWTCFVETPCAEPAPLVPQEEGASGVGHRGCAVAHLLPRPVVEVDEQLVGPRMVTTRKSAATGEGSHPEGSNHNNHGSPPPSPPPPPPPPPPPYTNPILTQILAQQANMMAAFLHHIQNPPQPNAPPPPPPPQHSKLAEFHRIRPPTFSSSNNPVDALDWLHAVGKKLDTVQCNVEEKVIFATHQLQGPASLWWDHFQATXPEGQPITWARFTAAFRRTHVPAGVMALKKREFQELKQGNRSVMEYLHEFNNLARYAPEDVHEDEEKQKKFLAGMDLELSVRLVSGDYPDFQRLVDKSIRLEAKHKELESHKRRLANFRNQXGANQRIRYTNPYPGGSSSQQQQQQQPRPAPXPQFVVRVPQPQQQQNQQGNRAPRSPAPAVQPSQGRRDVQGQPRLCFNCFEPGHFTDKCPKPRRQQGQAPPHPNNGGKDATRGRVNHVTTEDVLTTPDVIIGTFFIHSIPATILFDSGASHSFISVQFKGRNQLGVAKLRSSLLFTTPRGAMAKYYSPAVPIENXGIPFPSNLILLDTKDLDVILGMNWLTXFXGVVDCARRTVTMYRKPDLRVVFFAHPTPTGSILRQLGLSEILVANEFGDVFPEELPGMPKREIEFRIDLALGTTPMYKRPYRMAANELAEVKKQLEELKEKGYIRPSTSPWGAPVIFVEKKDMTNRMCVDYRALNEVTIKNKYPLPRIDDLFDQLKGATVFSKIDLRFGYHQLRIREEDIPKTAFTTRYGLYEFTVMSFGLTNAPAFFMNLMNKVFMEYLDKFVVVFIDDILVYSQSEEEHQQHLRLVLGKLREHQLYGKLSKCEFWLSEVKFLGHVISAKGVAVDLEIVTAVIGXQQPKTVTQVRSFLGLAGYYRRFIENLSKIARPMTQLLKKEQKFVWSPXCERAFQTLKEKLVSSPVLILLDTRKDFLVYCDASRQGLGCVLMQEGHVVAYASRQRXPYEGNYPIHDLELAAVVHALKIWRHYLIGNRYEIYTNHKSLEYIFTQSDLNLRKRRWLELIKDYDVGIHYHPDKANVVADALSRKGHCSTLCVRGIPPELNQQLENLSVVSHGFLAALEAKPTLLDQIREAQKNDPDMHGILKNMKQGKAAGFTEDEHGTLWNRNRVCVPGDKELKXLILXEAHESPYSIHPSSTKMYLDLKEKYWWVSMKREIAEFVALCDVCQRVKAEQQRPAGHLQPLKVPEWKWDEVSLDILFGTPFXTLC

SEQ ID NO: 19643 - protein, 2187 aa, Oryza sativa
  Clone ID: TF_OSC900197j.C1.p21.gm
MGNNRSKLTDFLSSRPPEFSQTVEPVEADDWLKDVDRKLNLVQCTPVEKTLYASHQLRGPAADWWENYCNAHPEPTNIAWDEFATAFRAAHVPESTIDMKKEEFNRLKQGNNSVNEYLSLFNKLARYAPEEVDTDKKKIRKEILPEAHLALAMEKKGTDFSIDDQGTVWCGPRICVPAKKELRDLILKEAHESAYSIHPGSTKMYQDIKAYFWWARMKRDVAEYVALCDICQRVKAEHQRPAGLLQPLPIPEWKWEEIGIDFITGLPRTPSGRRRVRALAPPPPRIAPHPAVPARIKERGITPRDSLSRFPRFPLSLSLGFVRIRPAKFAGVFNGARDLRARFPLSPAALSFPRRYKIVARAPLFRFRRSPLALAVDFVPAPCSALSAIAAELRSAAAAAPDFLLTRRHPRPLRRVAADPVRRSASPVDRRSTVVIVIPNRAAVFLRSVRRFHRLRRLGVSRGPLRSFPPFLLSLGCHSAAPLVAGGDHRGAGARRSRRPRRRGRPRARPRGCQVGPAVSRPRPRVRLTRGTHGADRRQPRAPGPPWTERLTHGPHFPWTRANEGYTSCGPMAGSVTRRGLGMTGFVLELRGMCVVLGYPHGVDYQARPLPEQEGEDAEPHAGWEVTAVILSGSPERTSLAVTAGGDSFPAACQNAALLAIGTLHQRYPDELQHSPYRYHPRRGGARDYATFRDASSEDDATVVHLARMVEAYDAARIDFHQMVRRGMVENNMKILELRQENLQLKKDLDALEAQLHQLKIAQGEDSRPKRRRVCRSQKITARKSTSRPELVRQSLAWTCFVETPRAEPAPVVPQEGEASGVGSSEGALLLTFRPGPSQRSPSLFAGSVWGFQMVTTRRNVNTGEGNQPEGSNPNPQGNPPPPPPPDTNAILTQILAQQANMMNAFLHHLQNPPQQNAPPPPPQHSKLAEFLRIRPPTFSSSNNPVDALDWLHAVGKKLDTVQCSDEEKVIFAAHQLQGPASLWWDHFQATQPEGQPITWARFTAAFRRTHVPAGVVALKKREFRELKQGNRSVMEYLHEFNNLARYAPEDVREDEEKQEKFLAGMDPELSVRLVSGDYPDFQRLVDKSIRLEAKHKELESHKRRLANFRNQQGANQRVRYTNPYPGGSSSQQQQQQQPPRPAPRPQFVVRVPQPQQQQNQQGTRAPRPPTPAVQPVQGRRDASGPQRLCFNCFEPGHFTDKCPKPRRQQGQAPPRSNNGGKDVIRGRVNHVTAEDVLTTPDVIVEIPIVREFGDVFPEELPGMPPKREIEFRIDLAPGTTPLYKRPYRMAANELAEVKKQLEELKEKGYIRPSTSPWGAPVIFVEKKDKTKRMCVDYRALNEVTIKNKYPLPRIDDLFDQLKGATVFSKVDLRSGYHQLRIREEDIPKTAFTTRYGLYEFTVMSFGLTNAPAFFMNLMNKVFMEYLDKFVVVFIDDILIYSQSEEDHQHHLRLVLGKLREHQLYAKLSKCEFWLSEVKFLGHVISAKGVAVDPETVTAVTDWKQPKTVTQVRSFLGLAGYYRRFIENFSKIARPMTQLLKKEEKFVWSPQCEKAFQTLKEKLDGHVVAYASRQLRPHEGNYPTHDLELAAVVHALKIWRHYLIGNRCEIYTDHKSLKYIFTQSDLNLRQSRWLELIKDYDVGIHYHPGKANVVADALSRKSHCNTLNVRGIPPELNQQMEALNLNIVGRGFLAALEAKPTLLDQIREAQKNDPDMHGLLKNMKQGKAAGFTEDEHGTLWNGKRVCVPDNRELKQLILQEAHESPYSIHPGSTKMYLDLKEKYWWVSMKREIAEFVALCDVCQRVKAEHQRPAGLLQPLQVPEWKWDEIGMDFITGLPKTQGGYDSIWVIVDRLTKVARFIPVKTTYGGNKLAELYIARIVSLHGIPKKIVSDRGSQFTSHFWKKLQEELGTRLNFSTAYHPQTDGQTERLNQILEDMLRACVLDFGKTWDKSLPYAEFSYNNSYQASIQMAPYEALYGRKCRTPLLWDQVGESQVFGTDILREAEAKVRIIRDNLKVAQSRQKSYADNRRRDLEFAVDDFVYLRVTPLRGVHRFQKKGKLAPRYVGPFRIIARRGEVAYQLELPASWGNVHDVFHVSQLKKCLRVPSEQANSEQIEVREDLTYVEKPVKILDTMERRTRNRVIRFCKVQWSNHAEEEATWEREDELKAAHPDLFASSSESRGRDSV

SEQ ID NO: 19644 - protein, 818 aa, Oryza sativa
  Clone ID: TF_OSC29718j.C1.p2.gm
MAPAQPAPSAQAKKETGAKPGSSYNCGELGHFADKCPKPRRAGPRFAQARVNHASAEEAQATPEVVLDLDIILGMDWLTKFKGVIDCANRTVTFTKEKGETVVYKSPVSPNQGIPLNQIEVENPVKGYIRPSTSPWGAPAIFVEKKDNTKRMCVDYRALNEVTIKNKYPLPWIDDLFDQLKGAKEHQLYAKFSKCDFWVSEVKFLGHVITAQGVAVDPSNVEKSYYNALCTGGMCKELQQELEHLNLGIVEHGYVAALEARPTLVDQVRAALVNDPEIAKLKNNMRVGKARDLLEDEHGTIWLGERFAVAAFVFSVHHRQPLQPPVAAASAIDDLRRRLSRLRKVKLHPVHPFPQAKIHRSFIVAVNPNAKPKAVHPFFSAGVRRKATVTVVPISPPLEARRRLPFIVARRRHGSLRGTRLRSGEKPVVVAGESMPLVIEGVIMIQERKSYCNASCTGGMCKEMQQELEHLNLGIIEHEYVAAPEARSTLVDQVRAAQVNDPEIAELKKNMRVGKARDFLEDEYGTIWLGERLCVPDDKELRELILTEAHQTQYSIHPGNTKITPETRRITTTSLDPGMEMGRDWNGFHNSTAYHPQTDGQTERVNQILEDMLRAYALDFGGAWDKSLPYAEFSYNNSYQTNLQMAPFEVLYGRKCRTPLFWDQIGERQLFGTEVLTEAEEKVRTIRERLRIAQSRQKSYADNHRRELTFEAGDYVYLRVTPLRGVHCFQTKGKLAPCFVGPYKILERRGEVAYKLELPSNMAGIHDVFHVSQLNKCLRVPEEQADSEHIDLQEDLTYVEKPIRILETSERRTRNKVT

SEQ ID NO: 19645 - protein, 752 aa, Oryza sativa
  Clone ID: TF_OSC101628j.C1.p6.fg
MEIMQQLAAAATATATATATPLCLPEPPPTAMTTAQVEAAIATLHGKKQGLREAYDSLVLHSPIPLPFRWSDLDSHLSSLQSSIHARFSQLQALQASRPAPPAAAAASHDEDVEMEDVQEQGEDEVMAPPSTVQVKEEPVEAAACASNTAGERAGVGQDGFVRPGGMAAAKMASPSKVQVKEEPVEVSPSPPAGATGLTAAACASMDAPRLTDVCKRAGGGGGQGLCARNGSGTAQSPPIPSCPVLQQQHTAGAPNGSHPVLRQHAANAMNAGHSAAFRPQQHMGKPRDTCDLRKAAAPNTGDRLPLQWRQQRVHANLTCPLPPPVVAGSSSSPPQQRVGVFPSPTPQIVGSSPPPPSQARVGEANVTNPSRQQFTASAPHAGDGQLQKRPPWQRLQRVGVANPMNAGDLPPQKPHFTANARNAGEHPFQEQQQPPPVAKPTDAAAGDLLPQQKQLMANAPNAGEHLLPEQQKQQPVTAAKPANAPPLQHAANATNPAVLRRQRQRQWVRLRPPTATNLPQTKQEQHHLFMADDGANARNPLSPPPPCGMAKPPNSGDPLTDQNNQQLMANTHSAPTPVSTPLVASNQSESSAMTTTTTTNSNQNSGGGRTGPQPVAAGAAPNPAGNQQQGQRKGGANRRGGRGQGNKNNNVANTNISNMSKVIGKGNKGQGNGNPQLNKNGNPQFNKNVPGDHHQKNKNAGQLCYRCGCRGHWSRICRTPEHLVKLYQQDRKAKLQAGANTNTVYVGAMTD

SEQ ID NO: 19646 - protein, 583 aa, Oryza sativa
  unsure (1)..(583): unsure at all Xaa locations
  Clone ID: TF_OSC15757j.C1.p1.np
MANKTLREFAAPSADNVAIRLQVNIGDMDFDLKSSLITMAQANPFCGKPNEDANAHLQQFLEIYSTYTIKGVSPDVVRLRLFPFSLLGRAKXWFYANRAAVNTWDKCSTTFLSKFFPMGKTNALRGRISSFQQMRDESILEAWERLXEYVAACPHHWMDDWLILQNFYNGLTPMSRDHLDAAAGGAFFSKTVQGAVDLIEKMVSNMGWSEERLQTRXRGMHTVKETELLAAKLDLLMKRLDDHEKWPQGTVKALDSHVTCEVCGNTGHSGNDCPETHEEAMYMGNNNNGYLPQGVTNETRRIPGQPDSSIENVKAITTRGGKSTRDPPYPNPTGINGISKEAPSKDSADKDVQPEKTVPQEYCDTRLLPFPQRIRKSSVDKHFARFIEEIQKIHINVPLPTMEVVKLMEQCSLPTMEVVKLMEQCSNVILHKLPEKKKDPGCPTTCSIGAQQFDPALCDLGASVSVMPKDVFDKLNFTVLAPTPMRLQLADSSVYYSAGIAEDVPVKIRDFFILVDFVMLDMDTGKETPLILGRTFLSTAGANIDVGMGIICFHINGKEEKFEFQPRMEQCSMIRIKYGPTAS

SEQ ID NO: 19647 - protein, 129 aa, Oryza sativa
  Clone ID: TF_OSC16925j.C1.p1.np
FHAHGMRSKDQKRKAPMRTEDEVRKMIITSTEWPPPGMTKRQRRNSFRGAPQLTEHLLASGGRVYDSEDSDQVSSDDEDEKSPQGFNQNKMEHKACSRCGEIGHVASSCATTCFHCEEDHPPECPMRKI

SEQ ID NO: 19648 - protein, 286 aa, Oryza sativa
  unsure (1)..(286): unsure at all Xaa locations
  Clone ID: TF_OSC19175j.C1.p2.np
IADKTLHEFAAPSAENVAIGPQINMGDMDFDLKSSLITMAXASPFCGKPNEDANAHLQQFLENCNTYAIKGVSPDTVRLRLFPVSLLRRAKQWFYANRAAVNTWDKCSTVFLSKFFPMGKTKSFQQTRDEAIPEAWERLQEYVAACPHHGIDNWLIMQNFYNTPMSRDHLDVAAGGAIFSKLVRGAADLIEKMVSNMGWSEERLQTRQRGMHTVKETELLAAKLDLLMKRLDDHDKRPQGTIKALDSHVTCEVCGNMGHSGNDCPETYEEAMYMGNNNNGYHPQGV

SEQ ID NO: 19649 - protein, 736 aa, Oryza sativa
  Clone ID: TF_OSC404812j.C1.p4.gm
MGMVKFSASAAHLQIAPSRYSRALGTTKIPKSLGRLRRHLARRRLMSSSSPHIVLVAHHGCVASLVKFSGLAVSLDVHSAAAIASLPASSVAAVALPEVKLDDNPTGRRPMARSSTCSTSTTWFLPPKDRTSDSGGGGVGSKEEEDEAWDEWLAKPIHERMPWQMPPATELQDAGLEAVTNCYGELYGDMMEYCGRSWKPGTGTAPCWCMTAIPPFNPTTSLSGARLEGHVLGTSVPPEAELEQKEGEKGEKTIRVPNPAYGEWFATDQQVIGFLFTSLTREILSQVADAPTAAAAWKTIENVFSTRSRAGAINVRLALTTTQKGQSTVTEYVSKMRALGDEIAATGKPIDDEELVAYIINGLDSEFDPVVEALVAKNASVTVAEVYSQLLGFENRVKIRTACAAMSGNRGGGNQGRGGGNPRGRGAGRGGSGRGGGRGRGNGRGGADNRPTCQVCHKKGHVAADCWHCYDENYVPDEKLGGAATHAYGVDTNWYVDTGATDHITGQLDKLTTREKYKGTDQIHTASGEDDTEADASDSNAEINAEQPDGTHPGASTGVHTAETEVAEESSSRTDQWRAVQAPEQPATATEPAAATSSAVQSSRASSRSIASHHQPGGDTSPGPRHDAAGSSAAPEVIAEIEQVSKGWSLRQLDVQNAFLHGVLEEEDLNQEFALKDLEDLHFFLGIEVKKDLTLYLGVHENKLQSLDQVLKLNTRHWQMQQQKLCGYKHYFRNLV

SEQ ID NO: 19650 - protein, 247 aa, Oryza sativa
  Clone ID: TF_OSC420074j.C1.p7.gm
MKRLDDHDKRPQGTVKALDSHVTCEVCGNMGHSGNDCPETREEAMYISNNNNGYRPQGGQGWNQPRPYYQGETNGVAKEAPSSDSADKEIQPEKVVPQEPRKSVRTGEGEEGHGNGGVEKKSTAPALSADWPVMANCGRRQRLRVRACAKRVHGTRRWRPRDREEDRLCGWASLGLGLLGGASNIFLFLFVFVFLFIFFFVRVSKRVFIFVFVRVLIFIFLHFVLIDIVFANAQPGGRLPEVEPSPG

SEQ ID NO: 19651 - protein, 488 aa, Oryza sativa
  Clone ID: TF_OSC20612j.C1.p3.fg
MDISRTNEGYTSCGPVVEMSWHRAGVLLLGAQSCLPVPEVPAVGGVGSVLLFMARMGWELCHVFRPYTVVMFNREKGKNVSGYASTNSSFQLNPPLSSRELTRAHPWSIPSMLLSSQLPLVGSQDQNQYVFDRAFATQVNELPMPEEHVPFCHDCREQGHYALNCPWVYAKQASSFGLAGQTSLNQPPRTKSSLQPSVQSREPNGENPLNPGKCFPPSLSYHVGSHTKQAKGKKSKNQKRKAPMRTEEEVRKMTITNTEWPPVGITIPRRQRGNTFRGARQLTQHLLSHGGRVSDSEGSDQVSSDDEDESPRHLGEEEMESKACTCCGEIGHVASMCLTLCPHCEEDHPPGECPTRKMTCFLCEGTNHVPKDCQLSVLLTKTVEIQRTTLRLSHQLVSSNSNIDDIIHSTNVPPAPPNSAINHSNNTFSTNHSLHRQPQQRIVVDGRSCVSPRPTPGRAKGNQPPEGDTKQKTVIRFKQQSEGSFSCE

SEQ ID NO: 19652 - protein, 711 aa, Oryza sativa
  Clone ID: TF_OSC401388j.C1.p4.fg
MASKTLREFAAPSANNVVVGPQVNIGDVDFDLKSSLITMAQASPFCGKPNEDANAHMQQFLEICSTYTIKGVSPDAVRLRLFPFSLLKRAKQWFYANRAAINTCDKCSTTFLSKFFPMGKTNALRGRISSFQQTRDESIPEAWERLQEYVAACPHHGMDDWLILQNFYNGLTPVSRDHQDAAAGGAFFSKTVQGAVELIEKMVSNMGWSKERFQTHQRGMHIVKEMELLVAKLDLLMKRLDDHDKRLQGTIKALDSHVTCEVCGGTGHSGNDCPKTREEAMYMGNNNNGYRPQGGQGWNSTSLHGNADVRRHAKRRFDKLNFTALASTPMYLQLADSSVRYPTRIAEDVPIKIRDFLIPVDFVEPLLEDAGKITRTGQEIRAAGSEEAVFRIEIKEGVEGKAKDTRSITSGDGWKIHELKRKEEFTLTWKGLSTLLGFHDSCKIDLQRGISGFEKNRFWEDISGAPICKKPRTNNIHNPTLRLVHKWIAMTLFSRSDLRPIRGDELIIMFAMVRKVKISPVKCMIRQWLESIMFSAPVECTSLITRIAKELGVVSDQIAFISAARPHIDEAYLVQGHILKQGADGSLIYFFPSCTNEIPLPNAGYHLYNCHELTIPLQTIEESRAGGTYRETRNMTRNEQESSSSSTPVQMYEAGWAPTGDAPRWTQAPRHSIGVSPWASAGEDRWHAAPLRLPSFHSPLNPRHGSGVWCR

SEQ ID NO: 19653 - protein, 1328 aa, Oryza sativa
  Clone ID: TF_OSC102349j.C1.p24.fg
MATNPKGSNHNNHGSPPPPPPPPPPPPPDTNSILTQILAQQANMMAAFLHHIQNPPQHNAPPPPPPPQHSKLAEFLRIRPPTFSSSNNPVDALDWLHTVGKKLYTVQCNDEEKATQPEGQPITWARFTAAFRRTHVPTGVMALKKREFRELKQGNRSMMEYLHEFNNLARYAPEDVREDEEKQEKFLAGMDPELSVRLVSGDYPDFQRLVDKSIRLEAKHKELESHKRRLANFRNQQGANQRVHYTNPYPGGSSSQQQQQQQPRSAPRPQFVVRVPQPQQQQSQQGTRASRPPTPAVQPGQGRRDVQGQQRLCFDCFEPGHFADKCPKPRRQQGQAPPRPNNGGKDVIRGRVNHVTAEDVLTTPDVIVGTFLIHSIPATILFDSGASHSFISVPFVGRNQLGVERLRNPLLITTPGGVMTAKYYSPAVPIEIHGIPFPSDLILLDTKNLDMILGMNWLAQFQGVVDCARRTVTLYRGPEQPVVFFAPPTSVGSSELHQIGLSETPIVSEFRDVFPEELPGMPPKREIEFRIDLAPGTTPLYKRPYRMAANELAEVKKQLEELKEKGYIRPSTSPWGAPVIFVEKKDKTKRMCVDYRALNEVTIKNKYPLPRIDDLFDQLKGATVFSKIDLRSGYHQLRIREKDIPKIVFTTRYGLYEFTVMSFGLTNAPAFFMNLMNKVFMEYLDKFVVVFIDDILVYSQSEEDHQQHLRRVLGKLREHQLYAKLSKCEFWLSEVKFLGHVISAKGVAVDPETVIAVTDWKQPKTVTQIRSFLGLAGYYRRFIENFSKIARPMTQLLKKEEKFVWSPQCEKAFQTLKEKLVSSPVLILPDTRKDFLVYCDASRQGLGCVLMQDGHVVAYASRQLRPHEGNYPTHDLELAAVVHALKIWRHYLIGNRCEIYTDHKSLKYIFTQSDLNLRQRRWLELIKDYDVGIHYHPGKANVVADALSRKSRCNTLGVCDIPPELNQQMEALNLSIVSRGFLATLEAKPTLLDQISEAQKNDPDMHGILKNMKQGKAAGFTEDEHGTLWNGNRVCVPDDKELRQLILQEAHESPYSIHPGSTKMYLDLKEKYWWVSMKREIAKFVALCDVCQRVKAEHQRPAGLLQPLQVPKWKWDEIGMDFITGLPKTQGEYDSIWVVVDRLTKVARFIPVKTTYGGNKLAELYFARIDKSLPYAEFSYNNSYQASIQMAPYEALYGRKCRTPLLWDQVGESQVFGTDILREVKAKIRTIRENLKVAQSRQKSYADNRRRDLEFAVDDFVYLRVTPLRGVHRFQTKGKLAPRFVGPFRIIARRGEVAYQLELPASLGNVHDVFHVSQLKKCLRVPSE

SEQ ID NO: 19654 - protein, 548 aa, Oryza sativa
  Clone ID: TF_OSC401716j.C1.p8.gm
MPPPRLGSAEPVSCRARAPAAPPRDRPIGFVPIRAVGSRGPAVDSLGGPGPRWTGAHVPLTGGARLPAPPLPLDDVSEGYGLRHWWGCDHTSRWSARGTISPDQDPVSFMGQLSAILIIFHVSLLKISLNPKSWLIKLRQWKSCYNRCDVDTKYTRCNRCNDNVRSHVNVTHHRSPEKDEKQCPGSNQAPSQSTNKKDGTLQHNFGANRKVIWKMDNGRTMIITSSEFTPEDAARIPKRTDHVPKDCQLNAVIAKTKKEQGTTVQPIRQPMTIDNSGHNPSALPPTPAPVEANHGRSNVTKDVHKSLLVPVSAAKVHNQKPAPRDQASRFCRNCRKPGHRFSDCPLPRAAKAVRRDSQVTSIAHDTNRHLNVQPPPQRIIVKGTVKGRIVPPATVSSLQHQRQQGKQCQENNSSLQLQRGGTLLRQHPRQVLSAPGRPTVVSSSNAPGIAPIWRPIDKSPLGNPTGKKILPVTADKTVAPPPSKINKQSNVPGSISGTQMKRVMEYLKVTMVGSMVLDTMKSLQRQYQGMWQFNVQISQTADQHQLSF

SEQ ID NO: 19655 - protein, 712 aa, Oryza sativa
  Clone ID: TF_OSC405120j.C1.p8.gm
MGQLSAILIVFHVSLLKISLNPKSWLIKLRQWKSCYNRYDVGVPNIGIEDPCQNAVQIPEDNDSQVNVFARSPEKDEKQCPGSNQAPSQSTDKKDGTLQPNSGVNRTVIWKMDNGRTMIITGSEFTPEDAARIPKRERFSADDDDDNDDDNDDNDDATLDSFRERELKFKAYHVPKDCQLNAVIAKTKKEQGTTVQPIRQPMTIDNSGHNPSALPPTPAPVEANHGRSNVTKDVHKSLLVPVSAAKVHNQEPAPRDQASRFCRNCRKPGHRFSDCPLPRAAKAVRRDSQVTSTAHDTNRHLNVQPPPQRIIVKGTVKGRIVPPAIVSSLQHQRQQGKQCQENNSSLQLQRGGTLLRQHPRQVLSAPGRATVVRSSNAPRIAPIWRPIDKSPLGNPTGKKILPVTADKTVAPPPSKINKQSNVPEVEGVLTQSGTSPDYKVGNRITDISQKMVEELKESVKEEQAEKKEEAAKEKPDEPQEIVLKVDMHCEGCAKKVEKSLLRFEGQKAFHTVSNYDFCRRAADPSKVCERVQRKTKRRVELIFPLPPPPEEEKKEEAPAPPPEEKKEEPPKTITVILKVQMHCDACAQILQKRISRTEGVESVETDLLNGLVVVKGVMDPAVLIESIQRKTRRPAVIVEEVKPREEEKKAEEEEKKPDEDKADGIEEIKKYDFWPPVQYYVEYVYPYPLPPPPTALVSEEFSDENPNACTVA

SEQ ID NO: 19656 - protein, 1090 aa, Oryza sativa
  Clone ID: TF_OSC14471j.C1.p1.fg
MASKLKSMEMEISKGFLVHFIMSSLPQEFSPFTINYNAMKIKWGIDELIAMYVQEEERLKAERVDHANLFKHSKKKKYKKFKKEYLKPKPSQFKEKGQSSNQSQQNKSGGNPYTEEKGKEKDGCYFCGKSGHRQKDCIGFMRWLSKKDTDVISFVDESLNIDYATNSWWIDSGATIHVANSLQGFAMRRTLRRGERRIRVANGERISTHGDCQRGPLGCKRACPGEGGTLQYYSPAVPIEIQGIPFPSDLILLDTKNLDVILGMNWLAQFQGVVDCARRTVTLYRGLEQPVVFFAPPTSVGSSELHQIGLSETPIVREFRDVFPEELPGMPPKREIEFRIDLAPGTTPLYKRPYRMAANELAEVKKQLEELKEKGGRPSAASPSGVGKVAGTPTVCKLSKCEFWLSEVKFLGHVISTKGVAVDPETVTAVTDWKQPKIVTQVRSFLGLAGYYRRFIENFSKIARPMTQLLKKEEKFVWSPQCEKAFQTLHEKLVSSPVLILPDTRKDYLVYCDASRQGLGCVLMQEGHVVAYASRQLRPHEGNYPTHDLELAAVVHALKIWRHYLIGNRCEIYTDHKSLKYIFTQSDLNLRQRRWLELIKDYDVGIRYHPGKANVVADALSRKSRCNTLGVRGIPPELHQQMEALNLSIVGRGFLAMLEAKPTLLDQIREAQKNDPDMHGILKNMKQGKAAGFTEDEHGTLWNGNRRVKAEHQRPARLLQPLQVPEWKWDEIGMDFITGLPKTQGGHDSIWVVVDRLTKVARFIPVKTTYGGNKLAELYFARIVSLHGVPKKIVSDRGSQFTSHFWKKLQEELGTRLNFSTAYHPQTDGQTERLNQILEDMLRACVLDFEKTWDKSLPYAEFSYNNSYQASIQMAPYEALYGRKCRTPLLWDQVGESQVFGTDILREAEAKVRTIWDNLKVAQSRQKSYADNRRRNLEFAVDDFVYLRVTPLRGVDRFQTKGKLAPRFVGPFRIIARRGEVAYQLELPASLGNVHDVFHVSQLKKCLRVPSEQADSEQIEVREDLTYVERLVKILDTMERRTRNRVIRFCKVQWSNNAEEEATWERESELKAAHPDLFASSSESRGRDSV

SEQ ID NO: 19657 - protein, 611 aa, Oryza sativa
  Clone ID: TF_OSC21716j.C1.p1.fg
MGNIEQLNGSNYASWKEKLEITLALLDIDYALHNDPPVEPRPENENYETLKRIYDEVKAKWDISNRKCLMIIKSSIIDAIRGAVPDTQTAREYLAKVEEQFKGSSKVYATTLIKRLVNERYDFTENLREHIMKKCHMVSKLKSMEMEISEGFLVHFIMSSLPQEFSPFTINYNAMKIKWGIDELIAMCVQEEERLKAERVDHANLFKHSEKKKYKKFKKEYLKPKPIQFKEKGQSSNQSQQNKSGGNPYTEEKGKEKDGCYFCGKSGHRQKDCIGFMRWLSKKGTDVISFVDESLNIDYATNSWWIDSGATIHVANSLQGFAMRRTLRRGQRRIRVANGVETEVEAIGDFTLTLHTGFKLQLHDVLYYRLGHISRGGIERLIKENILYPLDFSDADVDHCIDCIKGKYSKQIKKGANRSMGVLEIIHTDICGPFNEKHTTYGQIPGPFARFLQENGIKAQYSAPGEPQQNGVAERRNRTLMDMVSLGDQEHAVFLENDIIKGSMTPREVVLEEKRNYIPMPIIEEPVFSTHTHVAPSIERNNDATPAETPATTSSSVSNDENNEDAQQPQIVIDEQNNEPVRRSQRVRKSAIPSDYVTYINEEVNKPMGEE

SEQ ID NO: 19658 - protein, 1437 aa, Oryza sativa
  Clone ID: TF_OSC23733j.C1.p3.fg
MASSSSNPSALNGQTVSEKLTKSNFVLWKAQVLAALRGAQMAGFLDGSNQAPAATIIITKDDGKTTEKVANPALVQWKAQEQQVLSYLLSSLSREMEAIESLFASQSRARILNTRMALSTTVKGNRSMAEYVGKPVDDEELISYILAGLDFDYNSVVSSVTGRTGPISVSDVYALLVGFESRLELLQNAANPSANTASRGGRGGGGRDGRGRGGGNPGRGGSFGRGRNDGKPKPTCQLCGKIGHIVAKCWKRFDPSFTGEEKNANTAAVNSYGIDTNWYIDSGATDHITGEMEKLMVKDKYTGNDQVHNASGAGMNIDHVGHTAIRTPTRDLTLKNVLHVPDACKSLVSAHRFTRDNKTFVELHPFFFLVKDQVTRMPLLRGRCRSGLYPLPTDKLQTISNKQAFGVVKPSLFRWHSRLGHPSFSVVNRVISQNNLPVVRDSSQEFVCDACQKGKSHQLPYPKSSSVSIEPLQLVFSDVWGPAINSVGNKVYYVSFIDDFSKFTWIYLLKHKSEVFAKFQDFQNLVERLTNRKIKAVQTDWGGEYQRLNSFFQRIGIEHYVACPYAHQQNGSAERKHRHIVEVGLSLLAHASMPLKFWDEAFTTAAYLINRTPTKVINFETPLQRLFNLPPDYSLLRTFGCACWPNLRPYNARKLAFRSKQCAFLGYSTLHKGFKCLDISTGRVYISRDVVFDEQIYPFEKLHPNAGARLRAEINLLPAHLLPLLDHGGVQMHDQPLIDDSNPANPIIENSAGSSAGNGAKSGAQHGHDFMQSSGGQPTGGHHDSLTHSTMHGTENQADQENSASSRSAEPVTPRHAASPSAAPHAATAPIASSHAAASSLSGDIVGPGSRGPSQEDQDTSQEDQDTSASAPASSTSHDDDSAQFAAQPTRPVTRAQRGIHKPKKYTDGTVRYAGLTHTGEPGNLQEALSNTNWKSAMDSEFAALVRNKTWHLVPPKQGVNVIDCKWVYKIKRKADGTIDRYKARLVAKGFKQRYGIAYEDTFSPVVKAATIRLVLSLAVSQGWSLRQLDVQNAFLHGYLEEDVYMRQPPRYEEKKMPHYLCKLDKALYGLKQAPRAWYSRLSKRLQELGFVSSKADTSLFFYNKKGLVMFLLVYVDDIIVASSSGQAVTVLLKELEKDFALKDLGDLHYFLGIEVKKTEKGLLLTQERYAGDIIKRTGMSNCKPVSTPLCVSEKLWLNDGEFLGANDASQYRSIVGALQYLTLTRPDISFSVNKVCQFLQNPTIVHWAAVKRILRYLQGTLGLGLKIDKSFSYIVSAFSDADWAGCLDDRRSTGGFAVFLGSNLISWSARKQASVSRSSTEAEYKALANATAEVMWVRKLLEEIGLLHPGPSQLWCDNIGATYLSANPVFHARTKHIEVDYHFVREQVAQKMLEIRFVPSQDQIADGFTKPLPVRQLQLFCNNLNLGELRLRGSVR

SEQ ID NO: 19659 - protein, 548 aa, Oryza sativa
  Clone ID: TF_OSC23733j.C1.p3.gm
MALSTTVKGNRSMAEYVGKMKSLADDMASAGKPVDDEELISYILAGLDFDYNSVVSSVTGRTGPISVSDVYALLVGFESRLELLQNAANPSANTASRGGRGGGGRDGRGRGGGNPGRGGSFGRGRNDGKPKPTCQLCGKIGHIVAKCWKRFDPSFTGEEKNANTAAVNSYGIDTNWYIDSGATDHITGEMEKLMVKDKYTGNDQVHNASGADKLQTISNKQAFGVVKPSLFRWHSRLGHPSFSVVNRVISQNNLPVVRDSSQEFVCDACQKGKSHQLPYPKSSSVSIEPLQLRIGIEHYVACPYAHQQNGSAERKHRHIVEVGLSLLAHASMPLKFWDEAFTTAAYLINRTPTKVINFETPLQRLFNLPPDYSLLRTFGCACWPNLRPYNARKLAFRSKQCAFLGYSTLHKGFKCLDISTGRVYISRDVVFDEQIYPFEKLHPNAGARLRAEINLLPAHLLPLLDHGGGPGELGVISICRTGHAATRSESLGRATRGNRANRVVTRGSLVSVGRHCGTGFTWAIAGGSRHVAGGSRHVCISSCFFHIA

SEQ ID NO: 19660 - protein, 1254 aa, Oryza sativa
  Clone ID: TF_OSC400390j.C1.p57.fg
MGNIEQLNGSNYASWKEKLEITLALLDIDYALHNDPPVEPRPENENYETLKRIYDEVKAKWDISNRKCLMIIKSSIIDAIRGAVPDTQTAREYLAKVEEQFKGSSKVYATTLIKRLVNERYDFTENLREHIMKKCHMVSKLKSMEMEISEGFLVHFIMSSLPQEFSPFTINYNAMKIKWGIDELIAMCVQEEERLKAERVDHANLFKHSEKKKYKKFKKEYLKPKPIQFKEKGQSSNQSQQNKSGGNPYTEEKGKEKDGCYFCGKSGHRQKDCIGFMRWLSKKGTDVISFVDESLNIDYATNSWWIDSGATIHVANSLQGFAMRRTLRRGQRRIRVANGVETEVEAIGDFTLTLHTGFKLQLHDVLYYRLGHISRGGIERLIKENILYPLDFSDADVDHCIDCIKGKYSKQIKKGANRSMGVLEIIHTDICGPFNEKSDRGGEYYGRHTTYGQIPGPFARFLQENGIKAQYSAPGEPQQNGVAERRNRTLMDMVRSMLSHSTLPVKLWMEALKTATHILNRVPSKSVPKTPFELWTGKKPTLNYFHVWGCPAEARVFNPNMGKLDIKIISCHFIGYPDKSKAYRFYCPNQFTKFIETRHAVFLENDIIKGSMTPREVVLEEKRNYIPMPIIEEPVFSTHTHVAPSIERNNDATPAETPATTSSSVSNDENNEDAQQPQIVIDEQNNEPVRRSQRVRKSAIPSDYVTYINEEVNKPMGEEVNEPILDNDPISFKEAMKSKHSSEWLKAMKDEMKSMSTNKVWDLVEIPEGAKTVGCKWVYKTKRDPKGNIERFKARLVAKGFTQREGIDYNETFSPVSTKDSFRIIMALVAHYDLELHQMDVKTAFLNGDLYEDVYMAQPEGFVMKGKEHMGCHLKKSIYGLKQASRQWYLKFDQIIRQFGFKENKKDDCIYTKFKESKFIFLILYVDDILLASNDKNMLLETKKFLASKFEMKDLGEANYVLGIEIYRGRSNGVLGLSQKAYIEKVLKKYNMHNCSASPAPIMKGDKYGKFQCPKNEYEAAQMKSISYASAVGSIMYAQVCTRPDLAFVTGMLGRYQSNPGLEHWKLAKKTLRYLQGTKDLMLTYRKSENLEVVGYSDSDLAGCVDDKKSTSGYIFTLARGAISWKSSKQRVTTSSTMQAEYVACYEATGQAIWLKNFIPGLRVVDSISKPLKLYCDNKPAVYYASSNKSSASAKYIDIKYHVVKEMIQDQTISIEYMNTKLMLADPLTKGLPPVVFKEHVAGIGLVEKPSILE

SEQ ID NO: 19661 - protein, 1184 aa, Oryza sativa
  unsure (1)..(1184): unsure at all Xaa locations
  Clone ID: TF_OSC400596j.C1.p9.np
MGTPGDQASYASQIAGIIGNIEQLNGSNYAPWKEKLEITLALLDIDYALHNDPLVEPRPENENYDTLKRRYDEVKAKWDISNRKCLMIIKSSIIDAIRGAVPHTXIAREYLAKVEEEFKGSSKVYATTLIKRLVNERYDFTGNLREHIMKKCHMASKLKSMEMEISEGFLVHFIMSSLPQEFSPFTINYNAMKIKWGIDELIAMCVQEEERLKAARVDHANLFKHSEKKKYKKFKKEYLKPKPIQFKEIGQSLNQSEQNKSGGNLYTEEKGKEKDGCYFCGKSGHRQKDCIGFMRWLSKKGFAMRRTLRRGERRIRVANGVETEVKAIGDFTLTLHTGFKLQLYDILYVPSMKRNLVLVSRLDNGGYYCTFGNNRCIIMHDNKEVGLADEQLYQIFMCDATYNVSSNANVSTKRKYNDNETSSKLWHYRLGHISRGRIEHLIKENILYPLDFSDADVDHCIDCIKGKYSKQIKKGANRSMGVLKIIHTDICGPFNEKSVDGFVSFITFTDDYSRYGYIYPIKERSEALDKFKIFKAEVENQHDRKIKIFTKFIETRHVVFLENDIIKGSMTPREVVLEEKRNYVPMHIIEEPVFSTHTHVAPSIERNNDATPTEAPATTSSSVSNDENNEDAQQPQIVIDEQNNEPVRRSQRVRKSAIPSDYVTYMNEEVNELMSEEVNEPILDNDPISFKEAMKSEHSSEWLKAMKDEMKSMSTNKVWDLVEIPEGAKTVGCKWVYKTKRDPKRNIERFKARLVAKGFTQREGIDYNETFSPVSTKDSFRIIMALVAYYDLELHQMDVKTAFLNGDLYKDVYMAQPEGFVMKEKEHMGCHLKKSIYGLKQESRQWYLKFDHIIRQFGFKENKKDDCIYAKFKEKFLVSKFEMKDLGEATYVLGIEIYRDRSNGVLGLSXKAYIEKVLKKYNMHNCLASPAPIMKGDKYGKFQCPKNEYEAAQMKSIPYASAVGSIMYAQVCTRPDLAFVTEMLGRYQSNPGLEHWKLAKKTLCYLQGTKDLMLTYRKSENLEVVGYLDSDLAGCVDDKKSTSGYIFTLAGGAISWKSSKQRVTASSTMQAEYVACYEATRQAIWLKNFILGLRVVDSISKPLKLYCDNKPAVYYASSNKSASAKYIDIKYHVVKEMIQDQTISVEYMNTKLMLADPLTKGLPPVVFKEHVASMGLVEKPLILE

SEQ ID NO: 19662 - protein, 1225 aa, Oryza sativa
  Clone ID: TF_OSC401051j.C1.p47.fg
MGTPGDQASYASQISGIMGNIEQLNGSNYASWKEKLEITLAMLDIDYALHNDPPVEPRPENENYETLKRIYDEVKAKWDISNRKCLMIIKSSIIDAIRVAVPDTQTAREYLAKIEEQFKGSSKVYATTLIKRLVNERYDFSGNLREHIMKKCHMASKLKSMEMEISEGFLVHFIMSSLPQEFSPFTINYNAMKIKWGIDELIAMCVQEEERLKAERVDHANLFKHSEKKKYKKFKKEYLKPKPIQFKEKGQSSSQSQQNKSGGNPYTEEKEKEKDGCYFCGKSGHRQKDCIGFMRWLSKKGTDVISFVDESLNIDYATNSWWIDSGATIHVANSLQGFAMRRTLRRGERRIRVANGVETEVEAIGDFTLTLHTGFKLQLHDVLYVPSMKRNLVSVSRLDNGGYYCTFGNNRCIIMHDNKEVGLAVGREQLYQISVCDATYNVDSSSNANISTKRKHNDNKTFSKLWHYRLGHISRGRIERLIKENILYPLDFSDADVVHCIDCIKGKYSKQIKKGANRSMGVLEIIHTDICGPFNEKSVDGFDSFITFTNDYSRYGYIYPIKERSEALDKFKIFKVEVENQHDRKIKIFTKFIETRHAVFLENDIIKGSMTPREVVLEEKRNYVPMPIIEEPVFSTHTHVAPSIERNNDATPAEAPATTSSSVSNGENNEDAQQPQIVIDEQNNEPVRRSQRVRKSAIPSDYVIYMNEEVNEPMIEEVNEPILDNDPISFKEAMKSEHSSEWLKAMKDEMKSMSTNKVWDLVEIPKGAKTVGCKWVYKTKRDPKGNIERFKAGLVAKGFTQREGIDYNETFSPVSTKDSFRIIMALVAHYDLELHQMDVKTAFLNGDLYEDVYMAQPEGFVMKRKEHMGCHLKKSIYGLKQASRQWYLKFDQIIRQFGFKANKKDDCVYAKFKEKILASKFEMKDLGEATYVLGIEIYRDRSNGVLGLSQKAYIEKVLKKYNMHNCSASPAPIMKGDKYGKFQCPKNEYEAAQMKSIPYASAIRSIMYAQVCTRPDLAFVTGMLGRYQSNPGLEHWKLAKKTLRYLQGTKDLMLTYRKSENLEVVGYSDSDLAGCVDDKKSTSGYIFTLAKGAVSWKSSKQRVTASSTMQAEYVACYEATGQAIWLKNFIPGLRVVDSISKPLKLYCDNKPAVYYTSSNKSSASAKYIDIKYHVVKEMIQDQTISVEYMNTKLMLADPLTKGLPPIVFKEHVAGMGLVEKPLILE

SEQ ID NO: 19663 - protein, 627 aa, Oryza sativa
  Clone ID: TF_OSC405418j.C1.p1.fg
MAAATASSPATAAAANSDDEDNYEEYIPVAKRRAMEADRLRRLRLSKPAPPSSSAAEAASDLPPPPPPPPNQPSAGGGGGGLEASAKPSLLVKATQLKRAAPEVTHTEQLIMQEKEMIEHLSDRKTLMSVRELAKGITYSDPLKTGWKPPLRLRRMPRAKADELRRKWHILVDGDDVPPPARDFRDLRLPEPMLRKLREKGIVQPTPIQVQGLPVVLSGRDMIGIAFTGSGKTLVFVLPLIMVALQEEMMMPIVPGEGPFGMIICPSRELAKQTYDVIEQFLVPLKEAGYPEIRPLLCIGGVDMRAQLDVVKKGVHIVVATPGRLKDLLAKKKMNLDNCRYLTLDEADRLVDLGFEDDIREVFDHFKAQRQTLLFSATMPKKIQNFAKSALVKPVIVNVGRAGAANLDVIQEVEYVKEDARIIYLLECLQKTPPPVLVFCENKADVDYIHEYLLLKGVEAVAIHGGKDQEERENAIEFFKNGKKDVLVATDVASKGLDFPDIQHVINYDMPAEIENYVHRIGRTGRCGKTGIATTFINKNQTETTLLDLKHLLKEAKQRIPPVLAELNDPLEDEETMAKESGVKGCAYCGGLGHRVTDCPKLEHQKSMAIAGSRRDYYGGGGYRGEI

SEQ ID NO: 19664 - protein, 1098 aa, Oryza sativa
  Clone ID: TF_OSC416746j.C1.p19.fg
MGTPGDQASYASQIARIMGNIEQLNGSNYASWKEKLEITLALLDIDYALHNDPPVEPRPENENYETLKGRYDEVKAKWYISNRKCLMIIKSSIIDAIRGAVPDTQTAREYLAKVEEQFKGSSKVYATTLIKRLVNERYDFTGNLREHIMKKCHMASKLKSMEMEISEGFLVHFIMSSLPQEFSPFTINYNAMKIKWGIDELIAMCVQEEERLKAERVDHANLFKHSEKKRYKKFKKEYLKPKPIQFKEKGQSSNQSQQNKSGGNPYTEEKGKEKDGCYFCGKSGHRQKDCIGFMRWLSKKDVDHCIDCIKGKYSKQIKKGANRSMGVLEIIHTDICGPFNEKSVDGFDSFITFTDDYSRYGYIYPIKEISEALDKFKIFKAEVENQHDRKIKIVRSDRGGEYYGRHTTYGQIPGPFARFLHESGIKAQYSAPGEPQQNGVAERRNRTLMDMGCPAEARVFNPNMGKLDLKTISCHFIGYPDKSKAYRFYCPNQFTKFIETRHAVFLENDIIKGSMTPREVVLEEKRNYVPMPIIKEPVFSTHTHVAPSIERNNDATPAEAPATTSSSVSNDENNEDAQQPQIVIDEQNNEPVRKSQRVRKSAIPSDYVTCMNEDVNEPMSEEVNEPILDNDPISFKEAMKSEHSSEWLKAMKDEMKSMSTNKVWDLVEIPEAAKTVGCKWVYKTKRDPKGNIERFKARLVAKGFTQREGIDYNETFSPVSTKDSFRIIMALVAHYDLELHQMDVKTAFLNGDLYEDVYMAQPEGFVMKGKEDMGCHLKKSIYGLKQASRQWYLKFDQIIRQFGFKENKKDDCIYTKFKESKFIFLILYVDDILLASNDKNMLLETKKFLASKFEMKDLGEATYVLGIEIYRDRSNGVLGLSQKAYIEKVLKKYNMHNCSASPAPIMKCDKYEKFQCPKNEYEAAQMKSIPYASAIGSIMYAQVCARPDLAFVTGMLGRYQSNPGGAVSWKSSKQRVTASSTMQAEYVACYEATGHAIWLKNFIPGLRVVDSISKPLKLYCDNKPAVYYSSSNKSSASAKYIDIKYHVVKEMIQDQTISVEYMNTKLMLADPLTKGLPPAVFKEHVAGMGLVEKPSILE

SEQ ID NO: 19665 - protein, 1296 aa, Oryza sativa
  Clone ID: TF_OSC421895j.C1.p14.fg
MGTPGDKASYASQIAGIIGNIEQLNGSNYASWKEKLEITLAQLDIDYALHNDPPVEPIPENENYETLKRRYDEVKAKWDISNRKCLMIIKSSIIDAIRGAVPDTQTAREYLAKVEEQFKGSSKVYATTLIKRLVNERYDFTGNLREHIMKKYHMASKLKSMEMEISKGFLVHFIMSSLPQEFSPFTINYNAMKIKWGIDELIAMCVQEEERLKAERVDHANLFKHSEKKRYKKFKKEYLKPKPIQFKEKGQSSNQSQQNKSGGNPYTEEKGKEKDGCYFCGKSGHRQKDCIGFMRWLSKKGTDVISFVDESLNIDYATNSWWIDSGATIHVANSLQGFAMRRTLRRGERRIRVANGVETEVEAIGDFTLTLHTGFKLQLHDVLYVPSMKRNLVSVSRLDNGGYYCTFGNNRCIIMHDNKEVGLAVGWEQLYQISVCDATYNVDSSSNANVSTKRKHNDNETSSKLWHYRLGHISKGRIERLIKENILYPLDFSDADVDHCIDCIKGKYSKQIKKGANRSMGVLEIIHTDICGPFNEKSVDGFDSFITFTDDYSRYGYIYPIKERSEALDKFKIFKAEVENQHDRKIKIVRSDRGGEYYGRHTTYGQIPGPFARFLQESGIKAQYSAPGEPQQNGVAERRNRTLMDMVRSMLSHSTLPVKLWMEALKTATHILNRVPSKSVPKTPFELWTGKKPTLNYFHVWGCPAEAQVFNPNMGKLDLKTISCHFIGYPDKSKAYRFYCPNQFTKFIETRHAVFLENDIIKGSMTPREVVLEEKRNYVPMPIIEEPVFSTHTHVAPSIERNNDATPAEAPATTSSSVSNDENNEDAQQPQIMIDEQNNEPVRRSQRVRKSAIPSDYVTYMNEEVNEPMSEEVNEPILDNDPISFKEAMKSEHSSEWLKAMKDEMKSMSTNKVWDLVEIPEGAKTVGCKWVYKTKRDPKGNIERFKSRLVAKGFTQREGIDYNETFSPVSTKDSFRIIMALVAHYDLELHQMDVKTAFLNGKEHMGCHLKKSIYGLKQASRQWYLKFDQIIRQFGFKENKKDDCIYTKFKESKFIFLILYVDDILLASNDKNMLLETKKFLASKFEMKDLGEATYVLGIEIYRDRSNGVLGLSQKAYIEKVLKKYNMHNCSASPAPIMKGDKYGKFQCPKNEYEAALMKSIPYASAVGSIMYAQVCTRPDLAFVTGMLGRYQSNPGLEHWKLAKKTLRYLQGTKDLMLTYRKSENLEVVGYSDSDLAGCVDDKKSTSGYIFTLARGAVSWKSSKQRVTTSSTMQAEYVACYEATGQAIWLKNFIPG

SEQ ID NO: 19666 - protein, 1407 aa, Oryza sativa
  Clone ID: TF_OSC900317j.C1.p15.fg
MGTPGDQASYASQISGIMGNIEQLNGSNYASWKEKLEITLALLDIDYALHNDPPVEPRPENENYETLKRIYDEVKAKWDISNRKCLMIIKSSIIDAIRGVVPDTQTAREYLAKIEEQFKGSSKVYATTLIKRLVNERYDFTGNLREHIMKKCHMASKLKSMEMEISEGFLVHFIMSSLPQEFSSFTINYNAMKIKWGIDELIAMCVQEEERLKAERVDHANLFKHSEKKKYKKFKKEYLKHKPIQFKEKGQSSSQSQQNKSGGNPYTEEKGKEKDGCYFCGKSGHRQKDCIGFMRWLSKKGTDIISFVDESLNIDYATNSWWIDSGATFHVANSLQGFAMRRTLKRGERRIRVANGVETEVEAIGDFTLTLHTGFKLQLHDVLYVPSMKRNLVSVSRLDNDGYYCTFGNNRCIIMHDNKEVGLAVGWEQLYQISVCDATYNVDSSSNANISTKQKHNDNETSSKLWHYRLGHISRGRIERLIKENILYPLDFSDADIDHCIDCIKGKYSKQIKKGANRSMGILEIIHTDICGPFNEKSVDGFDSFITFTDDYSRYGYIYPIKERSEALDKFKIFKAEVENQHDRKIKIVRSDRGGEYYGRHTTYGQIPGPFARFLQESGIKAQYSAPGEPQQNGVAERRNRTLMDMVRSMLSHSTLPVKLWMEALKTATHILNRIPSKSVPKTPFELWTGKKPTLNYFHVWGCPAEARVFNPNMGKLDLKTISCHFIGYPDKSKAYRFYCPNQFTKFIETRHAVFLENDIIKGSMTPREVVLEEKRNYVPMPIIKEPVFSTHTHVTPSIERHNDATPAEAPATTSSSISNDENNEDAQQPQIVIDEQNNEPVRRSQRVRKSAIPSDYITYMNEEVNEPMSEEVNEPILDNDPISFKEAMKGEHSSEWLKAMKDEMKSMSTNKVWDLVEIPEGAKTVGCKWVYKTKRDPKGNIKRFKVRLVAKGFTQREGIDYNETFSPVSTKDSFRIIMALVAHYDLELHQMDVKTAFLNGDLYEDVYMAQPEGFVMKGKEHMGCYLKKSIYGLKQASRQWYLKFDQIIRQFGFKENKKDDCIYAKFKESKFIFLILYVDDILLASNNRNMLLETKKFLASKFEMKDLGEATYVLGIEIYRDRSNGVLGLSQKAYIEKVLKKYNMHNCSASPAPIMKGDKYGKFQCPKNEYEAAQMKSIPYASAVGSIMYAQVCTRPDLAFVTGMLGRYQSNPSLEHWKLAKKTLRYLQGTKDLMLTYRKSENLEVIGYSDSDLAGCVDDKKSTSGYIFTLARGAVSWKSSKQKVTASSTMQAEYVACYEATGQAIWLKNFIPGLRVVDSISKPLKLYCDNKPAVYYASSNKSSASAKYIDIKYHVVKEMIQDQTISVEYMNTKLMLADPLTKDLPPAVFKEHVAGMGLVEKPLILE

SEQ ID NO: 19667 - protein, 1313 aa, Oryza sativa
  Clone ID: TF_OSC400615j.C1.p16.fg
MASSSMAAAISNPLFGLQISEKLTKQNHPLWAAQILTTLRGAQLEEHIVSTTAAPAAEIEKEDGDKDKKTKIVIPNPEYKTWFVQDQQVLGFIFSSLSREVLQQVAGARTAAQAWNMIDDMFSCKSKAGTINVLLALTTTQKGPMSISEYIAKMRSLADEMAAAGKPLDEEELVAYIINGLDSEFDAAVEGPMATARIAPVSISHVYSQLLSYENRIRIRQAYLTTSANAANRGGGRGGRGSSTGNRGGGRGGFGRGGHGRGAPSGASQGRGRGNDTRPVCQVCHKRGHVASDCWHRYDDSYVPDEKLGGAATYAYGVDTNWYVDTGATNHITGQLDKLTTKERYKGTDQIHTASGEGMSIKHVGHAIVPTPSRPLHLKNVLHVPEAAKNLVSVHKLVADNYAFLEIHGKYFLIKDKATRRTILEGPCRRGLYPLPARLSLRQAFVATPSFERWHGRLGHLSKPIVLRILSQNKLPCLSNSVNESVCDACQQAKCHQLPFPRSTSVSNNPLELIHSDVWGPASESVGAKKYYVSFIDDYSKFVWIYFLKHKSEVFQKFHEFQKLVERQFDRKILSMQTDWGGEYLKLHTFFNEIGISHHVSCPHTHQQNGAVERKHRHIVEVGLSLLAHASMPLKFWDEAFLATTYFINRLPSKVIKFDTPLERISQKCEFRYTGGIWPGTWSKWRLGGRIRLRFSVGPGAAAAAGLRICDAGGVGAAALGHPTSARATSPAASPTAAPPSPARAVASSSGGAQQSHQPGSSAPSESAQLSEVMRPKTRLQSGIRKEKIYTDGTVRYSCFTSSGEPQTLHEALGDKNWKEAMDSEYQALMKNKTWHLVPSKKGQNIIDCKWVYKVKRKADGSLDRYKARLVAKGFKQRYGIDYEDTFSPVVKAATIRTILSIAISRGWTLRQLDVQNAFLHGVLEEDVFMRQPPGYEQKDGYVCKLDKALYGLKQAPRAWYSRLSTKLHELGFKSSKSDTSLFFYSKGDVTMFMLVYVDDIIVASSSIDATNALLKNLNQEFALKDLGRLHYFLGIEVKEVNDGIVLTQEKYAMDVLKRVNMSDCKAVNTPLSISEKLSAHEGNPLGPEDSTRYRSLVGALQYLTLTRPDLSFSVNKVCQYLHAPTTKHWAAAKRILRYLKHTVKLGLKISKSNSLLVSAFSDADWAGCLDDRRSTGGFAVFIGPNLVSWSARKQATVSRSITEAEYKALANATAEIMWIQTLLHELGIQVPKIAKVWCDNIGAKYMTANPVFHARTKHIEVDYHFVRERVARKLLQVEYISTKDQVADGFTKTLSVRQLEMFRNNLNLTGSD

SEQ ID NO: 19668 - protein, 1031 aa, Oryza sativa
  Clone ID: TF_OSC400622j.C1.p17.fg
MASFSMAAAISNPLFGLQISEKLTKQNHPLWAAQILTTLRGAQLEEHIVSTTAAPAAEIEKEDGDKDKKTKIVIPNPEYKTWFVQDQQVLGFIFSSLSREVLQQVAGARTAAQAWNMIDDMFSCKSKAGTINVLLALTTTQKGPMSISEYIAKMRSLADEMAATGKPLDEEELVAYIINGLDSEFDAAVEGLMATARIAPVSISHVYSQLLSYENRIRIRQAYLTTSANAANRGGGRGGRGSSTGNRGGRRGGFGRGGRGRGAPSGASQGRGRGNDTRPVCQVCHKRGHVASDCWHRYDDSYVPDEKLGGAATYAYGVDTNWYVDTGATDHITGQLDKLTTKERYKGTDQIHTASGEGMSIKHVGHAIVPTPSRPLHLKNVLHVPEAAKNLVSVHKLVADNYAFLEIHGKYFLIKDKATRRTILEGPCRRGLYPLPARLSLRQAFVATPSFERISQKCEFRYTGGIWPGGAQQSHQPGSSAPSESAQLSEVMRPKTRLQSGIRKEKIYTDGTVRYSCFTSSGEPQTLHEALGDKNWKEAMDSEYQALMKNKTWHRVPSKKGQNIIDCKWVYKVKRKADGSLDRYKARLVAKGFKQRYGIDYEDTFRPVVKAATIRTILSIAISRGWTLRQLDVQNAFLHGVLEEDVFMRQPPGYEQKDGYVCKLDKALYGLKQAPRAWYSRLSTKLHELGFKSSKSDTSLFFYSKGDVTIFMLVYVDDIIVASSSIVATNALLKNLNQEFALKDLGRLHYFLGIEVKEVNDGIVLTQEKYAMDVLKRVNMSDCKAVNTPLSISEKLSAHEGNPLGPEDSTRYRSLVGALQYLTLTRPDLSFSVNKVCQYLHAATTKHWVAAKRILRYLKHTVKLGLKISKSNSLLVSAFSDADWAGCLDDRRSTGGFAVFIGPNLVSWSARKQATVSRSSTEAEYKALANATAEIMWIQTLLHELGIQVPKIAKVWCDNIGAKYMTANPVFHARTKHIEVDYHFVRERVARKLLQVEYISTKDQVADGFTKTLSVRQLEMFRNNLNLTGSD

SEQ ID NO: 19669 - protein, 499 aa, Oryza sativa
  Clone ID: TF_OSC401245j.C1.p3.gm
GGGRGGFGRGGHGRGAPSGASQGRGRGNDTRPVCQVCHKRGHVASDCWHRYDDSYVPDEKLGGAATYAYGVDTNWYVDTGATDHITGQLDKLTTKERYKGTDQIHTASGEGTSIKHVGHAIVPTPSHPLHLKNVLHVPEAAKNLVSVHKLVADNYAFLEIHGKYFLIKDKATRRTILEGPCRRGLYPLPARSSLRQAFVATPSFVRVYVSRDVTFDEQVFPFANLHPNAGARLRAEISLLPPTLINEKTSDQGGEEHHDHLFNISMPNATDISCAESPRNVNSDIPGAFGRVHGANGDLAGESASDSASVQAQLQRQASGSATQGESEQQRSGIQPARATSPAASPTAAPPSPARAVASSSGGAQQSHQPGSSAPSESAQLSENAFLHGVLEEDVFMRQPPGYEQKDGYVCKLDKALYGLKQAPRACKGDVAMFMLVYVDDIIVASSSIDATNALLKNLNQEFALKDLGRLHYFLGIEVKEIGQDVWMIGILLGVLLFL

SEQ ID NO: 19670 - protein, 988 aa, Oryza sativa
  Clone ID: TF_OSC403212j.C1.p1.fg
MASSSMAAAIPNPLFGLQISEKLTKQNHPLWAAQILTTLRGAQLEEHIVSTTAAPAAEIEKEDGDKDKKTKIVIPNPEYKTWFVQDQQVLGFIFSSLSREVLQQVAGARTAAQAWNMIDDMFSCKSKAGTINVLLALTTTQKGPMSISEYIAKMRSLADEMAAAGKPLDEEELVAYIINGLDSEFDAAVEGLMATARIAPVSISHVYSQLLSYENRIRIRQAYLTTSANAANRGGGRGGRGSSTGNRGGGRGGFGRGGRGRGAPSGASQGRGRGNDTRPVCQVCHKRGHVASDCWHRYDDSYVPDEKLGGAATYATLDKLTTKERYKGTDQIHTASGEGMSIKHVGHAIVPTPSRPLHLKNVLHVPEAAKNLVSVHKLVADNYAFLEIHGKYFLIKDKATRRTILEGPCRRGLYPLPARSSLRQAFVATPSFVRWHGRLGHPSKPIVLRILSQNKLPCLSNSVNESVCDACQQAKCHQLPFPRSTSVSNNPLELIHSDVWGPASESVGAKKYYVSFIDDYSKFVWIYFLKHKSEVFQKFHEFQKLVEWQFDRKILSMQTDWGGEYLKLHTFFNEIGISHHVSCPHTHQQNGAVERKHRHIVEVGLSLLAHASMPLKFWDEDFLAATYLINRLPNIPGAFGPVHGANGDLAGESASDSSSVQAQLQRQASGSATQGESEQQRSGIQPARATLPAASPTAAPPSPARAVASSSGGAQQSHQPGSSAPSESAQLSEVMRPKTRLQSGIRKEKIYTDGTVRYSCFTSSGEPQTLHEALGDKNWKEAMDSEYQALMKNKTWHLVPSKKGQNIIDCKWVYKVKQKADGSLDRYKARLVAKGFKQRYGIDYEDTFSPVVKAATIRTILSIAISRGWTLRQLDVQNAFLHGVLEEDVFMRQPPGYEQKDGYVCKLDKALYGLKQAPRAWYSRLSTKLHELGFKSSKSDTSLFFYKKLSAHEGNPLGPEDSTRYRSLVGALQYLTLTRPDLSFSVNK

SEQ ID NO: 19671 - protein, 961 aa, Oryza sativa
  Clone ID: TF_OSC416267j.C1.p3.np
MASSSSAVVISNPLFGIQILEKFTKQNHSLWSAQILTTLRGAQLEGYITGTAEAPAAECEKEDGDKKVKTTISNPEYIKWFTQDQQVLGFLFSSLSREVLQQVAGAKTAAQAWSMINDMFTCKSKAGAINVLLALTTTQKGPISISEYIAKMRSLGDEMAGAGKPLDDEELIAYIINGLNSDFDATVEGLMATARIAPLSISHVYSQLLSYENRIRIRQAYLTTSANAANRGGRGGRGGNRGGRSSAPHGGRGGGRGNTGGANPGRGRGNDTRPVCQVCHKRGHVASDCWHRYDENYGPDEKLGGAATYAYGVDTNWYVDTRATDHITGQLDKLTTREKYKGTDLIHTVSGEGAKKYYVSFIDDYNKFVWIYFLKHKYEVFQKFHKFQKLFERQFDRKILAMQTDWGGEYVNNLHKGFKCLDVSSGRVYVSHDVTFDEQVFPFATLHPNAGARLRAEISLLPSNLMNNTLDQGGEEQYDQMFNIHVPNATDDACIAVESYDRNSAENCNGNERSGECGCYAQPGARSAGGFGGRIPLGRGLAAALSCASDAFADGRPVRSIPLGRGLAAALSCASDAFADGRPVRSWHVACRQLSPLAQQHHHVPRAGRAAVPSTWIICANGGRTTGYSCFTSSGEPYSCFTSSGEPQTLDEALGDKHWKEAMDSEYHAVMKNKTWHLVPPKRGLNVIDCKWVYKIKRKADGSLDRYKARLVAKGFKQRYGIDYEDTFSPIVKAATIRTILSIAVSRGWTLRQLDVQNAFFHGILEEEFYMRQLPGYEQDDIIIASSSNSATDTLLKNLNQEFALKDLGELHYFLGIELSAHEGTPLGPVDSTRYRNLVGALQYLTLTRPDLSFSVNKVCQYLHAPTTEHWAVAKRILRYLKHTVKLGLKISKSNSLLVSAFSDADWAGCLDDRLSTGGFAVFIGPNLVSWSARKQATVSSSSTEAEYKALANATAKIMWI

SEQ ID NO: 19672 - protein, 1007 aa, Oryza sativa
  Clone ID: TF_OSC900055j.C1.p8.gm
MHIPAGVVALKKREFRALNQGSRSVTEYLHDFNRLARYAPEDVRTDEERQEKFLEGLNDELSYALMSTDFRDFQQLVDKAIRQEDKYNRMEQKKRRAAQFKAQQGSNQRLRLVVGPQAPPYPQGGSSSVVRPQRQFYNNNTGNRGNDNRNMVARHVATPVQNQPVRKEQGSKPGVCLNCGDPGHYDDKCPKPRRVKNVPAPNNSNAPAPKARVNHVAAAEAQSAPDVVLANELAEVKRQVDDLLQKGYIRPCTSPWGAPVIFVEKKDHTQRMCVDYRALNEVTIKNKYPLPRIDDLFDQLEGATVFSKIDLRSGYHQLRIREEDIPKTAFTTRYGLFECTVMSFGLTNAPAFFMNLMNKVFMEYLDKFVVVFIDDILIYSKTKEEHEEHLRLALEKLREHQLYAKFSKCEFWLSEVKFLGHVISSGGVAVDPSNVESVLSWKQPKTVSEIRSFLGLAGYYRRFIENFSKIARPMTRLLQKEVKYKWTEDYYDMEIHYHPGKANVVADALRRKSYCNMSEGRRLPWELCQEFEKLNLGIVSNGFVAALEAKPTLFDQVREAQVNDPDILEIKKNMRRGKAIGFVEDEQGTVWLGERICVPDNKELKDTIMKEAHETLYSIHPGSTKMYQDLKQQFWWASMRREIAEYVALCDVCQRVKAEHQKPAGLLQPLKIPEWKWEEIGMDFITGLPRTSAGHDSIWIVVDRLTKVAHFIPVKTTYTGNKLAELYMARVLKKCLRVPTEEADPDRIELQEDLTYAEKPVRILEVRTEVRKLGRISFVAAGRRSSLPTVSSNHPADRPSSGEVANPSRPVMDDVMLTRAAVPVPLLPLPCAVLAAPPLHRCSLRRYCHCCAAALPRRLPPCCAGRFALPRHATTPLSRCAVRCLVAPLLHAAAMSRTTIALSPLPPCRCVSPCHSHAAAAVCRRSATTPLAAKRNRAAALASPLPCRTTKLCRHLAEPCCSLALLAGSAEPLLPLGSRLAESRLSRCRCRVSKHDFGNIKGVAHKT

SEQ ID NO: 19673 - protein, 1339 aa, Oryza sativa
  Clone ID: TF_OSC401126j.C1.p15.fg
MASKENRSEAMVSGADGINQGENLDPIGEGLDDHHGNLDQGLSSAMVLFKKKLTDGEEEDDDVLDVDLGEEVEEMKSKWLIIARFYSGQRERLGSLGDNRFLVEFACEADYNRVVYGGPWKHKGDALLVVPYDGLARPSEICIESLPLWLRIYDLPEIMMTTGFARSLGGKIGEVLEVGGAIHDFLRVKVAFPLSSPLKPLLRIWIKDKGVMSFPVKYENVPFFCFSCGRIGHAERECPEVGSSSAQVRFGKELRASPLKRKLQSFAPSSISTPKAAKVLNFSGAQREKVLTASSSSKASVLSNPKLNSGGATMFLVGEKADQEEKAASVEAEASLYPLPKGITAALEEGVSQMKMQLDDGELNLAARGPCSRERVSMSSDYGLSGEETPQHSAGIVSGVVNQDVKSPGGQSKKKQWVPTRETDRAVKAKSLSIGRDIGKPRKITVRLSADAVEARNCMQIREQLPWWALTASPTRNNECSSLELVRLVRMYSPRLVFLSATRQDQERVQGLRWRLGLKNCLALKGEGSGGGVALIWDETLSVHLLSMSCRSDHCPILLRVEREKYRPVKCFRYEIMWEREDSLGEAIKLAWEQEGTALNLGEWSVRVFGSVSQEIKEIKAKVEELSSLDPINHDGEIRKLYARLDELLYREEMMWLQRSRVSWLKEGDRNTKFFHRQAAWRAKKNKINCLKDEDSRYVENKGDMEKLTRDFFQKLYARDEGVDPGELVDLFDVRVDATEGLSTILNHEVVAGRLEELKVCRRAPGVSHLLFADDSLLFVKACPQQVESATFESNYLGLPTLEGRMTADKFKTIKERLIKRLNSWAEKFMSSGAKDILIKFVAQAIPTYVMGVFKLSVSSCEAYTKLVRDFWWGDEEDKRKVHWTAWDNLVLPKCMGGLGFRDVRIFNQALLGRQAWRLIQFPESLCARILKAKYFPNCDLIDAVFPADTSQTWKGIEHGPQLLKEGLIWRIADGKRVKFWKDRWIPRESSFRVSGMKSRCRLRWASQFIIPEGNCWDEQLIRRVCHPFDADEMLKIKLPQFPTDDFLAWHFEKYGMYTVRSGYRAALMKQINTDCVSFSSANSDWLLILLDRLSPEERAKLLLVLWSSWFLRNDSLFGSGSSTVHGSVLFLQSLWESISTTKVNPVTDIKGKGPQMGTKSATTVARSSPSDLVRWEAPPQGWAKINVDGAFVQQIGEAGTGIVIRDHVGDVLLTSWNGIRSCQSPEEAEAQACRDGLRLAADWIQMPVILESDCANVVASLTSGAKNRSPLWQVFQEIKSILPLLPAFKFNRINRGANEVAHCLSQLARRLKQSSVWRICAPECVKESLAKDCIPPNL

SEQ ID NO: 19674 - protein, 1393 aa, Oryza sativa
  Clone ID: TF_OSC401339j.C1.p46.fg
MAGTSSSSNTSTGGYSLMGCIKDIPTLKGDNYAEWKRKLDLAFILGEVDWVLTTPCPIEPAELVRGENESDADWQKRQRDNAPLVMSYDIEQKKWSLANKKCLAVVKNTIEPTILGSIPECDAVSEYLERIKSQFTGSSKTYATQLIKQLVTERYHGGGVRDHILRMSNMASKLKPMDLGITDDFLVHLVMASLPKQFDNFIVNYNISPEKWNFEKLIANCVQEEERIKESNGGSINYVKDKKKNHKSPTSKGKQSQHLPQQQQFAVEKDQCLHCKKTGHYKKDCSDFLKMIMAMKGENIITFVNESHYVGYSRSTWWIDSGATIHACNCLKAFRSTRTTQRRESTIRVANGVEEKVEAVGDLPLELANGFILLLRDVFYVPSLQRNLISVSKLDFDGYDCRFGSGKCELWHNNACIGLAVLRDELYLLSLSENVNVVSSLTKENKKRKRTPDVSSKLWHCRLGHISRGRIERLVKNEILPPLEFSDLEQCIECIKGKFVKSIKKGAKRSAGILEIIHTDICGPFPVKSVDGYDSFITFTDDYSRYGYIYPIKERSEALDKFKIFKAEVENQHDIKIKVVRSDRGGEYYGRHTPYGQVPGPFARFLLENGIVAQYSTPGEPQQNGVAERRNRTLMDMVRSMMSYSTLPLGLWMEALKTAIHILNRVPSKSVPKTPYELWTGRVPSLTHLRVWGSPTEAKVFNPNIGKLDPKTVSCHFIGYPERSKGYRFYCPNSYTKFVETRHAVFLEDEMIRGSSVVREIDLEERRVSVPAPSTQEPFFSLPADVVPAMPVIEVPAPVVTPPVATMNESEEPVIQDSTEMVATPEEELQQPQIDNVPVQETHQEPQVQDVPNVQAPRRSERVRRSAIRDDYKVYNIEESHMEDDPTSYEEAMRSARSSEWLEAMKDEMKSMKLNDVWDLEEIPKGAKTVGCKWVYKTKYDSRGNIEKFKARLVAKGFTQREGIDYNETFSPVSCKDSFRIIMALVAHYDLELHQMDVKTAFLNGDLEEKVYMAQPKGFVMKGNENMGCRLKRSIYGLKQASRQWYLKFDGTIKKFGFQENVEDNCIYSKFKNGRFIFLILYVDDILLASSDVSLLQETKKFLSSNFDMKDLGEASYVLGIEIHRDRTKKVLKKFNMYRCSATPAPIMKGEKYGASQCPRNQYELNEMKTKPYASAVGSLQCAQVCTRPDLAFVTGLLGRFQSNPGLEHWKLVKKVLRYLQGTKGLMLSYRRSESLQIVGYSDSDFAKDNTKSTSGYVFTLAGGAISWKSSKQTITAGSTMYAEFIACYEATGQVNWLKKFIPGLKVVDSIEKPLKLYCDNEPAVMYAHNNQSSGVAKHIDIKYYVVKDKVRDQTISLEHIKTERMLADPLTKGLPPNVFKEHVAGMGLREAL

SEQ ID NO: 19675 - protein, 990 aa, Oryza sativa
  Clone ID: TF_OSC401835j.C1.p5.gm
MVKTRNGSRVSNDASGSEEQISGARASDASNSSSSPPPKNPTIAQQQQQQNLRFGPPPPQSKLLDFLRVKPPTFSSTTNPIEANDWLHAIEKKLNLLQCNDQEKVALATHQLQGPAFVWWDNYMVTGPAGTEREFRSLQQGTRTVIEYLHEFNRLARYAPEDVRTDAERLEKFLSGLDDELTNQLISRDYEDFQKLGNSQKSRFMTGHQGGPSTMIIRQHRPYHPVQPAQPTQPEQPKRFGEKPELCFNCNELGHMVGSCPKPRRSGLKFVQARVNHASAEVAQSAPEVILGTFPINSTPAVILFDSGVTHSFISKRFAGAHGLSLVKLKIPMRVYTPRGGMTRTHYCPSVIVEIQGLIFPANLILLESKDFDVILGMDWLTRHIGVIDCASRTIKLTNAKGEVVTFQSLVPQKQGISLNQSTGEEQEEAVEKTTKKLEDIPIVREYPEVFPDDLTTIPPKRDIEFRIDLVPRTAPIHKRPYRMGANELADVKKQVDEQLQKGYICLSTSPWGAPVIFVEKKDKTKRMCVDYRALNEVTIKNKYPLPRIYDLFDQFKGATVFSKIDLRSGYHQLRIREEDIPKTAFITWYGLFKCIVMSFGLTNAPAFFMNLMNKVFIEFLDKFVVVFTDDILIYSKSEEEHEQHLRLVLEKLKEHQLYAKFSKCDFWLKKVQFLGHVVSAQGVAVDPANVESVTKWTPPRTVSQIRSFLGLAGYYSRFIENFSKIAMPMTQLLKKEEKFIWSAECNRSFEELKRRLVSAPVLILPDQTKDFQVYCDASRQGLGCNYPTHDLELAAVVHALKIWRHYLIGNRCEDYDMGIHYHPGKANVVADALSRKSYCNVAWIEELCCEKLIKLSMPFILAVPKCTKTSNKSSGGGEVAYQLELPSSMLGIHNVFHVSQLKKCLRVPEEQTSPYYIEIQEDLTYVEKPTRILETSVPHLLVVSYLRQLEPEPQPPAPPPFPPIRAPTPPAPRAHVAALSPRLLPPARA

SEQ ID NO: 19676 - protein, 310 aa, Oryza sativa
  Clone ID: TF_OSC27006j.C1.p1.fg
MADKFSTKPHVFNGVDFPYCVTSKNGNEIWNALRNFHQRTSNIKELRKDIFKKDYIKLEKKSEEALDDYLARFNKILSNLRSVDSSYDVNYSQFEVSRHFLNGLDMSIWEMKVTSIQESVDMFCLTLDSLYTKLKTHEMNILSQKVDSKSSALVSSLDLGASSSNSVSLYSINALSDDQLESFEEEDLALAINKLSRAMNNVRLKKRGGRIRCFECGELDHIRSHCPKLGRDKKDDNGVKTKDNKPVTTFKGRRSKEALKKVLNQVYAAFEPASNGDIKSDEDKDKEEYISDFCFMAHGESESEIEDNEF

SEQ ID NO: 19677 - protein, 1278 aa, Oryza sativa
  unsure (1)..(1278): unsure at all Xaa locations
  Clone ID: TF_OSC400675j.C1.p35.np
MPWTGCMPLGKSWTPSNAMMRRKLSSQPINQGPASLWWDHFQATQPEGQPITWARFTAAFRRTHVPAGVMALKKREFWELKQGNRSVMEHLHEFNNLARYAPEDVREDEEKQEKFLAGMDPELSVRLVSGDYPDFQRLVDKSIRLEAKHKELESHKRRLANFRNQQGANQRIRYTNPYPRILLTAAAAATSPRATTSICGTRPIVAATAESAREPCTPSPAPAVQPGQGRRDVQGQQRLCFNCFEPRHFADKCPKPRSQQGQAPPRPNNGGKDATRGRVNHITAENVLTTPDVIVGMFFIHSIPATILFDSGASHSFISVQFVGRNQLGVERRNSLLITTPGGAMTAKYYSPVVPIEIQGIPFPLDLILLDTKDLDVILKMNWLTQFQGVVDCARRTVTVYQKPDQPVVFFAHPTPTGSSVLHQLGLSEIPVVSEFGMPPKREIEFRIDLAPGTTPLYKRPYRMAANELAKVKKQLEELKEKGYIRPSTSPWGAPVTFVEKKDKTKRMCVDYRALNEVTIKNKYPLPQIDDLFDQLKGATVFSKIDLRSGYHQLRIREEDIPKTAFTTRYGLYEFTVMSFGLTNAPAFFMNLMNKVFMEYLDKFVVVFIDDILVYSQSEEDHQQHLRLVLXKLREHXLYAKLSKCEFWLSEVKFLGHVISAKGVAVDPETVTAVTDLKQPKSLLKLLKKEEKFVWSPQCERAFQTLKERLVSSLVLILPDTRKDFLVYCDASRQGLGCVLMQEGHVVAYASRQLRPHEGNYPTHDLELTAVVHALKIWRRYLIGNHCEIYTDHKSLKYIFTQPDLNLRLRRWLELIKDYDVGIHYHPSKANVVADALSRKGHCSTLCVRGIPPELNQQLEALNLSVVSHGFLAALEAKPTLLDQIREAQKNYPDMHGILKNMKQGKAAGFMEDEHGTLWNGNTKMYLDMKEKYWWVSMKREITEFVALCEVCQHVKAEHQRPAGLLQPLQVPEWKWDEIGMDFITGLPKTQGGYDSIWVVVDRLTKVARFIPVKTTYGGNKLDELYFARITWDKSLPYAEFSYNNSYRASIQMAPYEALYGRKCRTPLLWDQVGESQVFGTDILREAEAKVRTIRDNLKVAQSRQKSYADNRRRDLEFAVHDFVYLQVTPLQGVHRFQTKGKLAPRYVGPFRIIARRREVAYQLELPASLGNVHDVFHVLQLKKCLRVPSEQADSVQIEVREDLTYVEKPVKILDTMECRTWNRVIRFCKVLWSNHAKEEATWQPIPTSSSVLLNLRVEIPFKGVGLSRPKTTLKYNL

SEQ ID NO: 19678 - protein, 1050 aa, Oryza sativa
  Clone ID: TF_OSC400676j.C1.p11.gm
MVKTRNDPRDSNDASGSEEQTDGAHTSGASSSSPSPPPENPMVTQMMTMMMQQMQQHYHQMLQQAQQNQQFGPPPSHLSKLLDFLRIKPPTFSSTTNPMEANDRLRAIEKKLNLLQCNDQEKVAFSTHQLQGPASACLTVHGGPGAPGLTPADAVGPTRQPHQRARAADGRAPRGSRSVRPKAATAARPAGGGAPAPPMVAGGGHRHGGAAAERREGKGETRRRSTAHPRSTATTKRRPERRKAAARLGSTGTAALQRSTSETERWTRSARMRRSRRRRRRGGRWSGATTAADRSSAATAERESDGASSILARRKGGERRKRMEEVRGGVVLGRDKFRALQQGTMSVTEYMHEFNRLARYAPEDVRTDAEKQERFLFGLDDELTNQLISGVYDDFEKLVDKAIRQEEQRNKMDRKRKAAQISFPQGNNQKPRFMTGQLGEPSTLIVRQHRPYHSSNFNNDYNSGCHGSSKQHNHNSTPPPLMAPTQSDPPAMSAQSEQLKKESAGKPRPCFNCGKHGHFAGKYPKPKRAGPRFVQACVNHASAEEAQAAPEVVLGTFPVNSFPATVLFDSGASHSFISKRIAGTHGLSVVELKILMRVHTPGNDMNTTHYCPSVTIEIKRSPFLSNLILLESKDLDVILGMDWLTRHKGVIDCASRTITLTNDKGEKITFRSPVPQKSVASLNQATIEDQTEIAEKNPKKLEDIPIVQEYPEVFLEDLTTMPPKREIEFRIDLAPGTAAIYKRSYRMAANELAEVKKQVDEQLQKGYIQPSISPWGAPVIFVEKKDKTKRMCVDYHALNEVTIKNKYPLPRIDDLFDQLKGAKVFSKIDLRSGYHQLRIREEDIPKTAFTTRYGLFECTVMSFGLTNAPAFFMNLMNKVFMEFLDKFVVVFIDDILIYSKSEEEHEQHLRLVLEKLKEHQLYAKFSKCDFWLSEVKFLGHVITAQGVAVDPSNVEPMTQLLKKDEKFKWSVECNQSFEELKKKLVSAPVLILPDQTKDFQVYCDASRQGLGLVHALKIWRHYLIGNRCEVYTDHKSLKYIFTQPDLNIRQ

SEQ ID NO: 19679 - protein, 1249 aa, Oryza sativa
  Clone ID: TF_OSC409253j.C1.p1.fg
MSVTEYMHEFNRLARYAPEDVRTDAEKQERFLFGLDDELTNQLISGVYDDFEKLVDKAIRQEEQRNKMDRKRKAAQISFPQGNNQKPRFMTGQLGEPSTLIVRQHRPYHSSNFNNDYNSGCHGSSKQHNHNSTPPPLMAPTQSDPPAMSAQSEQLKKESAGKPRPCFNCGKHGHFAGKYPKPKRAGPRFVQACVNHASAEEAQAAPEVVLGTFPVNSFPATVLFDSGASHSFISKRIAGTHGLSVVELKILMRVHTPGNDMNTTHYCPSVTIEIKRSPFLSNLILLESKDLDVILGMDWLTRHKGVIDCASRTITLTNDKGEKITFRSPVPQKSVASLNQATIEDQTEIAEKNPKKLEDIPIVQEYPEVFLEDLTTMPPKREIEFRIDLAPGTAAIYKRSYRMAANELAEVKKQVDEQLQKGYIQPSISPWGAPVIFVEKKDKTKRMCVDYHALNEVTIKNKYPLPRIDDLFDQLKGAKVFSKIDLRSGYHQLRIREEDIPKTAFTTRYGLFECTVMSFGLTNAPAFFMNLMNKVFMEFLDKFVVVFIDDILIYSKSEEEHEQHLRLVLEKLKEHQLYAKFSKCDFWLSEVKFLGHVITAQGVAVDPSNVESVTKWTPPKTVSQIRSFLGLAGYYRRFIENFSKIARPMTQLLKKDEKFKWSVECNQSFEELKKKLVSAPVLILPDQTKDFQVYCDASRQGLGCVLMQEGRVVAYASRQLRPHESNYPTHDLELAAVVHALKIWRHYLIGNRCEVYTDHKSLKWLELIKDYDIGIHYHAGKANVVADAFSRKSHCNTVYTEGMCDKLQQDLEHLNLGIVEHGYVAALEARPTLVDQVRDAQVNDPEIAELKKNMRIGKARDFHEDGHGTIWLGERLCVPDDKELKDLILTEAHQTQYSIHPGSTKMYQDLKEKFWWASMRREIAEFVALCDVCQRVKAEHQRPAGLLQPLQIPEWKWEEIGMDFITGLPRTSSRHDSIWVVVDRLTKVAHFIPVHTTYTGKRLAELYLARIMCLHGVPKKIVSDRGSQFTSKFWQKLQEELGTHLNFSIAYHPQTNGQTERVNQILEDMLRACALDFGGAWDKSLPYAEFSYNNSYQASLQMAPFEALSGWKCRTSLFWDQTGERQLFGTEVLTEAEEKVRTIRERLRIAQSRQKSYADNRRRELIFEAGDYVYLRITPLRGVHRFQTKGKLAPRFVGPYRILERRGEVAYHLELPSNMAGIHDVFHVSQLKKCLRVPEEQASSEHIDI

SEQ ID NO: 19680 - protein, 671 aa, Oryza sativa
  Clone ID: TF_OSC412908j.C1.p19.fg
MANKTVREFVALSADNVAIGPQINMGDVDFDPKSSLIMMAQASPFCSKPNEDANAYLQQFLEICNTYTMKGVSPYAVRLRLFPFSLLGEAKLWFYANRPTINTWDKCSTAFLSKFFLMGKTNALRGRISSFQHTRDESIPEAWEQLQEYVAACPHHGMDDWLILQNFYNGLTPMSRDHLDAAAGGAFFSKTRGIHTVKETEILVAKLDLFMKRLDDHEKRPQGTIKALDSHITCEDCGSMGHSGNDCPETREEVMYMGNNNNNEYRPQGGQGWNQPLPYYQGATLVPTNESGRIPGQPESSVENVKVITMRGRKSTRDPPYPNPAGTSSITKEAPYSNSADEKVQPEKTMPQEYRDTRLLPFPQRNKKPSVDEQFARFVEVIQKIHINVPLLDAMQVPTYARYLNDILNNKRPFPTTEVVKLTEHCSNVILHKFLEKKKDPGCPTITCSIGTQQFDQALCDLGASVSVMPKDVFDKLNFTVLAATPMRLQLADSSVRYPAGIAEDVPVKIRDFFFLVDFVVLDMDTEKETPLILGRPFLSTAEDNNDMGMGSIRFRINGKQEKFEFQPRTKQCSMVRINYGPNQQNIQMVEVEPPKTDSLVKFMRNFLEKETTFPRNRYWKTPVKSSTPAKKLEQLAQRKPSPSPKPKRVWKEKPKTPTPSPPETGGKSAN

SEQ ID NO: 19681 - protein, 1121 aa, Oryza sativa
  Clone ID: TF_OSC6630j.C1.p3.fg
MAASGSVSCRLEDVTLHEFNNLARYAPEDVREDEEKQEKFLAGMDPELSVRLVSGDYPDFQRLSQQQQNQQGNRAPRPLAPAVQPGQGRRDVQGQQRLCFNCFEPRHFADKCPKPRSQQGQAPPRPNNGGKDATRGRVNHITAENVLTTPDVIVGAMTAKYYSPVVPIEIQGIPFPLDLILLDTKDLDVILKMNWLTQFQGVVDCARRTVTVYQKPDQPVVFFAHPTPTGSSVLHQLGLSEIPVVSEFGMPPKREIEFRIDLAPGTTPLYKRPYRMAANELAKVKKQLEELKEKGYIRPSTSPWGAPVTFVEKKDKTKRMCVDYRALNEVTIKNKYPLPQIDDLFDQLKGATVFSKIDLRSGYHQLRIREEDIPKTAFTTRYGLYEFTVMSFGLTNAPAFFMNLMNKVFMEYLDKFVVVFIDDILVYSQSEEDHQQHLRLLSKCEFWLSEVKFLGHVISAKGVAVDPETVTAVTDLKQPKSVTQVRSFLGLAGYYRRFIKNFSKISRPMTQLLKKEEKFVWSPQCERAFQTLKESYDPMKATILPMILELTAVVHALKIWRRYLIGNHCEIYTDHKSLKYIFTQPDLNLRLRRWLELIKDYDVGIHYHPSKANVVADALSRKGHCSTLCVRGIPPELNQQLEALNLSVVSHGFLAALEAKPTLLDQIREAQKNYPDMHGILKNMKQGKAAGFMEDEHGTLWNGNRVCVPDNKEFKQLILQGAHESPYSIHPGSTKMYLDMKEKYWWVSMKREITEFVALCEVCQHVKAEHQRPAGLLQPLQVPEWKWDEIGMDFITGLPKTQGGYDSIWVVVDRLTKVARFIPVKTTYGGNKLDELYFARIVSLHGVPKKIVSDRGSQFTSHFWKKLQEELGTRLNFSTTYHPQADGQTERLNQVLEDMLRACVLDFGKTWDKSLPYAEFSYNNSYRASIQMAPYEALYGRKCRTPLLWDQVGESQVFGTDILREAEAKVRTIRDNLKVAQSRQKSYADNRRRDLEFAVHDFVYLQVTPLQGVHRFQTKGKLAPRYVGPFRIIARRREVAYQLELPASLGNVHDVFHVLQLKKCLRVPSEQADSVQIEVREDLTYVEKPVKILDTMECRTWNRVIRFCKVLWSNHAKEEAT

SEQ ID NO: 19682 - protein, 1299 aa, Oryza sativa
  Clone ID: TF_OSC7844j.C1.p2.fg
MAATEERPGPKAAAGAARVDGVDGVRRVGDGNGEVDEVGEDAANPKKAAPRVVLGRDKFRALQQGTMSVTEYMHEFNRLARYAPEDVRTDAEKQERFLFGLDDELTNQLISGVYDDFEKLVDKAIRQEEQRNKMDRKRKAAQISFPQGNNQKPRFMTGQLGEPSTLIVRQHRPYHSSNFNNDYNSGCHGSSKQHNHNSTPPPLMAPTQSDPPAMSAQSEQLKKESAGKPRPCFNCGKHGHFAGKYPKPKRAGPRFVQACVNHASAEEAQAAPEVVLGTFPVNSFPATVLFDSGASHSFISKRIAGTHGLSVVELKILMRVHTPGNDMNTTHYCPSVTIEIKRSPFLSNLILLESKDLDVILGMDWLTRHKGVIDCASRTITLTNDKGEKITFRSPVPQKSVASLNQATIEDQTEIAEKNPKKLEDIPIVQEYPEVFLEDLTTMPPKREIEFRIDLAPGTAAIYKRSYRMAANELAEVKKQVDEQLQKGYIQPSISPWGAPVIFVEKKDKTKRMCVDYHALNEVTIKNKYPLPRIDDLFDQLKGAKVFSKIDLRSGYHQLRIREEDIPKTAFTTRYGLFECTVMSFGLTNAPAFFMNLMNKVFMEFLDKFVVVFIDDILIYSKSEEEHEQHLRLVLEKLKEHQLYAKFSKCDFWLSEVKFLGHVITAQGVAVDPSNVESVTKWTPPKTVSQIRSFLGLAGYYRRFIENFSKIARPMTQLLKKDEKFKWSVECNQSFEELKKKLVSAPVLILPDQTKDFQEGRVVAYASRQLRPHESNYPTHDLELAAVVHALKIWRHYLIGNRCEVYTDHKSLKWLELIKDYDIGIHYHAGKANVVADAFSRKSHCNTVYTEGMCDKLQQDLEHLNLGIVEHGYVAALEARPTLVDQVRDAQVNDPEIAELKKNMRIGKARDFHEDGHGTIWLGERLCVPDDKELKDLILTEAHQTQYSIHPGSTKMYQDLKEKFWWASMRREIAEFVALCDVCQRVKAEHQRPAGLLQPLQIPEWKWEEIGMDFITGLPRTSSRHDSIWVVVDRLTKVAHFIPVHTTYTGKRLAELYLARIMCLHGVPKKIVSDRGSQFTSKFWQKLQEELGTHLNFSIAYHPQTNGQTERVNQILEDMLRACALDFGGAWDKSLPYAEFSYNNSYQASLQMAPFEALSGWKCRTSLFWDQTGERQLFGTEVLTEAEEKVRTIRERLRIAQSRQKSYADNRRRELIFEAGDYVYLRITPLRGVHRFQTKGKLAPRFVGPYRILERRGEVAYHLELPSNMAGIHDVFHVSQLKKCLRVPEEQASSEHIDI

SEQ ID NO: 19683 - protein, 685 aa, Oryza sativa
  unsure (1)..(685): unsure at all Xaa locations
  Clone ID: TF_OSC24811j.C1.p2.np
GQTGGIAAVRPAGTRRSDRRRQESAVGVFGGSTDRSTSVRPTFIRQSDRLNYFGQTAIHRFRGVFVMATPARFSTKPHVFDGTDFTHWCSRMQSYIMAKDYDIWRKVSHAYVIPEVINTAAEKTAFEQNCKARNIFLSGISRSHYDRVAHLETAHEIWNALKNFHQGTNNIKELRRDLFKKEYIKFEMKHGEALDDYLSRFNKILSDLRSVDSSYDVNYPQSEISCHFLNGLDMSIWEMKVTSIQESVNMSTLTLDSLYTKLKTHEMNILSRKVDSKSSALIEEEDLALVANRIAXAMNNARNRKRGGPNRCFECGSIDHLRSHCPKLGRGKREGKDGEKTNNNKPNNYKSKGSNQGRKMENLRKAFQQVCAAFEPLSDVDGESGDDDKGKNVSDVCFMARGESDTEYEDNEVSAFEEAINILSAKNKKCEKMYKKQEFIIKSLKSEIDRLKSLIPNDDDCENCVGARSGEILIKPDTNKTVFKSAGIMSTMSASSSKSNVVHAKPPVSACVAKSSSSNNVSKQREKYTCSFCGKDGHIVDFCFRLAHKQKKEREIAFAKSKKPVRPQWVPRSDWRPVRPAEQPRSTGHKSKKPVRPQWVPRSDWRPVRPAEQPRSTGHRSDRRYRGGQTGPRSDRHCTSALVARKENVWIVDSGCSWHMTGDKDWFSSLKKASKTESIVFADAS

SEQ ID NO: 19684 - protein, 901 aa, Oryza sativa
  Clone ID: TF_OSC400261j.C1.p3.fg
MTGFDLPENFQENPEVFFRSVKPRVVPPQKTLPTKKPAVPAPPTFKTMADKTLREFAAPSSENVATGPQLNMGDVDFDLKSSLITMAQASPFCGKPNEDANAHMQWFLEICSTYTVKGVSPDVVRLRLFPFSLLGKAKQWFYANRAVINTWDKCSIVFLSKFFPMGKTNALRGRISSFQQTRDESIPEAWERLQELDEHEKKPQGTVKALDSHVTCEVCGNTGHSGNDCPKTHEEVMYMGNNNNNNNGYHPQGAKTTDALNKKMAANDKILENINVKLDGFASAFQNQLSFNKMIETQLAQLAALVLANETGRIPGQPKPSIENVKVITTRGGHPQQQATTTNNRGGQADGGMQQRDPPQTPGEEEGSEGSEKFDLALCDLGASVSVMPKDVFDKLNFTVLTPTPMRLQLADSSVHYLAGIAEDVPVKIRDCFIPVDFVVLDIDTGKETPLILGRPFLSTAEANIDVGTGSIRFRINGKEEKFEFQPRTEQCSMFRIKMRSRYWKTPVKPKTPAKKEEKLAQKKPPPIPRTKKSLTQASHQPVANPPCVFELLYPNESEQMNLQAYHMLKDREFGHTRAYDPELLRKTGDLRPIRGDELIIMFAKVRKTKVAPVKYMIRQWLESIKYNAPVECTSLITRIANGHGVITTDQIEYIFTVHPYVDETYLMQGHILKHGADGSLIYFFPCTNEIPLPNAGYHLYNCQELTIPLQTIEESRAGTSYRETRNKPRQKHEESSSSTPMQMYEADWEPTGDAPGWTQAPRHNTGGMPCLIPTKLHILNLRVGINKVTLGKVKQCLAGIRCKEIPTRTVGRRRRRHEENLHARLGDEVGRRGNLIYAGSDDQSRQRAKTQQLRSADEAARWEIPRCGRKKQRLATGSQTQRSEGAACRRPPLSSSLTRA

SEQ ID NO: 19685 - protein, 1453 aa, Oryza sativa
  Clone ID: TF_OSC400993j.C1.p54.gm
MVKTRNDPHDSNDASGSEEQTDGAHVSGASGSRSSPPPENPTVTQMMTMMMQQMQQHYHQMLQQAQQNQQFGPPPSHVSKLLDFLRIQPPTFSSTTNPMEANDWLRAIEKKLNLLQCNDQEKVAFATHQLQGPASAWWDNYVATRLDATEVTWAEFCQSFRKAQIPEGIMAQQKREFRALQQGTMSVTEYLHEFNRLARYAPEDVRTDAEKQEKFLFGLDDELTNQLISGVYEDFEKLVDKAIRQEEQRNKMDRKRKAAQISFPQGNNQKPRLMTGQLGGPSTLIVCQHRPYHPSNFDNDYNGGSHNNKQPKKGAVGKPGPCFNCGKHGHFVGKCPKLNRTGPRFIQARANHVSAEEAQAAPEVVLGTFPVNSYPATVLFDSGASHSFISKRFAGTHGLSVVELKIPMKVHTPGNDMRTAHYCPSVTIEIKRSPFLSNLILLESKDLDVILGMDWLTRNKGVIDCASRTITLTNDKGEKITFRSPASQKSVASLNQAAIEGQTETVEKSPRKLEDIPIVQEYPEVFPEDLTTMPPKRKIEFRIDLAPGTAPIYKRPYRMAANELAEVKKQVDEQLQKGYIRPSTSPWGAPVIFVEKKDKTKRMCVDYRALNEVTIKNKYPLPRIDDLFDQLKGAKVFSKIDLRSGYHQLRIREEDIPKTAFTTRYGLFECTVMSFGLTNAPAFFMNLMNKVFMEFLDKFVVVFIDDILIYSKSEEEHEQHLRLVLEKLKEHQLYAKFSKCDFWLSEVKFLGHVISAQGVAVDPSNVESVTKWTPPKTVSQIRSFLGLAGYYRRFIENFSKIARPMTQLLKKDEKFKWSAECNQSFEELKKKLVSAPVLILPDQTKDFQVYCDASRQGLGLVHALKIWRHYLIGNRCEVYTDHKSLKYIFTQPDLNLRQRRWLELIKDYDMGIHYHPGKANVVADALSRKSYCNAVCTEGMCDKLQQDLEHLNLGIVEHGYVAALEARPTLVDQVRAAQVNDPEIAELKKNMRVGKARDFHEDENGTIWLGERLCVPDDKELKDLILTEAHQTQYSIHPGSTKMYQDLKEKFWWGPPVGPFFHLPLPLPKPAAAETATDAAGSPPHPAIGAAASAIPRSTSSAVLPSNSIAGARISSHSELKSFPVEDVSKRLVSSLPSRIACGMESPAAGVNLEILVREFLGVTRRARPRAWRGSEEAVPAAGRHGTARTMTSGRASMRFEELAVGKIMDPNFPYQSPSFTLGDFDPNYMSGFDGGDSFGRIFRNRERKCFDTHRLEEIENLRQILSARSSGGTGHLKRHAESCAKKQGIQLRQQQLMLNPDGDHIDAVRQAIAWLTASNPRIAAWKRFCIAAGSSPAETPSYPHYSDAIHHEAQDFNVLGWWNDHKITYPVLSKLARDVLTVPVSTVSSESAFSLCGRIIEDRRTTLRSDHVEMLLSVKDWELARQHAQYTADNQELAAHFEQLYLDPDQPQ

SEQ ID NO: 19686 - protein, 1139 aa, Oryza sativa
  Clone ID: TF_OSC401472j.C1.p6.fg
MQHEIICGCICKRNNDERIMKVIGEVNKFENETVQGDKACRFSKCYGRMWERIRDKSKVESKSIISNYTGVYRCINARSCAWSLGRDDKHRFTISSVCGTPIGLAFSARSTGQCTIGNQRRHGACTMLDLPHVINSIASDHSDVAQFVAGDMMDFNLKADAVLLKSVLHDWSDEDCIKILKCCKEAIIPSKDAGGKIIIIDVVVGSSSEAICQGTQHLVDLNISVLTPGKERDEEEWFKMFTKYKISPVLGFRSIIKITVEVVLEIIDFQVCRDRSDRAVVAGDSMPRESICGDGPGVGLVREVIKLSSTLRVLRCVFHRVRRSDRRLNDGPTGDKRWSDRRYTGGQTGGGDSKRQLILEVKPEIESRSDRRQPGGQTGASTSVRPRSIDFEARNILLSGISRSDYDRVAHLQTAHEIWIALRNFHQGTNNIKELRRDLFKKEYIKFEMKLGEALDDYLSRFNKILSDLRSVDSSYDANYPQSEISRHFLNGFDMSIWEMKVTSIQESVNMSTLTLDSLYTKLKTHEMNILSRKGDSKYSALVSSTTSLDVDASSSKSSVLALFNAMFDDQLEQFEEDLVLLSNKFSRAMNNVRNRKRGGPNRCFKCGALDHLRSHCPKLGRGKKEDDVRVKEDDLNKKKNMKEKEKKKHCMQWLIQELIKVFDEPEDEDESKGKQVVDLAFIARNASSGVDESDDDNEEKLSYDQLEYAAYKFAKKLQTCSIVLDEKDHTIEILNAEIARLKSLIPNANNCQSCEVLFSEINALRDVNSISCKKLEFEIEKSKRLESSFALGFALHARVVDELILTKNVLEKYKVAFCASSLVNVSCANKAKQNNGALISQYCSKCGLNELKLKDALERVNHMEEIVKQDEVFSCSTCRKQKGLLDACKNCVVLTQEVSYLKSSLERFSDGKKNLNMILDQSKVSTHNRGLGFDSYDHHTRHPPTVLGVARRGFNSRSTVRPTLSSRSDRPAVKPQVNGRSDQLPGQVISQSQRRSDQPRGKLSHNSNQTFVKRQENKKYEKNEYRILGNSLDDNDVFDREVIKLSSTLRVLRFVFHRVLRSNRRPNGGPTGDKRRSDWRHTGGQTGGGDSKWQLISEVGPEIESRSDRRQLGGYTGASTSVLILGNVWQIAILLILR

SEQ ID NO: 19687 - protein, 563 aa, Oryza sativa
  Clone ID: TF_OSC405120j.C1.p12.fg
MANKTLREFAAPSADNVAIGPQVNIGDLDFDLKSSLITMAQASPFCGKPNEDVNAHLQQFLEICSTYTIKGVSPDAVRLRLFPFSLLGRAKQWFYAYRAANFYNGLTPMSRDHLDAVAGGAFFSKTVQGAVDLVEKMVSNMGWSEERLQTRQRGMHTVKETELHAAKLDLLMKCLDDHEKQPQGTVKALDSHVTCEVCGNTGHSGNDCPKTREEAMYMGNNNGYRPQGGQGWNQPRPYYQGGNNNETQLAQLASLVPANETGRIPRQTDSSVENVKAITTRGGTNGISKEAPSNDSTDKEVQREKTVPQEYCDTRLLPFPQRSRKPNPEDPHQRAIVGRYASANICPLSQRHTQQRETTPNNGGGQADGAMQQRNTPQAPGEEDLGCPTINCSIGAQQFEQALCDLGASVSVMPKDVFDKLNFTVLALRRMRLQLADSSVRYLAGIAEDLPVKIQDFFILVDFVVLDMDTEKETPLILGHPFLSTARANIDVGTGSIRFHINGKEEKFEFQPRTEQCSMVRIKYGPNLQNIQVVEVEPPKTDSLVKFMQNFLEKETTMPRNRY

SEQ ID NO: 19688 - protein, 1499 aa, Oryza sativa
  Clone ID: TF_OSC900356j.C1.p3.fg
MATPARFSTKPHVFDGTDFTHWCSRMQSYIMAKDYDIWRKVSHAYVIPEVINTAAEKTAFEQNCKARNIFLSGISRSHYDRVAHLETAHEIWNALKNFHQGTNNIKELRRDLFKKEYIKFEMKHGEALDDYLSRFNKILSDLRSVDSSYDVNYPQSEISCHFLNGLDMSIWEMKVTSIQESVNMNRKRGGPNRCFECGSIDHLRSHCPKLGRGKREGKDGEKTNNNKPNNYKSKGSNQGRKMENLRKAFQQVCAAFEPLSDVDGESGDDDKGKNVSDVCFMARGESDTEYEDNEVSAFEEAINILSAKNKKCEKMYKKQEFIIKSLKSEIDRLKSLIPNDDDCENCEVLMNEISKIRDVNAAHDLKNRPSLACSFALHTRTLDELFLTKKLLQKYQIAFYASLMFNMISAKKLKQHHDVLDCSTCNLNNMKLKDALGHVEYMEDVVKNNEVLSCPKCRKSKGVMVDCENCVNLEKEVSYLKNSLLRFSDGVGARSGEILIKPDTNKTVFKSAGIMSTMSASSSKSNVVHAKPPVSACVAKSSSSNNVSKQREKYTCSFCGKDGHIVDFCFRLAHKQKKEREIAFAKSKWQKSGFPSKKPVRPQWVPRSDWRPVRPAEQPRSDRAPVRPAVQRRSDRPPALVARKENVWIVDSGCSWHMTGDKDWFSSLKKASKTESIVFADASTSVVVATGMVKDEAFQHFRGLFLRLELEFPGLRRIRSDNGGEFKNASFEQFCNERGLEHEFSSPCVPQQNGVVERKNRVLVEMARTMLDEYKTPRKFWAEAINIACYISNRVFLRSKLGKTSYELRFGHQPKVSHLRVFGCKCFVLKSGNLDKFEARPTDGLFLGYPAHTRGYRVLILGTNKIVETCEVSFDDASPGTRPDISGTLSQVQGEDGRIFEDESDYDDNDEVGSAGQTGRQASQTAGTPPVRPAHEERSDRPGSSGSGTVDADQDGPPENSTSNSTDTERGSTSEVAAPLHIQRRHPPEQIIGNIGERTTRSKVTAHDVCANSAFVASFEPKDVSHALTDESCINAMHEELENFERNKVWTLVEPPSGHNVIGTKWVFKNKQNEDGLIVRNKARLVAKGFTQVEGLDFDETFAPVSRIEAIRLLLAFAASKGFKLYQMDVKSAFLNGFIQEEVYVKQPPGFENPDFPNHVFKLSKALYGLKQAPRAWYDRLKNFLLAKGFTMGNVDKMLFVLKHGDNQLFVQIYVDDIIFGCSTHALVVDFAETMRREFEMSMMGELSYFLGLQIKQTPQGTFVHQTKYTKDLLRRFKMENCKSISIPIGSTAVLDPDEDGEAVDQKEYRSMIGSLLYLTASRPDIQFVVCLCARFQASPRASHRQAVKRIMRYLNHTLEFGIWYSTSSSICLSGYSDADFGGCRIDRKSTSGTCHFLGTSLIAWSSRKQSSVAQSTAESEYVAAASCCSQILWLLSTLKDYGLTFEKVPLFCDNTSAINIAKNPVQHSRTKHIDIRFHFLRNHVEKGDIELQFLDTKL

SEQ ID NO: 19689 - protein, 1240 aa, Oryza sativa
  Clone ID: TF_OSC11344j.C1.p8.fg
MANKTLREFAAPSADNVAIGPQVNIGDVDFDLKSSLITIAQANPFCGEPNEGSNADLQQFLEICSTYNIKGVNPDTVRLRLFPFSLLGRAKQWFYVMRTSTPTIHPHFHNYNFMLLVHLVLAGSRLLAGTNTLVVGLIVHPSRFTTTSGVGVTIAKAQHPRIVVVGSPTSLHPIDLSLSSKDRDTLEHIRWYQSPSCSFFFDSLHSPPIAPPVRLTLDRDSATKASIHLLQRFVQVRRLPSPPVWHDENWLVRDRTQGLEEDVCITNEKLGHVERTQIDSNTKLTTLEASVATVNTSLDGIVWRLDEMARASHHGSEMDDHDYVGDSEDDADQRRHRFNRRGVAHRRPRREVRNNDDSFGKIKFTIPAFDGKYDPDAYLSWELVVDQKFACHDVPEDKRVRAATSEFTDFASVWWCEYRRTHINALPPTWDDLKQIMRARFVPSYYARDMLNKLQQLKHGGTSVEEYYQALQMGRTPWTARSGAAPTDRSSVSTSTSAPSNSNSNKAWPTPSTARSRASEVAEKPTKSASSVASTGRTRDVQCHRCKGFRHMQRDCPSKHVLVVKADGEYSSASDFDEDTLTLLVANNIASEDEKHIGADVADQYESLIVQRVLSAQMGKAEQNQRHNLFQTKCVVHKRSWCTIIDGATGTKNLGILYDTNAEGSSQYWNEEEGNEDPNQYLNEEGNVESDAEGNEEGNDEEESTGSHPSAGQKRAHGQRGAAKKIEGRHIVTEVDEDGRPSALAEAAKNFVHHSSWVVRDNVPVSTVYWRRTRARRDNDSFVPDSEKEMLWTTMLETFTLPAGTKNIVKQWTLKKIAEQFQSFKGDLYKKYILKGLTPNFDVFQKLRDHWDEFVAYKTGQQGQAMMARNKENAAKKKYHHHLGSGGYSVAMPKWEEMEASLIERGIEPATAKWPDRSKFWYYAHGGTLKPVDGSLVFSDQIRDAASRLTDAVEASSQGTFRPDREKEELSLALQIPEHPGRTRGKGVIPWKIGFKEDIHTYRSRMRSKRDTEAKIADLEYRVSSYELSMQEKMARKVASGMAIPTDPSGTYHCRPIPAGYSRVEVELVEAAYKDLELDYPGGDGETHLRDTRHAIILWCKRYIILPGRQAASHAPSPLAPPSPPAPSPPVPPPRPPAPSPPAPLPPPPPPPPPCLPAPPKTRSRQAPPPARTRATKKAKVDATKNKEPPYDCSQEELDAYVAGEVKRQLEPRSPEKKIPIDPSVKNYFKGMSATNKEAL

SEQ ID NO: 19690 - protein, 130 aa, Oryza sativa
  Clone ID: TF_OSC900326j.C1.p16.gm
MASCATPSITFFFNSSYSSLKSLVAIPLFGKLGLQLIAREQQLLLPFLTMTLVYEASLAGQCRCKEREQQLLLTRAEWKAKFEERKSNEAYGSNAKKYHSRFDKSKIDCRKCGKFGHFTNECEESKKKVM

SEQ ID NO: 19691 - protein, 467 aa, Oryza sativa
  Clone ID: TF_OSC400718j.C1.p26.fg
MVRIGTMFREEHRSSAVRIPCEKVTRVRILGGQLRSTVGTGTKLREKLRSKWSRIPGDEVEYKMAHGGWTPCVRDLRNGFYEVRGLDWEEQQWLGWMAGRVGPGGQETECELAKDRRQGGDLTGGVRAVRPAATGLRRDFHRFEARNILLSGISRSDFDRASHFQTAHEIWNALKNFHQETSNIKELRRDLFKKEYIKFEMKPGEALDDYLSRFNKILSDLRSVDSAYDKNYSQSEVSRHFLNGLDMSIWEMKFTSIQESVDMSTLILDSLYTKLKTHEMNILSRKIDSNSSALVSSSTSLDVGASSSNSTVLALINAMSDEYRKRGGPNRCFECGSTDHFRSRCPKLGRGKKEDDGRVLENEVDKKKITKEKKKNCMQWLIQELIRTFDESEDEDESKGKQVVDLAFIARNASSDVDESDSNSEEKLSYDQLEYAAFKFAKKLQTCSNMLDEKDHTIEILNAELID

SEQ ID NO: 19692 - protein, 1033 aa, Oryza sativa
  Clone ID: TF_OSC414570j.C1.p19.fg
MTNVRYRKRGGPNRCFECGSTDHFRSRCPKLGRARREDNGDEKTNDKKPKGTFKGRKIKETLNKAFDQVYAAFKPLSDVDGDSRDEDKGKNISSVCFMACGESDSGCEDNELKQPHDVLDCSTCTLNKIKLKDVLGRVEYMEDVVKNNEVLSCPKYRKSKGVMVDCENCANLEKEVSYLKSSLQRFYEDWLINKKGERNCFYKIKVAKIWFSLEETGLTAVGPAVRPATERRSDWLRSDRRTEASTSACVYALVARKENVWIVDSGCSRHMTGDKNWFSSLKKASKTESIIFGDASTSVVLAKGLVKKTGSKVFDSCGDSVLNISRYGRVFKADFDNHVSPAITCLVAKFDKDVMFWHRRLGHVGFDHLTRLSGLDLVRGLPKLKKDLDLVCTPCRHAKMVASSHAPIVFVMVDALGQLLHMDIVDPARVQSVGGKWYVLVIVDDFSSYSWVFFMATKDEAFQHFRGLFLRLDLEFPGSLKRIRSDNGGEFKNASFEQFCNERGLEHEFSSPRVPQQNGVFERKNHVLVEMARTMLDEYHTPRKFWAEAANTACYISNRVFLRSKLGKTSYELRFGCQPKVSHFACFWCKCFVLKSGNLDKFEARSIDIMFLGYPTHSHGYHVLILETNKIVETCEVSFDEASPGTRLDITGTLSQVQGEDSCIFEDDSDDDDDKVGSAGQTGRQAGQTASTPPGRPPQDERSNRPGSSGSGSVDADRDCPPEATTSTSTGTERETTLEVAATLHIQRRHPPEQIIGNLSERTTRSKITTHDVCANSAFVASFEPKDVSHALIDESWINAMHEELENFKRNKVWTLVESPSGHNIIGTKWVFKNKQNEDGLIVRNKARLVAQGFTQVEGLDFGETFDPVARIEAIRLLLAFAASKGFKLYQMDVKSDFLNGFIQEEIYVEDIIFSCSTHALVVEFAETVPKEFEMSMMASPGASHRQAVKRIMRKQSSVAQSIAESEYVAAANCCSQILWLISTLKDYDLTFEKVPLFCDNTSAINIAKNPVQHSRTKHIDIRFHFLRDHIEK

SEQ ID NO: 19693 - protein, 214 aa, Oryza sativa
  Clone ID: TF_OSC15262j.C1.p2.np
RGRRGTRRCDVGEGGGAAGRRADEEEGEAGAETTAFRRNSGEEEFGSKAYTRCGEIGHVASMCLTLCTHYEEDHPPGECPTRKVTCFLCEGTNHVPKDCQLSVLLTKTAEIQRTILRLSRQLVSSNNNIDDIIHSTNAPLAPPNSAINHGNNTYSTNHSLHRQPQQRIVVDGRSCVSPRPTPGQAKGNRPPEGDTKQKTVIRFNQQSEGSFSCE

SEQ ID NO: 19694 - protein, 1366 aa, Oryza sativa
  Clone ID: TF_OSC413084j.C1.p4.gm
MTRRSANTGDGNQPEGSNHNHQGNPPPPPPPPPPPLPDTNAILTQILAQQANMMTAFLHHLQNPPQLNAPPPPPQHSKLAEFLRIRPPTFSSSNNPVDALDWLHAVGKKLDTVQCSDEEKVIFAAHQLQGPASLWWDHFQATQPEGQPITWARFTAAFRRTHVPAGVVALKKREFRELKQGNRFVMEYLHEFNNLARYAPEDVREDEEKQEKFLAGMDPELSVRLVSGDYPDFQRLVDKSIRLEAKHKELESHKRRLANFRNQRGANQRVRYTNPYPGGSSSQQQQQQQQPRSAPRPQFVVRVPQPQQQQNQQGTRAPRPPTPTMQPGQGRRDAQGPQRLCFNCFKPGHFADKYPKPRRQQGQAPPRPNNGGKDVIRGRVNHVTAEDVLTTPDVIVELHQIELSEIPIVREFGDVFPEELPGMPPKREIEFRIDLAPGTTPLYKRPYRMAANELAEVKKQLEELKEKGYIRPSTSPWGAPVIFVEKKDKTKRMCVDYRALNEVTIKNKYPLPRIDDLFDQLKGATVFSKIDLRSGYHQLRIREEDIPKTAFTTRYGLYEFTVMSFGLTNAPAFFMNLMNKVFMEYLDKFVMVFIDDILIYSQSEEDHQHHLRLVLGKLREHQLYAKLSKCEFWLSEVEFLGHVISAKGVAVDPETVTAVTDWKQPKTVTQVRSFLGLAGYYRRFIENFSKIARPMTQLLKKEEKFVWSPQCEKAFQTLKEKLVSSPVLILPDTHKDFMVYCDASRQGLGCVLMQDGHVVAYASRQLRPHEGNYPTHDLELAAVVHALKIWRHYLIGNRYEIYTDHKSLKYIFTQSDLNLRQRRWLELIKDYDVGIHYHPGKANVVADALSRKSHCNTLNVRGIPPELNQQMEALNLSIVGRGFLATLEAKPTLLDQIREAQKNDPDLHGLLKNMKQGKAAGFTEDEHGTLWNGNRVCVPDNRELKQLILQEAHESPYSIHPGSTKMYLDLKEKYWWVSMKREIAEFVALCDVCQRVKAEHQRPAGLLQPLQVPEWKWDEIGMDFITGLPKTQGGYDSIWVVVDRLTKTDGQTERLNQILEDMLRACVLDFGKTWDKSLPYAEFSYNNSYQASIQMAPYEALYGRKCRTPLLWDQVGESQVFGTDILREAEAKVRTIRDNLKVAQSRQKSYADNRRRDLEFAVDDFVYLRVTPLRGVHRFQTKGKLAPRYVGPFRIVARRGEVAYQLELPASLGNVHDVFHVSQLKKCLRVPSEQADSEQIEVREDLTYVERPVKILDTMERRTRNRVIRFCKVQWSNHAEEEATWEREDELKAAHPDLFASPPPSSPRTSSRFGIASFGFAAFSPTLSTPPFRPPTAGAPPSSSTRAAPPPLSASVAVPVIAVDPG

SEQ ID NO: 19695 - protein, 485 aa, Oryza sativa
  unsure (1)..(485): unsure at all Xaa locations
  Clone ID: TF_OSC900380j.C1.p25.np
DLRHRISEPTHPPQFRTQQGGQQKPSFSSGQHSGPTTMIVCQHRPYQPGNFGXNSSGSNNGGNQNNRNPAPRPLMAQSQASXPTQQKKEAGGKPLICFNCNEPVHFADKCPKPKRNGPKIVQARVNHISTEEAQAAPEVVLGTFPVNLFPATVLFDSSATHSFISKKFVGVHGLRKVELSAPMKVNTPGNSTRLVSFCPSMMIEIQGSPFLANLILLECKDLDVILGMDWLSRHKGVIDCASCTVTLVDEKGEVVIIQFPMTQKKGVVLNQMEGEKQDEVEKDVQKLENIPVVCEYPEVFPEDLTTMPPKRDIEFRIDLVPGTAPIYKRPYRMAAKEMAEVKKQVDEQLXKEYIRPSTSPWAPVIFVEKKDKTKRMCADYRALNEVTIKNKYPLPRIDDLFDQLKGATVFSKIDLRSGYHQLRIREXDIPKTAFTTCYGLFECTVMSFGLTNAPVFFMNLMNNVFMEYLDKFVVIFIDDILVYSK

SEQ ID NO: 19696 - protein, 716 aa, Oryza sativa
  Clone ID: TF_OSC22997j.C1.p2.fg
MHTVKETELLAAKLDLLMKRLDDHEKRPQGTVKALESHVTCEVCGGTGHSGNECPETCEEVMYMGKNNWYRPQGAKTTDALSKKLAANDKILENINVNLDGFASAFQNQLSFNKMIETQLAQLASLVPANESRRIPGQPDSSIENVKAITTRGVIQKIHINVPLLDAMQVPTYARYLKDILNNKRPLPTTEVAKLTEHCSNIILHKLPEKKKDPGCPTITCSIGAQQIDQALCDLGASVSVMPKDIFDKLNFTSVRYPAGITEDLPDKIQDFFIPVDFVVLDMDTGKKTPLILGRPFLSTAGANIDVGTGSIRFHINGKEEEFEFQPRTEQCSMVRIKYGPNPQNIQVVELEPPKTDSLVKFMQNFLEKETTMNRNRYWRMPVKSPIPAKKLEQPAQKKPSTAPKSNKVNCMRRRLSRLFKGSGSPSSHHGESSTRSSADVSMEDADAPRQLLSDTDLDLVSDRERQAYYMRSDREYAHTREYSPELLKKIEIEDDIFFRFFRKEFTLTWKGLSTLLGFHDSCKIDLQKGISGFEKNRFWEDIFGAPICKKPRTNDIHNPTLRLMHKWIAMTLFPRSDLRPIRGDELIIMFAMIYEAGWAPTGDAPGWTQALRYSMDSQLGQAPVRTGGMRLMTSTGETINLPDQVDLGEITRRMDTLDVQTGEIQYNLTEHIAQTQEWQQSADAQFTNINNMMQQQHDDLQAYFRFQGFNPYQGP

SEQ ID NO: 19697 - protein, 1804 aa, Oryza sativa
  Clone ID: TF_OSC13173j.C1.p9.fg
MAPSPSLSPDTHPRHRRFRSSPEHLVGVFQASLASPTLETFPIPVPRHNPPLSAQTPSPKSPFSTHPDPPETIQISGIDSSTAASICLSPRLDSRFVTLRPQDPSKSSTLQDLPATAPLGALRLYSEVLAAPAPIPLAASSKSQQELSPPKIRSLAGRLNFPAAQPCSSVTERLNPVNLTDPDVGSQGAAPKDLRILKSGRKVQMPAQILSAVQHPRGSLDVSGSEWQEVKANRWRRSPAHSPDSTNQFQLQLSRARFLKHMEGKCFRCLRSDHRVIECREPLRCWFCMGIGHCASSCLKRKSFKSTATSQPLPQTSVESFPPLAPIRFPPKLLPRSALSSPSSMDDLSARPSQEPVVISATGEIERLRQKFSARSIVAWQVGHQGSNVDPNVFADDVHSAFRIRRSDIQITKFHPEDFFITCSSQNDRDAILRQPRLATKSGRVYLFCPWEEGLHGVPARFRYRARVCIEGIPMHARTEETAAKIIGRKCSINYVEEYSRRQNYNRTFDIWIWTDAPKFIPRSSTFSITNADEEGLPTDISLLDLEPHHNPPPDEPKEGWTYDILVHIDTLEDLHSKVARAYDWQYGAETDEGSLIPKEVQMMKTKTESSAPRGSVGAVPFGAVSVDGRKVVAVSVEEINKFTTKTRADASMFERPPLAAAAPTVLARQVQYDRPRLSRRGTRSPRIQSSPQVPSPCKSAIPRRSGSPDEGANALATLFSPSSSLVVQPEPVIFSQGQVAVLELLEKHLDPMLHEATIQHSLYSPDTSSPRIASPVFIPSSTQLGSGAADGVLGAAKNLQEFAASLSTPIQPAILPTPDVSSRRPCRNKVTLHSPQRHSERLARKRRFGTKIEHFAQEILAKNFGFLNDQTRFDENIEKLYVQHFKKPISPASMKIITTLVEKGGCEGIHLKTAKKKAAVVPICLLVFIMSQHNVHLFNWNVRGLNAQAKQDVVKAFVHKVGASIVCLQETKLATVTDRNILSILGQNFVQSYAFLPASGTRGGIILACNANLFSLSEAVQGQFSLSATITMFEEGLQWSITVVYSPQLEADKIAFLAEIEAMSSFMKPAWLLIGDFNLIYKVSDKNNDRLNRRMMQRFKGLIDKIEVKELHLPGRRFTWAGAGQNPTQTKIDRAFVIPDWDIMFSNASLQPLSSSTSDHAALFLIGNEMRGKPPNSRFEAFWLKIPGFLEVVEDSWNRPLLAANPLAILYIKLKRLARDLKRWNRQNVGDIKLQLAVANEVVFQLDVAQETRPLSDDECVLRSNLKARILGLAVLNKIQIRQRSRLTWLKEGDVNSKFFHIKENSRRRKNFIQTLQTQNGIAVSAQEKADTLFRFFSDRLGTPSQRQSCLNWATLNFPSFDLDDQEDDITEEELKHPVFSVPSEKAPGPDGYIGAFFKHAWEIIKEDLLLAAKSFMALNTNQLKKLNTAYICLLPKKRRSGWTKLLANRLAPRLNELVSQNQSAFVRKRAIHDNFLFVQNLVHILHRNHKEALFLKVHITKAFDTVGWPYLLEVLQRKVDFLPLIEKIGSRLPGWKGRYFTSEGRRILVQSVLSAMPTFHLSALQAPKWVIKRIDRFHRSFLWKGEDPSKTNPGSSLVNWSTVCKPKFLGGLGILELEKFPRALRLRWLWFKWKEENKPWIGMDIPCDNCDMRLFQAATTISLGNGEKTAFWQDKWLQSSCPKDIAPMCFNLAKRKQRSVKTELTNNSWLLSFRNITSIEEINEVVQLGENSHGSKPPAPQPPAPPLALQLDLQFVWRSPLKTPTIFSMGVLSSGKFGARYVNGKISKEPNLQMTLQLGGST

SEQ ID NO: 19698 - protein, 778 aa, Oryza sativa
  Clone ID: TF_OSC400773j.C1.p74.fg
MESERPDASAEDRRLEDLRKREERCCSYRSQEIAQKKKHFDELAAREEIQSYVMQLFICLGMANFRVYYGDGEIISNKMGVDLSNFSQCTLYHPNRDNLRMPEVWYWLTCSFSLDPQVYSVNVSLLWSRSATDIQWQLKEVTGSQSWKNWLQGCRRRGYEMAMLVQACPRRARPNSSFGQSDMQGEACAQSSAFHVEVSRHNEDNISIDMQSLHIEQVEQTVVAMPSTVQQDGSGEADEGEEINAIVDEIERVDRNAREDEANLAWEEDEEEDDEEYEVQPVPASWNREDLGYIRENELHDSIWFYGDGPINKGAMFSTKSAFQDAVKSWSFKMQRQFKVLKSSPTVYTVLCETEGCNFRVHGHVPKYESYRLVSREGTTAVETGEWYTISYHKAWRAKQKATEKRYGSFEVAYDTLPQILDILKQRNHGTYVAVQDRDSMRPPNFHVMERAFFSFGACIHAFQWSRPVLCVHGTFLTRKYRGSILIAVGADASNHIIPVAFAFVESENYDSWLWFLQHVKWGVVQSRSNVCIIHDRNAGLLKAIKELKEDENGAYYWPDLHSRWCMRHMGANFFKQFHSKRLMQMFKRLCMQNQRQKFEDLWRQLDEATSAHVKSKKDSKKNDQPAPEALEPMDGLITSNGLDSTAYVSPFYLKDRVLQAWSADILGYRAHENLIRTGGDDTVWVPDLHLLKGGKGRRQTRRLRNDMDESEAGGPIRRCETCLQYGHRTRDCTNNNDGTSSTAQQGQQTWESSRATRARRTRRGTGSSRNTPEGTTL

SEQ ID NO: 19699 - protein, 1737 aa, Oryza sativa
  Clone ID: TF_OSC900041j.C1.p11.fg
MAPSPSLSPDTHPRHRRFRSSPEHLVGVFQASLASPTLETFPIPVPRHNPPLSAQTPSPKSPFSTHPDPPETIQISGIDSSTAASICLSPRLDSRFVTLRPQDPSKSSTLQDLPATAPLGALRLYSEVLAAPAPIPLAASSKSQQELSPPKIRSLAGRLNFPAAQPCSSVTERLNPVNLTDPDVGSQGAAPKDLRILKSGRKVQMPAQILSAVQHPRGSLDVSGSEWQEVKANRWRRSPAHSPDSTNQFQLQLSRARFLKHMEGKCFRCLRSDHRVIECREPLRCWFCMGIGHCASSCLKRKSFKSTATSQPLPQTSVESFPPLAPIRFPPKLLPRSALSSPSSMDDLSARPSQEPVVISATGEIERLRQKFSARSIVAWQVGHQGSNVDPNVFADDVHSAFRIRRSDIQITKFHPEDFFITCSSQNDRDAILRQPRLATKSGRVYLFCPWEEGLHGVPARFRYRARVCIEGIPMHARTEETAAKIIGRKCSINYVEEYSRRQNYNRTFDIWIWTDAPKFIPRSSTFSITNADEEGLPTDISLLDLEPHHNPPPDEPKEGWTYDILVHIDTLEDLHSKVARAYDWQYGAETDEGSLIPKEVQMMKTKTESSAPRGSVGAVPFGAVSVDGRKVVAVSVEEINKFTTKTRADASMFERPPLAAAAPTVLARQGQVAVLELLEKHLDPMLHEATIQHSLYSPDTSSPRIASPVFIPSSTQLGSGAADGVLGAAKNLQEFAASLSTPIQPAILPTPDVSSRRPCRNKVTLHSPQRHSERLARKRRFGTKIEHFAQEILAKNFGFLNDQTRFDENIEKLYVQHFKKPISPASMKIITTLVEKGGCEGIHLKTAKKKAAVVPICLLVFIMSQHNVHLFNWNVRGLNAQAKQDVVKAFVHKVGASIVCLQETKLATVTDRNILSILGQNFVQSYAFLPASGTRGGIILACNANLFSLSEAVQGQFSLSATITMFEEGLQWSITVVYSPQLEADKIAFLAEIEAMSSFMKPAWLLIGDFNLIYKVSDKNNDRLNRRMMQRFKGLIDKIEVKELHLPGRRFTWAGAGQNPTQTKIDRAFVIPDWDIMFSNASLQPLSSSTSDHAALFLIGNEMRGKPPNSRFEAFWLKIPGFLEVVEDSWNRPLLAANPLAILYIKLKRLARDLKRWNRQNVGDIKLQLAVANEVVFQLDVAQETRPLSDDECVLRSNLKARILGLAVLNKIQIRQRSRLTWLKEGDVNSKFFHIKENSRRRKNFIQTLQTQNGIAVSAQEKADTLFRFFSDRLGTPSQRQSCLNWATLNFPSFDLDDQEDDITEEELKHPVFSVPSEKAPGPDGYIGAFFKHAWEIIKEDLLLAAKSFMALNTNQLKKLNTAYICLLPKKRRSGWTKLLANRLAPRLNELVSQNQSAFVRKRAIHDNFLFVQNLVHILHRNHKEALFLKVHITKAFDTVGWPYLLEVLQRKVDFLPLIEKIGSRLPGWKGRYFTSEGRRILVQSVLSAMPTFHLSALQAPKWVIKRIDRFHRSFLWKGEDPSKTNPGSSLVNWSTVCKPKFLGGLGILELEKFPRALRLRWLWFKWKEENKPWIGMDIPCDNCDMRLFQAATTISLGNGEKTAFWQDKWLQSSCPKDIAPMCFNLAKRKQRSVKTELTNNSWLLSFRNITSIEEINEVVQLGENSHGSKPPAPQPPAPPLALQLDLQFVWRSPLKTPTIFSMGVLSSGKFGARYVNGKISKEPNLQMTLQLGGST

SEQ ID NO: 19700 - protein, 259 aa, Oryza sativa
  unsure (1)..(259): unsure at all Xaa locations
  Clone ID: TF_OSC6545j.C1.p1.np
GPMSISEFIAKMRSFDYEMTGQGKLLDEELIAYIINGFDSDFDSSVIGLMPATRIAPLLISHVYSQLLSYENRISIRQTYLRISANAANRGGRGGRGGNRGGAPPAGRSAGRGGAVGANTGRGRGKDTHPVCRACHKGGHIASDCWHRYDEKYVSDEKLGDAATYAYGVDTNWYVDTGATDHITGQLDKRDYMEKYKGTDQIHTASGEGMNIXHIGHTIVPTPSSPLPLKNIIHGPQASKNLVSVHTLIGCRNDRSHFP

SEQ ID NO: 19701 - protein, 322 aa, Oryza sativa
  Clone ID: TF_OSC900148j.C1.p4.fg
MAKQWFYANRATVNTWDKCSTAFLSKFFPMGKTNALRGRISSFQQTRDESIPEAWERPQEYVAVCPHHGMDDCLILQSFYNGLTSSSRDHLDAAAVGAFFSKTVRAAVNLTEKMVSNMGWSEERLQTRQCGMHTVKETEMLAAKLDLLMKRIDDQEKAKPLVAFKALDSHLTCEVCGNTGHSGNDCPETREEAMFMGNNGYRPQGGQGWNQPRPYYQGGNNGNNNNNGNFNQPSLKDLVFAQAKTTDAINKKTALNDKVLENINVKLEVFASAFQNQLSFNKMIKTQLAQLAALGFYLALASLAHYVWWSHSSVSHSLAVVS

SEQ ID NO: 19702 - protein, 1404 aa, Oryza sativa
  unsure (1)..(1404): unsure at all Xaa locations
  Clone ID: TF_OSC900399j.C1.p1.np
MADHPPNHRGEGMDDFVAELARMTLVVGYPNAPEYSTVPPLSGEFPHRVRLEVHGYVGTCLANMVVEASGGTADHACQEAAYLMMARLRERHNYIFCNTAYRFHPRRASGDDISTFCPTAGENDTTLGHMCAVMRGMDKMHSDDGKLMRIIALKDEIARLKKENAQLKGLPIPGGVRIRNMPRKSTTAPVRIQLAPRNPPPPAAPAAPPVLPAVPAARAALAPVPAPAPVSAPASALSFAPASAVRGPASGNGGWLPATPSGSRNHISSSSSGSELPDSRSSSEGPGLFLQMVYTRNGSRTAGEGSNGEECTDGVHPNSDSSNGPLPLPENPALAQVMAHQTQMMAAMMQQMHQRMQQQAEQQQQQFGPPPPQSKLPEFLRVRPPTFSSTTNPMEANDWLHAIEKKLNLLQCNDQEKVAFATHQLQGPASAWWDNHMATRPPGTEVTWAEFCRSFRKAQVPDGVVAQKKREFRALHQGNRTVTEYLHEFNHLARYAPEDVRTDAEKQEKFLAGLDDELTNQLISGDYADFEKLVDKAIHQEDQRNKMDRKRKAAQFQSNQGSHQRPRFTPGQQGGPTTMIVRQHRPFNSSGFHQGASGSQNHQGGQPNRNAAPRPPMAPAQSAPSTQAKKETGTKPGSCYNXGEHGHFANKCPKPRRPGPRFVQARVNHASAEEAQAAPEVVLGTFPVNSIPATVLFDSGATHSFISRKFVGIHGLIREELSTPMQVHTPGNSSTSVQFSPSITIEIQRSPFLANLILLESKDLDVILRMDWLTKFKGVIDCVNRTVTLTNEKGETMVYKSPVSPKQGISLNXHEVENPVATDEKSSRKLEDIPVVCKYPEVFPEDLTTMPPKREIEFRIDLAPGTAPIYKRPYRMAANELAEVKKQVDEQLQKGYIRTSTSPWGAPIIFVEKKDKTKRMCVDYRALNKVTIKNKYPLPRIDDLFDQLKGAKVFSTIDLRSGYHQLRIREEDIPKTAFTTRYGLYECTVMSFGHTNAPAFFMNLMNKVFMEFLDKFVVVFIDDILIYSKSEEEHEQHLRLVLEKLKEHQLYAKFSKCDFWLSEVKFLGHVITAQGVAVDLSNVESVTKWTPPKTVSQIRSFLGLAGYYRRFIENFYRIARPMTQLLKKDEKFKWTAECDQSFEELKKKLVSALVLILPDQTKDFQVYCDASRHGLGCVLMQEGRVVAYASRQLRPHEGNYPTHDLELAAVVHALKIWRHYLIGNRCKVYTDHKSQKYIFTQPNLNLRQQRWLELIKDYDMSIHYHPGKANVVADALSRKSYCNALCTEGMCKELQQELERLNMGIVEHGFGAALEARPTHVDQVRAAQVNDPEIAELKKNMRVGKARDFLEDEHGTIWMGERLCVPDDRELKDLILTETHQTKYSIHPGSTKIYQDLNEKFWWA

SEQ ID NO: 19703 - protein, 1021 aa, Oryza sativa
  Clone ID: TF_OSC5516j.C1.p6.fg
MASSSSSAGSPFSGQAVAEKLTRTNFLLWKAQILPVIRGARMEGYLTGATQAPLAVIDAKDGEATVKASKPAFEMWITADQQVLGFLLSTLSKEILTQVISMESAAQVWKAITEMLSSQSRARALNTRLALATTLKGDLSVSDYISKMKVLADEMAFAGKPLDDEELISYVLAGLDDDYEPVVSSLVGKSEVVSLAECYSQLLSFKSRQKLRHAAAHQASSVNAARRGGGKGGGYTPFNRGGRSGGNNNGRRSNNGGGRGGRGNNNGDRGGKPHPVCHLCGKTGHVVADCWYRYDENFVPENKIAAAASYGVDTNWYVDTGATDHITGELDKLTTREKYNGKDQIYTASGAGMDIKHIGHSVICTPTRNIYLKNILHVPKAKKNLLFAHRLALDNHAFVEVHSRFFAIKDQAKSHQLPYPKSFSVFSHPLELVFSDVWGPAPDSVGGRKYYVSFIDDFSKFTWIYLLKKKSEVLQKFSEFQQLVERLFNRKIIAMQSDWGGEYEKLNAIFTKIGITHHVSCPYAHQQNGSAERKHRHIVEVGLSLLAHASMPLKFWDEAFLTATYLINRTPSKVIQYSTPLERLLNQKPNYSSLRTFGCACWPNLRPYNNRKLQFRSKQCVFLGYSNIHKGFKCLDVATGRVYISRDVVFDENIFPFSQLHSNAGARLRSEILLLPSTLLNPEIASRGMQVNDHMSNAPSGESNIISEHAPEQEAGGSNINAPTDTHDTEDPGAGGSTGFDENTAGSDGPDGSDGFDGSAAGSDPGDGSTEVGSSSSSAVGSPSTGNGGSSGASVNPGPGSASATEPARHGGATGDETHTNQIIPEQVHQPSRPTTRLQRGIRKEKVYTDGTVRGWCLRQFDVQNAFLHGVLEEEVYMRQPPGYEDKTSATQGAAEALLKDLKQEFALKDLGDLHYFLGIEVNKINRSSSTLVSAFSDADWAGSVDDRRSTGATYLSVNPVFHARTKHIEVDYHFVRERVARKQLEIKFISSGDQVADGFTKPISVQQLRDFRNNLNLDKL

SEQ ID NO: 19704 - protein, 523 aa, Oryza sativa
  Clone ID: TF_OSC900304j.C1.p1.fg
MHTVKETELLAAKLDLLMKRLDDHKKRPQGTVKALDSHIKCEVCGVTGHSGNDCPETREEAMPLCDHGASVSVMSKDVFDKLNFTVLAPTPMRLQLADSSVRYPVGIVEDVPVKIRDFFIAFDFVVLDMDTRKETPLILGSPFLSTAGANIDVGTGSIRFHINGKEAPWSESSTGQTRRTFKRSKWSHPRRIACMRRRLSHLFKGSGSPSSRHDESSTRSSADASMEDADAPRQLLSDADLDLVSDRERQAYYMLSDREYAHTREYSPELLKKIGMDVKFRSIWKAVGWQRFAMKGISRFEKNRFWEDISGAPICKKSRTNDIHNPTLRLMHKWIALTLFPRSDLRPIRRDELIIMFAMVRKIKISPVKCMIRQWLESIKFSALVECTSLITRYTRQVGHQLGMHPEGPKLHAITSESQPGQAPVRTGGMRLMTSTGRDNQPPRSSGVPPSPSEWRSSSSRWDLGEITRRMDTLDMQTGEIQYNLTEHTAQTQEWQQSADAQFPNINNMMQQQHDDLQAYFRF

SEQ ID NO: 19705 - protein, 1421 aa, Oryza sativa
  Clone ID: TF_OSC101455j.C1.p16.gm
MSNEVNHVGKAPMFNGTNYSTWKIKISTHLKAMSFHIWSIVDVDFAITGTPLTEIDHRNLQLNAQAMNALFNSLSQEEFDRVSNLETAYEIWNKLAEIHEGTSEYKDAKLHFLKIQYETFSMLPHERAWGNYTDLEVAQKMLRALSEKYETLVTMLINSDMSRMTSTSLLGKINTNDMYKLKKKEMEEASPSKKCIALQAEVEDKSKSKVNEVNEDLEEEMGHFASKCPSKDDDGDKSSKKKSGGYKLMKKLKKEGKKIEAFIGEWDSNEECSASSGSEEEGGDDASSKKKKMIVVAIKEAPSLFAPLYLMAKGSSKVTSLSDSESDDDCDDVSYDELVSMFEELHAYSEKEIVKFKALKKDHASLEVLYEELKTSHERLTISHEKLKEAHDNLLSTTQHGAHIDVGISCDLLDDSATCHITHVASSSISTSCDYLMDMPSPCSSSSSCVSICDASLVVENNELKEQVAKLNKSLERCFKGNNTLDKIMSEQRCILNKEGLGFIPKKDKKPSHHATRFVKRNGKYCSKCREVGHLVSDCPGGYASNSKAYRVYNKNKGIVEETADVQFDETNGSQEGHENLDDVGDEGLMRAMKNMSIGDVKPIEVEDKPSTSTQEEPSTSASSSQAQVEVEEEKAQDPPMPPRIHTALSKDHPIDQVLGDISKDEALCDPDWMNAMHEELNNFARNKLWTLVERPRDHNVIGTKWIFRNKQDENGLMVRNKARLVAQGFTQVEGLDFGETFAPVARLEAIRILLAFASCFDIKLFQMDVKSAFLNGEIAELVFVEQPPGFEDPKNPNHVYKLSKALYGLKQAPRAWYERLRDFLLSKDFKIRKVDTTLFTKIIGDDFFVCQIYVDDIIFGSTNEVFCKEFGDMMSREFEMSMIGELSFFLGLQIKQLKDGTFVSQTKYIKDLLKRFGLEDAKPIKTPMATNGHLDLDEGAMPPRTRHGRRAPTPDPVSENEESSGDEYVQSDEDNMENVEGDEMEVSDDGDDNESANGEDDEASDDGSPLDSSIQFVLNLRNAQQYTILRHHDQFRRPNDCNDPRFHTRFQKSVYVQVYANKAFAEHKWISWRHIGETPEFENLQEMFRTIGIDRIVTMKQPFDEDLIRQFYATVWVSGDCDAMKWMSGTLRCSINRREFKELLHIRFNNGDDLHDEHTHNLFPIDHFSQFYEEGGRHTYGKVAGLRALPSVINRIVRATILPRYGNNDDIRGVAWHVIDAIMDGRRFDVINLMMKEIAISKGTIGQGIYYAPYIMSPPPPQGYDPSTLFHPQYAYFGMQPNDFFNPVLGAINTLSESIQRLSTGHEALREDVRGLRTDVGNLNTSTGLLEAEMMLLGMADTEPTEPLPPPRQLVEELPGDLSEKIVEEARRRFVSGLEFTTFGVKEELPRVIEAWVVLSVGRLPPCPPLDEGGVRWLRS

SEQ ID NO: 19706 - protein, 968 aa, Oryza sativa
  unsure (1)..(968): unsure at all Xaa locations
  Clone ID: TF_OSC1518j.C1.p2.np
RTRTGQRRRDPYHPRRGEGTTTMNGRGRRPGMTETKGEGTTSQNSGGNATVAGGDALPEVSMGNRGQAGAEEAAATLEKAPARPTGARARRXGRLEGGRHXGKRRRRRRGGAATGRAREGAKTRERSEGPSYHGRSGSRKGRRRAHPNSITPTLARVRQPEESYTSNQAVTHSRLIKDAITGNNLISSWFGMVNSXFGDRTVQPMPRFKPEYLFGVEGFVQELHTMSFAIGFGTAPLYAQIPHDRDEEKCRVKVTMNSNSEDIPSVMFEAGGGNYIHACQEVARMAIGELRDRYSDQLADTEYRYHPRQPQGSDRGSYLETVGIENDATTRHLVEMLXAMDETRAETVLAAQDREDQNRGKICKLEDKVDHLEKELAALKGEAPPQKARVRLTARKRALFVPRYQLAPKVRVVEKEVTPALADPPVVNVSNDDKEESKRTHSKIEWGATQDDGDEPNEPSILRCPEDLDNGNGPNIINNNNNGENPTLAQVLAQQAQLMNMMMQQLQNQQNQGNNHAPPQNKLAEFLRVRPPTFSSTTNPVEAGDWLDAIEKKLDLLQCTDQEKVSFASHQLHGPASEWWDHFRLNRTIAEPITWLDFTAAFRKMHIPSGVVSLKKKEFRSLIQGSRTVTEYLHEINRQARYAPEDVRTDEERQERFLEGLNDELSYPLMTGDYHDFQKLVDKAIHQEDKYNRMEQKKCRIAHFKAQQGNSQRPHLTLGPQSMSQGGSSSVVRPQRQFFNNNTGNNIRNQAPRLVAALTQQQPAKREQGSKPGVCFNCGEPGHYSDKRPKPRRVKVVPAQSNSTAPASKARVNHVAAAEAQGAPDVILGTFLVNSVPATVLFDSGATHSFLSMSFAGNHGMEVEDLRRPLMVSTPSNQALSLQHSPSVRIEIQGVPFLANLILLEAKDLDVILGMDWLARYKGVIDCANRKVILTSNDGRVVTVHALSSESLRSSLNQMTLEEIPIVQ

SEQ ID NO: 19707 - protein, 1523 aa, Oryza sativa
  unsure (1)..(1523): unsure at all Xaa locations
  Clone ID: TF_OSC1661j.C1.p1.np
MEIRNGSRDSNNVSGSEEPINGARANGASDYSLSPPPENPTIAQVLNNQTQMMTMMMQQMQQQYHQVLQQVQQQAQQQQQNLQFGPPPPQSKLLEFLRVKPPIFSSTTNPIEAHDWLHAIEKKLNLLQCNEQEKVAFAIHQLQGPASIWWDNYMVTRPAGAEVTWTEFCHSFNKAQVPEGIVAQKKREFRSLQQGTRTVIEYLHELNRLARYAPEDVRTDAERQEKFLSGLDDELTNQLISRDYEDFEKLVDKAIRQEEHYNEINRKRKAAQFRTPQGKSQKPRFTMGHQGGPSTMIIRQYRPYHPGSFNKTHHSGSHNNSEQHRLKPTPSPLMIPAQPALPAQPEQPKKFGEKPELCFNCNEPGHTVGRCPKPRRAGPKFVQARVNHASAEEAQSAPEVILGTFPVDSTPAKILFDSGATHSFISKRFAGAHGLSLVKLKIPMRVHTPGGGMTTTHYCPSVTVEIQGMIFPANLILLESKDLDVILGMDWLTRHRGVIDCASRTIKLTNAKGEVVTFQSQVPRKLGISLNQAAGEEQEVAVEKTTKKLEDIPIVREYPEVFPDDLTTMPPKRDIEFRIDLVPGTAPIHKRPYRMGASELAEVKKQVDEQLQKGYIRPSTSPWGAPVIFVEKKDKTKRMCVDYRALNEVTIKNKYPLPRIDDLFDQLKGATVFSKIDLRSGYHQLRIREEDIPKTAFITRYGLFECTVMSFGLTNAPAFFMNLMNKVFMEFLDKFVVVFIDDILIYSKSEEEHEQHLRLVLEKLKEHQLYAKFSKCDFWLKEVQFLGHIVNAQGVAVDPANVESVTKWTPPRTVTHVRSFLGLAGYYRRFIENFSKIAKPMTQLLKKEEKFIWSAECNRSFEELKRRLVSAPVLILPDQTKGFQIYCDASRQGLGCVLMQDGKVVSYASRQLRPHEGNYPTHDLELAAVVHALKIWRHYLIGNRCEVYTDHKSLKYIFTQPDLNLRQRRWLELIKDYDMGIHYHPGKANVVADALSRKSYCNVAWVEQLCCEVQRGLEHLNLGIVEHGFVVALEAQPTLVEQVRIAQASDPEIAELKKNMRVGKARGFVEDEQGTIWMGERLCVPENKELKDLILIEAHQTQYSIHPGSTKMYQDLKEKFWWVSMRREIAEFVALYDVCQRVKAEHQRPAGLLQPLQIPEWKWEEIGMDFITGLPRTSSGHDSIWVVVDRLTKVAHFIPVHTTYSGKKLAXLYLARIMCLHGVPKKIVSDRGSQFTSKFWQKLQEGLGTRLNFSTAYHPQTDGQTERVNQMLEDMLRACALDFGGAWDKSLPYAXFSYNNSYQASLQMAPFEALYGRRCRTPLFWDQTGERQLFGTEVLNEAEEKVRAVRERLRIAQSRQKSYADNRRRELAFETGDYVYLRVTPLRGVHRFQTKGKLAPRFVGPYRILERRGEVAYQLELPSNMLGIHNVFHVSQLKKCLRVPEEQASPDHIEIQEDLTYVEKPTRVLKTSERRTRNKIRFCKVQWSHHSEEEATWEREDELKATHPHLFASSSESRGRDSV

SEQ ID NO: 19708 - protein, 1422 aa, Oryza sativa
  Clone ID: TF_OSC1661j.C1.p2.fg
MAIKDRFTGNPGRLTVLTTSGSGFVACGLVSGRYHVSVMEIRNGSRDSNNVSGSEEPINGARANGASDYSLSPPPENPTIAQVLNNQTQMMTMMMQQMQQQYHQVLQQVQQQAQQQQQNLQFGPPPPQSKLLEFLRVKPPIFSSTTNPIEAHDWLHAIEKKLNLLQCNEQEKVAFAIHQLQGPASIWWDNYMVTRPAGAEVTWTEFCHSFNKAQVPEGIVAQKKREFRSLQQGTRTVIEYLHELNRLARYAPEDVRTDAERQEKFLSGLDDELTNQLISRDYEDFEKLVDKAIRQEEHYNEINRKRKAAQFRTPQGKSQKPRFTMGHQGGPSTMIIRQYRPYHPGSFNKTHHSGSHNNSEQHRLKPTPSPLMIPAQPALPAQPEQPKKFGEKPELCFNCNEPGHTVGRCPKPRRAGPKFVQARVNHASAEEAQSAPEVILGTFPVDSTPAKILFDSGATHSFISKRFAGAHGLSLVKLKIPMRVHTPGGGMTTTHYCPSVTVEIQGMIFPANLILLESKDLDVILGMDWLTRHRGVIDCASRTIKLTNAKGEVVTFQSQVPRKLGISLNQAAGEEQEVAVEKTTKKLEDIPIVREYPEVFPDDLTTMPPKRDIEFRIDLVPGTAPIHKRPYRMGASELAEVKKQVDEQLQKGYIRPSTSPWGAPVIFVEKKDKTKRMCVDYRALNEVTIKNKYPLPRIDDLFDQLKGATVFSKIDLRSGYHQLRIREEDIPKTAFITRYGLFECTVMSFGLTNAPAFFMNLMNKVFMEFLDKFVVVFIDDILIYSKSEEEHEQHLRLVLEKLKEHQLYAKFSKCDFWLKEVQFLGHIVNAQGVAVDPANVESVTKWTPPRTVTHVRSFLGLAGYYRRFIENFSKIAKPMTQLLKKEEKFIWSAECNRSFEELKRRLVSAPVLILPDQTKGFQIYCDASRQGLGCVLMQDGKVVSYASRQLRPHEGNYPTHDLELAAVVHALKIWRHYLIGNRCEVYTDHKSLKYIFTQPDLNLRQRRWLELIKDYDMGIHYHPGKANVVADALSRKSYCNVAWVEQLCCEVQRGLEHLNLGIVEHGFVVALEAQPTLVEQVRIAQASDPEIAELKKNMRVGKARGFVEDEQGTIWMGERLCVPENKELKDLILIEAHQTQYSIHPGSTKMYQDLKEKFWWVSMRREIAEFVALYDVCQRVKAEHQRPAGLLQPLQIPEWKWEEIGMDFITGLPRTSSGHDSIWVVVDRLTKVAHFIPFSYNNSYQASLQMAPFEALYGRRCRTPLFWDQTGERQLFGTEVLNEAEEKVRAVRERLRIAQSRQKSYADNRRRELAFETGDYVYLRVTPLRGVHRFQTKGKLAPRFVGPYRILERRGEVAYQLELPSNMLGIHNVFHVSQLKKCLRVPEEQASPDHIEIQEDLTYVEKPTRVLKTSERRTRNKV

SEQ ID NO: 19709 - protein, 211 aa, Oryza sativa
  Clone ID: TF_OSC400196j.C1.p1.fg
MDQMALATIVQAVPEAMVMVISEKEMAREAWDALKQMNMGEERVKKARVQTLKRVLDDSFSRHESGGDHRRGEALAFRSRQVPIPHKHHRAVGDVSEMTVTETIGCLRAFEVSSKGRRRENAGEEQLLIAGAEQRLTRAEWEAIVAEEKKSYEASGSVTKKFRSKFDKSKIECCRCGKFGHFADECDEPRKMTKAVAQLAIADADDEPTLL

SEQ ID NO: 19710 - protein, 725 aa, Oryza sativa
  Clone ID: TF_OSC400872j.C1.p5.fg
MSGTSSDEPTLENLAHKLKGMENWYEELMRNSKSYKESTDKHLKTLSESLVKVVDQIEKMNQSHKQLTENIQNMNIGHENIVRRIGLLEAAGEEGAGATAHRHQRYDNEDEEQSVADDEEEDESVRNRRQRRVRDKDDPLSKFEPSVYLDWELAVEQKFSCYDFPDNKKVKAASSEFTSFASLWWNDICGRGLRPRTWDDMKRTMRSRFVPFYYARDILNKLQLLRQGPNSVETYYQEMMITLSRCDLQETEDARISMFYGGLKREIRDILEYKEYNTMNRLFHFACKAEREVQGRNKHRSSFAGATSTRQSTPRQSTTAVRPASSTPPTSTPSHAQETSKNASVQTPAKSETSVVSTGRTRDTTCHRSHGIGHIARDCPNRRALFVNADGEYTSASDCDDEYALATTNHAGGQDNDDIEKVHLHPESLDQYPSLIVKLALSAKEKCEEQNQRHNLFQSKVLVKGHTVKMIIDSGSCNNLASEEMVKKLGLTTHPHPHPYHIQWFNTCGKMKEYEDVFHDEIPPRMANGRESAHNQEDGIESRTTPIQEGEDDEDITSSDTLITSHAPMIIPSPSPVQPPEIALTSNGPSTFMPTPIWCSLVCIAGMINRASRLWERPCAHAYRINARRGSGVGWIYTGWGEPTGSATAGFRTQRPLTISPPDPMVADRSRAHCSRYHLPLEEVERRGGENRKWKIGVAERIRRGMGERIQRYFTEERVDAGLVG

SEQ ID NO: 19711 - protein, 1021 aa, Oryza sativa
  Clone ID: TF_OSC900139j.C1.p6.fg
MASSSSAATISNPMFGLQISEKLTKHNHSLWSAQILTTLRGAQLDGHLSGTTEAPAAEIEKEEGDKKIKIMVSNPAYKAWFAQDLQVLGFLFSSLTREILQQVAGATTAAQAWSMIGDMFSTKSKAGSINVLLALTMTQKSPMTISEYIAKMRSLADEMAAAGEPLDDEELVAYIINGLDSDFDAVVEGIMATERIAPPSVSHVYSQVLSYENRMKIRQAYVTTSANAANCGGRGGRNSGGNRGRGGFGRGGRGGGRGNPAGNNQGRGRGNDSRPLCQVCHKRGHVASDCWHRYDDSYVPDEKLGDNYGFLEIHGKYFLIKDKATRRIILEDVWEPASTSLGAKKYYVSFIDDYSKFVWIYFLKHKSEVFQKFHEFQKLVERQFDRKILAMQTDWGGPPEIAATDALGTLDGVPGAHEELSESTQDSAPAAVSGLPTDTPGSLSQGEQERSPARTAVRSQPSHQSGGDTSAGSGVLSPAHGDNIVTSDVTAPGSSTSAAPAQQQIPAEVMRPKTRLQSGIRKEKVYTDGTVRYSCFTSSGEPQSLCEALGDKNWKHAMDIPPKKGLNIIDCKWVYKIKRKADGSLDRYKARLVAKGFKQRYGIDYEDTFSLVVKAATIRTILSIAISRGWSLRQLDVQNAFLHGVLEEDVYMKQLLGYEQKDGYVCKLDKALYGLKQAPRAWYSRLSTKLHELGFKSSKSDTSLFFYSKGDITMFMLVYVDDIIVASSSHDATNVLLKNLNREFALKDLGELHYFLGIEVKKVNDGIVLTQEKYAKDVLRRVNMSECKAVNTPLSISEILSAQGGTPLGPEDSTKYRSLVGALQYLTLTRPDLSFSVNKVCQYLHAPTTEYWVAAKRILRYLKHTVKLGLKINWAGCLDDRRSTGGFAVFIGPNLVSWSARKQATVSRSSTEAEYKALANATAKIMWIQTLLLELGVQVPRAAKVRCDNIGAKYLSSNPVFHTRTKHIEVDYHFVRERVARKLLQVEYISTTDQVADGFTKTLAVRQLEMFRNNLNLTCID

SEQ ID NO: 19712 - protein, 1911 aa, Oryza sativa
  Clone ID: TF_OSC900300j.C1.p6.fg
MADKTLREFAAPSVDNVAIGPQINMGDVDFGLKSSLITMAQASPFSGKPNEDPTLICSSSWRSIAQLLQWTHSHVPRSLAAAAGGAFFSKTVRGAVDLIEKMVSNMGWSEERLQTRQRGMHTVKETELLTAKLDLLMKHLDDHDKRPQGTVKALDSHVTCEVCGGTGHSGNNCPEIHEEAKYMGNNNNGYRPQGGQGWNEPRPYYQGGTNGIAKEVPSNDSADKEIQPEKAVPQEYCDTRLLPFPQRSRKPSVDEQFAHFVEVIQKIHINVPLLDAMQVPTYARYLKDILNNKRLLPTTEFGQALYDLGASVSVMPKDVFDKLNFTVLAPTPMRLQLADSSVRYPVRIAEDVPVKIRDFFIPVDFVVLDMDTGKETALILGRPFLSTARANIDVGTGSIRFHINGKEEKFYFQLRTEQFSMVRIKYRPNPQNIQVVEVEPPKTDSLVKFMQNFLEKETTMPRNRYWKTPMDRSSWMYEMRRMQPVFIKEASKFIDQAKAHALRENMTKIFCPCRHCKNQKLLVDPDEILGHIMEYGFTANYKVWTYHGEFADPEDDNEELSFEMNKAENFIIEDMSRERMDVDVSTDSDDFEGGFDLDDMLRHVEPKVLAGRSRGLENWQALEKASKDLLYDETKGCDKDFTVLRSVLELLRLKTKHGWLDTSFNDLMSLLLVLLPKPNFVPSNTYQAKKLICPLSLGVEKIHACKNHCILYRKEYANLESCPMCGTSRYKMGNGPIDSECTDPDSDKGKRGKIPSMVMWYLPIKDRQKRLYSNPTDAELMRWHQESRKIDGMIRHPADARQWKKFDAKHPEFAKDPRNVRFALSIDGMNSFGDLSNSHNTWPVLLTMYNLPTWICQKRKYILLTILIQGPNQPGIDIDIFLEPLMEDMEELSKEGLRLWDEFKREHFNLGKTGCLICLEKTSYKYLTSSLKTVYMRHRRFLPQRHRYRKMARLFDNIVENDTAPEARSGTYVYEITKKIKVVYGKGKKKTVKRKKADGDKDTALPFKKHSIFFRYLDYWKDLEIRHAIDVMHLEKNVFDSTIGTLLDIPSKTKDGLKSHNDLVDLAIRHDLLPVVLPNGKTEIPPACYSLTLEEKKAFCKCLQGVRVPTGFASNIRKLVSMKDLTISGYNAHDCHRLLMVFLPIAIRAVKPVHTKVVITKLCYFFNRISQKMWAFERYMSILKGYVLNRAHPEGSMIEGYTTEEAVECCMDYIKDANAIGIPVHRHEWRLSGRGTVGRKQFFDNEYKMVSAAHNNVLQQLAIDEPFIERHLEEMKACFPGNLLYKDWHVGLQVLSIHGKIPVLRCEWVKDTTGVSVDDYGLTIVDHSKTGHEDDPWVLAERVAQVFYVKDPSDERKTIVISGKQQIVGIDNIEDPNDYNQFDDVPLFTDLPMRIKKVERTIDEANMSWKMSNDKVPSNAPIAPQEGNAPQKSGSNKQPDASSEETWRTPSDPFPMEITQVAPRDDDPYYIPMEQADGKPVEPPIVRSKFSNTCGTLVRTRFPINVKLWETVDDNIKTLLWNELQKYFVYPPGSELISTYDPKEIDKDKEKFMFSAFRNSEKRKKLAHVMSDSQKSVLAAQDEVQSWLSADVPETYEYGKPFLPTYLMNKLPWEMRVIHEWYIKASRKGLGFISVAVPEGAFMSGPNGIFFISFQDLYALYKLDKMDVNLVAVFCLMQFHEADRTGAKVGYVDPTRICKTQHIVELREDCEQLVGKTPKEKEEYVKTLHKRKKLEVATYLAIAMLAHADKDDLMVPYAFTDHYILFLVYPKDQLIISLDPAHYDKETFMEFLTILNLAHKYYRKRGGPVHITSQKQLSVRTGWLCYKQPPGTNLCGYYVCKMLRVNGRYKTTSNRIPKIPYIAQQFNDNTILNMAADLCRFIHRDVCNARGLFYDNQSELAMDDKFKPLRE

SEQ ID NO: 19713 - protein, 1245 aa, Oryza sativa
  Clone ID: TF_OSC401367j.C1.p87.fg
MASSSSSIPFALHGQSVSEKLTKSNFVLWKAQVLATLRGAQMAGFLDGSNKAPEATIVITKDDGKTTEKVANPALAQWVAQEQQVLSYLLSSLSRDVLTQVATLGKATEVWEALKASLRRSLELASSTPAWRSPPPRKGTKLSLNMNPLDEEDLVSYILVGLDFDYNSVVSSVAGRADSISVSELYALLVGFETRLDLLQNNSSPSANTVSRGGRGGGGGGRGQGGNNGGRGGGFRRGRGDGKPKPTCQLCGKIGHVVAKCWKRFDPSFTGEEKVASTAATNNSYSIDTNWYIDSAATDHITSEMEKLAIKDKYHGNDQVHAASGSGMDIDYVGHTAICTPTRDLWLKNILHVLEAYKSLVSAHCFARDNRAFVELHPCFFLVKDQVTRRPLLRGRCESGLYPLPTDKQAHGAIKPSLSRWHSRLGHPSFSIVDRVVSTNNLHVTRDSSRRLKPCKQIGGGEFQRLNSFFNNVGIEHHVACPYAYQQNGSVERNHHHIVEVGLSLLAHASMPLKFWDEAFTTAAYLINRTPTRVLSYETPLQRLFNLPPDYFLLRTFGCACWPNLRPYNTRKLAFRSKQCAFLGYSTMHKGFKCLDIAAGRVYISRDVVFDVQVFPFAQLHSNAGARLQSEIQLLTPNLLPSIMLDHGGAVVHDQPLINNPNPTDSSGESAGQNSGANGENSAANDSESTSINHDFMQNCDLASSGEHYTADDDPNADSADSVSRQVDPEADAAAHGSAASSPPTTPSHVDSDAFGPTMSLQDAGPTPTPATGSPTPTISAVESEATPEAQPIPGPITRAHHGIHKPKKYTDGTVRYACLTDTEEPSSLQEALHDKNWKIAMDKEFAALVHNKTWHLVPPQKGTNVIDCKWVYKIKRKADGIIDRYKARLVAKGFKQRYGIDYEDTFSPVVKATTIRLVLSLAVSQGWSLQQLDVQNAFLHGYLEEDVYMRQPPGYEESKVPHYLCKLDKALYGLKQAPRAWYSRLSKRLQELGFTSSKADTSLFFFNKKGLVMFLLVYADDIIVASSCSQAVTVLLENLEKDFALKDLGELHYFLGIEVKKDGDGLLLSQERYANEILKQVSMTGCKPVSTPLSTVEKLSAHEGEKLGVNDSSQYRSIVVALQYLTLTRPDISFSINKVCQFLQNPFVVHWAAVKRILRYLQGTVKLGLKIEKSPSSVVSAFSDADWAGYLDDRRSTGGFAVFLGSNLISWNARKQATVSRSSTEAEYKALANATAEVMWNSSS

SEQ ID NO: 19714 - protein, 486 aa, Oryza sativa
  unsure (1)..(486): unsure at all Xaa locations
  Clone ID: TF_OSC14790j.C1.p1.np
FSYPISGSVRSQSLXSRSRRSTRQTRAPNRFGFEEEPVQSEIPDQPVNQADEQEAESDHTVASESVNNARGNQPPPMLHQILAMQTQILQGMIQNIIAMQQQHTQERQPHMVQDNGRSKLNDFLTSRPPEFSQTTEPIEGDDWIKDVERRLNLVQCTPYEKTLYAAHQLRGPTADWWDNYCANHTDAGTIVWAEFAXVFRSAHILESIIDLKKEEFANIRQGSSGINEYLSRFNRLARYALEDADTDKKKIRRFLKGMDAKLRVKLLAHDFSMFQQMVDKSLLLEDAEXEMQEXKRRKVISRDSSKRRFVSKKTNSPAQYYQRVFQYSNGFGSTSRSTMSESSQQTTVINSKSLEGSNSVSCPPPPKSKAGVECFICHEMGHYSWYCPQVKSKQVQPTASLPSVPGPKSSKSNSGSVSLTSPPVGQSHLNHVQVETKGKAVPTVMGGCEVVPVTXICLPVLYEKLLWIGNCHQNQPTWQMDDLSGQ

SEQ ID NO: 19715 - protein, 453 aa, Oryza sativa
  Clone ID: TF_OSC401437j.C1.p16.fg
MARRSTRQIRAPNRFGFEEELVQSEIPDQPVNRTDEQEAESDHTVASGSVNDVARGNQPPPVDLHQILAMQTHIIQGMVQNIIAMQQQHTQERQPHMVQDDGKSKLNDFLGSRPPEFSQTNEPIEADDWIKDMERKLNLVQCTPQEKTLYAAHQLRGPAADWWDNYCATHTDASTIVWTEFAGAFRSAHIPESIIDLKKEEFANIKQGSSCINEYLSRFNRLARYAPEDVDTDKKKIRKFLKGMDAKLRVKLLAHDFPTFQQMVDKSLLLEDAEKEMQEYKRRKVMSLEIQAKEDLCRKTNSPAQYYQKASQHSNGSGSTSRSTMSEPGQQATMINSNSHEGSNSVPCPTPSKRRGYKAGVECFICHEMGHYSWYCPQKVKSKRVQPTTGLPNVSRPKSLKAPNSGSISLTSPPIGQSHLNHVQVETNGKVVNLEQVEGAGEEQVPQARAEPQ

SEQ ID NO: 19716 - protein, 687 aa, Oryza sativa
  Clone ID: TF_OSC408741j.C1.p9.gm
MEDAEAPRRLLNDTDLDLVSDRERQAYYILSDRDCRELTIPQQIIEESHAGGAYRETRNMTRNERKSTSSSTPVQMYEAEKGKRPSHRATRFVKSNGKYCSKCREVGHLVNDCPGGCASNSKAYQFYNKNRGIVEETADVQFGETNGTQEGHENLDDVGDEGLMRAMKNMSIGDVKEFDMSLIGELSFFLGLQIKQLKDGTFVSQTKYIKDLLKRFGLEDAKPIKTPMATNGHLALDEEVMASRTRRGRREPTPEPVSENDESSGEEYAQSEEEFVEEVEGAEEEASRDDSGSGGGEDEESDDEGLLDPTIYFSLNLRNAQQYTILHHHNQFRRPNDCANPQFHTRYQKAVYEQVYANKAFADHKWISWRHISETPEFVDLQGMFKAVGIDRIVTLKQPYDEDLIRHFYATVWVSSDCDAMKWMSGTIQCSINRREFKELLHIHFNNGDDLHDEHTHNPFPIDHYAQFYEEGGRHTYEKVAGLRIIPSGQPHSESHPSPKEIAISKGTIGQEIYYAPYIMRLIQSKLGEVGDNLREHKEYKLRRQLSTPRAPQMHQHIFDQGASSSAAPPHPHGFVDPNAFFNPQYAYFGMQPNDYFNPVLRAINTLSESIQRLSTRHEAMHEDPDQAGLTGAQGRSDRRQLGGLAGPPEAGMSSLWAGSRLTHPLTNGACGGFVIEQWSWARLNGE

SEQ ID NO: 19717 - protein, 2023 aa, Oryza sativa
  unsure (1)..(2023): unsure at all Xaa locations
  Clone ID: TF_OSC34301j.C1.p1.np
LTAADLPRRFPSSGRSLPLPTLFKPSPHLLRPVPPLAALPPRRIRARDVLSLRRRRRAPVHHRRRPGPPPTSAPPPSASPHPRRPRSPLCFGRRXPERRRPRRPEPRHRLPPLRPPPPSPPSPRGEPWTVASFPFPPLSRPPLRSIYGRSRRPSGRGRAASRRPRRRGRPRARRVAAAWSPAISRPRPQVRLTCGAHGAGRASPGAPGPPWTHLGHIRISLRASVAKHYRFHMSSGTNDGYTSCGPTNDGYTSCGPVVEMSWHRAGVLLLGAQSCLPVRGVPAVGGVGSMYTSDQSIICSNSRALGYGQAEQCTQMAGSINHRGLDLTGFVLELRGMCVVLGYPHGVDYQGKQLSKQEGDDAEPHAAWEVTAVILTGSPERTSLAVTAGGDSFSAACQNAALLTIGTLHQRYPDELQHSPYRYHPRRGGARDYATFRDASSEDDATIMHLARIVEAYDVARIDFHQMVRRGLVENNMKILELRQENLQLKKDLDAGEAQLCQLKIAXGEVCRPKRCRVCRSLKITARKSTSRPELVRQSLAWTCFVETPRDEPAPLVSQDEGASGVGSTEDALLLTFHGETRRSAATGEGSHPEGSNYNNHGSPPPPPHPPPPPPPDTNSILTQILAQQANMMAAFLHHIQNPPQHNAPPPPPPPQHSKLAEFLRIRPPTFSSSNNPVDALDWLHAVGKKLDTVQCNDEEKVIFAAHQLQGPASLWWDHFXATQPEGQPITWARFTAAFRRTHVPAGVMTLKKREFRELKQGNCSVMEYLHEFNNLARYAPEDVREDEEKQEKFLAGMDPELSVHMVSGDYPDFQRLADKSIRLEAKHKELESHKRRLANFRNQQGANQRIRYTNPYPGGSSSQQQQQPRSALRPQFVVRVPQPQQQQSQQGTRAPRPPTPAVQPGQGRRDVHGQQRLCFNYFEPGHFADKCPKPRRQQGQAPPRPNNGGKDVIRGRVNHVTAEDMLTTPGVIVGTFLIHSIPATILFDSGASHSFISVPFVGRNQLGVERLRNPLLITTPGGVMTAKYYSPAVPIEIQGILFPSDLILLDTKNLDVILGMKWLAQFQGVVDCARRTVTLYRGPEQPVVFFAPPTSASSSELHQIGLSEIPIVREFGDVFPEELLGMPPKREIEFRIDLAPGTTPLYKRPYRMAANELAEVKKXLEELKEKGYIRPSTSPXSAPVIFVEKKDKTKRMCVDYRALNEVTIKNKYPLPRIDDLFDQLKGATVFSKIDLRSGYHQLRIREEDIPKTAFTSRYGLYEFTVMSFGLTNAPAFFMNLMDKVFMENLDKFVVVFIDDILMYSQSEEDHQQHLRLVLGKLREHQLYAKLSKCEFWLSEVKFLGHVISAKGVAVDPETVTAVTNWKQPKTVTQVRSFLSMAGYYRRFIENFSKIARPVTQLLKKEEKFVWSPQCEKAFQTLKEKLVSSPVLILPDTRKDFLVYCDASRRGLGCVLMQEGHVVAYASRQLRPHEGNYPTHDLELSAVVHALKIWRHYLIVNRCEIYIDHKSLKYILTQSDLNLRXRRWLELIKDYDVGIHYHPSKANVVADALSRKSHCNTLGVRGIPPKLNQQMEALNLSIVGRGFLATLEAKPTLLDQIHEAQKNDPDMRGLLKNMKQGKATGFTEDEHGTQWNGNRHVKAEHQRPAGLLQPLQVPEWKWDEIGMDFITGLPKTQGGYDSMWVVVDRLTKVARFIPMKTTYGGNKLAELYFARIVSLHGVPKKIVSDQGSQFTSHFWKKLQEELGTRLNFSTAYHPQTDGQTERLNQILEDMLHACVLDFGKTWGKSLPYAEFSYNNSYQASIQMAPYEALYGRKCRTPLLWDQVGESQVFGTDILREAEAKVRTIRDNLKVAQSRQKSYADNRRRNLEFAVDDFVYLRVTPLRGVHRFQIKGKLATRFVGPFRIIARRGEVAYQLELPASLGNVQDVFHVSQLKKCLRVPSEQADSEXIEVREDLTYVERLVKILDTMERRTRNRVIRFCKVQWSNHAEEEATWEREDELKAVHPDLFAGSSESRGXDSV

SEQ ID NO: 19718 - protein, 1634 aa, Oryza sativa
  Clone ID: TF_OSC400231j.C1.p31.fg
MTTLAPCAKHYTPKGLTTLLQTNPNNRHTIPKTLKWDEITLPEKWVLSQAVEPKSMDQSEVESLIETLDGDVEITFASKQKAFLQSRPSVSLDSRPRTKPQNVVYATYEDNSDEPSISDFDINVIELDVGFVIALEEEEFEIDKELLRREIRLPKNRAKTKRYLEEVDESFRMKIREVWHNEMREQRRNIFFFDWYENSQIIHFEEFFKRKNMIKKEQKSEAEDLTVIKKVSTEWETASGNKVDSVHPPFESIQLSHNGGKACPLKSISKNTYGETAKVEHIGHLVEQQNYANISLRSLGQQTDRIETILMEGYKTGRPEVKINIPSNSQSSSSQSVSPMFVPTIDPNIKFGKQKAFGPAISEELVNELALKLNNLKVNKNINEISDNEKYDIVNKIFKPSTLTSTTRNYYPRPTYADLQFEEMPQIQNMTYYNGKEIVEWNLDGFTEYQIFTLCHQMIMYANACIANGNKEREAANMIVIGFSGQLKGWWNNYLNETQRQEILCAVKRDDQGRPLPDRDGNGNPTGNISDALATLIYNIIYHFAGNYHDIYEKNREQLINLKCKTMSDFRWYKDTFLSKLYTLPEPNQDFWKEKYISGLPPLFAEKVRNSLRKEGGGSINYHYLDIGKITQKIQLVGAELCNDLKIKDQLKKQRILGKREMGDFCYQFGFQDPYVYRKRKTHSKPMTKPNDKSKMSFQATKRKPKRIYNKNIRTQDTESKETICYKCGLKGHIANRCFKSKVKKEIQALLDSESEDVKEKLEAILNNIDNDLSSDEEKNAEINCCQDSGCSCCEPDNSEEESDENILVLTSLEEFVLDTFETIQDPEEKRRVLEKFLSRVKTDKDKLKKDIQKSKFLSIDEVFKRLDEQKKKNEQPDLISLFEDQKIMKQDLEEIRKRLYMLESKEGFHMEEKDEPIQEDDHVVGTIQKYMKQKWYTEVMYRFIDGSYFQHITLIDSGADVSCIREGIIPHKYFYKAAHRIRGADGRLLTVEYQIPEIYICISEVCIKTSFLLVKNLKQDVILGTPFLSLIRPFLVTNEDIQFKIMDKQVSLRFSSNTDEILDQLIQTKREQVVNTIYLHDNSFPSYLPKSMDLPGKTSWEDRYLLKATKDFEYICREMASQKSEWLTNMSSWRLPQLPRGHGERFNHNFRVTELQQGLLNLLWQTKNKKEKAHALNGLAYYFKNFVPSDQKITEKRAKIQDIPHHEEMLLDYREEKSRDGQDKLPMEVEQSMATDKNTKVFSDKILISTDPASSMVAFHININNLLQSFPHNKPSSSTKRHDTIPQTPYILHNHPNSFLPQYILRTQPKAPCRSCAYKDSCQKKLKSQNPMSTTYENLQPRLSFKTEQTLSCFGQDILDLVWHKFKERQMKIFLGLQDYFFDLLEGRERNPAIRVIIYMLPLLRLDDQAISDPSYRFLVLKAEINLQRFRNLPTYNHEEISLQTIIDHGLVNSIYATLDQILQSDLGNAVKDICRRLGHGRYRIIFSSIPPKFTPPVRPAIHYIYIMNRQFNFQEDGPSKLSDEEEEIYTTIANHENWRLFSEAAEIEEAITTDYEYQLVFQNKITRIFISKFYNQSYEYFKGAGHIIKPDFGNECSKKSYYRSLAQWFQKTEPSEIDTVQSAPMIINEDNE

SEQ ID NO: 19719 - protein, 1204 aa, Oryza sativa
  Clone ID: TF_OSC401054j.C1.p45.fg
MDNKIFKPSTLTSTTRNYYPRPTYADLQFEEMPQIQNMTYYNGKEIVEWNLDGFTEYQIFTLCHQMIMYANACIANGNKEREAANMIVIGFSGQLKGWWNNYLNETQRQEILCAVKRDDQGRPLPDRDGNGNPTGNISDALATLIYNIIYHFAGNYHDIYEKNREQLINLKCKTMSDFRWYKDTFLSKLYTLPEPNQDFWKEKYISGLPPLFAEKVRNSLRKEGGGSINYHYLDIGKITQKIQLVGVELCNDLKIKDQLKKQRILGKREMGDFCYQFGFQDPYVYRKRKTHSKPMTKPNDKSKMSFQATKRKPKRIYNKNIRTQDTESKETICYKCGLKGHIANRCFKSKVKKEIQALLDSESEDVKEKLEAILNNIDNDSSSDEEKNAEINCCQDSGCSCYEPDNSEEESDENILVLTSLEEFVLDTFETIQDPEEKRRVLEKFLSRVKTDKDKLKKDIQKSKFLSIDEVFKRLDEQKKKNEKPDLISLFEDQRIMKQDLEEIRKRLYRLESKEGFHMEEKDEPIQEDDQVVGTIQKYMKQKWYTEVMYRFIDGSYFQHITLIDSGADVNCIREVCIKTSFLLVKNLKQDVILGTPFLSLIRPFLVTNEDIQFKIMGKQVSLRFSSNTDEILDQLVQSKREQVVNTIYLHDNSFPSYLPKSMDLPGKTSWEDRYLLKATKDFEYICREMASQKSEWLTNMSSWRLPQLPRGHGERFNHNFRITELQQGLLNLLWQTKNKKEKAHALNGLAYYFKNFVPSDQKITEKRAKIQDIPHHEERLLDYREEKSRDGQDKLPMEVEQSMATDKNTKVFSDKILISTDPASSMVAFHININNLLQSFPHNKPSSSTKRHDTIPQTPYILHNHPNSFLPQYILRTQPKAPCRSCAYKDSYKKKLKSQNPMSTTYENLQPRLSFKTEQTLSCFGQDILDLVWQKFKERQMKIFLGLQDYFFDLLEGRERNPAIRVIIYMLPLLRLDDQAISDPSYRFLVLKAEINLQRFRNLPTYNHEEISLQTIIDHGLVNSIYATLDQILQSDLGNAVKDVCRRLGHGRYRIIFSSIPPKFTPPVRPAIHYIYIMNGQFNFQEDGPSKLSDEEEEIYTTIANHENWRLFSEAAEIEEAITTDYEYQLVFQNKITRIFISKFYNQSYEYFKGAGRIIKPDFGNECSKKSYYRSLAQWFQKTEPSEIDTVQSAPMIINEDNE

SEQ ID NO: 19720 - protein, 1529 aa, Oryza sativa
  Clone ID: TF_OSC401341j.C1.p21.fg
MAQGRCPAARGSVLPTCPGGPAVGGIGSVLLSMARMGWKLCHVFRLFTVVMAGSINRRGLDLTGFVLELRGMCVVLGYPHGVDYQCRQLPEQEGDDAERHAAWEVTAVILTGSPERTSLAVTAGGDSFSAACQNAALLAIGTLHQRYPDELQHSPYRYHPRRGGARDYAIFRDASSEDDATIMHLARMVEAYDAARIDFHQMVRRGMVKNNMKILELRQENLQLKKDLDAVEAQLHQLKIAQGEMVTTRRSANTGDGNQPKGSNHNNHGSPPPPPPPPPPPPPDTNAILTQILAQQANMMAAFLHHIQNPPQHNAPPPPPQHSKLAEFLRIRPPTFSSSNNPVDALDWLHAVGKKLDTVQCSDEEKVIFAAHQLQGPASLWWDHFQATQPEGQPITWARFTAAFRRTHVPAGVMALKKREFRELKQGNRFVMEYLHEFNNLAQYAPEDVREDEEKQEKFLAGMDPELSVRLVSGDYQDFQRLVDKSIRLEAKHKELESHKRRLASFRNQQGANQRVRYTNPYPGGSSSQQQQQQQQPRSAPRPQFVVRVPQPQQQQSQQGTRAPRPPTPAVQPGQGRRDAPGPQRLCFNYFEPGHFADKCPKPRRQQGQAPPRPNNGGKDVNRGRVNHVTAEDVLTTPDVIVGTFLIHSIPATILFDSGASHSFISVPFVGRNQLGVERLRNPLIITTPGGVMTAKYYSPAVPIEIQGIPFPSDLILLDTKNLDVILGMNWLAQFQGVVDCARRTVTLYRGPEQPVVFFAPPTSVGSSELHQIGLSEIPIVREFGDVFPEELPGMPPKREIEFRIDLAPGTTPQYKRPYRMAANELAEVKKQLEELKEKGYIRPSTSPWGAPVIFVEKKDKTKRMCVDYRALNEVTIKNKYPLPRIDDMFDQLKAATVFSKIDLRSGYHQLRIREEDIPKTAFTTRYGLYEFTVMSFGLTNAPAFFMNLMNKVFMEYLDKFVVVFIDDILVYSQSEEEHQHHLSLVLGKLREHQLYAKLSKCEFWLSEVKFLGHVISAKGVAVDPETVTAVTDWKQPKTVTQIRSFLGLVGYYRRFIENFSKIARPMTQLLKKEEKFVWSPQCEKAFQTLKEKLVSSQVLILPDTRKDFMVYCDASRQGLGCVLMQEGHVVAYASRQLRPHEGNYPTHDLELAAVVHALKIWRHYLIGNRCEIYTDHKSLKYIFTQSDLNLRQRRWLELIKDYDVGIHYNPGKANVVADALSRKSHCNTLDVRGIPPELNQQMEALILSIVGRGFLATLEAKPTLLDQIREAQKNDPDMRGLLKNMKQGKAAGFTEDEHGTLWNGNRVCVPDDKELKQLILQEAHESPYSIHPGSTKMYLDLKEKYWWVSMKREIAELVALCDVCQRVKAEHQRPAGLLQPLQVPEWKWDEIGMDFITGLPKTQGGYDSIWVVVDRLTKVARFIHVKTTYGGNKLAELYFARIKCLRVPPEQADSEQIEVREDLTYVERPVRILDTMERRTRNRVIRFCKVQWSNHAEEEATWEREDELKAAHPNLFGSSSESRGRDSV

SEQ ID NO: 19721 - protein, 1851 aa, Oryza sativa
  unsure (1)..(1851): unsure at all Xaa locations
  Clone ID: TF_OSC401344j.C1.p2.np
MAAGSSAPVSPSSGRPLSPPTLYPSPSSPPPFPPLTALSPRRNRARAVALSLRRRRRAPVCHRRRPGPPPTSAPPPSASPHPRRPRPPLRFGRRPPEHRRPRPPEPRRRLPPLRSPFPSSPSTRGEPWTAASFPPFPPLSRPPLRRAYGRRRRPXGRGRAASRLRRRGRLRACLAAAAWGPAVSRPRPXVRLTRGTHGAGRCEPGAPGPPWTHLGHIRTGLRASVAKHYRFHMSSGTNTNEGYTSCGPVVEMSWHRAGVLLLGAQSCLPVPGPAVGGIGSYTSDQSITYSNSRALGYGQAEQCTQMAGSINRRGLDLTGFVLELRGMCVVLGYPHGVDYQGRQLPEQEGDDAERHAAWEVTAVILTGSPERTSLAVTAGGDSFSAACQNAALLAIGTLHQRYPDELQHSPYRYHPRRGGARDYAIFRDASSEDDATIMHLARMVEAYDAARIDFHQMVRRGMVKNNMKILELRQENLQLKKDLDAVEAQLHQLKIAQGEVCRPKRRRVYRSQKITARKSTSRPELVRQSLAXTSFVETPRAEPAPVVPQEGEASGVGSTEDALLLTFHGETRRSANTGDGNQPKGSNHNNHGSPPPPPPPPPPPPPDTNAILTQILAQQANMMAAFLHHIQNPPQHNAPPPPPQHSKLAEFLRIRPPTFSSSNNPVDALDWLHAVGKKLDTVQCSDEEKVIFAAHQLQGPASLWWDHFQATQPEGQPITWARFTAAFRRTHVPAGVMALKKREFRELKQGNRFVMEYLHEFNNLAQYAPEDVREDEEKQEKFLAGMDPELSVRLVSGDYQDFQRLVDKSIRLEAKHKELESHKRRLASFRNQQGANQRVRYTNPYPGGSSSQQQQQQQQPRSAPRPQFVVRVPQPQQQQSQQGTRAPRPPTPAVQPGQGRRDAPGPQRLCFNYFEPGHFADKCPKPRRQQGQAPPRPNNGGKDVNRGRVNHVTAEDVLTTPDVIVGTFLIHSIPATILFDSGASHSFISVPFVGRNQLGVERLRNPLIITTPGGVMTAKYYSPAVPIEIQGIPFPSDLILLDTKNLDVILGMNWLAQFQGVVDCARRTVTLYRGPEQPVVFFAPPTSVGSSELHQIGLSEIPIVREFGDVFPEELPGMPPKREIEFRIDLAPGTTPQYKRPYRMAANELAEVKKQLEELKEKGYIRPSTSPWGAPVIFVEKKDKTKRMCVDYRALNEVTIKNKYPLPRIDDMFDQLKAATVFSKIDLRSGYHQLRIREEDIPKTAFTTRYGLYEFTVMSFGLTNAPAFFMNLMNKVFMEYLDKFVVVFIDDILVYSQSEEEHQHHLSLVLGKLREHQLYAKLSKCEFWLSEVKFLGHVISAKGVAVDPETVTAVTDWKQPKTVTQIRSFLGLVGYYRRFIENFSKIARPMTQLLKKEEKFVWSPQCEKAFQTLKEKLVSSQVLILPDTRKDFMVYCDASRQGLGCVLMQEGHVVAYASRQLRPHEGNYPTHDLELAAVVHALKIWRHYLIGNRCEIYTDHKSLKYIFTQSDLNLRQRRWLELIKDYDVGIHYNPGKANVVADALSRKSHCNTLDVRGIPPELNQQMEALILSIVGRGFLATLEAKPTLLDQIREAQKNDPDMRGLLKNMKQGKAAGFTEDEHGTLWNGNRRVKAEHQRPAGLLQPLQVPEWKWDEIGMDFITGLPKTQGGYDSIWVVVDRLTKVARFIHVKTTYGGNKLAELYFARIVSLHGVPKKIVSDRGSQFTSHFWKKLQEELGTGEVAYQLELPASLGNVHDVFHVSQLKKCLRVPPEQADSEQIEVREDLTYVERPVRILDTMERRTRNRVIRFCKVQWSNHAEEEATWEREDELKAAHPNLFGSSSESRGRDSV

SEQ ID NO: 19722 - protein, 1387 aa, Oryza sativa
  Clone ID: TF_OSC401549j.C1.p15.fg
MRAQPPNGLQSKGPGDGLYKRQPKALLALARKQRRPINPKRSFAEVVRAGEMAGGGGRYGGGRGTGSGGDGQDGDGRGGVFNPGRGEAATGNGSGGASGRGHQGRGGDSNRGPDGQFAVNLNAATASGTDVPRGESRVDIVTAEAGTSSKASKGRCFRCKEKSHAVSECTKILCDICEAPEHTALSCPLLLAPKPTASMCGWGVDGGGFFMIPTPTTGAVKPREHNKTAIIRVENGHISVDNLIIELRRLVPVRFQWDVKETAPDTYMVQFPSVIELDRLRRVGSVPSFDFNVNLVIDKWEQEIEAKFVLKKTWFKVYGVSYEIRDFLSLHAVGSVIGQTTTVDMIYLRKNGVVRMQVAVDELADLPPSVYVVVRNHGYEIFFEPELPEVDGKGKKKIDDIDQDGERKNGGDHDVHMEDRDPKRQKNGSDGSLRMEIGGLAPAKLPSTRTNNMVLDNEAFSPSPSSDTPATTTELEAFASYSSVVLETPMSQLGAQGTGNSESTKEAVGEVVYSDEVSTQLAKLATTKVLSTEVAVQLAGTDEVVTNGKEQQQEPVSMAQELQHVSASFLSPVEHVLDCNVQSELLPKNSQLAGDGRVTSTKNLMAVLATNEDQLSASSAATSKAQDAAQAVGARSPTRRRPRRPVDPIPTRQSERQKAMANADAPVANRAELLKKVHNLETLTGVSLGKNDLEIKESINQIKISEVDRFATLYSSAVASTSNVDKSNDELLKLSSLQHLCSDWLEEAESNDDESMDSQAIPQMRKISTKVKHKVVKNDLAKLLRDEELYWYQRSKTNHLLQGDSNTKYYHLIDNGKHRKQMIFQLEQEDTIITGEGNLKEYITNYYKGLFGPPDHNHVSMIEGWTDDIPQVSDLENDILTAEFSEKEVKEAIFQMDHNSSLGPDGFPAEFYQVFWEIVKNDLMALFREFHKGTLSLYNLNFGIIALLPKKADANQIQQYRPICLLNVSFKIFTKVDTNRITTVAHKVIRPTQTAFLPDRNIMEGVVILHETVHELHTKKMDGIIFKIDFEKAYDKVKWQFLQQTLRMKGFSQSWCNWISNWVEGGTVSVKVNDNVGKNFRTRKGLRQGDPMSPILFNIVADMLAILIEKVKVDGQIRGVIPHLVDDGLSILQYADDTIIFLEHDFEQAKNMKAILCVFEHLSGLKINFHKSEIFCFGGAKEMEDQYRQLFGCNSGSFPFKYLGIPIHYRKLRNFDWKCVEDRFQRKLSAWKGKNSSYGGRLVLLNLVLSSLPMFMLSFFEIPRGVLQRLDYYRSSFFWSSDSQKKKYKLTKWDYICRPKDQGGLGVLNLDIMNRCLLSKWLFKLLNGDGLWQNLLRNKYLKGYLHVFQLAPLLVYDAFTGTTGYYAQWCYTLGNSSQGTFISFWMA

SEQ ID NO: 19723 - protein, 959 aa, Oryza sativa
  unsure (1)..(959): unsure at all Xaa locations
  Clone ID: TF_OSC409046j.C1.p3.np
MACSEDNDEEGAFHSPRTKGIIKYFTRQVKXHKEGLDADLQVTNEKNGQLESTQIATNIKLTGLETSIACINTSLAALVRHFDDLNARGNGRRNEDGIEDEYADTKQDDRDALDRXQLRNNHRGMGGHRQRKVRNNDDVFFSKIKFKIPPIDGKYDPDAYLSWEIVVDQKFAWHDFPENSKVTSXFTDFSSVWXIEHGKKNPNNMPQTWDAFKRVMRAXSAPYFACDLLNRLQQLRQGVKSIGEYYQELQMGMLRCNLEETEDAAMARFLGGLNGEIYDIVDYKDYTNMTRLFHLACKAEREAGKSTLXXAGTTSPAGRTPSSSSTPTPSRAAPPPSSNKPRGPPASSTTKAVXLAASASSIASTGKTRDVQCHHCKGFGHMQRDYPSKHVLVVKNDGEYLSTSDFDEDTLALLAADHANNEEPPEEHIRANDAEHYENLIVQRVLSAQMEKAEQNHXHTLQTMYVIKERSCCMIIDGGNCHNASSEMVEKLAHSTKPHPHPXYIQWLNNSGKAKVTKLVRVNFAIGNYHDVVECDVVPMQACRGEIGSGWVGSHPSILTHILQSESGQIRIVSNTDTNSDNIWHKYEMDLYKHIYAIGYECLFGYLVKKTSLYIPIYSXRDYIRPLVSYNQRASNVILRREMNHRHPSLTVLCEVTSSCLALTNEVGGGGVETRGMQHELMSHDGFSGLPTAGALATGAVAMAETRRGVQATEDRRHERCGASMDAAAAATTVRSGRSCVAMLPMCSVHAWVRLPGWWLVGHLGLVAGSIVFSKVDLRSRCHQIHMKLGDEWKTAFKTKFRXYEWLVMPFGLTNAPSTFIRLTNEVLRAFIGKFVVVYFDDLLIYNKSMGEHLHHLRDVFNTLRDARLFGNLEKCTFCTDRVSLLVYVVTLQGIEVDQAKVEAIQECPVPITITQVRSFLGLARSYHCFVKDFSTIVAPLNELTKKNVATIWNXNTAN

SEQ ID NO: 19724 - protein, 1416 aa, Oryza sativa
  Clone ID: TF_OSC419191j.C1.p2.fg
MTTLAPCAKHYTPKGLTTLLQTNPNNRCTTPKTLKWDEITLPEKWVLSQAVEPKSMDQSEVESLIETPDGDVEITFASKQKAFLQSRPSVSLDSRPRTKPQNVVYATYEDNSDEPSISDFDINVIELDVGFVIAIEEDEFEIDKDLLKKELRLQKNRPKMKRYFERVDEPFRLKIRELWHKEMREQRKNIFFFDWNESSQVRHFEEFFKEKNMMKKEQKSEAEDLTVIKKVSTEWETTSGNKVDSVHPPFESIQLSHNGGKACPLKSISKNTYGETAKVEHIGHLVEQQNYANISLRSLGQQTDRIETILMEGYKTGRPEVKINIPSNSQSSSSQSVSPMFVPTIDPNIKLGKQKAFGSAISEELVSELALKLNNLKVNKNINEISDNEKYDMVNKIFKPSTLTSTTRNYYPRPTYADLQFEEMPQIQNMTYYNGKEIVEWNLDGFTEYQIFTLCHQMIMYANDCIANGNKEKYISGLPPLFAEKVRNSLRKEGGGSINYHYLDIGKITQKIQLVGAELCNDLKIKDQLKKQRILGKREMGDFCYQFGFQDPYVHRKRKTHSKPMTKSNDKSKMSFQATKRKPKRIYNKNIRTKDTESKETICYKCGLKGHIANRCFKSKVKKEIQALLDSESEDVKEKLEAILNNIDNDSSSDEEKNAEINCCQDSGCSCYEPDNSEEESDENILVLTSLEEFVLDTFETIQDPEEKRRVLEKFLSRVKTDKDKLKKDIQKSKFLSIDEVFKRLDEQKKKNEKPDLISLFEEQKIMKQDLEEIRKRLYMLELKEGFHMEEKDEPIQEDDQHITLIDSGADVNCIREGIIPHKYFRKAAHRIRGADGGLLTVEYQIPDTYICISEVCIKTSFLIVKNLKQDVILGTPFLSLIRPFLVTNEDIQFEIMGKQVSLRFSSNIDEILDQLVQTKREQIVNTIYLHDNSFPSYLPKSMDLTGKTSWEDRYLLKATKNFEYICKEMASQKSEWFTNMSSWRLPQLPRGHEERFNHNFRVTELQQGLLNLLWQTKNKKEKAHALNGLAYYFKNFVTSDQKITEKRAKLQDIPHHEERLLDYREEKSRDGQDKLPMEVEQSMATDKNTKPKAPCRSCAYKDSCQKKLKSQNPMSSTYENLQPRLSFKTEQTLSCFGQDIFNLVWQKFKERQMKIFLGLQDYFFDLLEGRERNPAIRVIIYMLPLLRLDDQAISDPSYRFLVLKAEINLQRFWNLPTYNHEEISLQTIIDHGLVNSIYATLDQILQSDLGSAVKDVYRRLGHGRYRIIFSSIPPKFTPPVRPAIHYIYIMNGQFNFQEDGTSKLSDEEEEIYTTIANHENWRLFSEAAEIEEAITTDYEYQPVFQNKITRIFISKYYNQSYEYFKGAGRIIKPDFENECSKKSYYRSLAQWFQKTEPSEIDTVQSAPIIINEDNE

SEQ ID NO: 19725 - protein, 1275 aa, Oryza sativa
  Clone ID: TF_OSC421500j.C1.p1.fg
MSIKNASSISFEDIEKSISNWKIPKVNIKEIYHVEREINSIRAKHQYHYLHFGLIQVAIRSLTRKGLNVSVLACLRDCRNKRFKDSLLGMVEASLSNGPVYFNTFPDFSVSLSDTNIHKVLTLNLQTSGYDLEPGSENISVTYRVYYKAMTTLAPCAKHYTPKGLTTLLQTNPNNRHTIPKTLKWDEITLPEKWVLSQAVEPKSMDQSEVESLIETPDGDVEITFASKQKAFLQSRPSVSLDSRPRTKPQNVVYATYEDNSDEPSISDFDINVIELDVGFVIAIEEDEFEIDKDLLKRELRLQKNRPKMKRYFERVDEPFRLKIRELWHKEMREQRKNIFFFDWYESSQVRHFEEFFKRKNMIKKEQKSEAEDLTVIKKVSTEWETASGNKVDSVHPPFESVQLSHNGGKACPLKSISKNTYGETAKVEHIGHLVEQQNYANISLRSLGQQTNRIETILMEGYKTGRPEKYDMVNKIFKPSTLTSTTRNYYPRPTYADLQFEEMPQIQNMIYYNGKEIVEWNLDGFTEYQIFTLCHQMIMYANACIANGNKEREAANMIVIGFSGQLKGWWNNYLNETQRQEILCAVKRDDQGRPLPDRDGNGNPTGNISDALATLIYNIIYHFAGNYHDIYEKNREQLINLKCKTMSDFRWYKDTFLSKLYTLPEPNQDFWKEKYISGLPPLFAEKVRNSLRKEGGGSINYHYLDIGKITQKIQLVGAELCNDLKIKDQLKKQRILGKREMGDFCYQFGFQDPYVHRKRKTHSKPMTKPNDKSKMSFQATKRKPKRIYNKNIRTQDTESKETICYKCGLKGHIANRCFKSKVKKEIQALLDSESEDVKEKLEAILNNIDNDSSSDEEKNAEINCCQDSGCSCCEPDNSEEESDENILVLTSLEEFVLDTFETIQDPEEKRRVLEKFLSRVKTDKDKLKKDIQKSKFLSIDEVFKRLDEQKKKNEQPDLISLFEDQKIMKQDLEEIRKRLYMLESKEGFHMEEKDEPIQEDDHVVGTIQKYMKQKWYTEVMYRFIDGSYFQHITLIDSGADVNCIREGIIPHKYFYKAAHRIRGADGGLLTVEYQIPEIYICITEVCIKTSFLLVKNLKQDVILGTPFLSLIRPFLVTNEDIQFKIMGKQVSLRFSSNTDEILDQLVQTKREQVVNTIYLHDNSFPSYLPKSMDLPGKTSWEDRYLLKATKDLEYICREMASQKSEWLTNMSSWRLPQLPRGHGERFNHNFRITELQQGLLNLLWQTKNKKEKAHALNGLAYYFKNFVPTDQKIT

SEQ ID NO: 19726 - protein, 1349 aa, Oryza sativa
  unsure (1)..(1349): unsure at all Xaa locations
  Clone ID: TF_OSC4434j.C1.p1.np
YNRSPCSAPPFPPLAAHSPRRNRARAVAPSLRRRRRAPVRRRRRPGPPPASASPPSASPRPRRPRPLLRFARRPPERRRPRRPEPRRRLPPLRSSFPPPSSSRGEPWTAPFASPFPPLSRGPLRRAVGRRRRPSGRGCAASRRPCRRGRLRARPAAARWGPAISRPRPRVRLTRGTHGAGRASPRAPGPPWTHLGHIRISLRASVAKHYRFHMSSGTNDGYTSCGPTNDGYTSCGPVVEMSWHRAGVLLLGAQSCLPVRGVPAVGGVGSMYTSDQSIICSNSRALGYGQAEQCTQMAGSINHRGLDLTGFVLELRGMCVVLGYPPGVDYQARPLPEQEGDDAEPHAAWEVTAVILTGSPERTSLAVTAGGDSFPAACQNAALLAIGTLHQRYPDELQHSPYRYHPRCGGARDFATFRDASSEDDATIVHLARMVEAYDAARIDFHQMVRRGMVENNMKILELRQENLQLKKDLDAGEAQLCQLKIAXGEVCRPKRCRVCRSLKITARKSTSRPELVRQSLAWTCFVETPRDEPAPLVSQDEGASGVGSTEDALLLTFHGETRRSAATGEGSHPEGSNYNNHGSPPPPPHPPPPPPPDTNSILTQILAQQANMMAAFLHHIQNPPQHNAPPPPPPPQHSKLAEFLRIRPPTFSSSNNPVDALDWLHAVGKKLDTVQCNDEEKVIFAAHQLQGPASLWWDHFXATQPEGQPITWARFTAAFRRTHVPAGVMTLKKREFRELKQGNCSVMEYLHEFNNLARYAPEDVREDEEKQEKFLAGMDPELSVHMVSGDYPDFQRLADKSIRLEAKHKELESHKRRLANFRNQQGANQRIRYTNPYPGGSSSQQQQQPRSALRPQFVVRVPQPQQQQSQQGTRAPRPPTPAVQPGQGRRDVHGQQRLCFNYFEPGHFADKCPKPRRQQGQAPPRPNNGGKDVIRGRVNHVTAEDMLTTPGVIVGTFLIHSIPATILFDSGASHSFISVPFVGRNQLGVERLRNPLLITTPGGVMTAKYYSPAVPIEIQGILFPSDLILLDTKNLDVILGMKWLAQFQGVVDCARRTVTLYRGPEQPVVFFAPPTSVSSSELHQIGLSEIPIVREFGDVFPEELLGMPPKREIEFRIDLAPGTTPLYKRPYRMAANELAEVKKXLEELKEKGYIRPSTSPXSAPVIFVEKKDKTKRMCVDYRALNEVTIKNKYPLPRIDDLFDQLKGATVFSKIDLRSGYHQLRIREEDIPKTAFTSRYGLYEFTVMSFGLTNAPAFFMNLMDKVFMENLDKFVVVFIDDILMYSQSEEDHQQHLRLVLGKLREHQLYAKLSKCEFWLSEVKFLGHVISAKGVAVDPETVTAVTNWKQP

SEQ ID NO: 19727 - protein, 1156 aa, Oryza sativa
  Clone ID: TF_OSC900176j.C1.p7.fg
MVTTRRSAATGEGSHPEGSNYNNHGSPPPPPHPPPPPPPDTNSILTQILAQQANMMAAFLHHIQNPPQHNAPPPPPPPQHSKLAEFLRIRPPTFSSSNNPVDALDWLHAVGKKLDTVQCNDEEKATQPEGQPITWARFTAAFRRTHVPAGVMTLKKREFRELKQGNCSVMEYLHEFNNLARYAPEDVREDEEKQEKFLAGMDPELSVHMQQQQPRSALRPQFVVRVPQPQQQQSQQGTRAPRPPTPAVQPGQGRRDVHGQQRLCFNYFEPGHFADKCPKPRRQQGQAPPRPNNGGKDVIRGRVNHVTAEDMLTTPGVIVGTFLIHSIPATILFDSGASHSFISVPFVGRNQLGVERLRNPLLITTPGGVMTAKYYSPAVPIEIQGILFPSDLILLDTKNLDVILGMKWLAQFQGVVDCARRTVTLYRGPEQPVVFFAPPTSASSSELHQIGLSEIPIVREFGDVFPEELLGMPPKREIEFRIDLAPGTTPLYKRPYRMAANELAEKKDKTKRMCVDYRALNEVTIKNKYPLPRIDDLFDQLKGATVFSKIDLRSGYHQLRIREEDIPKTAFTSRYGLYEFTVMSFGLTNAPAFFMNLMDKVFMENLDKFVVVFIDDILMYSQSEEDHQQHLRLVLGKLREHQLYAKLSKCEFWLSEVKFLGHVISAKGVAVDPETVTAVTNWKQPKTVTQVRSFLSMAGYYRRFIENFSKIARPVTQLLKKEEKFVWSPQCEKAFQTLKEKLVSSPVLILPDTRKDFLVYCDASRRGLGCVLMQEGHVVAYASRQLRPHEGNYPTHDLELSAVRRWLELIKDYDVGIHYHPSKANVVADALSRKSHCNTLGVRGIPPKLNQQMEALNLSIVGRGFLATLEAKPTLLDQIHEAQKNDPDMRGLLKNMKQGKATGFTEDEHGTQWNGNRVCVPDDRELKTVDTSGSSRKSLFHPSWQYEDVLRLERKILHVKAEHQRPAGLLQPLQVPEWKWDEIGMDFITGLPKTQGGYDSMWVVVDRLTKVARFIPMKTTYGGNKLAELYFARIVSLHGVPKKIVSDQGSQFTSHFWKKLQEELGTRLNFSTAYHPQTDGQTERLNQILEDMLHACVLDFGKTWGKSLPYAEFSYNNSYQASIQMAPYEARCMAANAGHRYCGTKLGKAKCSGPIY

SEQ ID NO: 19728 - protein, 714 aa, Oryza sativa
  Clone ID: TF_OSC401120j.C1.p11.fg
MANKTLREFAAPSTDNVANWPQINMGDVDFDLKSSLITMVQACPFCAKPNEDANAHLQQFLGICSTYTIKGVSPDAVRLRLFPFSLLGRAKQWFYANRATVNTWDKCSTAFLSKFFPMGKTNALRGRISSFQQTRDESIPEAWEQLQEYVAACPHHGMDDWLILQNFYNGLTPMSRDHLDAAAGGAFFSKTVQGAVDLIEKMVSNMSWSKERLQTRQRGMHTVKETELLAAKLDLLMKRFDDHEKRPQGTVKALDSHITCEVCGGIDHSKNDCPETREEAMHMGNNGYLPRGGQGWNQPRPYYQEAKTTDALSKKLAANDKNLENMNVKLDGFASAFQNQLSFNKMIETQLAQFASLVHANETGRIPGQPDFSIENVKVITTRGGTTGITKEAPSSDSADKEVQPEKTVPQKPLVDEQSAHFVDVIRKIHINVPLLDAMQVPTYTRYLKDILNNKRPLPTTEMVKLTEQCSNVILYKLPEKKKDPGCPTITCSIGAQQLDQALCDLGASVSVMPKDVFDKLNFTVLAPTPMCLQLADSSVRYLTGIPEDVPVKIRDFFIQVDFVVLDMDTGKETPLILGCPFLSTAGANIDVGTGSIRFHINRKEEKFEVQLRTEQCSMVRIKYGPNSQNIQVVEVEPPKTDSLVKFMQNFLEKETTMPRNHYWRTPVKPPIPAKLEQPAQRKPSFAPKQRKVWKEKPKMPAPSPTETGRKSAN

SEQ ID NO: 19729 - protein, 607 aa, Oryza sativa
  Clone ID: TF_OSC401845j.C1.p8.fg
MASKTLHEFAAPTADNVAVGPQVNIGDVDFNLKSSLVTLAQASPFCGKPNEDANAHLQQFLEICSMYTIKGVSPDAVRLRLFPFSLLGRAKQWFYANRAAINTWDKCSTAFLSKFFPMGKTNTLCGRISSFQQTRDESIPEAWERLQEYVAACPHHGMDDWMILQNFYNGVTPMSRDHLDAAAGGAFFSKTMVSNMGWSVERLQTRQRGMHTVKETELLATKLDLLMKRLDDHEKRPQGTVKALDSHVTCEVCGGTGHSGNDCRKHMRRRCTWATTTGPIHKEVRGGTNHAHIFKEEITKSLQMKLGGFWGNPRGGKSTCDPLYPNPAGTNGMSKGTPSNDSADKEIQPEKTVPQGYCDTWLLPFPQRSRKPSVDEQFAHFVAVIQKIHINVPLLDAMQVPTYACCLKDILNNKRPLPTAEVVKLTEHCSNVILHKLPEKKKDPGCPTITCSIGAQQFDQAFCDLGASVSVMPKDVFDKLNFTVLAPTPMRLQAADSSVRYPAGIVEDVPVKIRDFFIPVDFVVLDMDTGKETPLILGRPFLSTTGANIDVGTGSIRFHINRKEENFEFQPRTEQCSMVRIKYGPNPQNIQVVEVEPPKTDSLVRFM

SEQ ID NO: 19730 - protein, 1443 aa, Oryza sativa
  unsure (1)..(1443): unsure at all Xaa locations
  Clone ID: TF_OSC400003j.C1.p3.np
PAGGAAMGGWRARAAAKRRRAGRATPSSSCSAPSSEASGRRSRXGAAVERRRASATTGGRVTGGGRSGRGLVLRRVVKEVGGSANYPILTKTNYSDWSLLMRVMLQARGLWEAVETGDVDQEDRMALEAVLKAVPADLLPVLAVKETAKDAWDAIKTMRVGVDRVRKSKAQELRKQFDANEFKEGESVEFSVRLSGLVNNLAVLGFQLEESKVCEKFLHVVPDHLEQIALSIETRLNAEERRPKKKSGDEGGKLYLIEEQWAARAKERQSGEGSLGKKAGNNRRRRGGRKKSKAAADGERGARDTHDQGRDKCKNCGCLGHXAKDCRQKKQVAAHIAHGEEEDDEPALLGSCIELAPPPSSPPPAGLLDLDEPKVFAPLHRQEHVDTGVWHLDTGGTNHMPGVRDIFAELDTAVRGKVRFGNGSVVAIEGQGKIIFECRNGEHRALTGVYYIPKLNANLVSLGQLDENGCNVRIFHGVCTIRDTARQLLARVQRTRNQLYLIKITVARPMCLSARTQEAAWLWHARFGHLYFDALRRLARQDMVRGLPQIDQVEQLCDCCVITKQRRSPFPWRSLFCAEDRLELVHGDLCGPISPATPGGKKHFLLLVDDASRYMWLALLQNKREAAVAIKRFQARSEAESGCRLKLLRTDNGGEFTSAEFAAHCAESGVKRQLTAPYSPQQNRVVERRNQTILGMAQSLLKAKSVPACYWGEAVTTAVFLLNRAPTKCLDNKTPYEAWFGRKPAVGHLRTFGCLAYVKDVRPHVTKLQDRNKPTVFLYVEGSKAYKLFDPKSGRVQVTRDVVFDEGASWDWDATDGMHSPPSSDFSVEYIVTQEGTCGVVHADAGHTETWRGCARRAVTDGLTANARSPRFVSPPQDGDDNLDADADDCPPRYRSIDGILGAYTPGLATRDLADGELYLLAAEEPTTFGEAEHHQEWRRAMLQEISSIEDNKTWRLVDLPPGHRAIGLKWVYKIKKDARGMITKHKARLVAKGYMQQPGVDFNEVFAPVARLESVRMLLARAAQVGWPVHHMDVKSAFLNGELTEEVYVKQPPGFIVDGREHQVLRLDKALYGLRQAPRVWNAKLDASLLSLGFRRNDCEHAVYGRGSGDSRLLVGVYVDDLIITGNVAMEIDRFKAEMMSLFKMSDLGPLSFYLGIEVEQVADGIRLSQKSYAQRILERAGMQGCNSCLTPMEPRLKLTKASTAAPVDATQYRSIVGCLWYLVHTRPDLAFSVGYVSHFMEAPTTEHDAAVKRILRYVAGTVDFGCYYKRMETPPELVGYCDADMAGDVDTRKSTSGVVFFLGANPVSWQSIKQKVVALSSCEAEYIAATTAACXGIWLAQLLGEIKQEEPESFKLLVDNKSAIALSKNPVFHDRSKHIATRYHFIRECVEDGRAQVEFIGIDGQIADILTKALGRVRFQELRARISVVEVSSRCQAXGEN

SEQ ID NO: 19731 - protein, 1281 aa, Oryza sativa
  Clone ID: TF_OSC400044j.C1.p102.fg
MATPARFSTKPHVFDGTDFSHWCSRMQSYIMTEDYDIWRKVSYPYVIPEAINTAAEKTAFEQNCKARNILLSGISRSDYDRVAHFRTAHEIWNALSNFYQGTNNIKELRRDIFKKEYIKFEMKPGEALDDYLLVISIQESVDMSTLTLDSLYIKLKTHEMNVLSRKVDSKSSALVSSSSSLDADASSSKSSFLAVFNATSDDQLEQIEEEDLALVANRIARAMNNARNRKRGGPNRCFECGSIDHLRSYCPKLGRGKREDKDGEKTNNNKPKGSSQGRKLENLRKAFQQVCAAFEPLSDRDGESGDDDKGKNISDVCFMARGESDTEYEDNELKQPHDVLDCSTCNLNKLKLRDALGRVEYMEDVVKNNEVLSCPKCRKSKGVMVDSENCANLEKEISYLKSSLLRFYDGKKNLNMILDQSKVLVLEVAFVARKENVWIMDSGCSRHMTGDKNWFSSLKKASKTESIIFGDASTSVVLAIGLVKVKEKFELKNVALVENLKYNLLSVSQIVDENFEVHFKKTGSKVFDSCGDSVLNISRYGRVFKADFENPVSPVITCLVAKFDKDVMFWHRRLGHVGFDHLTRLSGLDLVRGLPKLKKDLDLVCTPCRHAKMIAFSHAPIVSVMTDAPGQLLHMDTVGPAGVQSVGGKWYVLVIVDDFSRYSWVFFMATKDEAFQHFRGLFLRFELEFPDESDDNDDDEVGSAGQTGRQAGPTAGTPPDRPAHEERSNWPGSSGSGTVDADRDGPPEITTSTSTNTEHGSTSEVAAPLHIQRRHPPEQIIGNIGERTTRSKVMTHDVCANSAFVASFEPKDVSHALIDESWINAMHEELENFERNKVWTLVEPPSGHNIIGTKWVFKNKQNEDGLIVRNKARLIAQGFTQNEGLDFDETFAPVARIEAIRLLLAFAASKGFKLYQMDVKIAFLNGFIQEEVYVKQPPGFENPDFPNHVLKLSKALYGLKQTPRVWYDRLKNFLLAKGFTMGKVDNTLFVLKHGDNQLFVQIYVDDIIFGCSTHALVVDFAETMCREFEMSMMGELSYFLGLQIKQTPQGTFVHQTKYTKDLLRRFKMENCKPISTPIGSTAVLDPDEDGEAVDQKEYRRMIGSLLYLTASRPDIQFAVYLCARFQASPRASHRQAVKRIMRYLNHTLEFGIWYSTSSSICLSGYSDADFGGCRIDRKSTSGTCHFLGTSLIARSSRKQFSVAQSTAESEYVAAASCCSQILWLLSILKDYGLTFEKVPLFCDNTSAINIAKNPVQHSRTKHIDIRFHFLRDHVEKGDVEL

SEQ ID NO: 19732 - protein, 1273 aa, Oryza sativa
  unsure (1)..(1273): unsure at all Xaa locations
  Clone ID: TF_OSC25045j.C1.p5.np
MAGFADALRPDKFTGVHFKRWQIRVTLWLTAMKCFWVSTGKPEGILTVDQQKQFEEATTLFVGCILSVVGDRLVEVYMHMTDAKELWDALNTKFGATVASNDLYIMEQFHDYKMADNRSVVEQAHEIQTMANELELLKCVLPDKFVAGCIIAKVPPSWKSFGTALKHKKQEYSVEGLIASLDVEEKAREKDAASKGDGGRSSANVVHKAQNKSKGKYKAQLVCGQPGHLARKCPQRKGIKAPVGQTSKSANATIGNTGDGSGYGNLPTVFSVNQSTNWWVDTGANVHVCADISLFSSYQVARGSTVLMGNGSHASVHGVGTVDLKFTSGKNVQHVPSIDRNLVSGSRLNRDRFKLVFESNKVVMSKHGYFIGKGYECGGLFRFSLSDFCNKSVNHICGSVDDEANVWHSRLCHINFGLMSRFSSMYLIPKFSIVKGSKCHSCMQSKQSRKPHKAAEERNLAPLELLHSDLCEMNGVLTKGGKXYFMTLIDDATRFCYVYLLKTKDEALDYFKIYNAEVENQLDRKIKRLRSDRGGEFFSNEFDLFCEKHGIIHERTPSYSLESNGIAERKNRTLTDLVNAMLDTTGLPKAWWGEALLTSNHVLNRVPNRNKDRTPYEIWIGRKPSLSYLRTWECLAKVNVPITKKRKLGPKTVDCFLGYAHHSIAYRFLIIKSEVPDMHVGTIMESRDATFFESFFPMKDTHSSSSQPSEVIPNSITPPEQTEHTHEHVTEEDVSEAPRRSKRQRTAKSFGDDFTVYLVDDTPKSISEAYASPDADNXKEVVCSEMDSIIANGTWEVTERPYGCKPVGCKWVFKKKLRPDGTIEKYKARLVAKGYIQKEGEDFFETYSPVARLTTIRVLLFLAASHGLLVHQMDVKTAFLNGELDDEIYMDQPDGFVVEGQEGKVCKLLKSLYGLKQAPKQWHEKFDKTLTSAGFAVNEADKCVYYRHGGGEGVILCLYVVDILIFGTNLVTNEVKSFLSXNFDMKDLGVADVIXNIKLIRGENGITLLQSHYVEKILNRFCYIDSKPSPTPYDPSLLIRKNKKIARNQLEYSQIIGSLMYLASATRPDISFAVSKLSRFTTNPEDDHWRALERVMCYLKGTMESGLHYTGYPAVLEGYSDSNXISDVDEIKATSGYVFTLGGGAVSWRSCKQTILTRSTMEAELTALDTATVEAEWLRDLLMDLPIVEKPVPAILMNCDNQTVIVKVNSSKDNMKSSRHVKRRLKSVRKLRNSGVITLDYIQTARNLADPFTKGLSRNVIDNASKEMGLRPM

SEQ ID NO: 19733 - protein, 1056 aa, Oryza sativa
  Clone ID: TF_OSC29329j.C1.p1.fg
MAGSINRRGLDLTGFVLELRGMCVVLGYPHGVDYQGRQLPEQEGDDAELHAAWEVTAVILTGSPERTSLTVTAGGDSFFAACQNAALLAIGTLHQRYPDELQHSPYRYHPRRGGARDYATFRDASSEDDTTIMHLARMVEAYDAARIDFHQMVRRGMVENNMKILELRQENLQLKKDLDAVEAQLHQLKIAQGEVCRPKRRRVCRSQKITTRKSTSRPELVRQSLAWTCFVETPRAEPAPVVPQEGEASGVGSTEDALLLTFRPGPSQRRNANTGDGNQPEGSNHNNHGSPPLPPPPPPPPPPDTNAILTQILAQQANMMAAFLHHIQHPPQHNAPPPPPQHSKLAEFLRIRPPTFSSSNNPVDALDWLHAVGKKLDTVQCSDEEKVIFAAHQLQGPASLWWDHFQATLPEGQPITWARFTAAFRRTHVPAGVMALKKREFRELKQGNRFVMEYLHEFNNLARYAPEDVREDEEKQEKFLAGMDPELSVRLVSGDYPDFQRLVDKSIRLEAKHKELESHKRRLASFRNQQGANQRVRYTNPYPGGSSSQQQQPRSAPRPQFVVRVPQPQQQQSQQGTCAPRPPTPAAQLGQGRRDVQGPQRLCFNCFEPGHFADKYPKPRRQQGQAPPRSNNGGKDVIRGRVNHVTAEDVLTTPDVIVGTFLIHSIPATILFDSGASNSFISVPFVGRNQLGVERLRNPLLITTPGGVMTANRLCRLDRAPAGRAVASSSVAATSSTPACPPFRAVTIGGALPPSPFSFLLAGHLQPHLPPRPCTLRPRRHLSRRRSRLLFPGFASVSRGNHRRRVLAGVQWRRHHFSASGRLCRVPGAPADVAVSSVDVAVPSSLPARPRRRPNFAGTPSSPRRPLLPPRRLATPLHHHLHQHRSGVFHAVPSSAQPLLPAIIVSSSSPIVLVVDVPSVARLVVSRRRLRRRHRSGVFLAVLVPVQPLPAVLVASSPVPVVVVVVVLSSFPVIVAFVPPSSRSRPSSASVKQAAAAPSSSSSSAPRRQASCRPRLAFAQGSPPKPSPRRSSPLCPSVSAAPVRRCRSHASSRGGL

SEQ ID NO: 19734 - protein, 1859 aa, Oryza sativa
  unsure (1)..(1859): unsure at all Xaa locations
  Clone ID: TF_OSC401672j.C1.p1.np
MDEVGGQWTSRANEGYTSCGPVVEMSWHRAGVLLLGAQSCLPVPGVPAVGGVGSLYTSDQSIIYPNSRALGYGQAEQCTQMAGSINRRGLDLTGFVLELRGMCVVLGYLHGVDYQGKQLPEXEGDDAEPHAAWEVTAVILTGSPERTSLAVTAGGDSFSAACQNAALLTIGTLHQRYPDELQHSPYHYRPRRGGARDYATFRDASSEDDATIMHLARMVEAYDAARIDFHQMVRRGLVENNMKILELRQENLQLKKDLDAVEAQLCQLKIAQGEVCRPKRRRVCRSLKITARKSTSRPELVRQSLAWTCFVETPRAGPAPLVPQEEGASSVGHGGCVVAHLPPWPVTEVDEQLVGLRMVTTRRSATTGDGNQPEGSNHNNHGSPPPPPPPPPPPPPDTNSILTQIFAQQANMMAAFLHHIQNPSQHNAPPPPPPPQHSKLAEFLRIRPPTFSSSNNPVDALDWLHAVGKKLDTVQCNDEEKVIFAAHQLQGPASLWWDHFQATQLEGQPITWARFTAAFQRTHVPAEVMALQKREFRELKQGNCSVIEYLHEFNNLARYAPEDVREDEEKQEKFLAGMDPELSVRLVSGDYPNFQRLVDKSIRLEAKHKELESQKRRLANFRNQQGANQRIRYTNPYPGGSSSQQQQQQQQPRSAPQPQFVVRVPQPQQQQSQQGTHAPRSPTSAVQPGQGRRNVQGQQRLCFNCFEPGHFADKYPKPRRQQGQAPPRPNNGGKDVIRGRVNHVTAEDVLTTPDVIVGTFLIHSIPATILFDSGASHSFISVPFVGRNQLGVERLRNPLLITTPGGVMTAKYYSPAVPIEIQGIPFPSDLILLDTKNLDVILGMNXLAQFQGVMDCARRTVTLYRGPEQPVVFFAPPTSVGSSELHQIGLSKIPIVSEFGDVFPEELPGMPPKREIKFRIDLAPGTTPLYKRPYRMAANELAEVKKLLEELKEKGYIRPSTSPXGAPVIFVEKKDKTKRMCVDYRALNEVTIKNKYPLPRIDDLFDQLKGATVFSKIDLRSGYHQLLIREEDIPKAAFTTRYGLYEFTVMSFGLTNAPAFFMNLVNKVFMEYLDKFVVVFIDDILVYSQSELRLVLGKLREHQLYAKLSKCEFWLSEVKFLGHVISAKGVAVDPKTVTAVTDWKRPKTVTQVRSFLGLAGYYRRFIENFSKIARPMTXLLKKEEKFVWSPQCEKAFQTLKEKLVSSPVLILPDTRKDFLVYCDASRQGLGCVLMQEGHVVAYATRQLRPHEGNYPTHDLELAAVVHALKIWRHYLIGNCCEICTDHKSLKYIFTQSDLNLRQRRWLELIKDYDVGIHYHPGKANVVADALSRKSHCNTLGVRGIPPELNQQMDALNLSIVGRGFLATLEAKPTLLDRIREAQKNDPDMHGILKNMKQCKAAGFIEDEHGTLWNGNRVCVPDDKELKHLILQEAHESPYSIHPSSTKMYLDLKGKYWWVSMKREIAEFMALCDVCQCVKAEHQRPAGLLQPLQVPEWKWDEIGMDFITGLPKTQGGYDSIWVVVDRLTKVARFIPVKTTYGGNKLAELYFARIVSLHGVPKKIVSDRGNQFTSHFWKKLQEELGTRLNFSTAYHPQTDGQTERLNKILEDMLRACVLDFGKTWDKSLPYAEFSYNNSYQASIQMAPYEALYGRKCWTPLLWDQVGESQVFGTDNLREAEAKVRTIRENLKLAQSRXKSYADNRRRDLEFAVDDFVYLRVTPLRGVRRFQTKGKLAPRFVGPFRIIARRGEVAYQLELPASLGNVHDVFHVSQLKKCLRVPSEQADSEQIEVREDLTYVERPVKILDTMERRTKNRVIRFCKVQWSNHAKEEATWEREDELKSAHPDLFASSSESRGRDSV

SEQ ID NO: 19735 - protein, 2008 aa, Oryza sativa
  unsure (1)..(2008): unsure at all Xaa locations
  Clone ID: TF_OSC405120j.C1.p28.np
MEPESAAPVSFSSGRPLSLPTLYKPSPHLLRPFPPLAALPPRRNRARAVALSLRRHRRAPVRRRRRPGPPPTSAPPPSASPHSRRPRPPLRFGRHPPERRRPHRPEPRRRLPSLRSPFPSSPSTRGEPWTAASFPPFPPLSRPPLRRAYGRRRRPXGRGRATSRLRRRGRLRVHRAAAAWGLAASRPRPXVRLTRGTHGAGRARPGAPGSPWTHHGHIRTGLRASVAKHYRFHMSSGXGLVWAQSGYKQKYTEQCTQVSVFILKTCLTTNVERLAMVGLGRAGTQGRVASSVXIIVGLGLRQCLXMAGSINRRGLDLTGFVLELRGMCVVLGYPHGVDYQGRQLPEQEGDDAELHAAWEVTAVILTGSPERTSLTVTAGGDSFFAACQNAALLAIGTLHQRYPDELQHSPYRYHPRRGGARDYATFRDASSEDDTTIMHLARMVEAYDAARIDFHQMVRRGMVENNMKILELRQENLQLKKDLDAVEAQLHQLKIAQGEVCRPKRRRVCRSQKITTRKSTSRPELVRQSLAWTCFVETPRAEPAPVVPQEGEASGVGSTEDALLLTFHGETRRNANTGDGNQPEGSNHNNHGSPPLPPPPPPPPPPDTNAILTQILAQQANMMAAFLHHIQHPPQHNAPPPPPQHSKLAEFLRIRPPTFSSSNNPVDALDWLHAVGKKLDTVQCSDEEKVIFAAHQLQGPASLWWDHFQATLPEGQPITWARFTAAFRRTHVPAGVMALKKREFRELKQGNRFVMEYLHEFNNLARYAPEDVREDEEKQEKFLAGMDPELSVRLVSGDYPDFQRLVDKSIRLEAKHKELESHKRRLASFRNQQGANQRVRYTNPYPGGSSSQQQQPRSAPRPQFVVRVPQPQQQQSQQGTCAPRPPTPAAQLGQGRRDVQGPQRLCFNCFEPGHFADKYPKPRRQQGQAPPRSNNGGKDVIRGRVNHVTAEDVLTTPDVIVGTFLIHSIPATILFDSGASNSFISVPFVGRNQLGVERLRNPLLITTPGGVMTAKYYSPAVPIEIQGIPFSDLILLDTKNLDVILGMNWLAQFQGVVDCARRTVTLYRGPEQPVVFFAPPTSVSSSELHQIGQSKIPIVREFGDVFPEELPGMPPKREIEFRIDLAPGTTPLYKRPYRMAANELAEVKKXLEELKEKGYIRPSTSPWGAPVIFVEKKDKTKRMCVDYRAFNEVTIKNKYPLPRIDDLFDQLKGATVFSKIDLRSGYHQLRIREANILKTAFTTRYGLYEFTVISFGLTNAPAFFMNLMNKVFMEYLDKFVVVFIDDILVYSQSEEDHQHHLRLVLGKLREHQLYAKLSKCEFWLSEVKFLGHVISAKXVAVDPETVTAVTDWKQPKTVTQIRSFLGLAGYYWRFIENFSKIARPMTQLLKKEEKFVWSPQCEKAFQTLKEKLVSSPVLILPDTRKDFMVYCDASRQGLGCVLMQEGHVVAYASRQLRPHEGNYPTHDLELAAMVHALKIWRHYLIGNRCEIYTDHKSLKYIFTQSDLNLRQRRWLELIKDYDVGIHYHPGKANVVADALSRKSHCNTLEVRGIPPKLNQQIKALNLSIVSRGFLATLEAKPTLLDQIREAQKNDPDMRGLLKNMKQGKAAGFTEDEHGTLWNGNRRVKAEHQRPAGLLQPLQVPEWKWDEIGMDFITGLPKTQGGYDSIWVVVDRLTKVARFIPVKTTYGGNKLAELYFARIVSLHGVPNKIVSDRGSQFTSHFWKKLQEELGTRLNFSTAYHPQTDGQTERLNQILEDMLRACVLDFGKTWDKSLPYAEFSYNNSYQASIQMAPYEALYGRKCRTPLLWDQVGESQVFGTDILREAEAKVRTIRDNLKVAQSRQKSYADNRRRNLEFAVDDFVYLRVKPLRGVHRFQTKGKLAPRFVGPFRIIARRGEVAYQLELPASLGNVHDVFHVSQLKKCLRVPSEQADSEQIEVREDLTYVERPVKILDTMERSRNRVIRFCKVQWSNHAEEEATWEREDELKAAHPDLFASSSESRGRDSV

SEQ ID NO: 19736 - protein, 1348 aa, Oryza sativa
  unsure (1)..(1348): unsure at all Xaa locations
  Clone ID: TF_OSC414257j.C1.p1.np
MEPESAAPVSFSSGRPLSLPTLYKPSPHLLRPFPPLAALPPRRNRARAVALSLRRHRRAPVRRRRRPGPPPTSAPPPSASPHSRRPRPPLRFGRHPPERRRPHRPEPRRRLPSLRSPFPSSPSTRGEPWTAASFPPFPPLSRPPLRRAYGRRRRPXGRGRATSRLRRRGRLRVHRAAAAWGLAASRPRPXVRLTRGTHGAGRARPGAPGSPWTHHGHIRTGLRASVAKHYRFHMSSGXGLVWAQSGYKQKYTEQCTQVSVFILKTCLTTNVERLAMVGLGRAGTQGRVASSVXIIVGLGLRQCLXMAGSINRRGLDLTGFVLELRGMCVVLGYPHGVDYQGRQLPEQEGDDAELHAAWEVTAVILTGSPERTSLTVTAGGDSFFAACQNAALLAIGTLHQRYPDELQHSPYRYHPRRGGARDYATFRDASSEDDTTIMHLARMVEAYDAARIDFHQMVRRGMVENNMKILELRQENLQLKKDLDAVEAQLHQLKIAQGEVCRPKRRRVCRSQKITTRKSTSRPELVRQSLAWTCFVETPRAEPAPVVPQEGEASGVGSTEDALLLTFHGETRRNANTGDGNQPEGSNHNNHGSPPLPPPPPPPPPPDTNAILTQILAQQANMMAAFLHHIQHPPQHNAPPPPPQHSKLAEFLRIRPPTFSSSNNPVDALDWLHAVGKKLDTVQCSDEEKVIFAAHQLQGPASLWWDHFQATLPEGQPITWARFTAAFRRTHVPAGVMALKKREFRELKQGNRFVMEYLHEFNNLARYAPEDVREDEEKQEKFLAGMDPELSVRLVSGDYPDFQRLVDKSIRLEAKHKELESHKRRLASFRNQQGANQRVRYTNPYPGGSSSQQQQPRSAPRPQFVVRVPQPQQQQSQQGTCAPRPPTPAAQLGQGRRDVQGPQRLCFNCFEPGHFADKYPKPRRQQGQAPPRSNNGGKDVIRGRVNHVTAEDVLTTPDVIVGTFLIHSIPATILFDSGASNSFISVPFVGRNQLGVERLRNPLLITTPGGVMTAKYYSPAVPIEIQGIPFSDLILLDTKNLDVILGMNWLAQFQGVVDCARRTVTLYRGPEQPVVFFAPPTSVSSSELHQIGQSKIPIVREFGDVFPEELPGMPPKREIEFRIDLAPGTTPLYKRPYRMAANELAEVKKXLEELKEKGYIRPSTSPWGAPVIFVEKKDKTKRMCVDYRAFNEVTIKNKYPLPRIDDLFDQLKGATVFSKIDLRSGYHQLRIREANILKTAFTTRYGLYEFTVISFGLTNAPAFFMNLMNKVFMEYLDKFVVVFIDDILVYSQSEEDHQHHLRLVLGKLREHQLYAKLSKCEFWLSEVKFLGHVISAKXVAVDPETVTA

SEQ ID NO: 19737 - protein, 545 aa, Oryza sativa
  Clone ID: TF_OSC418607j.C1.p24.fg
MNNLNRTLAELHGMLKTAEESIKKNSNHVMVMHKRKPNNKKSGQKRKLNSDEITSTSNSKTKVQKTGPAKDAECFFYKETGHWKRNCKKYLEQLKQKQQDGKSSTSVYNINAKRQLPNDLNPTFIWHCRLGHINEKRMKKLHRDGLLHSFDFESFETCESCLLGKMTKAPFTGQSERASELLGLVHTDVCGPMSSTARGGFGYFITFTDDFSRYGYVYLMRHKSESFEKFKKFQNEETKGYYFYNREEGKVFVARHGVFLEKEFISRKDSGSMLWKHRFHEGPKGYGVHLRDDDEPTTYVEAMVGPDSEKWLGAMKSEIESMHVNQVWNLVDPPDGVKAIECKWVFKKKTDVDGNVHIYKARLVAKGFRQIQGVDYDETFSPFAMLKSIRIVLAIAAYFNYEIWQMDVKTTFLNGNLDEDVYMTQPKGFVDPQSAKKICKLQKSIYGLKQASRSWNIRFDEVVKALRFVKNEEEPCVYKKISGSALVFLILYVDDILLIGNDILMLESVKTSLKNRFSMKDLGEAAYILGIRIYRDRSKRLIGLS

SEQ ID NO: 19738 - protein, 431 aa, Oryza sativa
  Clone ID: TF_OSC900047j.C1.p16.fg
MHCPRLPAGMKSVVTFWSTLQFHIKKRFLENERFLENESELPLFPCMHHVQYKGISNPITRMVSIALNKLPPRIKNDMIMVAPAPSSFNLRSILEKEKLTGTNFMDWYRNLRIVLRQEHKEFVLTESFPANLPNNALAAQRREHEKRCNDYLDISCLMLATMSPELQRQYEALDAHTIITGLRNMFEDQARAERFNTSKSLFACRLAEGNPVSPHVIKIIGYTESLDKLGFPLSRELATDLILQSLPPSFEPFIMNFNMNNLNRTLAELHGMLKTAEESIKKNSNHVMVMHKRKPNNKKSGQKRKLNSDEITSTSNSKTKVQKTGPAKDAECFFYKETGHWKRNCKKYLEQLKQKQQDGKSSTSGINVIEINLATSFTDSWVFDTGSVAHICKSLQGLKSRSLARGEVDIRVGNGARVAAVAVGTMPLSLP

SEQ ID NO: 19739 - protein, 467 aa, Oryza sativa
  unsure (1)..(467): unsure at all Xaa locations
  Clone ID: TF_OSC27895j.C1.p2.np
ALHTFYLYYYGCAHIPIGIMAQKRMEFLNLKQRNCVADYMQQFTYLSRYALDDVNTETKKVEAFFNGMQDSLKFHLSGFKFATLHELVDDAIQKEETRTNLEESRKRYQKQQGGSPKGYPRQDVDKMSVXTYRDQHPPPPRAFPRQVQPPCYIFGGNLKXYCPRNNVVCYNCDQIGHTRPNCPWNPSEAAKAQATGRVRVVRAPQPAQQNHGGAHGGQPGRQINXGAAHGGQPGRQINXGAPRDRVNHVNIXEAEEATDVIIGKFQVNLELAFLLFDPRATHSFVSESFILKSHLPLSTLEVPRVIYAPGTKSLVSSICLGVRLXIMSFLVDLLLLNMSGLDIILGMDXLSKYRGKLDCAKKVVEIVGADGQNVEYKSNSKMNEFKKRVVNVAIAKGVVPIVNEYLEVFPDDLLGMPPDREVEFSIELKPGTKPVAKAPYRMSAREHDGLKRQKDELENYGSEFESD

SEQ ID NO: 19740 - protein, 1307 aa, Oryza sativa
  Clone ID: TF_OSC24701j.C1.p4.fg
MTEPPSSKAEVEPAIVIPITLNDFEGEDRKSMEEYIKELTQEALMRASTRTRQDATFEDKFDEFLRFKVGPLLADFVGKNKASTTASQAPIDQTNSRTDGVAHTAGPTGPDGRPNGRSDRVLPRRSDRDLGQSDRASGCRSDRALDRTFDPPVSSAATNPQVPPHVPNAYNDVGRGYPPDTRQVQYNHIAPQTQPIRPPNPPPNQHRPDNMEEIIGGIIRDKFGIETRNLAKVYQKPYPDYYDNMPFPRNYRVPKFTKFSGEDGRTTWEHESRVKDNKKIVRPYEKKPNVNVIDYPEASDSEDEGDHDMYVAEWSWTNKNKPFVCSNLMPTPRKDRQSEVKYSFDVAKYDKIFDYLLQEKQIRLPKGHIIPSQEELKRRAYCKWHDSHSHSTNDCNVFRRQVQLAIDEGRLKFTDGSKMKLDHDPFPVNTINFNDKKVLIRPEQAESTKGKGVIIGEPRPKIIVPKNPEVCVCKENKSEASTSKAPRKTKVTLDMLLEKYEKQGSERARNKGKIQRSPPRERFGHSPRRSHSPPYHHSQDIPWGPYPMPPPGYPYPYYMPWGATPPMFNHMPPMQFNQGWGGPRRPIHERLSSPNNGRFYGKNRANEESASGWSDRWSTSGLTRLQRRFDRRFAKGDVRASSSSTRPNRGHYLPPGTEPKPRRMPKYLTATQRRRLQCLRAQEIREKKAEEQRDKRFNELRPPPVWRRKTIEKEEPVVVEKKEEQSIAKDESSPKEDMDINKVCMLPMEFCAMDEAEVAQFSLGPKDVVFEKPDESNRHMKPLYLKCHTDGKPVSRMLVDGGAAVNLMPYSLFKKLGREDDELKKTNMILNGFNGEPTEAKGIFSAELTVGNKTLPTAFFIVDVQEANLEWLQKRVQEYRSTKNDIGETIEDFDEVEKLGQGFTSADPLEEVDIVDGTKPRPTFVNKNMRADYKVNIIELLTEYVDCFAWEYHEMPGLSRELVEHRLPIKPGFRPYKQPPRRFNPLLYDRVKEEIDRLLKAGFIGPCRYAEWVSCIVLVEKKGSATAIVLLAWRYIKPSTRERAAAWEDQSSTIIVLFPAPSSSCYYRLLFATYIGKLCRLFFATVAHTPSRASVPTPSGYDYFRSLFFRERSSGSMPTLLLSIPGTKCSTAFLSKFFPMGKTNALRGRISSFQQTRDESIPEAWERLQEYVAACPHLGMDDWLILQNFYYGLTPMSHDHLDAAAGGAFFSKTVQGAVDLIEKMVSNMGWREERLQTRQRGMLLAAKLDLLMKRLDDHEKRPQGTLKALDTHATCEVCGNTGHSGNDCPETREEAMYMGNNNNGYHP

SEQ ID NO: 19741 - protein, 485 aa, Oryza sativa
  Clone ID: TF_OSC401095j.C1.p8.fg
MKPGEALDDYLSRFNKILSDLRSVDSSYDANYPQSKISRHFLNGLDMSIWEMKVTSIQESVNMSTLTLDSLYTKLKTHEMNILSRKGDSKSSASVLSSTSLDVGASSSKSSVLALFNAMSDDQLEQFKEEDLVLLSNKFSRAMKNVRNRKRGEPNRCFECGAIDHLRSYCPKLGRGKKEDDDKVKEDDINKKKNTKEKKKHCMQWLIQEIIAAFDESEGEDESKGKQIVDLAFIARNASCDVDESEDDNEEKLSYNQLEYAAYRFAKKVQTCSIVLDEKDNTIEILNAEIDRLKSSIRDDDNCQSCEVLFSEINALRDVNSVNCKKLEFEIEKSKRLAHKHKKESEIAFAKRRWQKSGFNSRTTVRPTLISRSDRLAVRPQLNRRLDRLPGPVRAQAQRRSDRPRGDFARNSNRTFVKQKEIIVEVVLEIINFQEMNRVCCFVGTGDSMPRESICDGPGVGLVVRRCPWWSDIMRDTKARVDAHG

SEQ ID NO: 19742 - protein, 287 aa, Oryza sativa
  Clone ID: TF_OSC403480j.C1.p1.fg
MVLLGVADTEPTEPYSVRPRRWRSDRAKKCIALQAEVEDKSKGKVNEVNEDLEEEIALLARRFNDLLGRRKERGRGSNSNRSRNRRPNKTLSNLRCFECGEKGHFVSKCPFKDDDGDKSSKKKSGGYKLMKKLKKECKKIEAFIGEWDSNEESSASSGSEEEGGDDASSKKKKMTVVAIKEAPSLFAPLCLMAKGSSKVTSLSDSESDDDCDDVSYDELVSMFEELHAYSEKEIVKFKALKKDHASLEVLYEELKTSYERLTISHEKLACLQVDSRGSPGTELEFAL

SEQ ID NO: 19743 - protein, 726 aa, Oryza sativa
  Clone ID: TF_OSC900207j.C1.p16.fg
MVMPAPPRGWDFSPGDAVREEVRLRFRSPVHFSLKFSPMHYRLAVDLLRANFRLTNSSVALALRAAIGGSPADLNVQHLLDRSFSFDVFSKQVGLWIYRLRSFSCDDFSLRFYLWRNGGPNWQWEFESWSRDCAEEWALVPSKKRSVHKSSKVQKDKSYAQAVQQRDVSVKFVFQCLKALLQERRSVFTRLQGLKVPIAGETLATKTVEPITKDDPISLRYLNSNFLPSCVRCLDKGHIASNCSGPVRCHSCLEAGHMSCFCATRPTKAHQPVGKFPKLSSEDNLVWRSKSSPAKKTAVSPHIPSSPRNTVQSNPQNFPSLAMADLNPTPQCFLRQAQVVHQGGNLRVPRVDLTIPQHPPRRHEDVCITIVEPAIPEHEWDHHRALISDYIFEVHMYEVRTAYRHPSTVGMFQLRSVMHRDALVNSPPAAYDGMHTVELVKHDQGQNWRACHFNREGWFLLLDFPLDFVDRHHINLALDRDQMLGRVFVRAKYRDLDSVPRKIVLQEPLGNGGGDGDFANIPPEDDLPPAGPQPGPNDDNADDPDDGNIWQLGHPGNQGGGGVWDDLVQQQQAAEAEIEDAWGQDHPMGQVEENSGQLIILPNQEEQELNLIDQEQQVQLFLARLKDIADREGPKHPSFYPMAGLLEKIDHLCKAKEIMQAAQIPSPTSLPFSSPFMTLVLLKRKAMFDHAPPVVKRAHSSWALLSSPSDDGHSDQEILDVAPLQA

SEQ ID NO: 19744 - protein, 1511 aa, Oryza sativa
  Clone ID: TF_OSC407447j.C1.p1.fg
MATPVRFSTKPHVFDGTDFSHWCSRMQSYIMAEDYDIWRKVSHPYVIPEAINTAAEKTAFEQNCKARNILLSGISRSDYDRVAHLQTAHEIWNALSNFHQGTNNIKELRRDIFKKEYIKFEMKPGEALDDYLSRFNKILSDLRSVDSSYDANYPQSEISRHFLNGLNMSIWKMKVTSIQEFVDMSTLTLDSLYTKLKTHEMNVLSRKVDSKSTALVSSTSSLDVDASSSKPSFLAVFNATSDDQLEQIEEEDLALFANHIARAMNNARNRKRGGPNRCFECGSIDHLRSHCPNLRRGKREDKDVERTSNNKPNNNKPQGSSQARKFKENLRRAFDQVYAAFEPSSDVDGESGDDGKGKNISGVCFMARGESDIEYEDHEVSAFEEAINILSAKNMKCEKMYRKQEFIIESLKSEIDRLKSLIPNDDDCSNCEVLMNEISKIRDINAAHDLKNRSSLACSFALHTRTLDELFLTKKLLQKYQIAFHASLMFNMISAKKFKQPHDVLDCLTYCENCANLEKEVSYLKNSLQRFSDGKKNLNMILNQSKVLVLEVVLVARKENVWIVDSGCSRHMTGDKNWFSSLKKASKTESIIFGDASTSAVLATGLVKVNEKFELKNVALVENLKYNLFSVSQIVDEEFEVHFKKTGSKVFDSRGDSVLNISRYGRVFKADFENPVSPVITCLVAKFDKDVMFWHRRLGHVGFDHLTRLSGLDLVRGLPKLKKDLDLVCTPCRHAKMVSTSHAPIVSMMTDAPGQLLHKDTIGPARVQSVGGKWYVFVIVDDFSIYSCVFFMATKDEAFQHFRGLFLRLNLEFPGSLKRIRSDNGGEFKNASFEQFCNERGLEHEFSSPRVPQQNGVVERKNRVLAEMTRTMLDEYKTPRKFWAEAINTAFYISNRVFLRSKLGKTSYELRFGHQPKVSHLRVFGCKCFVLKSGNLDKFEARSTDGLFLGYPAHTRGYRVLILGTNNIVETCEVSFDEASPGTRPEIAGTLSQVQGEDGRIFEDESDYDDDDEDVWSDRPGSSAEGSVDADRDGPPEITTSTSTDTEHGSTSEVTAPLHIQRRHPPEQIIGNIGERTTRSKVTTHDVCTNSAFVASFEPKDVSHALTDESWINAMHEELENFERNKVWTLVEPPSGHNIIGTKWVFKNKQNEDGLIVRNKARLIAQGFTQVEGLDFDETFAPVARIEAIRLLLAFAASKGFKLYQMDVKSAFLNGFIQEEVYVKQPPGFENPYFPNHVFKLSKALYGLKQAPRAWYDRLKNFLLAKGFTMGKVDKTLFVLKHGDNQLFVQIYVDDIIFGCSTHALVVDFAETMSREFEMSMMGELSYFLGLQIKQTPQGTFVHQTKYTKDLLRRFKMENSKPISTPIGSTAALDPDEDGEAVDQKEYRSMIGFLLYLTASRPDIQFAVCLCACFQASPRASHRQAVKRIMRYLNHTLEFGIWYSTSSSICLSGYFDADFGGCRIDRKSTSGTCHFPGTSLIAWSSRKQSSVAQSTAESEYVAAAICCSQIL

SEQ ID NO: 19745 - protein, 695 aa, Oryza sativa
  Clone ID: TF_OSC32096j.C1.p1.fg
MEEKYSAKPFVFDGHNFVIWKARMEAYLQSQGHNVWNKVKSPYTVPDDADITPANMAQVDFNYRARNAIIGGISSGEFNRVQHHKSAHDMWTALCNFHEGNNDIQLVRQNQFHKEYQRFEMHPGESIDSYFKRFGEIISKLRSVGKEFSDNDNARHLLNCLDYGVWEMKVTSITESAPLSDLTMDKLYSKLKTHEMDVFHRKGLKHSMALVADPSGSTSSNDSAFVYGGFSLAALHSVTEEQLEKIPEDDLALFARKFSRAYKNVRDRKRGKTNEPFVCFECGEPNHKRVNCPKLKKKSDKTTKKPEGQGRKGKKDLMKKAIHKVLAALEEVQLSDIDSDDDDQEKGDKDFSGMCCLANNEDFINLCLMALEDKDDSSEHPEVCLDDIPSLDGSLCDDSCSDNDSVDDELSKERMAHLMIEISDKYRSSKYKIEKLKSENDGMALEIARLRSMIPEEDTCSTCASYLSEINLLKDKLKSCALGAGNPSSASAACSTCYEMKVDMGLLEMELKELKEKFVHDRIGRCENCPILTSDNDELRQQVAMLRTKNDLLESFATKEPIHSSCANCAILETELKDAKTVIDSIKSIDSCSSCISLKVDLESAKKENSYLQQSLERFAQGKKKLNMILDQSKVSINNQGIGYDFAESLRIGTHEILGVTDGMIELAQKPITFKSAGFIGNTSSSTPKTSEPKM

SEQ ID NO: 19746 - protein, 2145 aa, Oryza sativa
  Clone ID: TF_OSC400300j.C1.p25.fg
MEEKYSAKPFVFDGHNFVIWKARMEAYLQSQGHNVWNKVKSPYTVPDDADITPANMAQVDFNYRARNAIIGGISSGEFNRVQHHKSAHDMWTALCNFHEGNNDIQLVRQNQFHKEYQRFEMHPGESIDSYFKRFGEIISKLRSVGKEFSDNDNARHLLNCLDYGVWEMKVTSITESAPLSDLTMDKLYSKLKTHEMDVFHRKGLKHSMALVADPSGSTSSNDSAFVYGGFSLAALHSVTEEQLEKIPEDDLALFARKFSRAYKNVRDRKRGKTNEPFVCFECGEPNHKRVNCPKLKKKSDKTTKKPEGQGRKGKKDLMKKAIHKVLAALEEVQLSDIDSDDDDQEKGDKDFSGMCCLANNEDFINLCLMALEDKDDSSEHPEVCLDDIPSLDGSLCDDSCSDNDSVDDELSKERMAHLMIEISDKYRSSKYKIEKLKSENDGMALEIARLRSMIPEEDTCSTCASYLSEINLLKDKLKSCALGAGNPSSASAACSTCYEMKVDMGLLEMELKELKEKFVHDRIGRCENCPILTSDNDELRQQVAMLRTKNDLLESFATKEPIHSSCANCAILETELKDAKTVIDSIKSIDSCSSCISLKVDLESAKKENSYLQQSLERFAQGKKKLNMILDQSKVSINNQGIGYDFAESLRIGTHEILGVTDGMIELAQKPITFKSAGFIGNTSSSTPKTSEPKMVPMTSKSKPVELPRPKNPKQVEHKQNQRQTKPVEKTKYECTYCGKAGHLDFGVGRSNSWLVDSGCSRHMTGEAKWFTSLTRASSDETITFGDASSGRVMAKGTIKVNDKFMLKDVALVSKLKYNLLSVSQLCDENLEVRFKKDRSRVLDASESPVFDISRVGRVFFANFDSSAPGPSRCLIASENRDLFFWHRRLGHIGFDHLSRISGMDLIRGLPKLKVPKDLVCAPCRHGKMTSSSHKPVTMVMTDGPGQLLHMDTVGPARVQSVGGKWYVLVVVDDFSRYSWVYFLESKEETFGFFQSLARSLALEFPGALRAIRSDNGSEFKNSAFESFCDSSGVEHQFSSPYVPQQNGVVERKNRTLVEMARTMLDEFTTPRKFWTEAISAACFISNRVFLRTILHKTPYELRFGRRPKVSHLRVFGCKCFVLKSGNLDKFESRSLDGIFLGYATHSRAYRVYVLSTNKIVETCEVTFDEASPGARPEISGVPDESIFVDEDSDDDDDDSIPPPLDSTPPVQETGSPSTTSPSGDAPTTSSSAAEEIDGGTSGPTAPRHIQNRHPPDSMIGGLGERVTRNRSYELVNSAFVASFEPKNVCHALSDENWVNAMHEELENFERNKVWSLVEPPLGFNVIGTKWVFKNKLGEDGSIVRNKARLVAQGFTQVEGLDFEETFAPVARLEAIRILLAFAASKGFKLFQMDVKSAFLNGVIEEEVYVKQPPGFENPKFPNHVFKLEKALYGLKQAPRAWYERLKTFLLQNGFEMGAVDKTLFTLHSGIDFLLVQIYVDDIIFGGSSHALVAQFSDVMSREFEMSMMGELTFFLGLQIKQTKEGIFVHQTKYSKELLKKFDMADCKPIATPMATTSSLGPDEDGEEVDQREYRSMIGSLLYLTASRPDIHFSVCLCARFQASPRTSHRQAVKRMFRYIKSTLEYGIWYSCSSALSVRAFSDADFAGCKIDRKSTSGTCHFLGTSLVSWSSRKQSSVAQSTAEAEYVAAASACSQVLWMISTLKDYGLSFSGVPLLCDNTSAINIAKNPVQHSRTKHIEIRYHFLRDNVEKGTIVLEFVESEKQLADIFTKPLDRSRFEFLRSELGVIGVDLGQRRIGTRLREELRSKAIKDAGEAKPIQPFHVAQDGEWLGSAGLHRPSSDGPRRRPMAHGLRRSGFSNSRDSMFELARNNKEVHLNINGISDLFPGESHIGISVADATDYTKTVQISREICQMMKGYMIYTVSSTVHLFGVHAILLLWNFDLPSFLTLVIAAFNYCCGQCKIEHKSLMDTDEEIRAALFLQMSIVNQAVALFAYSDDCCHIRCPGPVVTFAFIFTQMVATRKAVGGDLDFAIAKGVGWLKAGLIWLYNFVLLFVPVDLSDMEACKDDWRKIVDEAFSHPTYNSALNSGGDSSYNKAATNFSMRASSCKRMQLYPLSCHSGMYDLVGWEAIQLDASTGVCLAA

SEQ ID NO: 19747 - protein, 2257 aa, Oryza sativa
  Clone ID: TF_OSC401249j.C1.p19.fg
MEEKYSAKPFVFDGHNFVIWKARMEAYLQSQGHNVWNKVKSPYTVPDDADITPANMAQVDFNYRARNAIIGGISSGEFNRVQHHKSAHDMWTALCNFHEGNNDIQLVRQNQFHKEYQRFEMHPGESIDSYFKRFGEIISKLRSVGKEFSDNDNARHLLNCLDYGVWEMKVTSITESAPLSDLTMDKLYSKLKTHEMDVFHRKGLKHSMALVADPSGSTSSNDSAFVYGGFSLAALHSVTEEQLEKIPEDDLALFARKFSRAYKNVRDRKRGKTNEPFVCFECGEPNHKRVNCPKLKKKSDKTTKKPEGQGRKGKKDLMKKAIHKVLAALEEVQLSDIDSDDDDQEKGDKDFSGMCCLANNEDFINLCLMALEDKDDSSEHPEVCLDDIPSLDGSLCDDSCSDNDSVDDELSKERMAHLMIEISDKYRSSKYKIEKLKSENDGMALEIARLRSMIPEEDTCSTCASYLSEINLLKDKLKSCALGAGNPSSASAACSTCYEMKVDMGLLEMELKELKEKFVHDRIGRCENCPILTSDNDELRQQVAMLRTKNDLLESFATKEPIHSSCANCAILETELKDAKTVIDSIKSIDSCSSCISLKVDLESAKKENSYLQQSLERFAQGKKKLNMILDQSKVSINNQGIGYDFAESLRIGTHEILGVTDGMIELAQKPITFKSAGFIGNTSSSTPKTSEPKMVPMTSKSKPVELPRPKNPKQVEHKQNQRQTKPVEKTKYECTYCGKAGHLDFGVGRSNSWLVDSGCSRHMTGEAKWFTSLTRASSDETITFGDASSGRVMAKGTIKVNDKFMLKDVALVSKLKYNLLSVSQLCDENLEVRFKKDRSRVLDASESPVFDISRVGRVFFANFDSSAPGPSRCLIASENRDLFFWHRRLGHIGFDHLSRISGMDLIRGLPKLKVPKDLVCAPCRHGKMTSSSHKPVTMVMTDGPGQLLHMDTVGPARVQSVGGKWYVLVVVDDFSRYSWVYFLESKEETFGFFQSLARSLALEFPGALRAIRSDNGSEFKNSAFESFCDSSGVEHQFSSPYVPQQNGVVERKNRTLVEMARTMLDEFTTPRKFWTEAISAACFISNRVFLRTILHKTPYELRFGRRPKVSHLRVFGCKCFVLKSGNLDKFESRSLDGIFLGYATHSRAYRVYVLSTNKIVETCEVTFDEASPGARPEISGVPDESIFVDEDSDDDDDDSIPPPLDSTPPVQETGSPSTTSPSGDAPTTSSSAAEEIDGGTSGPTAPRHIQNRHPPDSMIGGLGERVTRNRSYELVNSAFVASFEPKNVCHALSDENWVNAMHEELENFERNKVWSLVEPPLGFNVIGTKWVFKNKLGEDGSIVRNKARLVAQGFTQVEGLDFEETFAPVARLEAIRILLAFAASKGFKLFQMDVKSAFLNGVIEEEVYVKQPPGFENPKFPNHVFKLEKALYGLKQAPRAWYERLKTFLLQNGFEMGAVDKTLFTLHSGIDFLLVQIYVDDIIFGGSSHALVAQFSDVMSREFEMSMMGELTFFLGLQIKQTKEGIFVHQTKYSKELLKKFDMADCKPIATPMATTSSLGPDEDGEEVDQREYRSMIGSLLYLTASRPDIHFSVCLCARFQASPRTSHRQAVKRMFRYIKSTLEYGIWYSCSSALSVRAFSDADFAGCKIDRKSTSGTCHFLGTSLVSWSSRKQSSVAQSTAEAEYVAAASACSQVLWMISTLKDYGLSFSGVPLLCDNTSAINIAKNPVQHSRTKHIEIRYHFLRDNVEKGTIVLEFVESEKQLADIFTKPLDRSRFEFLRSELGVIGVDLGQRRIGTRLREELRSKAIKDAGEAKPIQPFHVAQDGEWLGSAGLHRPSSDGPRRRPMAHGLRRCRQLACARTRAEKPYAATPVSRDSIGGGCRSAGPTRDFASARGSGSAGRVAASGWLGAGERALRKRRRNAHDAAGQRGKFGFVKTESTRIHQQEDHALPVHFMTVLQLPKWAVKDIERKCRGFLWKGQEKVNGGHCLVSWRKLCMPIEKGGLGVMDLDLFGQALRLKWHAKSLEQKGRPWTLVGSLSAAALCEFFQLWDEVRNTTLQNGDDSIRWKVSPDGQFSASATYNFFFTTKEDCPVGDLLWHSRAPSRVRFFMWLALKGKCLTADNLAKRNWPHEDHCVLCQREEEDCQHLFADCSFTSAVWGLIRSRVNFNFPIPTEENCPLMCWWLQPRARCRQLANRTVYTSAAQITVIRRGSITYGICQQSYLGVVMLDATRADQTNNKNRLQDTQHVHTYE

SEQ ID NO: 19748 - protein, 1637 aa, Oryza sativa
  Clone ID: TF_OSC412801j.C1.p4.fg
MAQVDFNYRARNAIIGGISSGEFNRVQHHKSAHDMWTALCNFHEGNNDIQLVRQNQFHKEYQRFEMHSGESIDSYFKRFGEIISKLRSVGKEFSDNDNARHLLNCLDYGVWEMKVTSITESAPLSDLTMDKLYSKLKTHEMDVFHRKGLKHSMALVADPSGSTSSNDSAFVYGGFSLAALHSVTEEQLEKIPEDDLALFARKFSRAYKNVRDKKRGKTNEPFVCFECGEPNHKRVNCPKLKKKSDKTTKKPEGQGRKGKKDLMKKAIHKVLAALEEVQLSDIDSDDDDQEKGDKDFSGMCCLANNEDFINLCLMALEDKDDSSEHPEVCLDDIPSLDGSLCDDSCSDNDSVDDELSKERMAHLMIEISDKYRSSKYKIEKLKSENDGMALEIARLRSMIPEEDTCSTCASYLSEINLLKDKLKSCALGARNPSSASAACSTCYEMKVDMGLLEMELKELKEKFVHDRIERFAQGKKKLNMILDQSKVSINNQGIGYDFAESLRIGTHEILGVTDGMIELAQKPITFKSAGFIGNTSSSTPKTSEPKMVSALERLEKSDKNVLGLEELLESLRGSSDFGVGRSNSWLVDSGCSRHMTGEAKWFTSLTRASGDETITFGDASSGRMMAKGTIKVNDKFMLKDVALVSKLKYNLLSVSQLCDENLEVRFKKDRSRVLDASESPVFDISRVGRVFFANFDSSAPGPSRCLIATENRDLFFWHRRLGHIGFDHLSRISGMDLIRGLPKLKVPKDLVCAPCRHGKMTSSSHKPVTMVMTDGPGQLLHMDTVGPARVQSVGGKWYVLVVVDDFSRYSWVYFLESKEETFGFFQSLARSLALEFPGALRAIRSDNGSEFKNSAFESFCDSSGVEHQFSSPYVPQQNGVVERKNRTLVEMARTMLDEFTTPRKFWTEAISAACFISNRVFLRTILHKTPYELRFGRRPKVSHLRVFGCKCFVLKSGNLDKFESRSLDGIFLGYATHSRAYRVYVLSTNKIVETCEVTFDEASPGARPEISGVPDESIFVDVDSDDDDDDSIPPPLDSTPPVQETGSPSTTSPSGDAPTTSSSAAEEIDGGTLGPTAPRHIQNRHPPDSMIGGLGERVTRNRSYELVNSAFVASFEPKNVCHALSDENWVNAMHEELENFERNKVWSLVEPPLGFNVIGTKWVFKNKLGEDGSIVRNKARLVAQGFTQVEGLDFEETFAPVARLEAIRILLAFAASKGFKLFQMDVKSAFLNGVIEEEVYVKQPPGFENPKFSNHVFKLEKALYGLKQAPRAWYERLKTFLLQNGFEMGAVDKTLFTLHSGIDFLLVQIYVDDIIFGGSSHALVAQFSDVMSREFEMSMMGELTFFLGLQIKQTKEGIFVHQTKYSKELLKKFDMADCKPIATPMATTSSLGPDEDDEEVDQREYRSMIGSLLYLTASRPDIHFSVCLCARFQASPRTSHRQAVKRIFRYIKSTLEYGIWYSCSSALSVRAFSDADFAGCKIDRKSTSSTCHFLGTSLVSWSSRKQSSVAQSTAEAEYVAAASACSQVLWMISTLKDYGLSFSGVPLLCDNTSAINIAKNPVQHSRTKHIEIRYHFLRDNVEKGTIVLEFVESEKQLADIFTKPLDRSRFEFLRTFICLSSLCDHVMLFKRVETCLN

SEQ ID NO: 19749 - protein, 605 aa, Oryza sativa
  Clone ID: TF_OSC7033j.C1.p1.fg
MALVADPSGSTSSNDSAFVYGGFSLAALHSVTEEQLEKIPEDDLALFARKFSRAYKNVRDRKRGKTNEPFVCFECGEPNHKRVNCPKLKKKSDKTIKKPEGQGRKGKKDLMKKAIHKVLAALEEVQLSDIDSDDDDQEKGDKDFSGMCCLANNEDFINLCLMALEDKDDSSEHPEVCLDDIPSLDGSLCDDSCSDNDSVDDELSKERMAHLMIEISDKYRSSKYKIEKLKSENDGMALEIARLRSMIPEEDTCSTCASYLSEINLLKDKLKSCALGAGNPSSASAACSTCYEMKVDMGLLEMELKELKEKFVHDRIGRCENCPILTSDNDELRQQVAMLRTKNDLLESFATKEPIHSSCANCAILETELKDAKTVIDSIKSIDSCSSCISLKVDLESAKKENSYLQQSLERFAQGKKKLNMILDQSKVSINNQGIGYDFAESLRIGTHEILGVTDGMIELAQKPITFKSAGFIGNTSSSTPKTSEPKMVPMTSKSKPVELPRPKNPKQVEHKQNQRQTKPVEKTKYECTYCGKAGHLDFGVGRSNSWLVDSGCSRHMTGEAKWFTSLTRASSDETITFGDASSGRVMAKGTIKVNDKFMLKDVAL

SEQ ID NO: 19750 - protein, 221 aa, Oryza sativa
  Clone ID: TF_OSC19190j.C1.p1.np
RFNKILSDLRSVDSSYDVNYTQSEISRHFLNGFDMSIWEMKVTSIQESVDMSTLTLDSLYTKLKTHEMSILSRKVDFKSSALVSSSTSLDVDSSSSVSAIALCNAMSDEYRKRGGPNLCFECYRKRGGPNLCFECGGTDHFRSRCPKLGRARREDNGDEKTNDNKPKGTVKGRKIKETLKKAFDQVYAVFEPLSDRDGESGDEDKGKNISGVCFMARGAAG

SEQ ID NO: 19751 - protein, 154 aa, Oryza sativa
  Clone ID: TF_OSC23526j.C1.p1.fg
MAVTRPPLGRRLPRDSGGPGCAVPVEAGRKEEEEQKQRGRRHPRLNRPPSRSRAYQDILILGDTLLRREDHVVVSYPMKRRKKPCFVCGLFGHNSKQCMQVDCFGVFYEARSNTRINRMKIINAVSKSVPQPHKVDLNSPNRIIIVQIEKCNGP

SEQ ID NO: 19752 - protein, 1662 aa, Oryza sativa
  Clone ID: TF_OSC400151j.C1.p49.fg
MASHEDPRDRHRDEGGATTDEEPIEDLGGASEEEDDEDAIVVDFDEAKKHIDTQYVAIGKFFSRRTFSAKGLFEAMQKAWGLRQGMEYKRLHDNRFLLEFQSAGDFRFATGGGPWIYQGDAFLITEYDGKSRPSDVKLNSLPVWVRIYDLPLSMMTETMGKLIGARLGEVRKVAVDDQGRAWDDFMRVRAEHPVDKPLTCWLKLKDKESSSVVQRYDVKYERIPRFCFYCGHIGHMERECDLPSDKQTVRFGLNLRASPYKQFEHRSWALPGKVDNNAKRNLWFPGENQSKPAPAGSQNKDGPSGKEDRKKNSPEENAPVKENFANRDEIEAEIPTVQEELKGLNARNPGKSREDGEVRKLAEQWEHMGKTQEDQPTFHAASQQAKEGQIRSETAGETWVSSKDSINQYEQLDEGAGNGREEVDEHVPPLSTIHEDISLINQLRDEELGEGHKENIDDGVKPVLGKRSMDKSLLGPGYDGPSFDVLVGGDKIGAAELCSSAWRRNGEGGDGLALFWDDTVQVDLLSYNFRYIDVLIKDESCPVQWRCTFVYGEPKASERHNMWTLLRRIKSNSTAPWCLVGDFNEAMWQFEHFSDHKRREKQIMDFREVLSHCDVFDLGFTGAPWTFDNKQKGRNNVRVRLDRAVASQSWSSLFPAAEVIHLTVSSSDHSPILLQASRVDRIKKGDRCLRLGAVINLVKLAKILKKQGIDWQSFRWQAGVLVIKTISIYPGSWILLYREEMQWLQRSRISWLKEGDRNTSFFHRKAAWRHKKNKINRLQRSDGTWCDKREEMEDMTSNFFKELYTNDPSVEPEPLLDLVQPRVTSEMNKLLCKEFSDDEISNALFQMGPLKAPGPDGFPARFFQKNWDVLKRDIIAAVKLFFEQRRMPQGVNDTAIVLIPKKKEPKDLKDYRPISLCNVIYKVIAKCLVNRMRPLLQDVIVPAQSAFIPGQMFTDNALIAFECFHAINRCKSVESQFCAYKLDLTKAYDRVDWRYLEGALLKVGFCSQWVQLLMTCVTSVSYAVRFNGSMLESFKPTRGLRQGDPLSPYLFLFVADGLSTALSEAERSGRLQPLKVCRRAPGISHLLFADDSLLFFKSNMEQTNVVKSALTLYEQSTGQLLSPAKCSLMFGKHCGDALQSDIRSLLQVQHTSFEDKYLGLPTPMGRLKAGRHQSLKERFEKRLTDWNEKYLSMGGKEVLIKSVLQAIPTYVMSVFKLPAGLCEEYMQLIRKFWDLKLFNQALLAWQAWRLIQFPNSLCAQILKAKYYPNGDLCDTTFLVDSSETWKGVVHGLELLKQGLIWWIGSGSKVRIWRDNWIPREHTLRVLGKTVRLRIKWVSDLMVPHQQIWNEELVRRIFYPPDAEEILRIQLPHSPEEDFIAWHYDKVGMFTVFSAYKLALQAQIRADEEVAQCSNGDGDRKLWKNIWNVQVPQKIRIFAWRVSRDCLATQHNKHRRQIVQKPNCEICGAEVEDAFHATVACTKAAALRAEMRQNRWLPGEQEFSQLGPDWLLHLINRADDQTRALIFLLLWNSRGEVLLSSWKFLRRCVSAEEAELLACYEGLKLAAEWIPMPVMLEYDCATAIARLLSTTEERSRWSFLLRAARSVIGLIKEVRLMHCNRECNRVAHELAQIAIRSGQSAVWRNNAPNCVMQCLQHDCNPVT

SEQ ID NO: 19753 - protein, 1319 aa, Oryza sativa
  Clone ID: TF_OSC403264j.C1.p7.fg
MSASPSVAASSSSGQEQGSLKVYGRRHDSHRRRLTLAPIPSPNLIATMAATTSAPDSPAQVHHNGSTALAGMEVIGLKTHDSQSGESDLSLIQGFWDEIGFPTPASRWWEQKSPIVSGVTPTAPPITEDDQWTRVSSKQKTKSTECHRRGWVMRPWKRPPVFPRFGGNHAGGSGTGGSGGRWHGGAGQSQCNSNRWFPQGNNAGGHHRRDHDDLPCPDQQDQKPKPRGKGMAAQGQQTEKLDQTTDGGQPHPTVQATKAKKPRPPHCHQCKTSGHIAQVCKADIDCYVCNKKESHLAVKCPLLKLPKPTCSLFGFGKTEFGFIQISDFGMNVQEASLVPTALVSIRGGSLTPEIVQTELAHRIRPDWKWEAVLHAENSFLVAFPSIEELKRMDDVEFRLKNHGVSMTIIEWKTTDELIPAYELDEVWVHVSGVPSPWHHYLAFWALGCVIGATQEVDMLTYRRTGVIRVKEDHENSSKDGSHDQAHKRAKNSASPTISKEQKSDVTAMQLVLTPFGNCRPPPPPRLVIANGIAYTIVHTKSGATVVGEVITAAEKVDEIYLSQPVDSPTPDQPCLLPPELERWSLLSSQPAAAAKITGEASLAATTAALSLAVPQMATPTSTDVNRSKDQLSKTSSTPRCRSVRSNVENMDGIAAGDDDSLLKAMKRKALRNLDDSFVGREKNPNLLQKEKSERLVPKIQKPLNLFPHERGVSDHTPLLLDTGEAAFTGNIKQFKLELGWFLRDDFYDRVLEIWNKLVKGRNAVQRWNNKMSALRRHLRGWAAHTSGVFKQKKANLQNTIDSLDIAVEVRLLSDQERILLDQSRDSLASLLREEEIKWKKRIFFLDQDEGKIEGVEALKTYITSFYRKLFGPPEENSFSLDESIIGDMAQVSQAENDFLTAPFSEEEVKEAIFAMEHNKAPGLDGFPAEFYQKFWDVIKHDLMNLFNEFHTGSLPIFGLNFGVLTLVPKVKEANQIQQYRPICLLNVSYKIFTKVATNRISSVANHLVNPTQTVFMRGRNILDGVVIIHETVHELHRKKLSGVIFKIDFEKTYDKVKWPFLLQTLRMKDKKGLRQGDPLSPILFNFIADMLATLINRAKTQGQIDGVIPHLIDGGLSILQYADDTVLFVNHDLEKAQNMKSVLLAFEQLSGLKINFHKSELYCFGEALDYSDQYNQLFGCQVGNFPFRYLGILIHYRKLRNAEWKEVVERFEKKLSSWKGKLLSLGGRLTLINSGMDIRRNTGLLSGTLFVVPKNNGGLGIHDLEIKNKVLISYHLSYPVATYLGYPPPTGIAGYYYGGISTFGPGGTGVFYPGAWVAI

SEQ ID NO: 19754 - protein, 1222 aa, Oryza sativa
  Clone ID: TF_OSC419806j.C1.p3.fg
MARTTAGGVEQGIGYGVAELAAEAGGRARGGRRGGVGRVGDGGRSHGGWRGGAEWSGVGRTGDEAGGRGGIDVGHLYAEIIGLLDKIMAAPAASNFNLRSIIEKEKLTGTNFMDWEHEKRCNDYLDISCLMLATMSPKLQRQYEALDAHTIITGLRNMSEDQARAERSNTSKSLFACRLAEGNPVSPHVIKMIGYTESLDKLGFPLNRELVTDLILQSLPPSFEPFIMNFNMNNLNRTLAELHGMLKTAEESIKKNSNHVMVMHKRKPNNKKSGQKRKLNSDEITSTSNSKTKVQKTGPAKDAECFFCKETGHWKRNYKKYLEQLKQKQQDGKSSTSGINVIEINLATSSTDSWVFDTESVAHICKSLQGLKRSRSLARGEVDIRVGNGARVAAVAVGTMPLSLPSGIVLELNNCYCIRALCKNVISASCLQAEGYGFRSVDNGCSVYYNDIFYFHVPMMNGLYIVNLDGCSVYNINAKRQCPNYLNPTFIWHCRLGHINEKRMEKLHRDGLLHSFDFESFKTYESCLLGKMTKGPFTGQSERASELLGLVHTDVCGPMSSTARGGFGYFITFTDDFSKYGYVYLMRHKSESFEKFKEFQNEVQNHLGKTIKYLRSDRGGEYLSLEFGNHRKECGIVPQLTPPGTPQWNAVSERRNRTLLDMVRSMMSQTNLPLSFSGYALETTAFTLNWVPSKSVDKTPYEIWTGNRPSLSFLKIWGYEINASLWGYPKETKGYYFYNREEGKVFVARHGVFLEKEFISRKDSGSMVRLEEIQKTPENASTSIQPQQAEQDVVQQVEQVVVEPVVEAPASRRPERIRRTPARYTLLTIGQRDILLLDNDEPTTYEEAMKKTDVDGNVHIYKARLVAKGFRQIQGVDYDETFLPVAMLKSIRIVLAIAAYFDYEIWQMDVKTAFLNGNLDEDVYMTQPKGFVDPQSAKKICKLQKSIYGLKQASRSWNIRFDEVVKALGFVKNEEVPCVYKKISGSALVFLILYVDDILLIGNDIPMLESVNISLKNSFSMKDLGEAAYILGIRIYRDGSKRLIGLSESTYIDKVLKMFNMQDSKKGFLPMSHGINLNKNQCLQTTNEQNKMSVIPYASAIGSIMYAMLCTRPDVSYVLSATSRYQSDPSESHWIAVKNILKYLRRTKDMFLVYGGQEELVVNGYTDASFQTDKDDFRSQSGFVFCLNGSAVSWKSSKQDTAANSTTEAEYIAASKAAKEAV

SEQ ID NO: 19755 - protein, 849 aa, Oryza sativa
  Clone ID: TF_OSC900099j.C1.p2.fg
MASSSSAVSNPLFGFQISEKLGEQNHALWSAQIERKKGEKGDKVMVVTNPAYQEWFATDQQVLGFLFSSLSCDVLTQVATSKTARDAWRAIESMFMSQTRARSLNIKLSLCTTQKDDEYEPAISGLVTRVEPVTVAELYSILLNYENRGSNNQQRVDNRPVCQVCYKMGHVASECWHCFDDSYVPDERHVAAATHAAYGVDTNWYLDTGATDHITGELDKLAVRERYKGNNQIHAANGAVFDKFHEFQNLVERLFDRKIIAVQTDWGDWYIPSHFLSLCLMNLMKKTQEKLMPQGETYALEIEPPTSSAPTRPHTRLSSGIWKEKKGRNVNDCKWVYKIKRKADGTLDRYKGRLVAKGFKQRYGIDYEDTFSPVVKAVTIRTVLSIVVSRGWSLRQLDVQNAFLHGVLEEEVYMRQPPGYEKSSLPNYVCKLDKALYGLKQAPRAWYSRLSTKLQELGFKASKADTSLFFYSKGGVTMFLLIHVDDIIVASYVPSAVPALLQDLGKEFALKDLGELHYFLGIEVKKMTNGILLSQEKYATYVIRKVGMNDCKPVTTPLSTSEKLSVNEGSLLGPNDATQHRSVVGALQYLTLTRPDISFPVNKTLLKESEIQAPAAAKILCDNIGAKYMSSNLVVHVSTKHIEVDYHFVRERVARKLLEIEYISTKDQIADGFTKALAILLVKVASQRLYRSPKIFIFWDGGSIRTLKDCGLCCETPEDRVFARGHCKKVAWWQTSVRRPAEEQGAAALERGREMADAMASTFLSSSNAGVPTSDHDQATFFLSRKSSRMMKEVSHVCPWWQHGRCHERARAIEPLELVGVAECTARRLVEEVGLLAGGAVPDADATYS

SEQ ID NO: 19756 - protein, 586 aa, Oryza sativa
  Clone ID: TF_OSC900367j.C1.p13.fg
MAVTRPPLGRRLPRDSGGPGCAVPVEAGRKEEEEQKQRGRRHPRLNRPPSRSRAYQDILILGDTLLRREDHVVVSYPMKRRKKPCFVCGLFGHNSKQCMQVDCFGVFYEARSNTRINRMKIINAVSKSVPQPHKVDLNSPNRIIIVQIEKFMTTSFHNIICMVGVIESSSLQAKNMLDRPNVATSVPRCYTDLGLRRRPNNLDDAAPPSPPTRALAAKRLDHPRLLSLCGRPSLAREMERETEESERNGIEFLLPRPVRDFMMAGAANDEWRGVLFHCFDSAGALEYSMANAGSRFSFATEVCAKLMNGARYAVADPPLDSEDHKEFENIVVSDAVIILDLIFDVVHDDAVLNVMMINNGADATGWRFYTDDDLTRTPENNVQSLVLPNGIALPTFEINGGIRFRRRVVLPPVLMEEDGVIYHFLQYKFLPNVRATVRASILSGLAHGEALEELAIDARAQHFAAIAGPEGHDLDPEQWAALLLPEPADGGEGHLDGEAAVGGEGQLDGEAAVEVGEEVLEVAVEVGDEVVLPALYGFVDDDEYRSTEDDDYVPDEEESHSSDDDFVPDESDDDYVPHHEGYESSD

SEQ ID NO: 19757 - protein, 424 aa, Oryza sativa
  Clone ID: TF_OSC24698j.C1.p2.fg
MARTTANATASMARLGAAASGDQSSGGGGGEEGDGARVIESMGGLSEMGKKRKGMAVQLVSMRDNFIGSGSQQFHGSTQHNSMSFPCQPFEDQPQSKVMANQTQTVEELLRQMRRRYQIYQMQQMQRQCQEPRQGHQPQMQVQVPTRNLNQSQSQEFPISAPKTPVKMLSRSPKITSANSPSDQRKISATCYDCGEQGHYPNSGANRTVKWKMDNGRTMFITSSEFTPEDVARIPKRQRGRNTFRGARQLTRHLIKYGPPRPEDDESGERFSADDDDDDDDDDDDDDDATLNSFMERGLEFKACTRCGIVGHTASLCLPTCRCGEYTHYSDACPLRKVTCFLCEGTDHVPKDCQLNAVIAKTKKEQGTTVQPIRQPMAVDNNSHNPSALPPTPAPVETNHGRSNVTKDVHKSLLVPVSAVNVHN

SEQ ID NO: 19758 - protein, 386 aa, Oryza sativa
  Clone ID: TF_OSC900368j.C1.p18.fg
MAPQPTCQTCVRNYLGSKEDPALSENPNQLAEQVTNQVAKTDNTVPGPNKEVATRNQHSSMDIYQILANQTQMLQEIAQNLASIQQQLLLPQPKVNPDKSKNEAAEIQGTQSVEGTDTHKEKNKEFLNVMITGMKTPLQANNCPNLQNSINKSVSRENSMIKEGSCHKRKTLPSEVDMQDVPQCQTMQSCQNLPKSPTLKSKKIRHVPGFICFICHKIGHYMRHCPQKPYMDAPLQANMSTSRMPFYPQGSPNSPNVNAVRSTFPDDKRAKASCDMCQDIQEKKEMQEYKRCKVMSLEIQAKEDLCRKTNSPAQYYQKASQHSTSSGSTSRSTMSEPGQQATMINSNSHEGSNSVPCPTPSKRRGYKAGVECFICHEMGHYSWCCP

SEQ ID NO: 19759 - protein, 1624 aa, Oryza sativa
  Clone ID: TF_OSC900114j.C1.p4.np
IPSFESPFLPEKSLKSSKASRQPGLEWYIPGLEIELSRGGCSEWLGLCNRMPRYKPEYLGVEGFVQELRTMSFVGFGTAPFYAQIPHDRHEKCRVKVTLNSNSEDISVMFKAGGRNYIHACQVARIAIGELRDRYSDLADTEYRYHPRQPQGSRGSYLETEGIENDATRHLVEMLWAMDESRAEVLAAQDREDRNRGKICLEDKVDRLEKELAVLGEAPPQKARIRLTARKALFVPRYQLAPKMVNTSNGNGPSNNNNGENPTAQVLAQQTQLMNMMMQLQNQQNQGNNHAPPQKLAEFLRVRPPVFSSTNPVEAGDWLHAIEKKDLLQCTDQEKVSFASHLHGPASEWWDHFRLNRTAEPITWLEFTAAFRTHIPSGVVSLKKKEFRLTQGSRSVTEYLHEFNLARYAPEDVRNDEERQKFLEGLNDELSYPLMGDYHDFQKLVDKAIRQEKYNRMEQKKRRIAQKTQQGNNQKPRLTLGPSMPQGGSSSVVRPQRQFNNNAGNNIRNQAPHVAAPAQQQPAKREQGSPVVCFNCGDPGHYANKPKPRRVKVVPVQSNSVPASKARVNHVAAAEAQAPDVILGTFLVNLVPTVLFDSGATHSFLSMFAGNHGMEVEDLRRPLVSTPSNQALSLQRSPSRIEIQGVPFLANLILLSKDLDVILGMDWLARKGVIDCANRKVTLTSNGRVVTVHALSSESLRRLNQITLEEISIVREYDVFPYDLPGMPPKRDIFRIDLVPGTTPIHKRYRMAANELAEVKRQVDLLQKGYIRPSSSPWGAVIFVEKKDHTQRMCVYRALNDVTIKNKYPLPIDDLFDQLKGATVFSKDLRSGYHQLRIKEEDPKTAFTTRYGLFECTVSFGLTNAPAFFMNLMNVFMEYLDKFVAVFIDILIYSRTKEEHEEHLRALEKLREHQLYAKFSKEFWLSEVKFLGHVISGGVAVDPSNVESVTNWQPKTVSEIRSFLGLAGYRRFIENFSKIAKPMRLLQKDVKYKWSEECESFQELKSRLISAPILLPDPKKGFQVYCDASKGLGCLLMQDGKVVAYARQLRPHEKNYPTHDLEAVVVHALKIWRHYLFTRTEVYTDHKSLKYIFQPDLNMRQRRWLELIDYDIGIHYHPGKANVVDALSRKGYCNATEGRQPLELCKEFERLNLGIVRGFVAALEAKPTLIDQREAQINDPDIQEIKKMRRGKAIGFLEDEHGTWLGERICVPDNKDLKAILKEAHDTLYSIHPGTKMYQDLKERFWWASMREIAEYVAVCDVCQRKAEHQKPAGLLQALKIEWKWEEIGMDFITGLRTSSGHDSIWVIVDRLKVAHFIPVKTTYSGSLAELYMARIVCLHGVPKKVSDRGSQFTSNFWKLQEEMGSKLNFSTAYHRTDGQTERVNQILEDMRACALDFDGSWDKNLYAEFSYNNSYQASLQMPYEALYGRKCRTPLLWQTGERQVFGTDILREEEKVKIIQERLRVAQSHKSYADNRRRDLSFENYVYLRVTPLRGVHRFTKGKLAPRFVGPYKIVKRGEVAYQLELPQSLAVHNVFHVSQLKKCLRPTEEANLEQIEVQEDLYVEKPIRILETDERRRNRVIRFCKVQWSNHSEESTWEREDELKSAHPLFASSSESRGRDSV

SEQ ID NO: 19760 - protein, 410 aa, Oryza sativa
  Clone ID: TF_OSC417493j.C1.p3.np
MDEVGCRWTFSRANEGYTSCGPVVEMSMAEGWCPAARGSVLPACPGIPAVGGIGSVLLSKARMGWKLCHVFRPYTVVVDCLTTKMWNGWPGLAWDELGPRSGCQFGLNHRRPWVKAVLDGQVSEEEDIVSCLSKLQKAVGSVSAAKEAVKPAVKQDKRLRSVKVLSLVSNLSLPFVFPLSLSKSLQQMADNEKGNKVRSQDIGTLSSRVNEAPDTSCVTLVQHLINQNRLLIEILQQHQTPILNLSQIQPQVQLEAVQALTPQVSMPPASRRTHGDVPHVDPKEASNICFMCDEQGHYARERPQQKRKTPMRTEDEVRKMIITSTEWPPPGMTRRQRRNTFRGAPQLTEHLLANGGRVSDSEDSDQVSSDDEDEECKACSRCGEIGHCRDTCGSTVVLCNEDDERERLDG

SEQ ID NO: 19761 - protein, 1282 aa, Oryza sativa
  Clone ID: TF_OSC10615j.C1.p9.fg
MAGFADALRPDKFTGVHFKRWQIRVTLWLTAIKCFWVSTGKPEGVLTAEQQKQFEEATTLFVGCILSVLGDRLVEVYMHMTDAKELWDALNTKFGATDASNDLYIMEQFHDYKMADNRSVVEQAHEIQTMAKELELLKCVLPDKFVAGCIIAKLPPSWRSFGTALKHKRQEYSVEGLIASLDVEEKAREKDAASKGDGGQSSANVVHKAQNKSKGKYKAQQTTNFKKQKKNNNNPNQDERICFVCGQVGHLARKCPQRKGMKAPAGQTSKSANVTIGNTGDGSGYGNLPTVFSVNQSTNWWVDTGANVARGSTVLMGNGSHASVHGVGTVDLKFTSGKIVQLKNVQHVPSIDRNLVSGSRLTRDGFKLVFESNKVVVSKHGYFIGKATRKPHKAAEERNLAPLELLHSYLCEMNGVLTKGGKRYFMTFIDDATRFCYVYLLKMKDEALDYFKIYKAEVENQLDRKIKRLRSDRGGKFFSNEFDLFCEEHGIIHERTPPYSPESNGIAERKNRTLTDLVNAMLDTAGLPKAWWGEALLTSNHVLNRVPNRNKDKTPYEIWIGRKTITFLFAHMGVLGESQFKSEVPDMHVGTIMESRDAIFFESFFPMKDTHSGSNQPSEIIPSSITPPEQTEHTHELVSEEDVSEAPRRSKRQRTAKSFGDDFTVYLVDDTPKSISEAYASPDADYWKEAVRSEMDSIVANGTWEVTERPYGCKPVGCKWVFKKKLRPDGTIEKYKARLVAKGYTQKEGEDFFDTYSPVARLTTIRVLLSLAASHGLLVHQMDVKTAFLNGELDEEIYMDQPDGFVVEGQEGKVCKLLKSLYGLKQAPKQWHEKFDKTLTSTGFAVNEADKCVYYRHGGGEGVILCLYVDDILIFGTNLEVINDVKSFLSQNFDMKDLGVADVILNIKLIRGENGITLLQSHYVEKILNRFGYIDSKPSPTPYDPSLLLRKNKRIARNQLEYSQIIGSLMYLASATRPDISFAVSKLSRFTSNPGDDHWRALERVMRYLKGTVELGLHYTGYPAVLEGYSDSNWISGVDEIKATSGYVFTLGGGAVSWRSCKQTILTRSTMEAELTALDTATVEAEWLRDLLMDLPVVEKPVPAILMNCDNQTTCEKTIEVCQEIKKLRSYNVGLHPNSEKPGRSLHEGTITKCDRQCIEGDGFETHSILERTHLCELDCWSQSMKILGESSRKLTKDLGIKSLYVYNLNKNHLILSVHCNDWKAYSCTTMIFSQCARNQKSSAIPSVTVIGRRKAITICISTSSQRPIPLIIEQNDWSMFS

SEQ ID NO: 19762 - protein, 686 aa, Oryza sativa
  Clone ID: TF_OSC14490j.C1.p1.fg
MKSNRGVSFSTKNAASGSKFTSRGSGNRGAFSSSSGGARSSNYGTSSGKDLAAPNERKNAANTSSTSVGSSTKSSGIQCFKCGGRGHVARECPNNRTIVVNDQGEYESTSEEEQEDSEEENNLEKDICEFESGAALVVTQILSVQMSDAENGQRHNLFQTRAKVQDKVVKVIIDGGSCHNLASKEMVEKLGLKLLKHPHPYHVQWLNNSGSIKIAQRVKVPFKIGEYIDTMECDVAPMTVCHMLLGRPWQYDRSSLHCGRTNQYTIKWKGKELILKPMTPQQILAEHLQKSSEVRNESAKEGQKNNLSAPHKSEYEDVFPEETPVGLPPLRGIEHQIDLIPGATLPNRPAYRTNPEETKEIQRQVQALLDKGYVRESLSPCAVPVILVPKKDGSWRMCVDCRAINNITVRYRHPIPRLDDMLDELSGSMIFSKIDLRSGFHQIRMKIGDEWKTAFKTKFGLYEWLVMPFGLTNAPSTFMRLMNHVLRAFIGKFVVVYFDDILIYSKTLEEHVAHIQQVLDVLRKEQLYANLEKCTFCTDQVVFLGFVVSGLGIQVDESKVKAIKDWPTPENVSQVKSFRGLAGFYRRFVRGFSTIAAPLNELTKKGVAFQWGEPQEKAFQELKKRLSEGPLLVLPDFTKTFEVECDASGIGIGGVLMQNGQPVAYFSEKLGDPLESTCRHASLSIL

SEQ ID NO: 19763 - protein, 1403 aa, Oryza sativa
  Clone ID: TF_OSC400860j.C1.p8.fg
MSAPTPRVSRSREPHQRRISRSPPHRRGRRRPGEDRELIPVQCVVKEVGGSANYPLLTKTNYGDWALMMKVMLQARGLWDAVEHGDADFQADRMAMEAILRAMPPEMLASLAVKPSAKEAWDAIKTMRVGVDRVRKSKAQMLQKQYDAMEFKDGETVEEFSLRLNGLVTNLATLGVHLEEGKVVEKFLNSVPDHLSQIALSIETLLDLDELTLEEVTGRLRNAEEKLPAKSSAAGGKLFLTEEQWTARWKEKQAAESSSGKAKSGGGNRRRRGGKKKAEAAAHDGDRAGRDTQEGREPNRDKCRNCGRTGHWAKDCRQPKRPAEAYQALADEDDDEPALLMAHVVDAAPVSASSSSAPPASSPPSQPDKTIELVEPKVFAHLLTEKQTDGGVWHLDTGATNHMTGIREVFAELDLSVRGSVRFGDGSVVGIEGRGKIIFECRNQEHRALTGVYYIPKLNANLISLGQLDENGCDVRIYHGVCTIRDPAAQLLARVQRTRNRLYLIKLTIGQPVCLAAKAQECAWLWHARYGHLHFDALRRLASRDMVRGMPDIDHVEQLCDSCVISKQRRTPFPRRSMFRAEDRLELVHGDLCGPISPATPGGKTHFLLLDDASRYMWITLLGCKSEAADAIKRFQARAEAESKQKLRILRTDNGGEFTSVEFATYCAEQGVSRHFSAPYSPQQNGVVERRNQTILGMARSLLKAKNMPARYWGEAVTTAVFLLNRAPTKSLANMTPYEAWHGKKPAVGYLRTFGCLAYVKDVRPHLPKLSDRSKPMVLIGYADGAKAYKVFDPVSGRVQVSRDVIFDEGAGWDWDAAGAAAVPGGGGCSDFTVEYLTTGTSPSASTSAPSSASSGASAMGDLLGDALTPGFATRDPEEGELHLLAAEEPASFTEAEQRQEWRRAMLDEIASIEENNTWRLVDLPSGHRAIGLKWVFKLKKDAEGRVAKHKARLIAKGYVQQPGIDFEEVFTPVARLESVRLLLAQAAQAGWTVHHMDVKSAFLNGELAEEVYVKQPPGFVKEGREHQVLRLDKALYGLRQAPRAWNSKLEATLLSLGFRRNDCEHAVYVRGNTSARLLVGVYVDDLIITGTKEDEIVRFKGEMKALFKMSDLGLLSFYLGIEVEQVAGSIRLSQAAYARRILERAGMLGCNPSATPMEQRLKLSKTSAAASVNPTWYRGIVGCLRYLVHTRPDIAFSVGYVSRFMEAPTTEHEAAVKRILRYIAGTTEFGCHYHQSSSPVQLVGYSDADMAGDPDTRKSTTGVVFFLGTSPVSWQSVKQKVVALSSCEAEYIAATTAACQGVWLSQLLGEINQEEPDAFKLLIDNKSAIALSKNPVFHERSKHIATRYHYIRERVEDGSVHVEFVGTEGQIADILTKALGRTRFQELRSRIGVADVKFRCKT

SEQ ID NO: 19764 - protein, 1009 aa, Oryza sativa
  Clone ID: TF_OSC401810j.C1.p53.gm
MAGFADALRPDKFTGVHFKRWQIRVTLWLTAIKCFWVSTGKPEGVLTAEQQKQFEEATTLFVGCILSVLGDRLVEVYMHMTDAKELWDALNTKFGATDASNDLYIMEQFHDYKMADNRSVVEQAHEIQTMAKELELLKCVLPDKFVAGCIIAKLPPSWRSFGTALKHKRQEYSVEGLIASLDVEEKAREKDAASKGDGGQSSANVVHKAQNKSKGKYKAQQTTNFKKQKKNNNNPNQDERICFVCGQVGHLARKCPQRKGMKAPAGQTSKSANVTIGNTGDGSGYGNLPTVARGSTVLMGNGSHASVHGVGTVDLKFTSGKIVQLKNVQHVPSIDRNLDTHSGSNQPSEIIPSSITPPEQTEHTHELVSEEDVSEAPRRSKRQRTAKSFGDDFTVYLVDDTPKSISEAYASPDADYWKEAVRSEMDSIVANGTWEVTERPYGCKPVGCKWVFKKKLRPDASHGLLVHQMDVKTAFLNGELDEEIYMDQPDGFVVEGFAVNEADKCVYYRHGGGEGVILCLYVDDILIFGTNLESHYVEKILNRFGYIDSKPSPTPYDPSLLLRKNKRIARNQLEYSQIIGSLMYLASATRPDISFAVSKLSRFTSNPGDDHWRALERVMRYLKGTVELGLHYTGYPAVLEGYSDSNWISGVDEIKATSGYVFTLGGGAVSWRSCKQTILTRSTMEAELTALDTATVEAEWLRDLLMDLPVVEKPVPAILMNCDNQTEIKKLRSYNVGLHPNSEKPGRSLHEGTITKYYSISLAGVHRRSGEQVSGTSAFDVLHREKAAIRDLLLLLQRHAYTAIAAAAVDSHFPQDYLKNITPMPSWLYNQLFDVGACRSHGRPHRRCKVLTGSFLVAEGGERERGSPVLRWPGGGDAGGKAAKGGDARRFQRRRSRRTSRRRRGKEEVGASSVLPLDVDGGASTWQLLLCWVAEEEQHGTATVAARLGGDGKTAATAHKAVGGGGAVAWAPSAPTERRKGGSAGWAGLGRASERRKGEMRPKLKREKV

SEQ ID NO: 19765 - protein, 1059 aa, Oryza sativa
  Clone ID: TF_OSC411095j.C1.p6.gm
MKPENAFVTVQEGTLCLAIVVTTKQQPVPILGNLAQQNIHVGSPPPTAQGAAGQRSIRAAGRRAAGEEDGADGERDEESEDAAAVIVHLHRSRARAVSGVAGGSVSAGAAAGGAGGDSLFPRRRRRPPLRLSLLKRPNRRRLPSPVSSSSPPASGPLRRSNPEVARATAATTGRRTSSPPASCPAGCCREKRTAGAASGSAQPAACDEERQARSGVRAAADDHPPPGSGRGSRRSPPARIWRRWPSPTWIRRWWRRAGGLGRWGVSGSGYRDGDSNYGDHDDDDNDDREEGSDNSFRIKVTLWLTAMKCFWVSTGKPEGVLTAEQLKQFEEATTLFVGCILSVLGDRLVEVYMHMTDAKELWDALNTKFGATDASNDLYIMEQFHDYKMADNRSVVEQAHEIQTMAKELELLKCVLPDKFVAGCIIAKLPPSWRSFGTALKHKRQEYSVKGLIASLDVEEKAREKDAASKGDGAQSSANVVHKAQSKSKGKYKAQQTTNFKKQKKNNNNPNQDEKTCFVCGQLGHLARKCPQRKGMKAPVGQTSKSAKSANVTIGNTGDGSGYGNLPTDARGSTVLMGNGSHASVHGVGTVYLKFTSGKIVQLKNMQHVPSIDRNLVSGSRLTRDGFKLVFESNKVVISKHRYFIGKGYEYGGLFRFSLSDFGNNSVNHISGSVDDEPNVWHSPSHGLLVYQMDVKTTFLNGELDEEIYMDQPDWFVVEGQEGKVCKLLKSLYGLKQAPKQWHEKFDKTLTSAGFAVNEAGKCVYYSHGGGEGVILCQYVDDILIFGTNLEVINESHYVEKILNCFDYIDSKPSPTPYDPSLLLRKNKRIARNQLEYSQIIGSLMYLASATRPDISFAVSKLSRFTSNPGDDHWRALERVMRYLKGTVELGLHYTGYPAVLEGYSDSNWISDVDEIKATSGYIFTLGGGAVSWRSCKQTILMRSTMEAELTALDTATVEAKWLRDLLMDLPIVEKPSILERTHLCELDCWSQSMEIFDYSIPLTSVHLRSGEQVSGTSTFDVLHRKKATIRFLESALRDCSLFIRDGSSSSLLACCVPS

SEQ ID NO: 19766 - protein, 963 aa, Oryza sativa
  Clone ID: TF_OSC416211j.C1.p4.fg
MVVRIGEEVGSGAGKAVAWPGRRRAMRARPWEEVAARPGEEADTRAAREGEDYSIPLAGVHLRSGEQVSGTSAFDVLHREKAAIRKIRLNHYMPIISTIQKPYYRHCDFTMAGFADALRPDKFTGVHFKRWQIRVTLWLTAMKCFWVSTGKPEGVLTAEQQNILGDRLVEVYMHMTDAKELWDALNTKFGATDASNDLYIMEQFHDYKISNNRSVVEQTHEIQTMAKELELLKCVLPDKFVAGCIIAKLHPSWRSFGTTLKHKRQEYSVKGLIASLDVEEKAREKDAASKGDGGQSSANVVHKAQNKSKGKYKAQQTTNLKKQKKNNNNPNQDEKTCFVCGQLGHLARKCPQHKGKKAPVGQTSKSANVTIGNTGDGSGYGNLPTVFSVNQSTNWWVDTGANVHVCADISLFSSYQVARGSTVLMGNGSHTSVYSVGTVDLKFTSGKIVQLKNVQHVPSIDRNLVSGSRLTRDEFKLVFESNKVVVSKHGNFIGKGYECGGLFRFSLSDFCNNSVNHICGSVDDEANVWHSRLCHSNFGLMSRLSSMCLIPKFSIVKGSKCHSCVQSKQPRKPHKAAEERNLAPLEFLHSDLCEMNGVLTKGGKRYFMTLIDDATRFCYVYLLKTKDEALDYFKIYKAEVENLLDRKIKRLRVPNRNKGKTPYEIWIGRKPSLSYLSTWGCLAKVNVPITKKRKLGPKTVDCVFLGYAYHSIAYRFLIVKSEVPDMHVGTIMESRDATFFESFFPMKDTHSSSSQPSEIIPSSITSPEQTEHTHEHVTEEDDSEAPRRSKRQRTAKSFGDDFTVYLVDDTPKSISEAYASPDADYWKEAIRSEMDSIIANGTWEWVFKKKLRPNGTIEKYKARLVAKGYTQKEGEDFFDTYSPIARLTTICVLLSLAASHGLLVHQMDVKTAFLNGELDEEIYMDQPDGFVVEGQEGKALISEDVVLQSILERTHLCELDCWS

SEQ ID NO: 19767 - protein, 1454 aa, Oryza sativa
  Clone ID: TF_OSC420023j.C1.p3.fg
MSAPTPRVSRSREPHQRRISRSPPHRRGRRRPGEDRELIPVQRVVKEVGGSANYPLLTKTNYGDWALMMKVMLQARGLWDAVEHGDADFQADRMAMEAILRAVPPEMLASLAVKPSAKEAWDAIKTMRVGVDRVRKSKAQMLQKQYDAMEFKDGETVEEFSLRLNGLVTNLATLGVHLEEGKVVEKSLNSVPDHLSQIALSIETLLDLDELTLEEVTGRLRNAEEKLPAKSSAAGGKLFLTEEQWTARWKEKQAAESSSGKAKSGGGNRRRRGGKKKAEAAARDGDRAGRDTQEGREPNRDKCRNCGRTGHWAKDCRQPKRPAEAHQALADEDDDEPALLMAHVVDAALVSASSSSAPPASSPPSQPDKTIELVEPKVFAHLLTEKQTDGGVWHLDTGATNHMTGIREVFAELDLSVRGSVRFGDGSVVGIEGRGKIIFECRNQEHRALTGVYYIPKLNANLISLGQLDENGCDVRIYHGVCTIRDPAAQLLARVRRTRNRLYLIKLTIGQPVCLAAKAQECAWLWHARYGHLHFDALRRLASRHMVRGMRDIDHVEQLCDSCVISKQRRTSFPRRSMFRAKDRLELVHGDLCGPISLATPGGKTHFLLLVDDASRYMWITLLGRKSEAADAIKRFQARAEAESKQKLRILRTDNGGEFTSVEFATYCAEQGVSRHFSAPYSPQQNGVVERRNQTILGMAHSLLKAKNMPARYWGEAVTTAVFLLNRAPTKSLANMTPYEAWHGKKPAVSYLRTFGCLAYVKDVRPHLPKLSDCSKPMVLIGYADGAKAYKVFDPVSGRVQVSRDVIFDEGAGWDWDAAGAAAVPGGGGCSDFTVEYLTTATSPSPLTSAPSSASSGASASRAVTPSSASTPATLASASTPATPTFVSPPPGVDENLDAEQDDCPLRYRSMGDLLGNARTPGFATRDPEKGELHLLAAEEPASFTEAEQRQEWRRAMLDEIASIEENNTWRLVDLPSGHRAIGLKWVFKLKKDAEGRVAKHKARLVAKGYVQQPGIDFEEVFALVARLESVRLLLAQAAQAGWTVHHMDVKSAFLNGELAEEVYVKQPPGFVEEGREHQVLRLDKALYGLRQAPRAWNSKLDATLLSLGFRQNDCEHAVYVRGNTSARLLVGVYVDDLIITGTKEDEIVRFKGEMKALFKMSDLGLLSFYLGIEVEQVAGSIRLSQAAYARRILERAGMLGCNPSATPMEQRLKLSKTSAAAPVNPNWYRGIVGCLRYLVHTRPDIAFSVGYVSRFMEAPTTEHEAAVKRILRYIAGTTEFGCHYHQSSSPVQLVGYSDADMAGDPDTRKSTTGVVFFLGTSPVSWQSVKQKVVALSSCEAEYIAATTAACQGVWLSQLLGEVNQEEPDAFKLLIDNKSAIALSKNPVFHERSKHIATRYHYIRERVGDGSVHVEFVRTEGQIADILTKALGRTRFQELRSRIGVADVKFRCKT

SEQ ID NO: 19768 - protein, 1232 aa, Oryza sativa
  Clone ID: TF_OSC6395j.C1.p2.fg
MWGLHKSYPPPLFLFVSVGRELAAVAGASSNSIHSLLLPFPAASLLAAAVHQPASGGDPGVALERRQRRAREGHSGGGGGDRGRRGRLAVGRKKTSHENGRVLATLGPATALSTAALDALSAGHDAPASAVLPPCPRTRKGRLRLATATHVGILSKMAAFGGGFFCTCGGSVEGSGGRASGSGGSDRGLVIHRVVKEAGGAANYPLLTRTNYNDWSLLMKIKLQARCLWGAIDPGGVELHEDRMALDAICSAVPPEMISTLATKASAKEAWDCIRILRVGDDRIRKASAQKVRMEYESLVLRDGETVEDFAMRLTSTVNQLATLGDPEPADKVVEKYLRVARPRFTQLVLSIETLLDISTLSLEEVTGRLKAAEDAMPLPSSSSDNAGKLYLTEEEWLERHNKKEQEAKKNSGSPSNRGKRRGGKGRNGGGAGVGGAKNTNSGAARREDKCRNCGKYGHWAKDCRSKPKRDEQAHVAQDDEPTLLLLTGGVITHACEQEHAPAPSAPTPSSDPIYLEEKKLFAALDDAAKRDPGRWIVDSGASNHMTGCRTAFSDIDTGITGNVRLGDGSVVRIEGRGTVLFSCKNGEHRTLSNTYLIPRLAANIISVGQLDETGFKVEAEDGVMRIWDEQRRLLARIHRNPGRLYVLDVELARPVCLTARIGDEAWKWHARFGHINFTALRKMGREQLVRGLPAVSQVDQLCEACLAGKHRRTPFPQQAQQRSLEPLQLLHGDLCGPISPPTPSDNRSSSKSIGGKTPYELWNGSPPAVHHLRTFGCLAHVKTTTPNVKKLDDRSKPMIFVGYEPGSKAYRCYDPASRRVHISRDVAFDEEAQWRWDGETASELDFTIEYTTVYHPAVVNAPRADSEQPELPTPSATSTSPCTPAATAGTTATSAEFATPPTIAADDLDADHDDAPLRFRRVDEILGPATPPGLAVREFDDELMMASAEEPASLAEAQQQDCWRQAMLDEMKSIEENGTWLLVDPPPRQRPIGLKWVFKTKKDAAGNITKHKARLVAKGYVQRQGIDYDEVFAPVARLESVRLLLAYAASEGWAVHHMDVKSAFLNGELKEEVYVAQPPGFVVDGKEQKVLRLVKALYGLRQAPRAWYTKLDASLLSLGFHRSASEHAVYMRGANARRLVVGVYVDDLVITGGNHSELDQFKKEMRETFQMSDLGLLRYYLGLEVSQTDEGITLSQGAYAKKILEAAGMVGCNPSQTPMEPRLKLTCLSIT

SEQ ID NO: 19769 - protein, 1618 aa, Oryza sativa
  Clone ID: TF_OSC900286j.C1.p13.fg
MWGLHKSYPPPLFLFVSVGRELAAVAGASSNSIHSLLLPFPAASLLAAAVHQPASGGDPGVALERRQRRAREGQSGGGGGDRGRRGRLAVGRKKTSHENGRVLATLGPATALSTAALDALSAGHDAPASAVLPPCPRTRKGRLRLATATHVGILSKMAAFGGGFFCTCGGSVEGGRSSAGEGGGGTTDGRGQHAEPADNGTVGNKPYTMYLGNLTSGIRARFRAWTRDRALEGVFMPRGRTHSPRRRSASPSVHVSGSGGRASGSGGSDRGLVIHRVVKEAGGAANYPLLTRTNYNDWSLLMKIKLQARCLWGAIDPGGVELHEDRMALDAICSAVPPEMISTLATKASAKEAWDCIRILRVGDDRIRKASAQKVRMEYESLVLRDGETVEDFAMRLTSTVNQLATLGDPEPADKVVEKYLRVARPRFTQLVLSIETLLDISTLSLEEVTGRLKAAEDAMPLPSSSSDNAGKLYLTEEEWLERHNKKEQEAKKNSGSPSNRGKRRGGKGRNGGGAGVGGAKNTNSGAARREDKCRNCGKYGHWAKDCRSKPKRDEQAHVAQDDEPTLLLLTGGVITHACEQEHAPAPSAPTPSSDPIYLEEKKLFAALDDAAKRDPGRWIVDSGASNHMTGCRTAFSDIDTGITGNVRLGDGSVVRIEGRGTVLFSCKNGEHRTLSNTYLIPRLAANIISVGQLDETGFKVEAEDGVMRIWDEQRRLLARIHRNPGRLYVLDVELARPVCLTARIGDEAWKWHARFGHINFTALRKMGREQLVRGLPAVSQVDQLCEACLAGKHRRTPFPQQAQQRSLEPLQLLHGDLCGPISPPTPSDNRYFLLLVDDYSCFMWLSLLPSKDGAAAAIKRIQAAAERKSGKKLRALRTDRGESSWSTTSRITAPSWESDARRRRPTRRNKTASWNVATNRWSGRRGACSKPKGCQTTTPNVKKLDDRSKPMIFVGYEPGSKAYRCYDPASRRVHISRDVAFDEEAQWRWDGETASELDFTIEYTTVYHPAVVNAPRADSEQPELPTPSATSTSPCTPAATAGTTATSAEFATPPTIAADDLDADHDDAPLRFRRVDEILGPATPPGLAVREFDDELMMASAEEPASLAEAQQQDCWRQAMLDEMKSIEENGTWLLVDPPPRQRPIGLKWVFKTKKDAAGNITKHKARLVAKGYVQRQGIDYDEVFAPVARLESVRLLLAYAASEGWAVHHMDVKSAFLNGELKEEVYVAQPPGFVVDGKEQKVLRLVKALYGLRQAPRAWYTKLDASLLSLGFHRSASEHAVYMRGANARRLVVGVYVDDLVITGGNHSELDQFKKEMRETFQMSDLGLLRYYLGLEVSQTDEGITLSQGAYAKKILEAAGMVGCNPSQTPMEPRLKLSKLSTSPCVDATDYRKIVGSLRYLVNSRPDLAFSVGYVSRFMEKPTTEHLAAVKRVLRYVAGTINRGCSYRRKKGAVHLVGFSDSDLAGDVDTRKSTTGVFFFLGDNLITWQSQKQKVVALSSCEAEYIAATTAACQGVWLARLLAELKGEEADAVTLNVDNQSAIQLSKNPVFHDRSKHIETRYHYIRECIEEDRVKIEFVSTNDQLADILTKSLGRDRFNELCTRIGLVEVKGTCKV

SEQ ID NO: 19770 - protein, 1286 aa, Oryza sativa
  Clone ID: TF_OSC400275j.C1.p2.fg
MASTGENRGDNINGGNTTTSKSSGGTFSGYIFILPILLDVSLLILFAMAALRYYVNVDAYFILSMLKLYTSSTVTRFTHIANVMFIVLIFWIKICRIITKFPTIQKLDRSFLVVSFAASLKPHAFDGSNYKKWKARALLWLTVMQCFFVSRGKPSEPPLFPEEEAKFEATDCLFRGALISVLADSIVDVYMHMPSGKDMWDALEAKFGVSDVDSELYVMEQFYDYKMVDDCSVVGQAHENQMLAKELENNNCELPDKFVAGGIIAKLPPSWTDFATSLKHKRQEFSVTDLIGSLSVEEKARAQDNRGKKIEGGSSANLVQKKNPHASHNNNKKVKPDVKPKATTNFKKKGKGKAKGDCFVCGKPGHWAKDCPERKDKKSANMVISEGGGTLGYGKFLPTVLSVCHSLDWWVDTGANIHVFADISLFSSYQVGRGSSLLMGNGSLVAVHGVGTVDLKFTSGKIVQLKNVQHVPSIKKNLVSGSLLCRDGFRLVFESNKCVVSKYGTFIGKGYDSGGLFRFSLDDMCNKVVNHVSDDDDESNVWHSQLCHVNFGCMTRLANMSLIPKFTLVKGSKCHTCVQTKQPRKPHKSSEARKLAPLEIVHSNLCEMNGVLTKGGKKYFMTLIDDCTRFCYVYLLKTKDEVLHYFKIYKAEVENQLERKIKRLRSDRGGEYFSNEFTSFCKEYGIIHERTHSYSPQSNGVAERKNRTLTEMVNAMLDTAGLSKEWWGEAILTACHVLNRIPTKHKEVTSFEEWERKKLNLSHLRTWGCLAKRCHIFENEFPMKNAPSTSSQEPILSPEHFVLIEHIDQTLEENSEENNIVATRKSKRQRTAKSFGDDYIVYLVDDTPRTIEEAYSSPDVDYWKEAVRSEMDSIMSNGTWEVIECPYGCKPVGCKWVFKKKLRPDASHGLLVHQMDVKTAFLNGELEEEIYMDQPDGYVLEGQEGMVCKLLKSLYGLKQAPKQWYEKFDNTLTSTGFVVNEADKCVYYRNGGGEGVILCLYVNDILIFGTSLNVIEEVKDFLSKSFEKKDLGVADVILNIKLLRGDEGRITLVQSHYVDKVLSRFGYSDCKAAPTPYDPSVLLRKNRRIARDQLRYSQIIGSLMYLASATRPDISFAVSKLSRFVSNPGDDHWHALERVMRYLKGTMSYGIHYAGYPKVLEGYSDSNWISDADEIKATSGYVFTLGGGAVSWKSCKQIILTRSTMETELTALDTATVEAEWLRELLMDLPVVEKPIPAILMNCDNQTVIIKVNSSKDNMKSSRHVKRRLKSVRKQKNSRVIALDYV

SEQ ID NO: 19771 - protein, 690 aa, Oryza sativa
  Clone ID: TF_OSC400888j.C1.p10.gm
MEDVAEVDLADPNPDILLLRNSVRLRTCTGRRAIKFLFTCAHSASSATAPVLRDYYYCIDAFVNMSTEIGDKEEEDKFEATDYLFREALISVLANNIVDVYMHIPSGKDMWGVLEAKFEAHEIQMLIKELENNHCELPDKFVAGGIIAKLPPSWSDFATSLKHKRQEFSVTDLIGSLGIEEKARAKDNRGKKIEGGSSANLVQKNNPHASHNNNKKVKPDVKPKATTNFKKKGKGKAKGDCFVCGKPGHWAKDCPERKDKKSANMVISEEGGTLGYASHGLLIHQMDVKTAFLNGELEEEIYMDQPDGYVLESQEGMVCKLLKSLYGLKQAPKQWHEKFDNTLTSAGFVVNEADKCVYYRCGGGEGVILCLYVDDILIFGTSLNVIEEVKDFLSKSFEMTDLRVADVILNIKLLRGDEGGITLVQSHYVDKVLSRFGYSDCKAAPTPYDPRTMSYGIHYAGYPKVLEGYSDSNWISDADEIKATSGYVFTLGESFPGSVHLRAQVYGTSRCLRNSVRLRTCTGRRAIKFLGSASSATAPVLRDYYYCIDAFVNMSMEIGDKEVNDINGGNTASKSSGGTFLGEILLSGRKFTWANSMPSPTYKNAASASARAPPSLPRVQPSAAAAPVTAVAPEGHRQVRKVATVLIPSSVSAKDCRSAAAIDDPKTAAASTSLPSSSKPPVSCRVALYA

SEQ ID NO: 19772 - protein, 939 aa, Oryza sativa
  Clone ID: TF_OSC400977j.C1.p5.fg
MSTEIGDKMMNDINGGNTASKSGGGTFSGYTFILPILLDVSLLILFAMAALRYYVNVDAYLILSILKLYTSSTVTRSTHIAIVMFIVLIFWIKICRIVTKFPTIQKLDRSFSVVGFAASLKPHAFDGSNYKRWKARALLWLTVMHCFFVSRGKPSEPPFSPEEEAKFEATDCLFHGALISVLADNIVDVYMHIPSGKDMWDALEAKFGVSDAGSELYVMERFYDYKMVDDRSVVEQAHEIQMLVKELENNNCELPDKFVAGGIIAKLPPSWSDFATPLKHKKQEFSVADLISSLGIEEKARAKDNRGKKIEGGSSANLVQKKNPHASHNNKKKVKPDVKPKATTNFKKKGKGKAKGDCFVCGKPGHWAKDCPERKDKKSANMVISEGEETLGYGKFLPIVLSVCHSPDWWVDTGANIHECADISLFSSYQVGRGSSLLMGNGSLAAVHGVGTVDLKFTSGKIVQLKNVQHVPSIKKNLVSGSLLCRDGFRLVFESNKCVVSKYGMFIGKGYDSGGGKKYFMTLIDDCTRFCYVYLLKTKNEALHYFKIHKAEVENQLVNVPIAKKRKLGPKIVDCVFLGYAIHSMGYRFLIVNSGVPDMRVGTITESRDATFFENEFPMKNAPSTSSQEPILSPEHFVPIEHIDQTLEENPEEDNIVATRKSKRQRTAKSFGDDYIVYLVDDTPRTIEEAYSSPDADYWKEAIRSEMDSMSNGIWEVVERPYGCKPIGCKWVFKKKLRPDASHGLLIHQMDVKTAFLNGELEEEIYMDQPDGYVLKGQEGMVCKLLKSLYGFKQAPKQCHEKFDNTLTFAGFVVNEADKCVYYRYGGGEGVILCLYVDDILIFGTSLNVIEEVKDFLSKSFEMKDLGVANVILNIKLLRGDEGGITLVQSHYVDKVLSRFGYSDCKAAPTPYDPSVLLRKNRRIVRDQLRYSQIIGSLM

SEQ ID NO: 19773 - protein, 495 aa, Oryza sativa
  Clone ID: TF_OSC401614j.C1.p8.gm
MVKQFVSNALVATRRALTEGMVYRTSRYLRNSVRLRTCTGRRAIKFLGSASSATALVLRGYCCCISAVTKMSTEIGDKKMNDINGGNTASKSSNGTFSGVLADNIVDVYMHIPSGKDMWDALEAKFRVSDAGSELYVMEQFYDYKMVDDRSAVEQAHEIQMLVKELENNNCELPDKFVAGGIIAKLPPSWSDFATSLKHKRQEFSVTDLIGSLGIEEKARAKDNRGKKIEGGSSANLVQKKNPHASHNNNKKVKPDVKPKATTNFKKKGKGKAKGDCFVCGKPGHWAKDCPERKDKKSTNMVISEGGGTLGYVVERPYGCKPIGCKWVFKKKLRPDGTIEKYKARLVAKVSHGLLVHQMDVKTAFLNGELEEEIYMDQPDGYVLEGQEGMVCKLLKSLYGLKQAPKQWHEKFDNTLTSAGFVVNEADKCVYYRYGGGEGVILCLYVDDILIFGTSLNVIEEVKDFLSKSFEMMDLGVADVILNIKLLRVTMWTRS

SEQ ID NO: 19774 - protein, 1319 aa, Oryza sativa
  unsure (1)..(1319): unsure at all Xaa locations
  Clone ID: TF_OSC401949j.C1.p16.np
DNTNGGSSASQSSGGTFTGSFSVVDFAATLKPHAFDGSNYKRWKARALLWLTAMQCFYVSRGKRSEPPLSPEEEVKFEASDCLFRGALISVLADNIVDVYMHMPSGKDMWDALEAKFGVFDTGSELYVMEQFYDYKMVDDRSVVEQAHEIQMLAKELENNNCELPDKFVAGGIIAKLPPSWSDFATSLKHKRQEFSVIDLIGSLGVEEKARAKDIWGKKVXGGSSANMVQKKNPHASHNNKKVKHDVKPKATTNFKKKGKGKAKGDCFVCGKPGHWAKDCPEHKDRKSANMVISEGGGTSGYGKILPTVLSVFHSPDWWVDTGANIHVCADIFLFSSYQVGRGSSLLMGNGSLAAVHGVSMVDLKFTSGKTVQLKNVQHVPSIKKNLVSGSLLCREGFKLVFESNKCVVSKYGTFIGKGYDSGGLFRFSLDDMCNNNNVVNHINENDESNVWHSRLCHVNFGCMTRLANMSLNPKFTLVKGSKCHTCVQSKQPRKPHKASEARNAPLELVHSDLCEMNGVLTKGGKKYFMTLIDDCTRFCYVYLLKTKDEALHYFKTYKAEVEKQLKRKIKRLRSDRDGEYFSNEFTSFCEEFGIIHERMPPYSPQSNGVAERKNRTLTEMVNAMLDTTGLSKEWWGETVLTACHVLNKIPMKHKEVTPFEEXERKKLNLSYLRTWGCLAKVNVPIAKKRKLGPNTVDCVFLGYAIHNVGYRFLIVNSGVPDMRVGTIIESRDATFFENEFPMKTPSTSSQETVIPHEHFAPIEHNDQTPEGNLEEDNIVDTRKSKRQRVAKSFGDDYIIXLMDDTPKTIEEAYLSPDADYWKEAIRSEMDSIMSNGTXEVVERPYGCKLVGCKWVFKKKLRLDGTIEKYKARLVAKGYTQKEGDDFFDTYSPVARLTTIRVLLVLAASYGLLVHQMGVKTAFLNGELEEEIYMDQPDGYVLEGQEGMVCKLLKSLYGLKQAPKQWHEKFDTTLTSAGFVVNEADKCVYYRYGEGEGVILCLYVDDILIFGTSLNVIEEVKDFLSKSFEIKDLGEADVILNIKLLRXDEGGITLVQSHYVDKVLSRFGYSDCKPAPTPYDPSVLLRKNRRIARDQLRYSQIIGSLMYLASATRPDISFAVSKLSRFVSNPGDDHWQALERVMRYLKGTMSYGIHYTGYPKVLEGYSDSNWISGADEIKTTSGYVFTLGGGAVSWKSCKQTILTRSTMEAELTTPDTATVEAEWLRELLMDLPVVEKPVPAILMNCDNQTVIIKVNSSKDNMKSSRHIKRRLKSVRKQKNSGVIALDYVQTAKNLADQFTKGLPRNVIDSASREMGLIPT

SEQ ID NO: 19775 - protein, 1045 aa, Oryza sativa
  Clone ID: TF_OSC413551j.C1.p1.fg
MLAKELENNNCELPDKFVAGGIIAKLPPSWTDFATSLKHKRQEFSVTDLIGSLSVEEKARAQDNRGKKIEGGSSANLVQKKNPHASHNNNKKVKPDVKPKATTNFKKKGKGKAKGDCFVCGKPGHWAKDCPERKDKKSANMVISEGGGTLGYGKFLPTVLSVCHSLDWWVDTGANIHVFADISLFSSYQVGRGSSLLMGNGSLVAVHGVGTVDLKFTSGKIVQLKNVQHVPSIKKNLVSGSLLCRDGFRLVFESNKCVVSKYGTFIGKGYDSGGLFRFSLDDMCNKVVNHVSDDDDESNVWHSQLCHVNFGCMTRLANMSLIPKFTLVKGSKCHTCVQTKQPRKPHKSSEARKLAPLEIVHSNLCEMNGVLTKGGKKYFMTLIDDCTRFCYVYLLKTKDEVLHYFKIYKAEVENQLERKIKRLRSDRGGEYFSNEFTSFCKEYGIIHERTHSYSPQSNGVAERKNRTLTEMVNAMLDTAGLSKEWWGEAILTACHVLNRIPTKHKEVTSFEEWERKKLNLSHLRTWGCLAKRCHIFENEFPMKNAPSTSSQEPILSPEHFVLIEHIDQTLEENSEENNIVATRKSKRQRTAKSFGDDYIVYLVDDTPRTIEEAYSSPDVDYWKEAVRSEMDSIMSNGTWEVIECPYGCKPVGCKWVFKKKLRPDASHGLLVHQMDVKTAFLNGELEEEIYMDQPDGYVLEGQEGMVCKLLKSLYGLKQAPKQWYEKFDNTLTSTGFVVNEADKCVYYRNGGGEGVILCLYVNDILIFGTSLNVIEEVKDFLSKSFEKKDLGVADVILNIKLLRGDEGRITLVQSHYVDKVLSRFGYSDCKAAPTPYDPSVLLRKNRRIARDQLRYSQIIGSLMYLASATRPDISFAVSKLSRFVSNPGDDHWHALERVMRYLKGTMSYGIHYAGYPKVLEGYSDSNWISDADEIKATSGYVFTLGGGAVSWKSCKQIILTRSTMETELTALDTATVEAEWLRELLMDLPVVEKPIPAILMNCDNQTVIIKVNSSKDNMKSSRHVKRRLKSVRKQKNSRVIALDYV

SEQ ID NO: 19776 - protein, 1187 aa, Oryza sativa
  Clone ID: TF_OSC421667j.C1.p33.gm
MDTYPFSNVEIDNSGFHVCDLIYSFRPSPRESFPGSVHLRAQVYGTSRCLRNSVRLRTCTGRRAIKFFGSASSATALVLRGYCCCIGAFTKMSTEIGDNKMNDINGGNTASNPAMGRSRGKDMWDALEVKFGVSDAGSELYVMEQFYDYKMVDYRSVVEQAYEIQMLVKELENNNCELPDKFVAGGIIAKLPPSWSDFATSLKHKRQKFSVTDLIGSLGIEEKVRAKDNQGKKIEGGSSANLVQKKNTHASHNNNKKVKPDIKSKATTNFKKKGKGKAKGDCFVCGKPGHWAKDCPERKDKKSANMVISEGGGTLCVGHRFLIVNSGVPDMRVGTITEFRDATFFENEFPVKNAHSTSSQEPILSPEHFMPIEHIDQTLEENPEEDNIVATRKSKRQRTAKSFGDDYIVYLVDDTPRTIEEAYSSPDVTIGKERSGCKWVFKKKLRPDGTIEKYKMDVKTAFLNGELEEEIYMDQPDGYVLEGQEGMVCKLLKSLYGLKQAPKQWHEKFDNTLTSVGFVVKEADKCVYYRYGGGEGVILCLYVDDILIFGNSLNVIEEVKDFLSKSFKMKDLGVADVILNIKLLRGDEGEITLVQSHYVDKVLSRFGYSDCKAAPTPYDPSVLLRKNRRIARDQLRYSQIIGSLMYLASATRPDISFAVSKLSQFVSNPGDDHWHALERVIHYLKGTMSYGIHYAGYPKVLEGYSDSNWISDADKIKATRGYVFTLGGGAVSWKSCKQTILTRSTMEAELTALDTATVEAERLRELLMDLLVVEKPVPAILMNCDNQTVIIKVNSSKDNMKSSRHVKRRLKSVSKQKNSGVIALDYVQTAKNLADQFTKGLPRNAGDQVFGSASSATALVLRGYCCCIGAFTKMSTEIGDKKMNDINGGNTASKSSDGTFSGSSSSNANTLAYMAEGTYKTNLLNLAKDLIANVTKTGSHSAAGATAGTTGPDIVYGAVLCRGDSTNCSSRLQRVLDTASISNNGSTSSESDSQSQSHKSTVTLYDHEFQALLSFSDTDFISSFSNAPACIVSNYLNPAVPQRDADRTRFSELFSELMERISDAMVSSRASYLTGKGKGWFDGQESQPVVYGLAQCMDGMPPERCRSCLGGITDQGKEMVSNGLTEGMVLGVRCSLWYHYQTDGEFFAGEPGVLAFLNMPSSRDESKFGLWATIGSFFLMKQDLNYD

SEQ ID NO: 19777 - protein, 1020 aa, Oryza sativa
  Clone ID: TF_OSC900407j.C1.p4.gm
MDTYPFSNVEIDNSGFHVCDLIYSFRPSPRESFPGSVHLRAQVYGTSRCLRNSVRLRTCTGRRAIKFFGSASSATALVLRGYCCCIGAFTKMSTEIGDNKMNDINGGNTASNPAMGRSRGKDMWDALEVKFGVSDAGSELYVMEQFYDYKMVDYRSVVEQAYEIQMLVKELENNNCELPDKFVAGGIIAKLPPSWSDFATSLKHKRQKFSVTDLIGSLGIEEKVRAKDNQGKKIEGGSSANLVQKKNTHASHNNNKKVKPDIKSKATTNFKKKGKGKAKGDCFVCGKPGHWAKDCPERKDKKSANMVISEGGGTLWPDGTIEKYKMDVKTAFLNGELEEEIYMDQPDGYVLEGQEGMVCKLLKSLYGLKQAPKQWHEKFDNTLTSVGFVVKEADKCVYYRYGGGEGVILCLYVDDILIFGNSLNVIEEVKDFLSKSFKMKDLGVADVILNIKLLRGDEGEITLVQSHYVDKVLSRFGYSDCKAAPTPYDPSVLLRKNRRIARDQLRYSQIIGSLMYLASATRPDISFAVSKLSQFVSNPGDDHWHALERVIHYLKGTMSYGIHYAGYPKVLEGYSDSNWISDADKIKATRGYVFTLGGGAVSWKSCKQTILTRSTMEAELTALDTATVEAERLRELLMDLLAGDQVFGSASSATALVLRGYCCCIGAFTKMSTEIGDKKMNDINGGNTASKSSGGTFSSSSSSNANTLAYMAEGTYKTNLLNLAKDLIANVTKTGSHSAAGATAGTTGPDIVYGAVLCRGDSTNCSSRLQRVLDTASISNNGSTSSESDSQSQSHKSTVTLYDHEFQALLSFSDTDFISSFSNAPACIVSNYLNPAVPQRDADRTRFSELFSELMERISDAMVSSRASYLTGKGKGWFDGQESQPVVYGLAQCMDGMPPERCRSCLGGITDQGKEMVSNGLTEGMVLGVRCSLWYHYQTDGEFFAGEPGVLAFLNMPSSRDAAASPTAALDATVAYRPLGGRFLKIALSEGGENDVADGRSLSGDGRQRNLQGGPLAALR

SEQ ID NO: 19778 - protein, 638 aa, Oryza sativa
  unsure (1)..(638): unsure at all Xaa locations
  Clone ID: TF_OSC412814j.C1.p3.np
PFSKKRFGEEVLGSGLFFPGLFPLSPQSLXQMFNREKGKNVSGYASSNSSFQLNPPLASRELTRAHPWSIPSMLLSPQLPLVGSQDQNQYVFDRAFATQVDELPIPEEDVPFCHDCREQGHYALNCPWVYAKEAPSLGLTVQTSLNQPLRTKSSLQPSVQSREPNEENPLNPGNCFPPSPSYHVGSRTKQAKGKKSKNQRRKAPMRTEEEVRKMTITSTEWPPPGMTKRQRRNTFRGAPQLTEHLLANGGRVSDSEDSDQVSSDDEDQKSPQGFNQNKMERKACSRCGEIGHVASSCATTCVHCEEDHPPDRCPMSRITCFFCQGTDHVPKDCQFSFLLTKRMASQPASSNGEQHQGNTNPRQDYSFSLTSVPGQRNQNEERKCRVREDICCFNCQGMGHFADKWPKPRNIAAGTSVHATPCNQKLAPQRIVIHASRSSPIAPVATAPTPASTLPQGVNAQFQPQPPVDKTAALYLWMFQHSSQKKNQVQDEEPEQDHPPGECPTRKITCFLCEGTNHVPKDCQLSVLLTKTAEIQRTTLRLSHQLVSSNSNIDDIIHSTNAPPAAPDSAINHSNNTFSTNHSLRRQPQQRIVVDGRSCFSPRPTPGRAKGNQPPEGDTKQKTVLRFKQQSDGSFSCE

SEQ ID NO: 19779 - protein, 453 aa, Oryza sativa
  Clone ID: TF_OSC23512j.C1.p3.fg
MADNEKGNKVRSQDIGTSSSRVNEAQDTSCAAVVQHLINQNKLLIEILQQHRMPILNPSQMQPQVQLEAVQALTPQVSAPPTSQKAPHAMPHVDPKEASIICFMCDEQGHYARNCPQQKRKAPMRTEGEVRKMIITSTEWPPPGMTRRQRRNTFRGAPQLTEHLLANGGRVSDSEDSDQVSSEDEDEKSPQGFNQDKMERKACSRCGEIGHVASSCASTCVHCEEDHPPDRCPTSRITCFFCEGTDHVPKDCQFSFLLTKKMANQPAGFNGEKHQGNTNPRQDYSFSLTPVPGQRNQNEKRKCRVREDICCFNCQGMGHFADKCPKPRNIAAGTSVHATPCNQKLAPQRMVIHASRSSPIARVATAPIPMSALPQGVNAQFQPQPPADKTDASICVVPLEAPIQQLRNQVQDEEPELEKGITPKTVPDLHIFANLHEADIPIVLWSLEQTPYP

SEQ ID NO: 19780 - protein, 736 aa, Oryza sativa
  unsure (1)..(736): unsure at all Xaa locations
  Clone ID: TF_OSC400750j.C1.p67.np
SITKPHHALAPPPPRIAPHPAVPARIKERGITPRDSLSRFPRFPLSLSLGSVRIHPVILAGDIYGARDPRAFPSSPAAFSPSRCYIIAPRAPLFRFRRSPLALAVGSVLAPCSSLSAVAADLRLAADVAPVLLPARRHLPRHRRIAVDLVRASVSLADRRSAAVIVIPSRAAVSLRSVRRSRRRRCPGVSRGPPLRFPLPSSLSGAAPPRRWSPAATIGARVRRSRRPCRRGRLRARPRGCQVGPAVSRPRPRVRLTRGTHGADRRQPRAPGPPWTERLTRGPLPWTRANEGYTSCGPMADNEKGNKVRSQDIGTSSSRVNEAPDTSCVAVVQHLINQNQLLIEILQQHRMPILNPSQMQPQVQLEAVQALTPQVSAPPTSQKAPHAMPHVDPKEASIICFMCDEQGHYARNCPQQKRKAPMRTEDEVRKMIITSTEWPPPGMTEHQRRNSFRGAQQLTEHLLANGGRVSDSEDSDQVSSDDEDKIELKACSRCGEIGHKIELKACSRCGEIGHVASSCASTCVHCEEDHPPDRCPTSRITCFFCEGTDHVPKDCQFSFLLTKKMANQPASSNGEKHQGNTNPRQDSSFSLTPVPGXRKQNEKRKCRVREDICCFNCQGMGHFADKCPKPRNVAASTSVHANPRNQKLAPQRIVIHASRSSPITRVATAPIPMSALPQGVNAQFQPQQRIVVDGRSCVSPRPTPGRAKGNQPPEGDTKQKTVIRFNQQSEGSFSCE

SEQ ID NO: 19781 - protein, 575 aa, Oryza sativa
  unsure (1)..(575): unsure at all Xaa locations
  Clone ID: TF_OSC400773j.C1.p15.np
MADNEKGNKVRSQDIGTSSSRVNEAPDTSCVAVVQHLINQNQLLIEILQQHRMPILNPSQMQPQVQLEAVQALTPQVSAPPTSQKAPHAMPHVDPKEASIICFMCDEQGHYARNCPQQKRKAPMRTEDEVRKMIITSTEWPPPGMTEHQRRNSFRGAQQLTEHLLANGGRVSDSEDSDQVSSDDEGAKPPQGFNQNKIELKACSRCGEIGHVASSCASTCVHCEEDHPPDRCPTSRITCFFCEGTDHVPKDCQFSFLLTKKMANQPASSNGEKHQGNTNPRQDSSFSLTPVPGXRKQNEKRKCRVREDICCFNCQGMGHFADKCPKPRNVAASTSVHANPRNQKLAPQRIVIHASRSSPITRVATAPIPMSALPQGVNAQFQPQPPADKTEASICVVPLEVPIQQLRNQVQDEEPEKKGITPKTVPNQGKIDKKGITPKTVPNQGKIDLHITANLHEADIPIVLWSLEQTPYQGVKSSTRYQMLHGVKSASTSYQVDSKEMNYAKLWNXSPIFMPQPSRSQKGSTRDKSGEEKIPSATGDRAKQSRVEKLCYKFVIKTERKKSDKKRRPPNLSSC

SEQ ID NO: 19782 - protein, 543 aa, Oryza sativa
  Clone ID: TF_OSC421503j.C1.p4.fg
MADNEKGNKVRSQDIGTSSSRVNEAPDTSCVAVVQHLINQNKLLIEILQQHRMPILNPSQMQPQVQLEAVQALTPQVSAPPTSQKAPHAMPHVDPKEASIICFMCDEQGHYARNCPQQKRKAPMRTEDEVRKMIITSTEWPPPGMTKHQRRNSFRGAQQLTEHLLANGGRVSGSEDSDQVSSDDEDEKSPQGFNQNKIELKACSRCGEIGHVASSCASTCVHCEEDHPPDRCPTSRITCFFCEGTDHVPKDCQFSFLLTKKMANQPASSNGEKHQGNTNPRQDHRFSLTPVPGQRNRNEKRKCRVREDICCFNCQGMGHFADKCPKPRNIAAGTSVHATPCNQKLAPQRIVIHASRSSPITRVATAPIPMSALPQGVNAQFQPQPPADKTEASICVVPLEVPIQQLRNQVQDEEPELKKGITPKTVPNQGKIDLHITANLHEADIPIVLWSLEQTPYPGNLSEVDSEDMNHEKFWDGSITALPQPSLSQPKGAPWSKSGEEKIPSATGGQAKQFRVVKFCWKFVKTQRKKSDKKRRPPNLSSC

SEQ ID NO: 19783 - protein, 427 aa, Oryza sativa
  Clone ID: TF_OSC900156j.C1.p3.fg
MADNEKGNKVRSQDIGTSSSRVNEAPDTSCVTLVQHLVNQNRLLIEILQQHQTPILNLSQIQPQVQLEAVQALTPQVSAPPTSQKAPHAMPHVDPKEASIICFMCDEQGHYARNCPQQKRKAPMRTEDEVRKMIITSTEWPPPGMTRRQRRNTFRGATQLTEHLLANGGRVSGSEDSDQVSSDDEDEKSPQGFNQNKIELKACSRCGEIGHVASSCASTCVHCEEDHPPDRCPTSRITCFFCEGTDHVPKDCQFSFLLTKKMANQPASSNGEKHQGNTNPRQDYSFSLTPVPGQRNRNEKRKCRVREDICCFNCQGMGHFADKCPKPRNIAASTSVHATPCNQKLAPQRIVIHASRSSPIARVATAPTPASALPQGVNAQFQPQPSVDKTEASIGIVPLDVPAQQPRNQVQDEEPKRKKVIYNGSTC

SEQ ID NO: 19784 - protein, 742 aa, Oryza sativa
  Clone ID: TF_OSC29453j.C1.p1.fg
MADNEKGNKVRSQDIGTSSSRVNEAPDTSCVAVVQHLINQNKLLIEILQQHRMPILNPSRMQPQVQLEAVQALTPQVSAPPTSQKAPHAMPHVDPKEASIICFMCDEQGHYARNCPQQKRKAPMRTEDEVRKMIITSTEWPPPGMTRRQRRNTFRGAPQLTEHLLANGGRVSDSEDSDQVSSDDEDEMERKACSRCGEIGHVASSCATICVHCEEDHPPDRCPTSRITCFFCEGTDHVPKDCQFSFLLTKKMANQPASSNGEKHQGNTNPRQDYSSSLTPVPGQRNRNEKRKCRVREDICCFNCQGMGHFADKCPKPRNIAAGTTVHATPCNQKLAPQRIVIHASRSSPIARVATAPIPMNALPQGVNAQFQPQPPADKTEASICVVPLEVPIQQLRNQVQDEEPECKKVIVCYNCSEEGHYSENCPQPRQNRPPHYRQFTRSRHSNRIVVTGANAVPVRIYLQTVKKIQEDINILEHNSRWLVISRSGIRKRSKVIWQKNNMDAPHLEEALNPSGIDTDSKQCISLKAASQRTSSSPEASAIHIKEYHLLEISRKMIDKKRLAKMFSSMKEVGRKVIDKQKHALHRSRKTPDCNCPATVTLSLSQQDDLGKSVSMKAKSEIFHSVSDATRSEKCKHRLPGDATSWEMIQRERTHQVDNLSEVDSEDMNHEKFWNGSITELPQPSLSQPKGAPWSKSGEEKIPSATGGQAKQFRVVKFCWKFVKTQRKKSDKKRRPPNLSSC

SEQ ID NO: 19785 - protein, 1719 aa, Oryza sativa
  unsure (1)..(1719): unsure at all Xaa locations
  Clone ID: TF_OSC1646j.C1.p1.np
PFTLIFXTLCKLIQKVVLLIGXMSXLPPFTCLXMPRYKPEYLFGVEGFVQELRTMSFVIGFGTAPFYAQIPHDRHEEKCRVKVTLNSNSEDIPSVMFEAGGRNYIHVCQEVARITIGELRDRYSDQLADTEYRYHPRQPQGSDRGSYLETEGIENDATTRHLVEMLWAMDETRAETVLAAQDREDRNRGKICKLEDKVDRLEKELAALKGEAPPQKARIRLTARKRALFVPRYQLAPKFSPVSLLVPCPCQMVLTRSNGNGPNNNNNNNNGENPTLAQVLAQQTQLMNMMMQQLQNQQNQLNQGNNNAPPPQNKLAEFLRVRPPTFSSTTNPVEAGDWLHAIEKKLDLLQCTDQENVSFASHQLHGPASEWXDHFRLNRTTAEPITWLEFTAAFRKTHIPSGVVSLKKKEFRSLTQGSRSVTEYLHEFNRLARYAPEDVRNDEERQEKFLEGLNDELSYPLMTRDYPDFQKLVDKAIRQEDKYNRMEQKKRRIAQFKTQQGNNQRPRLTLGPQSMPQGGSSSVVHPQRQFFNNNAGNNIRNQAPQPAKKEQGSKLVVCFNCGEPGHYADKCPKPRRVKVVPVQSNSTVPASKARVNHVAAAEAQDAPDVILGTFLVNSVPATVLFDSGATHSFLSMSFAGNHGMEVEDLRRPMMVSTPSNQALSLQRSPSVRIEIKGVPFLANLILLESKDLDVILGMDWLARHKGVIDCANRKVTLTSNGGRVVTVHALSSESLRSRLNQITLEEIPIVREYPDVFPDDLPGMPPKRDIEFRIDLVPGTTPIHKRPYRMAANELAEVKRQVDDLLQKGYIRPSSSPWGAPVIFVEKKDHTQRMCVDYRALNDVTIKNKYPLPRIDDLFDQLKGATVFSKIDLRSGYHQLRIKEEDIPKTAFTTRYGLFECTVMSFGLTNASAFFMNLMNKVFMEYLDKFVVVFIDDILIYSRTKEEHEEHLRLALEKLREHQFYAKFSKCEFWLSEVKFLGHIISAGGVAVDPSNVESVTNWKQPKTVSEIRSFLGFTGYYRRFIDNFFKIAKPMTRLLQKDVKYKWSEECEQSFQELKNRLISAPILILPDPKKGFQVYCDASKLGLGCVLMQDGKVVAYASRQIRPHEKNYPTHDLELAAVVHALKIWRHYLFGTRIEVYTDHKSLKYIFTQPDLNMRQRRWLELIKDYDMGIHYHPGKANVVADALSRKGYCNATEGRQLPLELCKEFERLNLGIVSRGFVAVLEAKPTLIDQVREAQINDPDIQEIKKNMRRGKAIGFLEDEQGTVWLGERICVPDNKDLKDAILKEAHDTLYSIHPGSTKMYQDLKERFWWANMKREIAEYVAVCDVCQRVKAEHQKPADLLXPLKIPEWKWEEIGMDFITGLPRTSSGHDSIWVIVDRLTKVAHFIPVKTTYSGSRLAELYMARIVCLHGVPKKIVSDRGSQFTSNFWKKLQEEMGSKLNFSTAYHPQTDGQTERVNQILEDMLRACALDFGGSWDKNLPYAEFSYNNSYQASLQMAPYEALYGRKCRTPLLWDQTGEHQVFGTDILREAEEKVKIIQERLRVAQSRHKSYADNRRRDLSFEEGDYVYLRVTPIRGVHRFHTKGKLAPRFVGPYKIVSRRGEVAYQLELPQSLAGVHNVFHVSQLKKCLRVPTEEANLEQIEVQEDLTYVERPTRILEIDERKTRNXVIRFCKVQWSNHSEEESTWEREDELKSAHPHLFASSSESRGRDSV

SEQ ID NO: 19786 - protein, 319 aa, Oryza sativa
  Clone ID: TF_OSC1664j.C1.p3.gm
MATVCPCARLPTGMSSVYLVVSECVALAPASETTRCCDVCTDGRAIRFLESVRRDYSLFVNIYFTFTNMSNTGDNGNTGYKEKEAPVNINGGNTASNSNGGPFLGVLADNIVDVYMHMPSGKNMWDALEAKFGVSDAGSELYVMEQFYDYKMVDDRSVVEQAHEIQMLAKELENNNCELPDKFVAGGIIAKFPPSWSDFATSLKHKRQEFSVTDLIGSLGVEEKARAKDNRGKNIEGGSSANLVQNKNPHASHNNNKKKVKPDVKPKATTNFKKKGKGKAKGDCFVCGKPGHWAKNCPDRKDKKSANMVISEGGGTSGY

SEQ ID NO: 19787 - protein, 281 aa, Oryza sativa
  Clone ID: TF_OSC19218j.C1.p1.fg
MQCFYVSQGKRSEPPLSPKEEAKFEASDCLFRGALISVLTDNIVDVYMHMPSGKDMWDALEAKFGVSDAVSELYVMEQFYDYKMMLAKEFENNNCELPDKFVAGGIIAKLPPSWSDFATSLKHKRQEFSVTDLIGSLGVEEKARVKDNRGKNIEGGSSANLVQKKNPHASHNNNNKKVKPDVKPKATTNFKKKGKGKAKGDCFVCGKPGHWAKNCPDRKDKKSANMVISEGGGTSGYGRERFLLVDGKRVACGCSWCWYGRSEVYFGKERAACPFNKEESS

SEQ ID NO: 19788 - protein, 583 aa, Oryza sativa
  Clone ID: TF_OSC31861j.C1.p1.fg
ESQADVNPKATTNFKKKGKGKAKGDCFVCGKPGHWAKNCPDRKDKKSANMVISEGGGTSGYGYFLPTVLSVFHSPDWWVDTGANIHVGRGSSLLMGNRSLAAIHVFDIAVYLLKTKDEALHYFKIYKAEVENQLERKIKRLRSDKGGEYFSNEFTSFCEEFGIIHERTPPYSPQSNGVAERMNRTLTKMVNAMLDTAGLSNEWWGEAIFTACHVLNKIPVKHKEVTPFEEWERKKLNLSYLRTWGCLAKVNVPIAKKRKLGPKTIDCVFLGYAIHSVGYRFLIVNSGVPDMRVGTITESRDAIFFENEFPMKNTPSTSSLEPVLPHEHFAPIKHNEQTLEGNPEEDSIVDTRKSKRQRVAKSFGDDYIVYLVDDTPRTIEEAYSSPDADYWKEAVRIVERPYGCKPVGCKWVFKKKLRPDGTIEKYKARLVAKGYTQKEGEDFFDTYSPVARLTTIRVLLALAASHGLLVHQMDVKTVFLNGELEEEIYMDQPDRYVLKGQEGMVCKLLKSLYGLKQAPKQWHEKFDPTLTSAGFVVNEADKCAYYRYGRGEGVILCLYVDDILIFGTSFNVIEEVKDFLGIL

SEQ ID NO: 19789 - protein, 1596 aa, Oryza sativa
  Clone ID: TF_OSC401054j.C1.p17.fg
MAAKSSHVAASPARLPLPRMPRYKPEYLFGVEGFVQELRTMSFVIGFGTAPFYAQIPHDRHEEKCRVKVTLNSNSEDIPSVMFEAGGRNYIHACQEVARIAIGELRDRYSDQLADTEYRYHPRQPQGSDRGSYLETEGIENDATTRHLVDMLWAMDETRAETVLAAQDREDRNRGKICKLEDKVDRLEKELAALKGEAPPQKARVRLTARKRALFVPRYQLAPKVRVVEKEVTPALADPPVVNMVLTRSNGNGPNNNNNNNNNNGENPTLAQVLAQQAQLMNMMMQQLQNQQNQGNNHAPPQNKLAEFLRVRPPTFSSTTNPVEAGDWLHAIEKKLDLLQCTDQEKVSFASHQLHGPASEWWDHFRLNRTTAEPITWLELTAAFRKTHIPSGVVSLKKKEFRSLTQGSRSVTEYLHEFNRLARYAPEDKLVDKAIRQEDKYNRMEQKKRRIAQFKTQQGNNQRPRLTLGPQSMPQGGSSSVVRPQRQIFNNNAGNNISNQAPRPVAVSTQQQPAKREQGSKPVVCFNCGEPGHYADKCPKPRRVKVVPTQSNSTVPVSKASVNHVAAAEAQGAPDVILGTFLVNLVPATVPFDSGATHSFLSMSFAGNHGMEVEDLRRPLMVSTPSNQALSLQRSPSVRIEIQGVPFLANLILLESKDLDVILGMDWLARHKGVIDCANRKVTLTSDDGRVVTVHALSSESLRSSLNQIILKEIPIVRGYPDVFPDDLPGMPPKRDIEFRIDLVPGTTPIHKRPYRMAANELAEVKRQVDDLLQKGYIRPSSSPWGAPVIFVEKKDHTQRMFVDYRALNDVTIKNKYPLPRIDDLFDQLKGATVFSKIDLRSGYHQLRIKEEDIPKTAFTTRYGLFECTVMSFGLTNAPAFFMNLMNKVFMEYLDKFVVVFIDDILIYSRTKEEHEEHLRLALEKLREHQLYAKFSKCEFWLSEVKFLGHVISAGGVAVDPSNVESVTNWKQPKTVSEIRSFLGLAGYYRRFIENFSKIAKPMTRLLQKDVKYKWSEECEQSFQELKNRLISAPILILPDPKKGFQVYCDASKLGLGCVLMQDGKVVAYASRQLRPHEKNYPTHDLELAAVVHALKIWRHYLFALEAKPTLIDQVREAQINDPDIQKIKKNMRRGKAIGFLEDEQGTVWLGERICVLDNKDLKDAILKEAHDTLYSIHPGSTKMYQDLKERFWWASMKREIAEYVAVCDVCQRVKAEHQKPAGLLQPLKIPEWKWEEIGMDFITGLPRTSSGHDSIWVIVDRLTKVAHFIPVKTTYSGSRLAELYMARIVCLHGVRKKIVSDRGSQFTSNFWKKLQEEMGSKLNFSTAYHPQTDGQTERVNQILEDMLRACTLDFGGSWDKNLPYAEFLYNNSYQASLQMAPYEALYGRKCRTPLLWDQTGERQVFGTDILREAEEKVKIIQERLRVAQSRHKSYADNRRRDLSFEEGDYVYLRVTPLRGVHRFHTKGKLAPRFVGPYKIVSRRGEVAYQLELPQSLAGVHNVFHVSQLKKCLRVPTEEANLEQIEVQEDLTYVEKPIRILETNERRTRNRVIRFCKVNWSNHSEEESTWEREDELKSAHPHLFASSSESRGRDSV

SEQ ID NO: 19790 - protein, 1686 aa, Oryza sativa
  Clone ID: TF_OSC401161j.C1.p43.fg
MHARAAEPPPPVVTSSPTSSSPSPIPSFPESPFSQEKSLKSSKASKATPGLEWYIPGLEIGLCSRDGCSEWLGLYNRMPRYKPEYLFGVEGFVQELRTMSFAIGFGTAPFYAQIPHDRHEEKCRVKVTLNSNSEDIPSVMFEAGGRNYIHTCQEVARIAIGELRDRYSDQLADTEYRYHPRQPQGSDRGSYLETEGIENDATTRHLVEMLWAMDETRAETVLAAQDREDRNRGKICKLEDKVDRLEKELAVLKGEAPPQKARVRLTARKRALFVPRYQLVPKVRVVEKEVTPALADPPVVNMVLTRSNGNGPNSNNNNNNEGNPTLAQVLAQQTQLMNMMMQQLQNQQNQGNNHAPPQNKLAEFLRVRPPIFSSTANPVEAGDWLHAIEKKLDLLQCTDQEKVSFASHQLHGPASEWWDHFRLNRITAEPITWLEFTAAFRKTHIPSGVVSLKKKEFRSLTQGSRSVTEYLHEFNRLARYAPEDKLVDKAIRQEDKYNRMEQKKRRIAHFMTQQGNNQRPRLTLGPQSMPQGGSSSVVRPQRQFFNNNAGNNIRNQAPRPVAALTQQQPAKKEQGSKPVVCFNCGEPGHYADKCPKPRRAKVVPAQSNSTAPASKARVNHVAAAETQGAPDVILAPSIRIEIQGVPFLANLILLESKDLDVILGMDWLARHKGVIDCANRKITLTSNDGRVVTVHALSPEFLRSRLNQITLEEIPIVREYPDVFPDDLPGMPPKRDIEFRIDLVPGTTPIHKRPYRMAANELAEVKRQVDDLLQKGYIRPSSSPWGAPVIFVEKKDHTQRMCVDYRALNDMTIKNKYPLPRIDDLFDQLKGATVFSKIDLRSGYHQLRIKEEDIPKTAFTTRYGLFECTVMSFGLTNAPTFFMNLMNKVFMEYLDKFVVVFIDDILIYSRTKEEHIEHLRLALEKLREHQLYAKFSKCEFWLSEVKFLGHVISAGGVAVDPSNVESVTNWKQPKTVSEIRSFLGLAGYYRRFIENFSKIAKPMTRLLQKDVKYKWSEECEQSFQELKNRLISAPILILPDPKKGFQVYCDASKLGLGCVLMQDGKVVAYASRQLRPHEKNYPTHDLELAAVVHALKIWRHYLFGTRTEVYTDHKSLKYIFTQPDLNMRQRRWLELIKDYDMGIHYHPGKANVVADALSRKGYCNATEGRQLPLELCKEFERLNLGIVSTGFVAALEAKPTLIDQVREAQINNPDIQEIKKNMRRGKAIGFLEDEQGTVWLGERICVPDNKDLKDAILKEAHDTLYSIHPGSTKMYQDLKERFWWASMKREIAEYVAVCDVCQRVKAEHQKPAGLLQPLKIPEWKWEEIGMDFITGLPRTSSGHDSIWVIVDRLTKVAHFIPVKTTYSGSRLAELYMARIVCLHGVPKKIVSDRGSQFTSKFWKKLQEEMGSKLNFSTAYHPQTDGQTERVNQILEDMLRACALDFGGSWDKNLPYAEFSYNNSYQASLQMAPYEALYGRKCRTPLLWDQTGERQVFGTDILREAEEKVKIIQERLRVAQSRHKSYADNRRRDLSFDAGDYVYLRVTPLRGVHRFHTKGKLAPRFVGPYKIISRRGEVAYQLELPQSLAGVHNVFHVSQLKKCLRVPTEEANLEHIEVQEDLTYVERPIHILEIDERRTRNRVIRFCKVQWSNHSEEESTWEREDELKSAHPHLIASASESRGRDSV

SEQ ID NO: 19791 - protein, 225 aa, Oryza sativa
  Clone ID: TF_OSC413091j.C1.p1.fg
MEQLYDYKMVDDRSVVEQAHEIQMLAKELENNNCELPDKFVAGGIIAKLPPFWSDFATSLKHKRQEFSVTNLIGSLGVEEKARAKDNRGKNIEGGSSTNLVQKKNPHASHNNNNKKVKPDVKPKATTNFKKKGKGKAKGDCFVCGKPGHWAKNCPDRKDKKSANMVISESGGTSGYGRERFLLVDGKRVACGCSWCWYGRSEVYFGKDRAAEERAACPFNKEESS

SEQ ID NO: 19792 - protein, 2142 aa, Oryza sativa
  Clone ID: TF_OSC414575j.C1.p1.np
KEICWQQQFHSASSCSISCGSSYGTSATSADVCAPRPQTQLVRQVPRAVQAAGDASRNANVTCYNCGKGHYSPSCPYPKTPAPTFGRGRLNHVTAEEATDAPGVVLGTFLVHSIPLTVLFDSGATHSFMSTLKAKQLDLKTEFLSDAMRIQSPGSTMVTKLLCKGVELIIDGVKFKANLILLDTLGLNVILGMDWLTKHEGTIDCAHRTVTLRSTDGQFVGLPLNKPPLQINPLQSLSIPELKSVPIVNEYSDVFPDELPGMPPDRDIEFVIDLIPGTAPIAKRPYRMTSENLMELKKQLNEQLAKGFIRPSSSPWGCPVLFVPKKDGTMRMCVDYRPLNEVTIKNKYPLPRIDDLFDQLTGTRVFSKIDLRLGYFQLKIRPEDIPKTAFTTRYGLFEYTVVSFGLTIAPASFMNMMNKIFMEYLDKFVVVFIDDILIYSKSEEEHAQHLRMVLDKLREHQLYAKFSKCEFWLKEVEFLGHVLSEGGIAVNPRNVQNVLNWKQPQNVPEIRSFLGLAGYYRRFIENFSKIARPLTQLLKKENKFIWSEACETSFHELKRRLTTAPVLVMPDVLKPFNVYCDASHHGLGCVLMQEGKVVAYASRQLRPHEINYPTHDLELAAVVHALKIWRHYLVSNRCEIFTDHKSLKYFFTQPDLNLRQRRWLELIKDYDLGIHYHPGKANVVADALSRKLHHLAVIETINQPSLSSEFQKLNLGLVEDGYVAALALQPTLYSQIKAAQSIDEEVAEIMKEINSKPQSIYTLNSDGMVMLGKRIFVPNNQHLRETILDEAHQTPLSIHPGCTKMYQDIRTQYWWPSLRRDIAAYVAICDVCQRVKAEHQRPAGLLQPLQVPEWKFDEVGMDFITGLPKTPNHVTYGGAHVTYGGAKLAELYLTHIVRLHGVPKVIVSDRGTQFTSRFWKNLHELLGTKLFLSTAFHPQTGGQVERTNQILEDMLRACVLEHNTNWEKCLSFAEFSYNNSFQSSIQMSPFEALYGRNCRTPLYWSEVGERQFFGPAIINEAEKNVTLIRDRLKEAQTRQKSYSDRRRRELSFDVGDHVYLKVSPMRGTQRFQIHGKLAPRYIGPYQIISKRGQVAYQLELPFQLSNIHDVFHVSQLKKCLRTPIEHTSLEDINLKPNLSYQEYPILNSHATRVSTRRARERASSSCPSPPATILNPTGRFEEEALPHILWLMLQHLGYDHPPEYHFFSHERSSSLEHIWLSCVYRDFDEPPLYFQACGWDAPSAMQEAALQAIYYRHYRPGLDGFFHFFPARANQSSANYYPGLEGNMREIDTPGLFLAGLVRAMDRYLAKTMVVMLDRRIEPLGHQGHFDNAIIYGNHEAKTMVVMLDRRIEPLGHQGHFDNAIIYGNHELQPLTETLPPPMGIYHNTAHVLLYFECRMTHTHSMAALTDDANGEGASQPRTGPYSSGRAGGSRRAATAEQHDDEPSLAQLLANQNRLFERMVANSENMGAAMAQQANPPSKLADVQRTHPPHFSSAADPLAADDWLRDIEIKLNLCRCDPVEKATFAAYYLQGAAAAWWETYKTLIPPDEPITWTVFREGFRSAHIPAGLMEIKKKEFLNLKQGNMPFMEFMERFNYLGRYAASDLNTETKKVELCRDRLAPELKHALAAHEITSMKTLVDKALRVESSEKEVVEDRKRKWAAIPRAVQAAGDASRNANVTCYNCGKKGHYSPSCPYPKTKIRTVLTGSTAAASWGGRLNHVTAEEATDAPGVVLGTFLVHSIPLTVLFDSGATHSFMSTLKAKQLDLKTEFLSDAMRIQSPGSTMVTKLLCKGVELIIDGVKFKANLILLDTLGLNVILGMDWLTKHEGTIDCAHRTVTLRSTDGQFVRLTSTSNQPSIQSLSIPELKSVPIVNEYSDVFPDELPGMPPDRDIEFVIDLIPGTAPIAKRPYRMTSENLMELKKQLNEQLAKGFIRPSSSPWGCPVLFVPKKDGTMRMCVDYRPLNEVTIKNKYPLPRIDDLFDQLNKFVVVFIDDILIYSKSEEEHAQHLRMVLDKLREHQLYAKFSKCEFWLKEVEFLGHVLSEGGIAVNPRNVQNVLNWKQPQNVPEIRSFLGLAGYYRRFIENFSKIARPLTQLLKKENKFIWSEACEIHELKRRLNSPSASDADVLKPFNVYCDA

SEQ ID NO: 19793 - protein, 1770 aa, Oryza sativa
  unsure (1)..(1770): unsure at all Xaa locations
  Clone ID: TF_OSC422890j.C1.p3.np
KLSIGDRRQIAVKWAMLKRLDRMDEDDDVGDPVNSGVATEIPTFPESPFSQEKNLKSSKASKATPGLEWYIPGLEIELCSRDGCSEWLVLYNRMPRYKLEYLFGVEGFVQDLRTMSFAIGFGTAPFYAQIPHDRHEEKCRVKVTLNSNSEDIPSVMFEAGGRNYIHACQEVARIAIGEFRDRYSDQLADTEYRYHPRQPQGSDRGSYLETEGIENDATTRHLVEMLWAMDETRAETVLAAQDREDRNRGKICKLEDKVDRLEKELAALKGEAPPQKARIRLTARKRALFVPRYQLVPKMVLTRSNGNGPNNNNNNNGENPPLAQVLAQQAQLMNMMMQQLQNQQNQGNNHAPPQNKLAEFLRVRPPTFSSTTNPVEAGDWLHAIEKKLDLLQCTDQEKVSFASHQLHGPASEWWDHFRLNRTTAEPITWLEFTAAFRKTHIPSGVVSLKKREFRSLTQGSRSVTEYLHXFNRLARYAPEDVRTDEERQEKFLEGLNDELSYPLMTGDYPDFQKLVDKAIRQEDKYNRMEQKKRRIAQFKTQQGNNQRPRLTLGPQSMPQGGSSSVVHPQRQFFNNNAGNNIRNQAPRPVAVLTQQQPAKKEQGSKPVVCFNCGEPGHYADKCPKPRRMKVVPAQSNSTVPASKARVNHVAAAEAQDAPDVILGTFLVNLVPATVLFDSGATHSFLSMSFAGNHGMEVEDLRRPLMVSTPSNQALSMQRSPSVRIEIQGVPFLANLILLESKDLDVILGMDWLARHKGVIDCANRKVTLTSNDGRVVTVHALSSESLRSRLNQITLEEIPVVREYPDVFLDDLPGIPPKRDIEFRIDLVPGTTPIHKRPYRMAANELAEVKRQVDDLLQKGYIRPSSSPWGAPVIFVEKKDHTQRMCVDYRALNDVTIKNKYLLPRIDDLFDQLKGATVFSKIDLRSGYHQLRIKEEDIPKTAFTTRYGLFECTVMSFGLTNAPAFFMNLMNKVFMEYLDKFVVVFIDDILIYSRTKEEHEEHLRLALEKLREHQLYAKFSKCEFWLSEVKFLGHVISAGGVAVDPSNVESVTNWKQPKTVSEIRSFLGLAGYYQRFIENFSKIAKPMTRLLQKDVKYKWSEACEQSFQELKNHLISAPILILPDPKKGFQVYCDASKLGLGCVLMQDGKVVAYASRQLRPHEKNYPTHDLELAAVVHALKIWRHYLFGTRTEVYTDHKSLKYIFTQPDLNMRQRRWLELIKDYDMGIHYHPGKANVVADALSRKGYCNATEGRQLPLELYKEFERLNLGIVSRGFVAALEAKPTLIDQVREAQINDPDIQEIKKNMRRGKAIGFLEDEQGTVWLGERICVPDNKDLKDAILKEAHDTLYSIHPGSTKMYQDLKERFWWASMKREIAEYVAVCDVCQRVKAEHQKLAGLLQPLKIPEWKWEEIGMDFITGLPRTSSGHDSIWVIVDRLTKVAHFIPVKTTYSGSRLAELYMARIVCLHGVPKKIVSDRGSQFTSNFWKKLQEEMGSKLNFSTAYHPQTDGQTERVNQILEDMLRACALDFSGSWDKNLPYAEFSYNNSYQASVQMAPYKALYGRKCRTPLLWDQTGERQVFGTDILREAEEKVKIIQERLRVAQSRHKSYADNRRRDLSFDEGDYVYLRVTPFRGVHRFHTKGKLAPRFVGPYKIISRRGEVAYQLELPQSLAGVHNVFHVSQLKKXLRVPTEEANLEQIEVQEDLTYVEKPIRILEIDERRTRNRVIRFCKVQWSNHSEEESTGEREDELKSAHPHLFAGSSESRGRDSV

SEQ ID NO: 19794 - protein, 719 aa, Oryza sativa
  Clone ID: TF_OSC423199j.C1.p4.gm
ASETTCCCDVCTDGRAIRFLGSATRDYSLFVNIYFTFTNISNTGDNGNTGYKEKEAPVNTNGGNTASNSSGGPFLGVLADNIVDVYMHMPSGKDMWDALEAKFGVSDAGSELYMLAKKLENNNCELPDKFVAGGIIAKLPPSWLDFATSLKHKRQEFSVTDLIGSLGVEEKARAKDNRGKNIEGGSSTNLVQQKNPHASHNNNNNKKVKPDVKPKATTNFKKKGKGKAKGDCFVCGKPGHWAKNCPDRKDKKSANMVISESGGTSGLNVIEEVKDFLSKSFEMKDLGVADVVLNIKLLRGDEGGITLVQSHYVDKVLSRFGYSDCKPAPTPYDSSVLLRKNRRIARDQLRYSQIIGSLMYLASATRPDISFAVSKLSRFVSNPGDDHWQALERVMRYLKGTMSYEIHYTGYPKVLEGYSDSNWISDADEIKATSRYVFTLGGGAVSWKSCKQTILTRSTMEAELTALDTATVEAEWLRELLMDLPVVEKPVPAILMNCDNQIVIIKASETTRCCDVCTDGRAIRFLGSATRDYSLFVNIYFIFTNMSNTGDNGNTGYKEKEAPVNTNGGNTASNSSGGPFLGHAHRLLTPASEAPTTNPHTHPREGGKEGESLPPPSPPANATAGASPHADILRHTRADAGGLLVVVRGGEEAPPPRGSSSSLVRGGGGSWRLAKGACRGRGGGGGGVVVFARRASRAREAPPRRRLRGAFCKYSIEQQ

SEQ ID NO: 19795 - protein, 449 aa, Oryza sativa
  Clone ID: TF_OSC18589j.C1.p1.fg
MDNTGNKGYGNDGSDDSRTQASGNEKSINKTSPELIQIVVNQTNMLATAFQLLQYWNNPAGATNVQVPTVQQQCKLSEFLKTEPPTFAIAVDPMEASDWLRTVEKKLGLIQCTDQERVGFTTHQLVGPASEWWDSYEASRPEGHTITWNEFSSVFKRSHVPARMITLRKREFRYLKQGDLTVTEYLHEFYRLAHYAPEDVETDEDKQEKFLQGLKDELAVQLLLEDYEDFEKLVDKAMQLESEHNRMTNCKRRIVNIPVFPCGNQRQRTEPLQITGSSVAHQELLPQEDGHNADNNISNTNADDTTNNHGSCPIHDHLDQACNVNSIHQDIDDSINEGTQNDNPSNFDSEKDSNGDSNYGTTDANVSKDFQPPIPTPSQNDRSQTDNSVKKTLICYNCKEPGHFSKDCPQPKRNLRHHSGHYARRRQVTRLVVTGANAIPVRPRVNHNP

SEQ ID NO: 19796 - protein, 146 aa, Oryza sativa
  Clone ID: TF_OSC22584j.C1.p1.fg
MAASTSVHATPRNQKLAPQRIVIHASRSSPIARVATAPTPTSALPQGVNAPFQSHPPADETEASICVVPLDVPIQQLINQVQDEEPECKKVIVCYNCSEEGHYSRDCPQPRQNRPPHFRQFTGSKHANRQVVTGANAVPVKPSASQ

SEQ ID NO: 19797 - protein, 1366 aa, Oryza sativa
  unsure (1)..(1366): unsure at all Xaa locations
  Clone ID: TF_OSC401836j.C1.p9.np
LALRVPPPFFLSCLRAQVYRMSRCLRNSIRLRTCTGRRAIKFLGIASNATALVLRGYCCCIGAFTKMSTEIGDKKMNDINGGNTASKSSGGTFSGSFSIVDFAASLKPDAFDGSNYKRWKAHTLLWLTAMHCFFVSLGKPSEAPLSPEEEAKFEASDCLFRGALFSVLADKIVDVYMHMPSGKDMWDSLEAKFGVSDANSERYVMEQFYDYNMVDDRSVVEQAHEIQMLAKELGNNNYELPDKFDLIGSLGVEEKAKAKDNXGKRIEGGFSTNLVQKKNPHASHNNNKKVKPDVKSKATTNFKKKGKGKAKEDCFVCGKPGHWAKDCPERKDKKFANMVISEGGGTLGXGKFLPTVLSVCHSPDWWVDTGANIHVYADISLFSSYXVGRGSSLLMGNGSLAAVHGVGTVDLKFISGKIVQLKNVXHVPSIKKNLVSGSLLCTDGFRLVFESNKCVISKYGTFIGKGYDSGGLFRFSLDDMCNVVNHVSDDDDESNVWHSQLCHVNFGCMTCLANMSLIPKFTLVKGSKXHTXVQSKQPRKPHKASEARNLAPLELVHSDLXEMNGVLTKGGKKYFMTLIEDCTRFCYVYLLKIKDEALHYFKIYKAEVENQLERKIKRLRSDRGGEYFSNEFTSFCEEYGIIYERTPPYSPQSNGVAERKNRTLTEMVNAMLDTAGLSKEWWGEAILTACHVLNIIPTKHKEVTPFEEWERKKLNLSDLRTWGCLSKVNVPIAKKRKLGPKTIDCVFLGYAIHSVGYRFLIVNSGVPDMRVGTITESRDATFFENEFPMKNAPSTSSQEPILSPEHFMPIEHIDQTLEENPEDDSIVATRKSKRQRTAKSFGDDYIVYLVNDTPRTTEEAYPSPNASYWKEAVHSEMDSIMSNGTWEVVEHPYGCKPVGCKWVFQKKLRPDGTIEKYKARLVAKGYTQKEGEDFFDTYSPVARLTTIRVLLALAASDGLLVHQMDVKTAFLNGELEEEIYMDQPDGYVLEGQEGMVXKLLKSLYVLKQAPKQXHEKFDNTLTSAGFVVNKADKCVYYRYGGGEGVILCLYVDDILIFGTSHNVIEEVKDFLSKSFEMKDLGVADVILNIKLLRGDEGGITLVQSHYVDKVLSRFGYSDCKAAPTPYDPSVLLSKNGRIARDQLRYSQIIGSLMYLASATRPDILFAVSKLSRFVSNPGDNHWHALERVMRYLKGTMSYGISSTGYPKVLEGYSDSNWISDADEIKATSGYVFTLGGGVVSWKSCMQTILTRSTMEAELTALDTATVEAEWLRELLMDLPVVEKPVPAILMNCDNQTMIIKVNSSKDNMKSSRHVKRRLKSVRKQKNSGVIALDYVXTAKNLADQFTKGLPRNVIDCASREMGLRPT

SEQ ID NO: 19798 - protein, 284 aa, Oryza sativa
  Clone ID: TF_OSC101188j.C1.p2.gm
MSFPDEEEDEAFLLAVAATEEAALASSDSSKRRRLSMTSSTSSSPTSATPPPAAVPEGPYLAALKGSHSSAWKQQQETLSQARKRPGGSQTLATPGSGSGSGGAQVARGGACFKCGDSCHWARECPQSVPATGGGGGGGAFGGSGGGGGGYGDAGGAVEEKACPCGAGSCLVLTSNTPRNPGRKFYRCPMRGGSSCGYFKWCDEQQLRTAAPLQASTQYHTDVASSGQIPSKRSSSACFKCGQENHWAKDCPNQSSDPYPDKAMSSPLLLWAHGTATDTDSRYL

SEQ ID NO: 19799 - protein, 508 aa, Oryza sativa
  Clone ID: TF_OSC400446j.C1.p28.fg
MADNEKGNKVRSQDIGTSSSRVNEAPDTSCVTLVQHLINQNRLPIEILQQHQTPILNLSQIQPQVQLEAVQALTPQVSMPPASRRTHGDVPHVDSKEASIICFMCDEQGHYARECPQQKRKTPMRTEDEVRMTKRQRRNTFRGAPQLTEHLLANGGRVSDSEDSDQVSSDDEDEMERKACSCCGEIGHVASSCATTCVHCEEDHPPDRCPTSRITCFFCEGTDHVLKDCQFSFLLTKKMANQPASSNGEKHQGNTNPRQDYSFSLTPVPGQRNQNEKRKCRVREDICCFNCQGMGHFADKCPRPRNIAASTSVHATPCNQKLAPQRIVIHASRSSHIARVATAPIPANALPQGVNAQFRPQPPVDKTEASIGIVPLDVPAQQPRNQVQDEEPEPPTILCTYGLSKELSSMEEVVSLPDLLQAEQRAINLRRAIPSRRPSSASNSNQKEASPVNDSNMQSYHIITEPIKDDAVTRTTPAISLQNQNEQPRLWFSVRYLSLRNRKFAAIM

SEQ ID NO: 19800 - protein, 555 aa, Oryza sativa
  Clone ID: TF_OSC400943j.C1.p6.fg
MADNEKGNKVRRQDIGTSSSRVNEAPDTSCVTLVQHLINQNRLLIEILQQHQTPILNLSQIQPQVQLEAVQALTPQVSMPPASRRTHGDVPHVDSKEASIICFMCDEQGHYARECPQQKRKTPMRTEDEVRKMIITSTEWPPPGMTKRQRRNTFRGAPQLTEHLLANGGRVSDSEDSDQVSSDDEEEKSPQGFNQNKMEHKACSRCGEIGHVASSCATTCVHCEEDHPPDRCPTSRITCFFCEGTDHVPKDCQFSFLLTKNMANQPASSNGEKHQGNTNPRQDYSFSLTPVPGQRNQNEKRKCRVREDICCFNCQGMGHFVDKCPKPRNIAASTSVHATPCNQKLVPQRIVIHASRSSPIARVATAPTPASALPQGVNAQFQPQPSIDKTEASIGIVPLDVPAQQPRNQVPDEEPEHKKVIVCYNCEKHEIMNEFDKFIEGSMLRLQVLLSKDLSSMEEVVSLPDLLQAEPRAINLRRAIPSRRPLFASNSTQKEASPVNNSNMQSYHIITEPIKDDAVTRTMPAISLQSQNEQPRLWFSVRYLSLCSRKFAAIM

SEQ ID NO: 19801 - protein, 844 aa, Oryza sativa
  Clone ID: TF_OSC400925j.C1.p17.gm
MSCGGSCNCGSCGCGGGCGKMYPDLAEKITTTTTTATTVLGVAPEKGHFEVMVGKAAESGEAAHGCSCGSSCKTSEEFTPADGDLRSWTRVGSRRRCIRDAVKPTTVARWVVWEIWKEQNQRIFEHKESTTTYLLTKIIEEAKLWMLAGARRLRELLPHLVQKMYPDLAEKNTTTTSVTMVLGVAPEKGHSEPGFELAAGSGEAGHGCSCGSSCNVDMFPFSGRWQKSGCGLVDREVRRLIASRHSGDGDHHLIAGGHSDAGDHLPTSSLMSQLGRTSWRDIVLSRPAVNAVDQRGEEDQAFKKARTVPRWLQGCCFNCLGLGHQKSACPGSTRCYNCWYSGHIARNCPTSRAARAQPATGSKEVATKPAGGEKPRKEVLEALPPRKKGREEGVAAGDGMASFQICAQQPSRVMKEWRTGDANIRPESGRCTISWTPRMVETEAIFEQKVLLATVLGNQPALSPRDLVAVIVDCGILPAHFRVEVTTPEDYLIVFRSAREKDWVLGKSKQVFFQGAPIAFKSWNRRLLASSTRFQFFTKLSLEGLPQHAWDEEAMAQLIRELGGELVELVPPADARVLTMFAWLKNPSAVPTTLEVEIPERAGGGPPCWERMAGSIRIPRAPLHKCTLTYNIIVHIEEIIDPTPLHVPLSTASNDEDDDDVPRQVTFSCWAGRIDGTGPWTSKQGGGRPFGGASGFAGGLPGRTWSTSSVQRVSEMIPTNPGALRDTARDDEHTEHAGSGLHASDRDTIEEHSSGEPGNRMAGRGDDAACNVVPRVLATSTALVAGRDVLATGKDVLATENGVLATGKDVLATGGELCPRQSPLSPLRSKPPAVVIAGPRHSAR

SEQ ID NO: 19802 - protein, 1716 aa, Oryza sativa
  Clone ID: TF_OSC900409j.C1.p9.fg
MSFVISFTLLTIVNDAITGNNLISSWFGMMPRYKPEYLFGVEGFVQELRTMSFVIGFGTAPFYAQIPHDRHEEKCRVKVTLNSNSEDIPSVMFKAGGRNYIHACQEVARIAIGELRDRYSDQLADTEYRYHPRQPQGSDRGSYLETEGIENDATTRHLVEMLWAMDESRAEIVLAAQDREDRNRGKICKLEDKVDRLEKELAVLKGEAPPQKARIRLTARKRALFVPRYQLAPKFPPVSLLVPCPCQMVNTRSNGNGPSNNNNGENPTLAQVLAQQTQLMNMMMQQLQNQQNQGNNHAPPQNKLAEFLRVRPPVFSSTTNPVEAGDWLHAIEKKLDLLQCTDQEKVSFASHQLHGPASEWWDHFRLNRTTAEPITWLEFTAAFRKTHIPSGVVSLKKKEFRSLTQGSRSVTEYLHEFNRLARYAPEDVRNDEERQEKFLEGLNDELSYPLMTGDYHDFQKLVDKAIRQEEKYNRMEQKKRRIAQFKTQQGNNQKPRLTLGPQSMPQGGSSSVVRPQRQFFNNNAGNNIRNQAPHPVAAPAQQQPAKREQGSKPVVCFNCGDPGHYANKCPKPRRVKVVPVQSNSTVPASKARVNHVAAAEAQDAPDVILGTFLVNLVPATVLFDSGATHSFLSMSFAGNHGMEVEDLRRPLMVSTPSNQALSLQRSPSVRIEIQGVPFLANLILLESKDLDVILGMDWLARHKGVIDCANRKVTLTSNDGRVVTVHALSSESLRSRLNQITLEEISIVREYPDVFPYDLPGMPPKRDIEFRIDLVPGTTPIHKRPYRMAANELAEVKRQVDDLLQKGYIRPSSSPWGAPVIFVEKKDHTQRMCVDYRALNDVTIKNKYPLPRIDDLFDQLKGATVFSKIDLRSGYHQLRIKEEDIPKTAFTTRYGLFECTVMSFGLTNAPAFFMNLMNKVFMEYLDKFVAVFIDDILIYSRTKEEHEEHLRLALEKLREHQLYAKFSKCEFWLSEVKFLGHVISAGGVAVDPSNVESVTNWKQPKTVSEIRSFLGLAGYYRRFIENFSKIAKPMTRLLQKDVKYKWSEECEQSFQELKSRLISAPILILPDPKKGFQVYCDASKLGLGCLLMQDGKVVAYASRQLRPHEKNYPTHDLELAVVVHALKIWRHYLFGTRTEVYTDHKSLKYIFTQPDLNMRQRRWLELIKDYDIGIHYHPGKANVVADALSRKGYCNATEGRQLPLELCKEFERLNLGIVSRGFVAALEAKPTLIDQVREAQINDPDIQEIKKNMRRGKAIGFLEDEHGTVWLGERICVPDNKDLKDAILKEAHDTLYSIHPGSTKMYQDLKERFWWASMKREIAEYVAVCDVCQRVKAEHQKPAGLLQPLKIPEWKWEEIGMDFITGLPRTSSGHDSIWVIVDRLTKVAHFIPVKTTYSGSRLAELYMARIVCLHGVPKKIVSDRGSQFTSNFWKKLQEEMGSKLNFSTAYHPQTDGQTERVNQILEDMLRACALDFDGSWDKNLPYAEFSYNNSYQASLQMAPYEALYGRKCRTPLLWDQTGERQVFGTDILREAEEKVKIIQERLRVAQSRHKSYADNRRRDLSFEGDYVYLRVTPLRGVHRFHTKGKLAPRFVGPYKIVSKRGEVAYQLELPQSLAGVHNVFHVSQLKKCLRVPTEEANLEQIEVQEDLTYVEKPIRILETDERRTRNRVIRFCKVQWSNHSEEESTWEREDELKSAHPHLFASSSESRGRDSV

SEQ ID NO: 19803 - protein, 38 aa, Oryza sativa
  Clone ID: TF_OSC405121j.C1.p1.hg
YGGGGGGYPTGGGDEDDGGCYNCGETGHIARECPSKTY

SEQ ID NO: 19804 - protein, 564 aa, Oryza sativa
  unsure (1)..(564): unsure at all Xaa locations
  Clone ID: TF_OSC15730j.C1.p2.np
MDEVVATMDISEANEGYASCGSVIEMSRQMKATRVGARAQSWPACPGIPAVGRVGSVLLFTARMGKGLCHVFYDGSIAMECRVKACLVGWPGLAWDELGPRSGCQFGPNHRRPWVKAVLGGQLCEEEDVVNCLPKLRKTVGSASEAREAVKPDVKQEKKCSSVKVLSLVSDLSLPFVFPLSLSKLQQMADNEKGNKVRSQEMGTSSSRVNEAPDTNCVAVVQHLINQNKLLIEILQQHRMPILNPSQMQPQAQLEAIQALTPQVSAPPTSQKAPHAMSHVDSKEASIIGFMCDEQGHYARNCPQQKRKAPMRTEDEVRKMIITSTEWPPPGMTKRQRRNSFRGAPXLTEHLLANGGRVSDSEDSDQVSSDDEDEKSPQGFNQNKMEHKACSHCGEIGHVASSCATTCFHCKEDHPPGECPMSRITCFLCEGTDHVPKDCQLSFLLTKKMANQHARSNGEKHQGNTNPRQDYSFSLTPVPGQRNQNEKRKYXVRKDICCFNCQEMCHFTDKCPKPRNIATSTSVHATPHNQKLAPQRIVIHASRSIPIARVATAPTPVMWTPIFI

SEQ ID NO: 19805 - protein, 484 aa, Oryza sativa
  Clone ID: TF_OSC402673j.C1.p7.np
MADNEKGNKVRSQDIGTSSSRVNEAPDTSCVTLVQHLINQNRLLIEILQQHQTPILNLSQIQPQVQLEAVQALTPQVSMPPASRRTHGDVPHVDPKEASNICFMCDEQGHYARERPQQKRKTPMRTEDEVRMTRRQRRNTFRGAPQLTEHLMTRRQRRNTFRGAPQLTEHLLANGGRVSDSEDSDQVSSDDEDEMECKACSRCGEISHVASSCATICVHCEEDHPPDRCPTSRITCFFCEGTDHVPKDCQFSFLLTKKMANQPASSNGEKHQGNTNPRQDYSFSLTPVPGQRNQNEKRKCRVREDICCFNCQGMGHFADKCPKPRNIAASTSVHAAPCNQKLAPQRIVIHASQSSPMARVATAPTPASALPQGVNAHFQPQKELSSMEEVVSLPDLLQAKQRAIDLRRAIPSRRPSSASTSNQKEASPVNDSIMQSYHITTEPIKDAVTRTMPAISLQNQNEQPCLWFPVRYLSWCNRKFAAIM

SEQ ID NO: 19806 - protein, 530 aa, Oryza sativa
  Clone ID: TF_OSC18392j.C1.p5.fg
MADNEKGNKVRSQDVGTSSSRVNEAPDTSCVTLVQHLINQNRLLIEILQQHQTPILNLSQIQPQVQLEAVQAPTPQVSMPPASRRTHGDVPHVDSKEASIICFMCDEQGHYARECPQQKRETPMRTEDEVRKMIITSTEWPPPGMTKRQRRNTFRGAPQLTEHLLANGGRVSDSEDSDQVSSDDEDEKSPQGFNQDKMERKACSRCGEIGHVASSCATTCIHCEEDHPPDRCPTSRITCFFCEGTDHVPKDCQFSFLLTKKMANQPASSNGEKHQGHTNPRQDYSFSLTPVPGQRNQNEKRKCRVWEDICCFNCQGMGHFADKCPKPRNIAASTSVHATPCNQKLAPQRIVIHASRSSPIARGATAPTPASALPQGVNAQFQPQPPVDKTEASIGIVPLDVPAQQPRNQVQDEEPEPPTILCTDSLSKELSSMEEVVSLPDLLQAEQRAINLRRAIPSRRPSSASTHNQKEASPVNDSNMQSYHIITELIKDAVTRTMPAISLQNQNEQPYLWFSVRYLSLCNRKFAAIM

SEQ ID NO: 19807 - protein, 797 aa, Oryza sativa
  Clone ID: TF_OSC20764j.C1.p4.fg
MADNEKGNKVRSQDIGTSSSRVNEAPDTSCVTLVQHLINHNRLLIEILQQHQTPILNLSQIQPQVQLEAVQALTPRVSMPPASRRTHGDVPHVDSKEASIICFMCDEQGHYARECPQQKRKTPMRTKDEVRKMIITSTEWPPPGMTKRQRRNTFRGAPQLTEHLLANGGRVSDSEDSDQVSSDDEDEKSPQGFNQNKMERKACSRCGEIGHVASSCATTCVHCEEDHPPDRCPTSRITCFFCEGTDHVPKDCQFSLLLTKKMANQPASSNGEKHQGNTNPRQDYSFSLTPVPGQRNQNEKRKCRVREDICCFNCQGMGHFADKCPKPRDIAASTSVHATPCNQKLAPQRIVIHASRSSPIARVATAPTPASALPQGVNAQFQPQPPVDKTEATFQLLQNWNYPAGATNVQVPTVQQQCKLSEFLKTETPTFAIVVEPMEASDWLRTVEKKLGLIQCTDQERVVFATHQLVGLASEWWDSYEASRPEGHTITWDEFSSVFKRSHVPAGMITLRKREFRYLKQEDLTVTEYLHEFHRLAHYAPEDVENDEDKQEKYLQGLKDEIAVQLLLEEYEDFEKLVDKAIQLESEHNRMKNCKRRIVSIPVFPVVTKDSARSHFRSPDLLLRIKSFRPKKMDTMQTTTLAILMMMIPPPTMLLAPLVTTQIKRAMSTSFTKVSTIVSMMAPKMTTLAIVTLRKTPMVIATMVSLKDSTPKDLIAPEASSTPGAKSTWLRKVESGNLYEVDSEDMNHEKFWNGSIIKLPQPSLSQLKGAPWFKSGEEKIPSATEGQAKQFRVVKFC

SEQ ID NO: 19808 - protein, 416 aa, Oryza sativa
  Clone ID: TF_OSC25016j.C1.p1.fg
MADNEKGNKVRSQDVGTSSSRVNEAPDTSCVTLVQHLINQNRLLIEILQQHQTPILNLSQIQPQVQLEAVQAPTPQVSMPPASRRTHGDVPHVDSKEASIICFMCDEQGHYARECPQQKRETPMRTEDEVRKMIITSTEWPPPGMTKRQRRNTFRGAPQLTEHLLANGGRVSDSEDSDQVSSDDEDEKSPQGFNQDKMERKACSRCGEIGHVASSCATTCIHCEEDHPPDRCPTSRITCFFCEGTDHVPKDCQFSFLLTKKMANQPASSNGEKHQGHTNPPQDYSFSLTPVPGQRNQNEKRKCRVREDICCFNCQGMGHFADKCPKPRNIAASTSVHATPCNQKLAPQRIVIHASRSSPIARGATAPTPASALPQGVNAQFQPQPPVDKTEASIGIVPLDVPAQQPRNQVQDEEPE

SEQ ID NO: 19809 - protein, 467 aa, Oryza sativa
  Clone ID: TF_OSC401512j.C1.p1.fg
MADNEKGNKVRSQDIGTSSSRVNEAPDTSCVTLVQHLINQNRLLIEILQQHQTPILNLSQIQPQVQLEAVQALTPQVSMPPASRKTHGGVPHVDSKEASIICFMCDEQGHYARECPQQKRKTPMRTEDEVRKMIITSTEWPPPGLTKRQRRNTFRGAPQLTEHLLANGGRVSDSEDSDQVSSDDEDEMERKACSRCGEIGHVASSCATTCVHCKEDHPPDRCPTSRITCFFCEGTDHVPKDCQFSFLLTKKMANQPASSNGEKHQGNTNPRQDYSFSLTPVPGQRNQNEKRKCRVREDICCFNCQGMGHFADKCPKPRNVAASTSVHATPYNQKLAPQRIVIHASRSSPIARVATAPTPASALPQGVNAQFQPQPSVDKTEASIGIVPLDVPAQQPRNQVQDEEPERSRLKYHLVTGSIHNTRSEEYLVDKGQKMIDRRYRKRCLLPGKEVGRKVIDKRNRERTHQG

SEQ ID NO: 19810 - protein, 726 aa, Oryza sativa
  Clone ID: TF_OSC405209j.C1.p1.np
KKVNPSCFRLARALAPPPPRIPPLTSVPRAIKRGEIFPVIPSLSPPPHFSLPLSLGFVWKLPPNLAGANGGRIFRARFPLPAALSPSQPYINTPRASLRRFRHSPHSLSAGIELAPSLSLSAVAAELRSAAVLAPDHLPPRRRLLRLRRNLADLVHLSVSVADRRNAAVPVNPSHAAAPLRSSRRSRRRRRPGVSRGPPIRFPLPSPLSGAAPPRRWSPAATIGARARRSRRLCRRGRLRARPAAAMWGPAVSRPHPRVRLTHWTHGAGRCEPGAPGPPWTVRLPRGPLPWTRTNEGYTSCGPMADNEKGNKVRSQDIGTSSSRVNEAPDTSCVTLVQHLINQNRLLIEILQQHQTPILNLSQIQPQVQLEAVQALTPQVSMPPASRRTHGDVPHVDSKEASIICFMCDEQGHYARECPQQKRKTPMRTEDEVRKMIITSTKWPPLGMTKRQRRNTFRGAPQLTEHLLANGGRVSDSEDSDQVSSDDEDEMERKACSRCGEIGHVASSCATTCVHCEEDHPPDRCPTSRITCFFCEGTDHVPKDCQFSFLLTKKMANQPASSNGEKHQGNTNPRQDYSFSLNPVPGQRNQNEKRKCRVREDICCFNCQGMGHFADKCPKPRNVAASTSVHATPCNQKLAPQRIVIHASRSSPIARVATAPTPASALPQGVNAQFQPQQRIVVDGRSCVSPRPTPGRAKGNQPPEGDTKQKTAIRFKQQSEERFSCE

SEQ ID NO: 19811 - protein, 536 aa, Oryza sativa
  Clone ID: TF_OSC411277j.C1.p2.fg
MADNEKGNKVRSQDIGTSSSRVNEAPDTSCVTLVQHLINQNRLLIEILQQHQTPILNLSQIQPQVQLEAVQALTPQVSMPPASRRTHGDVPHVDSKEASIICFMCDEQGHYARECPQQKRKTPMRTEDEVRKMIITSTEWPPPGMTKRQRRNTFRGAPQLTEHLLANGGRVSDSEDSDQVSSDDEDEKSPQGFNQNKMERKACSRCGEIGHVASSCATTCVHCEEDHPPDRCPTSRITCFFCEGTDHVPKDCQFSFLLTKKMANQPASSNGEKHQGNTNPRQDYSFSLTPVPGQRNQNEKRKCRVREDICCFNCQGMGHFADKCPKPRNIAASTSVHATPCNQKLAPQRIVIQASRSSPIARVATAPTPASALPQGVNAQFQPQPPVDKTEASIGIAPLDVPAQQPRNQVQDEEPEPIIPLAPTILCTDSLSKELSSMEEVVSLPDLLQAEPRAINLRRAIPSRRPSSASNSTQKEASPVNDSNMQFYHIITEPIKDDAVTRTTPAISLQNQNEQPRLWFSVRYLSLCNRKFAAIM

SEQ ID NO: 19812 - protein, 545 aa, Oryza sativa
  unsure (1)..(545): unsure at all Xaa locations
  Clone ID: TF_OSC6554j.C1.p2.np
HVCVVYPGFSWDGINTLAFGKRQFSRSRQAVLDGQVSEEEDIVSCLPKLRKTAGSASEVEEAVKPAVKQDKRLRSVKVLSLVSNLSLPFVFPLSLSKPLQQMADNEKGNKVRSQDIGTSSSRVNEAPDTSCVTLVQHLINQNRLLIEILQQHQTPILNLSQIQPQVQLEAVQALTPQVSMPPASRRTQGDVPHVDSKEASIICFMCDEQGHYARECPQQKRKTSMRTEDEVRKMIITSTEWPPPGMTKRQRRNTFRGAPQLTEHLLANGGRVSDSEDSDQVSSDDEDEMDKACSRCGEIGHVASSCATTCIHCEEDHPPDRCPTSRITCFFCEGTDHVPKDCQFSFLLTKKMANQPASSNGEKHQGNTNPRQDFSFSLTPVPGQRNQNEKRKCRVREDICCFNCQGMGHFADKCPKPRNIAASTSVHATPCNQKLAPQRIVIHASRSNPIARVATAPTPASALPQGVNAQFQPXPSVDKTEASIGIVPLDVPAQQPRNQVQDEEPERKKVIVCYNCSTCXSRHANRQVVTGANAVPVKPSASQKQ

SEQ ID NO: 19813 - protein, 456 aa, Oryza sativa
  Clone ID: TF_OSC19734j.C1.p1.np
SSRVNEAPDTSCVTLVQHLINQNRLLIEILQQHQTPILNLSQIQPQVQLEAVQALTPRVSMPPASRRTHGDVPHVDSKEASIICFMCDEQGHYARECPQQKRKTPMRTEDEVRMTKRQRRNTFRGAMTKRQRRNTFRGAPQLTEHLLANGGRVSDSEDSDQVSSDDEDEMERKACSRCGEIGHVASSCAMERKACSRCGEIGHVASSCATTCVHCEEDHPPDRCPTSRITCFFCEGTDHVPKDCQFSLLLTKKMANQPASSNGEKHQGNTNPRQDYSFSLTPVPGQRNQNEKRKCRVREDICCFNCQGMGHFADKYPKPRDIAASTSVHATPCNQKLAPQRIVIHASRSSPIARVATAPTPASALPQGVNAQFQPQPPVDKTEASIGILPLDVPAQQPRNQVQDEEPKPMGMITVQLLLEEYEDFEKLVDKAIQLESEHNRMNVREGLSASQYSHV

SEQ ID NO: 19814 - protein, 658 aa, Oryza sativa
  unsure (1)..(658): unsure at all Xaa locations
  Clone ID: TF_OSC12272j.C1.p5.np
MDEFVATMDISEANEGYVSCGSVIEMSRQMKAARAGVRAQSXPACGIPTVGKVGSVLLFTARMGEGLCHMFTTGSKAMECGVKMCLVGWPWLAWDELGPRSGYQFGLNHRRPLVKAVLDGHLCEEEDAVNCLPKLRKTVGSASEAKEAVKPAVKQEKKIRSVKVLSLVSDLSLPFVFPLSLSKPGQMADNEKGSKVRNQDKGASCSQVNKAPDTSCVVVVQHLINQNKLLIDLLQHHQTPILNPSQMQPQVQFEADQAPTSPDNVPLASQQAHCAMPHVDSKEAIIICLIYDEQGHYARNCPQQKRKAPMRTDDEVRKMTITGTEWPPPGMTKRQIGNFFRGAPQLTQHLLANGGRVSDSEDSDQVSSGDEDEKSPXGFKQNKMEHKACSRCGEIGHVASSCVTTCLHCEKDHPPGECPMSRITCFLCEGTDHVPKDCQFSFLLTKKMANHPASSNKEKHQDHVNPRQEYSFQPNSRVGQRNQNGKSKSRVRQDISCLNCQEMGHFAARCPKLRNIAASMSVHATPHNQKLVPXRIVIHASRSSRIAXVATSALPQGVNAXFQPQPPVDKTEANICVVPLDVPVQQPRNXVLDEELGRKKVIVCYNCSEERHYSRNCPQPKRNPRHHSGRYARRRHDHNIRVTGANAVPVKPSASQXQ

SEQ ID NO: 19815 - protein, 549 aa, Oryza sativa
  unsure (1)..(549): unsure at all Xaa locations
  Clone ID: TF_OSC14650j.C1.p1.np
KRSFGEEVLDGHLCEEEDAVNCLPKLRKTVGSASEAKEAVKPAVKQEKKIRSVKVLSLVSDLSLPFVFPLSLSKPGQMADNEKGSKVRNQDKGASCSQVNKAPDTSCVVVVQHLINQNKLLIDLLQHHQTPILNPSQMQPQVQFEADQAPTSPDNVPLASQQAHCAMPHVDSKEAIIICLIYDEQGHYARNCPQQKRKAPMRTDDEVRKMTITGTEWPPPGMTKRQIGNFFRGAPQLTQHFLANGGRVSDSEDSDQVSSGDEDEKSPXGFKQNKMEHKACSRCGEIGHVASSCVTTCLHCEKDHPPGECPMSRITCFLCEGTDHVPKDCQFSFLLTKKMANHPASSNKEKHQDHVNPRQEYSFQPNSRVGQRNQNGKSKSRVRQDISCLNCQEMGHFAARCPKLRNIAASMSVHATPHNQKLVPXRIVIHASRSSRIAXVATSALPQGVNAXFQPQPPVDKTEANICVVPLDVPVQQPRNXVLDEELGRKKVIVCYNCSEERHYSRNCPQPKRNPRHHSGRYARRRHDHNIRVTGANAVPVKPSASQXQ

SEQ ID NO: 19816 - protein, 323 aa, Oryza sativa
  Clone ID: TF_OSC414256j.C1.p5.fg
MAGKEEGRIFVGGLSFHTDERKLADAFRRFGKVVDAQWFGSFCGSFVNQVILIMLERHTQRHRGFGFVTFSDPEAVDSAIKEMHCQELDGRTISVNKAEPKMNTDDTRYESGGGRGEYRGGRGDGPPPGNCFECGRAGHWARDCPNPGGGRSARYSSSKFSAGGRGDRFSGSDRFGDRYMDDRYDGGYREPVDVRDRYGGGRDRYANDRYPSGGDRYVPDRYGGPDRYQPSSYGRERERSYERDGVRGNGGYDRSGPRGGGSYDRDGPRGGISGGYDRDGPRGGGVDRYGGGGPARYDGGSYRDRSGPYDRPSRGGRFDDRFQ

SEQ ID NO: 19817 - protein, 429 aa, Oryza sativa
  Clone ID: TF_OSC400702j.C1.p17.fg
MAPQPTCQTCVRNYLGSKEDLALSENPNQLAEQVTNQVAKTDNTVPGPNKEPKVNPDKSKDEAAEIQGTQSVEGTDTHKEKNKEFLNVMIIGMKTPLRANNCPNLQNSINKSVSQENSMVKEGSCHKRKTLPSKVDMQDVPQCQTMQSCQNLPKSPTLKSKKIRHVPGLICFICHEIGHYMRHCPQKPYMDALLQANMSTSRMPFYPQGSPNLQNVNAVRPTFPDDKRAKASCDMCQDIQEKKKMQEYKRRKVMSLGIQAKEGLCRKTNSPTQYYQKASQHSNGSGSTSLSTMSEPGQQATMINSNSHEGSNSVPCPTPSKRRGHKAGVECFTCHEMGHYSWDCPQKAKMKCPQKVKSKQVQQTTSLPNVSGPKSSKPPNSGSASLTSPPVGQGRLNHVQVETNGKVVNLEQVERAGEEQVPQARAEPQ

SEQ ID NO: 19818 - protein, 1697 aa, Oryza sativa
  unsure (1)..(1697): unsure at all Xaa locations
  Clone ID: TF_OSC416848j.C1.p3.np
MSNKVNHVGKAPMFNGTNYSWKIKISTHLKAMSFHIWSIVDVGFAITGTPLTEIDHRNLQLNAQAMNALFNSLSQEEFDRVSNLETAYEIWNKLAEIHEGTSEYKDAKLHFLKIQYETFSMLPHENVNDMYGRLNVIVNDLKGLGANYTDLEVAQKMLRALPEKYETLVTMLINSDMSRMTPASLLGKINTNDMYKLKKKEMEEASPSKKCIALQAEVEDKSKSKVNEVNEDLEEEMILLARRFNDLLGRRKERGRGSNSNRRRNRRPNKTLSNLRCFECSEKGHFASKCPSKDDDGDKSSKKKSGGYKLMKKLKKEGKKIEAFIGEWDSNEESSASSGSEEEGGDDASSKKKKMVVVAIKEAPSLFAPICLMAKGSSKVTSLSDSESDDDCDDVSYDELVSMFEELYAYSEKDIVKFKALKKDHASLEVLYEXLKISHERLTISHEKLKEAHDNLLSTTQHGAHIDVGISCDLLDDSATCHIAHVASSSISTSCDDLMYMPSPCSSSSSCVSICDASLVVENNELKEQVAKLNKSLERCFKGKNTLDKILSEQRCILNKEGLGFIPKKGKKPSHHATRFVKRNGKYCYKCREVGHLVSDCPEGKPPKTCMFDSHYMLSKAHDGSIVARYVGSPILGGKKNAIWVPKALVSNLQGLKQVWIILAILVFFLHDKSIVAELFKKFAKRAQNEFSCTLVKIRSDNGSEFKNTNIEDYCDDLGIKHELSATYSPQQNGVVERKNRTLIEMARTMLDEYGVSDSFWAEAINTACHATNRLYLHRLLKKTSYELIVVRKPNVAYFRVFGCKCYIYRKGVRLTKFESRCDEGFLLGYASNSKAYQVYNKNKGDEGLMRAMKNMSIGDVKPIEVDDEPSTSASSSQAQVEVEEEKAQDPPMPPRIHTALSKDHPIDQVLGDISKGVQTRSHVASICEHYSFVSCLEPKHVDEALCDPDWMNAMHEELNNFARNKVLTLVERPRDHNVIGTKWIFRNKQDENGLVVRNKARLVAQGFTQVEGLDFGETFAPVARLEAIRILLAFASCFDIKLFQMDVKSAFLNGEIAXLVFVEQPPGFEDPKNPNHVYKLSKALYGLKQAPRWYERLRDFLLSKDFKIGKVDTTLFTKIIGDDFFVCQIYVDDIIFGFTNEVFCKEFGDMMSREFEMSMIGELSFFLGLQIKQLKDGTFVSQTKYIKDLLKRFGLEDARPIKTPMATNGHLDLDEGGKPVDLKLYRSMIGSLLYLTASRPDIMFSVCMCARFQAVPKECHLVAYPKGAKFKYPKGAKFKLVGYSDSNYVGCKVDRKSTSGSCQMLAMPPRTRHGRRAPTPDPVSENEESSGDEYVQSDEDNMENVEGDEMEVSDDGDDNESGNGEDDEASDDGSPFDSSIQFVLNLRNAQQYAILHHHDQFRRPNDCNDPRFHTRFQKSVYVQVYAKKAFTEHKWISWRHIGETPEFENVQEMFRTVGIDRIVTMKQPFDEDLIRQFYATVWVSGDCDAMKWMSGTLRCSINRREFKELLHIRFNNGDDLHDEHTHNPFPIDHFSQFYEEGGRHTYGKVAGLRALPSVINRIVRATILPRCGNNDDIRGVAWHVIDAIMDGRRFDVINFMMKEITISKGTIGQGIYYAPYIMRLPPPRRLVEELPGDLSEKIVEEARRRFVSGLEFTTFGVKEELPRVIEAWVVLSVGRLPPCPPLDEGDVRWLRG

SEQ ID NO: 19819 - protein, 1041 aa, Oryza sativa
  Clone ID: TF_OSC900333j.C1.p17.fg
MAGFADALRPDKFSGVHFKRWQIRVTLWLTAMKCFWVSTGKPEGVLTAEQQKQFEEATTLFVGCILSVLGDRLVEVYMHMTDAKELWDALNTKFGATDASNDLYIMEQFHDYKMADNRSVVEQAHEIQTMAKELELLKCVLPDKFVAGCIIAKLPPSWRSFGTALKHKRQEYSVEGLIASLDVEEKAQEKDAASKGDGGQSSANVVHKAQNKSKGKYKAQQTTNFKKQKKNNNNPNQDDRTCFVCGQPDHLARKCPQRKGMKAPAEQTSKSANVTIGNTGDGSGYGNLPTVFSVNQSTNWWVDTGANVARGSTVLMGNGSHASVHGVGTVDLKFTSGKIVQLKNGGKRYFMMLIDDATRFCYVYLLKTKDEVLDYFKIYKAEVENQLDRKIKRLRSDRGGEFFSNEFDLFCEEYGIIHERTPPYSPESNGIAERKNRTLTDLVNAMLDTTGLPKAWWGEALLTSNHVLNRVPNRNKDKTPYEIWIGRKPSLSYLRTWGCLTKVNVPITKKRKLGPKTVDCVFLGYAHHSIAYRFLIVKSEVPDMHVGTIMESRDATFFESFFPMKDTHSSSSQPSEIIPSSITPPEQTEHTHKHVTEEDDSEAPRRSKRQRMAKSFGDDFIVYLVDDTPKSISEAYASPDADYWKEAVRSEMDSIIANGTWEVTERPYGCKPVGCKWVFKKKLRPDGTIEKYKARLVAKGYTQKEGEDFFDTYSPVARLTTIRVLLSLAASHGLLVHQMDVKTAFLNGELDEEIYMDQPDGFVVEGQEDKVCKLLKSLYGLKQAPKQWHEKFDRTLTSTGFAVNEADKCVYYRHGGGEGVILCLYVDDILIFGTNLEVINEVKSFLSQKFDMKDLGVADVILNIKLIRGTIELGLHYSGYPAVLEGYSDSNWISDVDEIKATSEYFFTLGGDAVSWRSCKQTILTRSTMEAELMALDTAIVEAEWLRDLLMDLPIVEKPVPAILMNCDNQTVIVKVNSSKDNMKSSRHVKRRLKSVRKLRNSGVITLDYIQTTRNLADPFTKGLSRNVIDNASKEMGLRSM

SEQ ID NO: 19820 - protein, 814 aa, Oryza sativa
  Clone ID: TF_OSC20909j.C1.p1.fg
MGENQGLEQVMGKLVEMLAKKFNEAPTTSSAVVPHTESVQKIELMQNDIKLEGVKNYLSWSRRALLILKTKGLEGYVTGEIKEPENISSVEWKTWSTTNSLVVAWLLTSLIPAIATTVETISSASEMWKTLTNLYSREGNVMLMVETQEKISVLRQGERSVAEYVAELKHLWSDLDHYNPLGLEHPDCIAKMRKWIERRRVIEFLKGLNSEFEGRRNAMFHQTTLPTLDEAIAAMAQEKLKKKVLPSATPSSPSPTYVVAQSKETRECFNCGKMGHLIRDCRAPRKPSYGRGRFGDRGGARGGRGYAVLIQIGYLTRVHLDMSRERETGKKLGIGVRRDGLWYLDRKETSEDVCLALMASTSEEEAKKTDLSSLFIDLDDSTNGHDGHQMKDEILGPKGDEQPKKEKLVVGSIPCPMGGPVAQEQEWRKPHEEKNLQVYTRRTRCPVIQQVEEDNQVEEDVSREQGSLESGGEEEEVREESDLPIAIRKSVRSNAASLDSVQIPKDWREAKQDPRWHQAMLDELEALEKNKTWDLVPFPKGKKIVNYKWVYTVKQNPDGKVERYKARLVAKGYSQTYGIDYDETFAPVAKMSTVRTLISCAANFDWPLHQLDVKNAFLHGDLQEEVYMDVPPGFATSQTKGKVLRLKKSLYGLKQSPRAWFDRFRRAMCAMDYKQCNGDHTVFYHHCGDHITILAVYVDDMIITGNDCLEITRLKRNLSKEFEVKDLGQLRYFLGIEIARSPRGIVISQRKYVLDLLSETGRLGCRPVSTPIDQNHKLCAESGDPVNRERYQRLVGRLIYLCHTRPDITYAVSM

SEQ ID NO: 19821 - protein, 882 aa, Oryza sativa
  Clone ID: TF_OSC1445j.C1.p1.fg
MKLRLMRGTNPIRSAYIAADNRECYNCGQVGHVSYNCPTSRNIGGRGSIRGGHGGTRGGFRGDRGVFGGNRGGRGGDRGGRVGGRGRGRGVPQANAVKEDGKAVTLIGEQVTQWEEWQKNKTNESSNTTTHFGNFANYAQVGEGTQAQALASTYRHPIDWIIDSGASKHVTGLHNTFTSYTPYIHSETIQIADGTSKPIHGIGSVECTSSMNLSSVLHVPSFPVNLLSISSAIDQLKCIVVFDENSCLFQEKGTGRRIGTGVTRDGLWYINHEELGLPAVVGDVEKEISLLHYEGIIHQTTCPGTPPQNGVAERKNRHLLEVARSLMFQMNVPKYLWSEAVMTAAYLINRMPSRILGMKSPAELLLGKREFKVPPKVFGCVCFVRDHRPSVGKLDPHAVKCVFVGYASSQKGYKCWDPIGRRLFVSMDVTFREFEPYYKSKGDLDQFLEEFSTVMEVDSREGERERGDIHEKNVGDKNGEAVVIGSIPCSIDDASKVVEVIEDTQDEDREMVPHEEDGEEGEVVVGTIPCPMEGAERVKQKDVLVYQRRRFDSQGEKRKGLVQSQIEELPHPKCPVPESSQSLSPPASLASLETIGNTSPTLEHVELPLVQRRETRSNAGRPPIRLGFEHLSFMHDIANYITYSHVSPAYKTFIASLQTMPIPKDWKCAKQDPKWKDAMKEELNALVKNKTWELVKLPPEKRAVGCKWVFTVKQTPEGKVDRYKARLVAKGYSQTYGIDYDETFAPVAKMGTVRALVSCAVNFGWPLHQLDVKNAFLHGDLHEEVYMEIPPGFGNSQTVGKVCKLKKSLYGLKQSPRAWFDRFRHAVCDMGYSQCNGDHTVFYKHRGTHITILAVYVDDIVITGDDVEEIRCLKERLGKAFE

SEQ ID NO: 19822 - protein, 468 aa, Oryza sativa
  Clone ID: TF_OSC400358j.C1.p1.fg
MPLEDAHLIWNTLEERYDKSECDEAKLAIEEPLVECSNSSTICKEPQVILSNEQDSLATFTSSPTHVSIKGNEMVSSVNVDTSTSYSACRTNLLKVEVCGKKWPSEEFTSPRCSSSHLDEYSCIMEKSYLEKENLELKAQLVELTSKHVDLQEKYDELLCSHGNLVDSHAMLEVTHEVIIITVKSYVPHVQVDFTCANSCCSQANIFLRTTCDLDYVGKKDKYIDHGFVCNAQPSQDNRESMLKKLEKGSTVACTKFYQEDNKSNNKSKGQDQSKNKASITCFKCKKMGHHVRDCPWKKQKKLSKNEDLAHKFFKSTKEGHFASSCPCKIDDEATLPRKTSRINRRKCYGCIEKGHEIGFCPHKKDDHSNRSSKRQTGNKQVKKQDKSKTQLCYNCRAKGHIGKNCPIGKIPKPNLSFHHNLLRKAKNGTCATRVISSLHASTKAIWVPKSLVTNIHGPNVIWVPKYA

SEQ ID NO: 19823 - protein, 1496 aa, Oryza sativa
  Clone ID: TF_OSC400459j.C1.p7.fg
MSSVVGKEVVDASSLITKGDMKDLLEDLLKMGMIGQRNVAGGSKLKLEVMPSELRLEGSKNYLSWCRRAQLMLRAKGVDHFLQEGCEEPSDKESQAWRTWNTTNLTVMLLKHEEDIVIGNKWMQRRRVIHFLKGLNKEFEDRRAAMFHQATLPTMEEVIFAMVQEMRLKLMRGTNLTRSAYTVADNRECYNCGQVGHVSYNCPTPRNIGGRGLIRGGHGGFGGTRGGFGGDRGGFGGNRGGRGGDWRGRGGGRGRTEVLLRPMQPLRREKGLGGGLGLESGVMGCGTSIMRNWIGWHFWDGVVVMVNLSSFLLLPPNNYLNYPHWLHLSPPLSAWDGVRGVAASATGGTTVPVINPAVSAADPASVVGEKLKAAVLAANPVLAASAMGGGSIGHVGGRRGGRSCVRSGVDSGWGGLFNAIDTILIIGRGAFSIAIMELVMGAMENLIPKLGELLKEEYVMQSGVREKIQSVSRELESIHAALRKIGKVPWEHLDDELRLWAHDLREASYDMEDIIDSFLVRVDGHEASEVHWFKWFLEKMTNQFNKIKASHEIGVAMKEIDEKLQEVATRHARYTIDNIAINPAGPATVDPRLLSMYKTLAELVGIEGPMDELMKMLDIDLPTKKRKIEIDVSVRKPKMVSIFGFGGLGKTTLAKAVYDKLKPSFDSGAFIPVGQNPNIRKVFRDILMDLDKQSYNDLNLKLLDERQLINKLQEFLQKKRCFVVIDDIWDKDSWRLIRCALQDSNHESRVVTTTRIYEVATQVGEVYKMHPLSHDESKKLLYTRIISGEGESLRSTSVEACDKILKKCGGVPLAIIIIASLLANKPREYWSEVYNSIGLEHGYNDDVDNTRRILSLSYYDLPLHLKPCLLYLSIFPEDYYIEKNLLIWKWIAEGFVHEKQAAKLGLFETGEGYFNELINRSMIQPVEHEYSGYMCGCRVHDMVLDLILLLSGEENFVTVVDGSKEHELSWKNARRLALQHWSFEENRNQLANMGVKQTRSLIMTECFDKNMQLPSFQVLRVLEIQKQGRWWNIDGKINLQHVRNLLHLRFLHLDCIDSIPLIEQFRNLRFLQVLHLKESNIQELPESVGLLTKLLSLRVDIDVRVSPGVIEKLTSLQELYLWPYSDDTFQFVKVLGKLRELRVLHAKNLKLDGQGETSALLESLCNLHKIQTLDIDLNLNPNEGVTWDAGFTSPQCLRYLCLVSLRFHRMPEWINWSLLPNLSYLELRVNFLEELDLETLGRLPKLRYLHLFIHCDRIVSIGKIAGAGDACFQELRFLNTPYLYVRFDQHGIMCSKDEKAVMPNVKTLSFCVYVRILKDTDILGFDKLFSFAHLGRSSLQQVQVNIQCRGARAMEVEEAEAALAHAAAIHPNRPTLQIHKFSEGEMLPPHEEPSSFFPKVVVENLNAHERKDDDLRFVLGQMLQRNPCVKKFSVSINCENACLEEVEKAEAAARYAVDFHANRPTLELVKYGEDKMVLSGQHQQVCTPGCLSDSNP

SEQ ID NO: 19824 - protein, 300 aa, Oryza sativa
  Clone ID: TF_OSC401179j.C1.p20.fg
MARVYVGNLDPRVTAREIEDEFRVFGVLRSVWVARKPPGFAFIDFDDRRDAEDAIRDLDGKNGWRVELSTKAGSGRGRDRSGGSDMKCYECGEPGHFARECRLRIGSGGLGSGRRRSRSRSRSPRYRGRSRSRSPRYRRSPSYGRRSYSPRDRSPKRRSYSRSPPPARARSYSRSPPPPRAALFACCGCRNIRGLHMLLDVSTASGCAVVTVLRHFPGSQLFWSSSHILLQHSLYHASRHHCHDHMRYMCTTPTPGTGTPIRRFTWLCAKAVYASTEVTWLHYAAAAIKLPWHLQQKRLQ

SEQ ID NO: 19825 - protein, 1422 aa, Oryza sativa
  unsure (1)..(1422): unsure at all Xaa locations
  Clone ID: TF_OSC401225j.C1.p6.np
KLELMPNELRLEGSKNYLSWCRRAQLMLRAKGVDHFLLESCEEPSDKESQAWRTWNTTNSTVVSWLMNVAPSIGRMIEAIQNAAVVWKTLSNMYSGEGNVMMMVEAQNKVENLKQERRTVKEYASELQQLWANLDHYDPLQLKHEDDIVIGNKWLQRRRVIHFLKGLNKEFEDRRAAMFHQATLPTMEEAISAMVQEEMRLRLMRGNSIRSAYIAADNRECYNCGQVGHVSYNCPTSRNIGGRGSIRGGHGGTRGGFGGDRGGFGGNRGGRGGDRGGRVTNESSNTTTHFGNFANYAQVGEGTQAQALASTXTSYWIIDSGASKHVTGLHNTFTSYTPYIHSETIQIADGTSKPIHGIGSVECTSSMNLSSVLHVPSFPVNILSVSSAIDQLKCIVVFDENSCLFQEKGTGRRIGTGVRRDGLWYINHEELGLAAVVGDVEKEISLLHCQLGHPSFEILSKLYPDLFSRVDKHRLVCDACELGKHTRSTYVGIGLRNCEPFILIHSDVWACPVTSVSGFKWFVTFIDCHTRMTWIYMLKHKSEVLRCFQDFHKLVTTQFDAKVKIIRTDNGTEYINNEFVSYVSDEGIIHQTTCPGTPPQNGVAERKNRHLLEVARSLMFQMNVPKYLWSEAVMTAAYLINRMPSRILGMKSPAELLLGKREFKVPPKVFGCVCFVRDHRPSVGKLDPHAVKCVFVGYASSQKGYKCWDPIERRLFVSMDVTFREFEPYYKSKGDLDQFLEEFSTVMEVDRGERERGDIHEKNVGDKNGEAVVIGSIPCSIDDASKEDREMVPHEEDDREMVPHEEDGEEGEVVVGTIPCPMEGAERVKQKDVLVYQRRRFESGGEKKRVTLEHVELPLAQRRETRSNASRPPIRLGFEHLSSMHDIANYITYSHVSPAYKTFIASLQTVPIPKDWKCAKQDPKWKDAMKEELNALVKNKTWELVKLPPEKRTVGCKWVFTVKQTPEGKVDRYKARLVAKGYSQTYGIDYDEIFAPVAKMGTVRGLVSCAVNFGWPLHQLDVKNAFLHGDLHEEVYMEIPPGFGNSQTVGKVCKLKKSLYGLKQSPRAWFDRFRHAVCDMGYSQCNGDHTIFYKHRGTHITILAVYVDDIVITGDDVEEIRCLKERLGKAFEVKDLGPLRYFLGIEIARSSKGIVLSQRKYVLDLLTDIGMLGCRASTTPIDRNHQLCAQSGDPVDKEAYQRLVGRLIYLCHTRPDISYAVSVVSRYMHDPRTGHLDVVHKILRYLKGTPGKGLWFRKNGHLNVEGYCDADWASSMDDRRSTSGYCVFVGGNLVSWRSKKQAVVARSTAEAEYRAMALSLSEMLWMRSLLTELRVLRSDTVMLHCDNKSAISIANNPVQHDRTKHVEIDRFFIKEKIDSGVIRLEYIKSCEQLADCLTKGLGPSEIQSICNKMGMIDIFCPS

SEQ ID NO: 19826 - protein, 1082 aa, Oryza sativa
  Clone ID: TF_OSC401276j.C1.p5.fg
MSSGVGKEVVDASSVVTKGDMKDLLENLLKMGMIGPKSVAGGFELKLELMPNELRLEWSKNYLSWCRRAQLMLRAKGVDHFLQESCEEPSDKESQAWRMWNTTNSTVVSWLMTSVAPSISRMIETIQNAAIVWKTLSNMYSGEGNVMMMVEAQNKMQRQRVIHFLKGLNKEFEDRRAAMFYQATLPTMEEAISAMVQEEMRLKLMRGTNPTRSAYTVADNRECYNCGQVGHVSYNCPTPRNIGGRGLIRGGYGGFGGTRGGFGGDRGDFGGNHSGRGGRGGDRGGGGRGEQVTQWEEWQKNKINESSNTTTHFGNFANYAQVGEGIQAQALASTYRHPIDWIIDSGASKHFTGLHNTFTSYTPYVHSETIQIADGTSKPIHGIGSVECTSSINLSSDLHVPSFPVNLLSVSSAIDQLKCIVVFDENSHLFQEKGTGRRIGTRVRCDGLWYINHEELGLAAVVGNVEKEISLLHCQLGHPSFEILSKLYLDLFSKVDKHRLVCDACELGKHTRSTYVGIGLRNCEPFILIHSDVWGPCPVTSVSGFKWFVTFIDCHTRMTWIYMLKHNSEVLRCFQDFHKLVTTQFDAKVKIIRTDNGTEYINNEFVSYISDEGIIHQTSTPPQNGVAERKNRHLLEVARSLMFQMNVPKYLWSEAVMTAAYLINRMPSRILGMKSPVELLLGKREFKVPPKVFGCVCFVRDHRPSIGKLDPHAVKCVFVGYASSQKGYKCWDPIGRRLFVSMDVTFREFEPYYKSKGDLDQFLEEFSTVMEVDSREGEIERGDTHRKNVSDKNGETVVVGSIPCSIDNASKEAVEVIGDTQDKDREMVLHEEDGEDGEDEEVVVGTIPCPMERAEKTVPIPKDWKCAKQDPRWKDAMREELNALMKNKTWELVKLPPGKKAVGCKWVFTVKQTPEGKVDRYKARLVAKGYSQTYGIDYDETFAPVAKMGTVRTLVSCAVNFGWPLHQLDVKNAFLHGDLYEEVYMEIPPGFGNSQTVGKICKLKKSLYGLKQFPRAWFERFRCAVCDMGYSQCNGDHTVFYKHRGTYITILAVYVDDIVITGDDVEEIRCLKEWTPKCRRIL

SEQ ID NO: 19827 - protein, 1554 aa, Oryza sativa
  Clone ID: TF_OSC401564j.C1.p7.fg
MSSGEGKEVVDTSLLVTKGDMKGLLEDLLKMGMIGPRNAAGVSEVKLELMPNELRLEGSKNYLSWCRRAQLMLRAKGVDHFLLESCEEPSDKESQAWRTWNTTNSTVVSWLMTLVAPSIGRMIEAIQNAAVVWKTLSNMYSGEGNVMMMVEAQNKVENLKQEGRTVQEYASELQQLWADLDHYDPLLLKHEDDIVIGNKWLQRRRVIHFLKGLNKEFEDRRAAMFHQATLPTMEEAISAMVQEEMRLRLMRGTNPIRSAYIAADNRECYNCGQVGHVSYNCPTSRNIGGRGSIRGGHGGTRGGFGGDRGGFGGNRGGRGGDRGGRVGGRGRGRGVPQANAATEDGKAVTLIGEQVTQWEEWQKNKTNESSNTTTHFGNFANYAQVGEGTQAQALASTYRHPIDWIIDSGASKHVTGLHNTFTSYTPYIHSETIQIADGTSKPIHGIGSVECTSSMNLSSVLHVPSFPVNLLSVSSAIDQLKCIVVFDENSCLFQEKWTGRRIGTGVRRDGLWYINHEELGLAAVVGDVEKEISLLHCQLGHPSFEILSKLYPDLFSRVDKHRLVCDACELGKHTRSTYVGIGLRNCELFILIHSDVWGPCPVTSVSGFKWFVTFIDCHTRMTWIYMLKHKSEVLRCFQDFHKLVTTQFDAKVKIIRTDNGTEYINNEFVSYVSDEGIIHQTTCPGTPPQNGVAERKNRHLLEVARSLMFQMNVPKYLWSEAVMTAAYLINRMPSRILGMKSPAELLLGKREFKVPPKVFGCVCFVRDHRPSVGKLDPHAVKCVFVGYASSQKGYKCWDPIGRRLFVSMDVTFREFEPYYKSKGDLDQFLEEFSTVMEVDSREGERERGDIHEKNVGDKNGEAVVIGSIPCSIDDASKEVVEVIEDTQDEDREMVPHEEDGEEGEVVVGTIPCPMEGAERVKQKDVLVYQRRRFDSQGEKRKGLVQSQIEELPHQKCPVPESSQSLSPPASLASLETIGNTSPTLEHVELPLAQRRETRSNAGRPPIRLGFEHLSSMHDIANYITYSHVSPAYKTFIASLQTVPIPKDWKCAKQDPKWKDAMKEELNALVKNKTWELVKLPPEKRAVGCKWVFTVKQTPEGKVDMYKARLVAKGYSQTYGIDYDETFAPVAKMGTVRALVSCAVNFGWPLHQLDVKNAFLHGDLHEEVYMEIPPGFGNSQTVGKVCKLKKSLYGLKQSPRAWFDRFRHAVCDMGYSQCNGDHTVFYKHRGTHITILAVYVDDIVITGDDVEEIRCLKERLGKAFEVKDLGPLRYFLGIEIARSSKGIVLSQRKYVLDLLTDTGMLGCRASTTPIDRNHQLCAQSGDPVDKEAYQRLVGRLIYLCHTRPDISYAVSVVSRYMHDPRTGHLDVVHKILRYLKGTPGKGLWFRKNGHLNVEGYCDADWASSMDDRRSTSGYCVFVGGNLVSWRSKKQAVVARSTAEAEYRAMALSFSEMLWMRSLLTELRVLRSDTVMLHCDNKSAISIANNPVQHDRTKHVEIDRFFIKEKIDSGVLRLEYIKSCEQLADCLTKGLGPSEIQSVCNKMGMIDIFCSS

SEQ ID NO: 19828 - protein, 1647 aa, Oryza sativa
  Clone ID: TF_OSC415902j.C1.p18.fg
MSSGEGKEVVDTSLLVTKGDMKGLLEDLLKMGMIGPRNAAGVSAVKLELMPNELRLEGSKNYLSWCRRAQLMLRAKGMDHFLLESCEEPSDKESQAWRTWNTTNSTVVSWLMTSVAPSIGRMIEAIQNAAVVWKTLSNMYSGEGNVMMMVEAQNKVENLKQEGRTVQEYASELQQLWADLDHYDLLQLKHEDDIVIGNKWLQRRRVIHFLKGLNKEFEDRRAAMFHQATLPTMEEAISAMVQEEMRLRLMRGTNPIRSAYIAADNRECYNCGQVGHVSYNCPTSRNIGGRGSIRGGHGGTRGGFRGDRGGFGGNRGGRGGDRGGRVGGRGRGRGVPQANAVKEDGKAVTLIGEQVTQWEEWQKNKTNESSNTTTHFGNFANYAQVGEGTQAQALASTYRHPIDWIIDSGASKHVTGLHNTFTSYTPYIHSETIQIADGTSKPIHGIGSVECTSSMNLSSVLHVPSFPVNLLSVSSAIDQLKCIVVFDENSCLFQEKRTGRRIGTGVRRDGLWYINHEELGLAAVVGDVEKEISLLHCQLGHPSFEILSKLYLDLFSRVDKHRLVCDACELGKHTRSTYVGIGLRNCEPLILIHSDVWGPCPVTSVSGFKWFVTFIDCHTRMTWIYMLKHKSEVLRCFQDFHKLVTTQFDAKVKIIRTDNGTEYINNEFVSYVSDEGIIHQTTCPGTPPQNGVAERKNRHLLEVARSLMFQMNVPKYLWSEAVMTAAYLINRMPSRILGMKSPAEQLLGKREFKVPPKVFGCVCFVRDHRPSVGKLDPHAVKCVFVGYASSQKGYKCWDPIGRRLFVSMDVTFREFEPYYKSKGDLDQFLEEFSTVMEVDSREGERERGDIHEKNVGDKNGEAVVIGSIPCSIDDASKVVEVIEDTQDEDREMVPHEEDGEEGEVVVGTIPCPMEGAERVKQKDVLVYQRRRFDSQGEKRKGLVQSQIEELPHPKCPVPESSQSLSPPASLASLETIGNTSPTLEHVELPLAQRRETRSNAGRPPIRLGFEHLSSMHDIANYITYSHVSPAYKTFIASLQTMPIPKDWKCAKQDPKWKDAMKEELNDLVKNKTWELVKLPPEKRAVGCKWVFTVKQTPEGKVDRYKARLVAKGYSQTYGIDYDETFAPVAKMGTVRALVSCAVNFGWPLHQLDVKNAFLHGDLHEEVYMEIPPGFGNSQTVGKVCKLKKSLYGLKQSPRAWFDRFRHAVCDMGYSQCNGDHTVFYKHRGTHITILAVYVDDIVITGDDVEEIRCLKERLGKAFEVKDLGPLRYFLGIEIARSSKGIVLSQRKYVLDLLTDTGMLGCRASTTPIDRNHQLCAQSGDPVDKEAYQRLVGRLIYLCHTRPDISYAVSVVSRYMHDPRTGHLDVVHKILRYLKGTPGKGLWFRKNEHLNVEGYCDADWASSMDDRRSTSGYCVFVGGNLVSWRSKKQAVVARSTAEAEYRAMALSLSEMLWMRSLLTELRVLRSDIVMLHCDNKSAISIANNPVQHDRTKHVEIDRFFIKEKIDSGVLSLEYIKSCEQLADCLTKGQIVYSSGGRIKHTAAVPICGYTDQIEVCAQHLVANRDSYRLKHIAYQIHDMNMCLVVSKCGQEERLSVVSCVCLDEKGIGGQGPPCLADNTEAAELLGWEPHQDVEQHVQREDARI

SEQ ID NO: 19829 - protein, 1713 aa, Oryza sativa
  Clone ID: TF_OSC900306j.C1.p19.fg
MGWGVACHTPPDTRAASGHVAVVLSITWPVTDRFFVIIDDIWDRKSWELIRCAVQDSKLGSRVVVTTRIFEIATHRGEKEKKEMSSVVGKEVVDASSLITKGDMKDLLEDLLKMGMIGQRNVAGGSKLKLEVMPSELRLEGSKNYLSWCRRAQLMLRAKGVDHFLQEGCEEPSDKESQAWRTWNTTNLTVMLLKHEEDIVIGNKWMQRRRVIHFLKGLNKEFEDRRAAMFHQATLPTMEEVIFAMVQEMRLKLMRGTNLTRSAYTVADNRECYNCGQVGHVSYNCPTPRNIGGRGLIRGGHGGFGGTRGGFGGDRGGFGGNRGGRGGDWRGRGGGRGRTEVLLRPMQPLRREKGLGGGLGLESGVMGCGTSIMRNCKFRHWLHLSPPLSAWDGVRGVAASATGGTTVPVINPGRFRGGSSISGGRETEGGRSCSEPSVGGIGNGRGRGAFSIAIMELVMGAMENLIPKLGELLKEEYVMQSGVREKIQSVSRELESIHAALRKIGKVPWEHLDDELRLWAHDLREASYDMEDIIDSFLVRVDGHEASEVHWFKWFLEKMTNQFNKIKASHEIGVAMKEIDEKLQEVATRHARYTIDNIAINPAGPSTVDPRLLSMYKTLAELVGIEGPMDELMKMLDIDLPTKKRKIEIDVSVRKPKMVSIFGFGGLGKTTLAKAVYDKLKPSFDSGAFIPVGQNPNIRKVFRDILMDLDKQSYNDLNLKLLDERQLINKLQEFLQKKRCFVVIDDIWDKDSWRLIRCALQDSNHESRVVTTTRIYEVATQVGEVYKMHPLSHDESKKLLYTRIISGEGESLRSTSVEACDKILKKCGGVPLAIIIIASLLANKPREYWSEVYNSIGLEHGYNDDVDNTRRILSLSYYDLPLHLKPCLLYLSIFPEDYYIEKNLLIWKWIAEGFVHEKQAAKLGLFETGEGYFNELINRSMIQPVEHEYSGYMCGCRVHDMVLDLILLLSGEENFVTVVDGSKEHELSWKNARRLALQHWSFEENRNQLANMGVKQTRSLIMTECFDKNMQLPSFQVLRVLEIQKQGRWWNIDGKINLQHVRNLLHLRFLHLDCIDSIPLIEQFRNLRFLQVLHLKESNIQELPESVGLLTKLLSLRVDIDVRVSPGVIEKLTSLQELYLWPYSDDTFQFVKVLGKLRELRVLHAKNLKLDGQGETSALLESLCNLHKIQTLDIDLNLNPNEGVTWDAGFTSPQCLRYLCLVSLRFHRMPEWINWSLLPNLSYLELRVNFLEELDLETLGRLPKLRYLHLFIHCDRIVSIGKIAGAGDACFQELRFLNTPYLYVRFDQHGIMCSKDEKAVMPNVKTLSFCVYVRILKDTDILGFDKLFSFAHLGRSSLQQVQVNIQCRGARAMEVEEAEAALAHAAAIHPNRPTLQIHKFSEGEMLPPHEEPSSFFPKVVVENLNAHERKDDDLRFVLGQMLQRNPCVKKFSVSINCENACLEEVEKAEAAARYAVDFHANRPTLELVKYGEDKMVLSGQHQQVLKRTKTGFHPAATLEGVRRHGNALRRLERHHCRPGQGRAWFSPVVHRLLIKSCSPLLQLPTLHRQYVNIAAPTPLVGQPPLPPCRPPTRRHRIAGKPLPPPVVPPCAVLASAVTDHTSSCRANFHDHCGTAGSLRCHLHALPCRPPPLPACAGCALPSSAAPARVGRPSSASIAAYMPTSASAATWTLALAASRLSMTKFGNISIGDED

SEQ ID NO: 19830 - protein, 525 aa, Oryza sativa
  Clone ID: TF_OSC900373j.C1.p7.fg
MECRGSRGFGSSMNIKSKSKVGIDQSKGAVFENGSTRDRESHLEVLSGTSWHQGEVEKFHKCCPEVPGTFTRKLLAGFQFKLDAHLIWNTLEERYDKSECDEAKLAIEEPLVECSNSSTICKEPQVILSNEQDSLATFTSSPTHVSIKGNEMVEVCGKKWPSEEFTSPRCSSSHLDEYSCIMEKSYLEKENLELKAQLVELTSKHVDLQEKYDELLCSHGNLVDSHAMLEVTHEVIIITVKSYVPHVQVDFTCANSCCSQANIFLRTTCDLDYVGKKDKYIDHGFVCNAQPSQDNRESMLKKLEKGSTVACTKFYQEDNKSNNKSKGQDQSKNKASITCFKCKKMGHHVRDCPWKKQKKLSKNEDLAHKFFKSTKEGHFASSCPCKIDDEATLPRKTSRINRRKCYGCIEKGHEIGFCPHKKDDHSNRSSKRQTGNKQVKKQDKSKTQLCYNCRAKGHIGKNCPIGKIPKPNLSFHHNLLRKAKNGTCATRVISSLHASTKAIWVPKSLVTNIHGPNVIWVPKYA

SEQ ID NO: 19831 - protein, 943 aa, Oryza sativa
  Clone ID: TF_OSC9929j.C1.p2.fg
MSSGVGKEVVDASSVVTKGDMKDLLENLLKMGMIGPKSVAGGFELKLELMPNELRLEWSKNYLSWCRRAQLMLRAKGVDHFLQESCEEPSDKESQAWRMWNTTNSTVVSWLMTSVAPSISRMIETIQNAAIVWKTLSNMYSGEGNVMMMVEAQNKMQRQRVIHFLKGLIKEFEDRRAAMLYQATLPTMEEAISAMVQEEMRLKLMRGTNPTRSAYTVADNRECYNCGQVGHVSYNCPTPRNIGGRGLIRGGYGGFGGTRGGFGGDRGDFGGNHSGRGGRGGDRGGGGRGRGEEKGTGRRIGTRVRCDGLWYINHEELGLAAVVGNVEKEISLLHCQLGHPSFEILSKLYLDLFSKVDKHRLVCDACELGKHTRSTYVGIGLRNCEPFILIHSDVWGPCPVTSVSGFKWFVTFIDCHTRMTWIYMLKHNSEVLRCFQDFHKLVTTQFDAKVKIIRTDNGTEYINNEFVSYISDEGIIHQTSTPPQNGVAERKNRHLLEVARSLMFQMNVPKYLWSEAVMTAAYLINRMPSRILGMKSPVELLLGKREFKVPPKVFGCVCFVRDHRPSIGKLDPHAVKCVFVGYASSQKGYKCWDPIGRRLFVSMDVTFREFEPYYKSKGDLDQFLEEFSTVMEVDSREGEIERGDTHRKNVSDKNGETVVVGSIPCSIDNASKEAVEVIGDTQDKDREMVLHEEDGEDGEDEEVVVGTIPCPMERAEKTVPIPKDWKCAKQDPRWKDAMREELNALMKNKTWELVKLPPGKKAVGCKWVFTVKQTPEGKVDRYKARLVAKGYSQTYGIDYDETFAPVAKMGTVRTLVSCAVNFGWPLHQLDVKNAFLHGDLYEEVYMEIPPGFGNSQTVGKICKLKKSLYGLKQFPRAWFERFRCAVCDMGYSQCNGDHTVFYKHRGTYITILAVYVDDIVITGDDVEEIRCLKEWTPKCRRIL

SEQ ID NO: 19832 - protein, 126 aa, Oryza sativa
  Clone ID: TF_OSC30459j.C1.p3.gp
GVTCFNCGGKGHYSNKCPQKQKQHGVRSTNAAAMKDKTPNLTGVTCFDCGDRGHFSYTCPQNLLEVMLTAELEPHDDTYERQPKADNGTVPTVLSLNCGEASHCGRNNPMKSLESSSDKINSTAMT

SEQ ID NO: 19833 - protein, 402 aa, Oryza sativa
  Clone ID: TF_OSC23022j.C1.p2.fg
MADNEKGNKVRSQDIGTSSSRVNEAPDTSCVTLVQHLINQNRLLIEILQQHQTPILNLSQIQPQVQLEAVQALTPQVSMPPASRRTHGDVPHVDPKEASNICFMCDEQGHYARERPQQKRKTPMRTEDEVRKMIITSTEWPPPGMTRRQRRNTFRGAPQLTEHLLANGGRVSDSEDSDQVSSDDEDEMERKACSRCGEIGHVASSCATICVHCEEDHPPDRCPTSRITCFFCEGTDHVPKDCQFSFLLTKKMVNQPASSNGEKHQGNTNPRQNYSLSLNPVPGQRNQNEKWKCRVREDICCFNCQGMGHFADKCPRPRNIAASMSVPATPCNQKLAPQRIVIHAARSSPIDRVATAPTPASALPPGVNAQFQPQPSVYKTEASIGIVSLDVPAQQPKKSSIR

SEQ ID NO: 19834 - protein, 850 aa, Oryza sativa
  Clone ID: TF_OSC408350j.C1.p3.fg
MADNEKGNKVRSQDIGTSSSRVNEAPDTSCVTLVQHLINQNRLLIEILQQHQTPILNLSQIQPQVQLEAVQALTPQVSMPPASQKTHGGVPHVDSKEASIICFMCDEQGHYARNCPQQKGKTPMRTEDEVRKMIITSTEWPPPGMTKRQRRNTFRGAPQLTEHLLANGGRVSDSEDSDQVSSDDEDEKSPQGFNQNKMERKACSRCGEIGHVASSCASTCVHCEEDHPPDRCPTSRITCFFCEGTDHVPKDCQFSLLLTKKMANQPASSNGEKHQGNTNPRQDYSFSLTPVPGQRNQNEKRKCRVREDICCFNCQGMGHFADKCPKPRDIAASTPIARVATAPTPASALPQGVNAQFQPQPPVDKTEASIGIVPLDVPAQQPRNQNWNNPAGATNVQVPTVQQQCKLSEFLKTETPTFAIAVEPMEASDWLRTVEKKLGLIQCTDQERVVFATHQLVGLASELWDSYEASRPEGHTITWDEFSLVFKRSHVPAGMITLRKREFRYLKQEDLTVTEYLHEFHRLAHYAPEDVENDEDKQEKYLQGLKDEIAVQLLLEEYEDFEKLNCKRRIVSIPVFPCGNQRQRTEPLQITGSSVAHQEFPPQEDGHNADNNISNTNDDDTTNNHASCPISDHSNQACNVNIIHQGVDDSINDGTQNDNPSNCDSKKDSNGDSNYGTTDANVSKDFQPPIPTPSQNDRPQTDSSAKKTLICYNCKEPGHYSRDCLQPRQSRPPHYRQFTRSRHPNRIVVTGANAVPVSLKDSTPKDLIAPEASSTPGAKSTWLRKVESGNLYEVDSEDMNHEKFWNGSIIKLPQPSLSQLKGAPWFKSGEEKIPSATGGQAKQFRVVKFC

SEQ ID NO: 19835 - protein, 658 aa, Oryza sativa
  unsure (1)..(658): unsure at all Xaa locations
  Clone ID: TF_OSC9374j.C1.p4.np
VKESGSSTNYPVLTKTNYNDWALLMKIKLRARCLWDAVECGPVELHEDRMALDGICSTVPPEMISTLATKASVKEAWDCIKTMRVGDDRIRKASAQRVRTEYERIVFRDGXSVEDFAMRLTSVVNQLATLGDPEPDDKVVEKYLRVARPMFSQLVLSIETLLDISTLSLEEITGRLKAAEDYQPPPSSQNTDGKLYLTEEEWLECHKKEQEAKRSGAGSSGRNKRRGRKGCTGQLGWAPVRAPGRRRRGRVSVATTSSLAHRDDKCRNCGKLGHWAKECRSKPKHEDQAHVAQDEPTLMLLTGGCVETPPATPAPQCVCIELVEKKVFTALDTGGCVETPPATPAPQCVCIELVEKKVFTALDDEADRDRSWIMDSGASNHMTGCRAAFSDLDTSVTGNVRLGDGSIVPIEGRSTVLFTCKNGEHRTLANTYFLPWLAANIVSIGQLHKTGFQVLVEDGIMRVRDEQWRLLTQIPRSPGRLYVLDIKLARPVCLTARPGENAWRWHARFGHINFTALRKMSRETLVRGLPLLMHVDQVCEACLAGKHRRAPFPQRVLSRSNEPLQLLHGDLCSPISPATPSGNRYFLLLVDDYSRFMWIKLLLSKDVAPAAIKQIQAAAESKGKLLCALRTDRGGEFTADHFIVMTESNCISKHYTHQ

SEQ ID NO: 19836 - protein, 437 aa, Oryza sativa
  Clone ID: TF_OSC401000j.C1.p11.fg
MASRDIVHTGGDPPMFDGTNYAQWKIHMISYFTAMSPKIWWIVDVGFSHALDDHAPTSGQDKCLHLDAQATNALFCGLSDDMFNEVCNLKSAHAMWVKLKEKYEVPTLVENGCTQESMSGEDSTSSSDDEELPIPSTSPHCLMTNCKNEVKNDSLDSIIENTCVVDDGGDDDEPSYDDLFNILREATSSCSTSKASVSTSCDDLLDVPCSSSIDENSCSSSSMYIVANLVEENKQLQAQVKDLKEDLDRSYKGKNTLDEILSKQKSTNDKCGLGFHRKENAKKTRHMPRYARKHAYLRNDGKKNVSKNHPHITCFGCHEKGHFASVCANMKDEKCNFKLRQTGKKQDKTTSHRGQNLTCYNCRKKGHIGKNCPIGNTPKPNIIFDDYVLRKNRQGNVFARYVGLPRLAPRRRTIWVPRILVTNIDGPNFVGDQNVPK

SEQ ID NO: 19837 - protein, 543 aa, Oryza sativa
  Clone ID: TF_OSC900175j.C1.p8.fg
MADNEKGNKVRSQDIGTSSSRVNEAPDTSCVAVVQHLINQNKLLIEILQQHRMPILNPSQMQPQVQLEAVQALTPQVSAPPTSQKAPHAMPHVDPKEASIICFMCDEQGHYARNCPQQKRKAPMRTEDEVRKMIITSTEWPPPGMTKHQRRNSFRGAQQLTEHLLANGGRVSGSEDSDQVSSDDEDEKSPQGFNQNKIELKACSRCGEIGHVASSCASTCVHCEEDHPPDRCPTNKITYFFCEGTDHVPKDCQFSFLLTKKMANQPASSNGEKHQGNTNPRQDHRFSLTPVPGQRNRNEKRKCRVREDICCFNCQGMGHFADKCPKPRNIAAGTSVHATPCNQKLAPQRIVIHASRSSPIARVATAPIPMNALPQGVNAQFQPQPPADKTGASICVVPLEVPIQQLRNQVQDEEPELKKGITPKTVPNQGKIDLHITANLHEADIPIVLWSLEQTPYPGNLSEVDSEDMNHEKFWNGSITALPQPSLSQPKGAPWSKSGEEEIPPATGGQAKQFRVVKFCWKFVKTQRKKSDKKRRPPNLSSC

SEQ ID NO: 19838 - protein, 227 aa, Oryza sativa
  Clone ID: TF_OSC101455j.C1.p23.gm
MAGFADALRPDKFSGVHFKRWQIRVTLWLTAMKCFWVSTGKPEGILIADQQKQFEEATTLFVGCILSVLGDRLVEVYMHMTDAKELWDALNTKFGATDASNDLYIMEQFHDYKMTDNRSIVEQAHEIQTMAKELELLNANVVHKAQNKSKGKYKAQQTTNFKKKKKNNNNPNQDERTCFMCGQPGHLARKCPQRKGMKAPAGQTSKSANVTIGNTGDGGGSHGVPSS

SEQ ID NO: 19839 - protein, 1166 aa, Oryza sativa
  Clone ID: TF_OSC3174j.C1.p1.fg
MAGFADTLRPDKFTGVHFKRWQIRVTLWLTAMKCFWVSTRKPEGILTAPQQKQFEEATTLFVGCILSVLGDRLVEEKAREKDAASKGDGGQSSANVVHKAYNKSKGKYKAQQTTNFKKQKKNNNNPNQDERTCFVCGQPGHLAKKCPQRKGMKAPAGQTSKSANVTISNTGDGSGYGNLPTVFSVNQSTNWWVDTGANVAWGSTVLMGNGSHASVHGVGTVDLKFTLGKIMNLVSGSCLTRDGFKLVFESNKVVVSKHGYFIGKDYECGGLFRFSLSDFCNKPVNHICGSVDDEANVWHSRLCHINFGLMSRLSSMRLIPKFSIVKCSKCHSCVQPKQPRKPHKAAEERNLAQLELLHSDLCEMNGVLTKGGKRYFMTLIDDATRFCYVYLLKTKDEALDYFKIYKAEDENQLDRKIKRLRSDRGGEFFSNEFDLFCEEHGIIHERTPPYSPESNGIAEKKNRTLTDLVNAMLDTAGLPKAWWGEALLISNHVLNRVPNRNKDKTPYEIWIGRKPSLSYLRTWGCLAKVNVPITKKRKLGPKTVDRVFLGYAHHSIAYRFLIVKSEVPDMHIGTIMESRDATYFESFFPMKDTYSGSSQPSEIIPSSITPPEQTEHLYEHVTKEDVSEAPRRSKRQRTAKSFGDDFTVYLVDDTPKSISEAYASPDADYWKEVVRSEMDSIIANRTWEVTERPYGCKPVECKWVFKKKFRPDGTIEKYKAQLVAKGYTQKEGEDFFDTYSPIARLTTIRVLLSLAASNGLLVHQMDVKTTFLNRELDEEIYMDQPDGFVVEGQEGKVCKLLKSLYGLKQASKQWHEKFDKTLTSAGFAVNEADKCVHYRHGGGEGVILCLYVDDILIFGTNLEVINEVKSFLSQNFDMKDLGVADVILNIKLIKGENGITLLQSHYMEKILNSFGYIDSKASPTPYDTSLLLRKNKRIARNKLEYSQIIGSLIYLASATRPDISFAVSMVSRFTSNPGDDHWRALERVMRYLKGTMELGLHYSGYPAVLEGYSDSNWISDVDEIKATSGYVFTLGGGAVSWRSCKQTILTRSTMEAELTALDTATIEAEWLRDLLMDLPIVEKPVPAILMNCDNQTVIVKVDSSKDNMKSSRHVKKRLKSVRKLRNSGVITLDYIQTARNLADPFTKGLSRNVIDNASKEMGLSPM

SEQ ID NO: 19840 - protein, 79 aa, Oryza sativa
  Clone ID: TF_OSC34965j.C1.p1.gm
KKNPHASPNNKKVKPDVKPKAAANFKKKGKGKAKGACFVCGKSGHWAKDCPERKDRKSANMVGKRFLLVDGKRVACGCS

SEQ ID NO: 19841 - protein, 434 aa, Oryza sativa
  unsure (1)..(434): unsure at all Xaa locations
  Clone ID: TF_OSC400343j.C1.p1.np
MAPQPICQTCALNYLGSNEDPALSENPNQLAEQVTNQVAKTDDTVPGPNKEVANSGQSDSDKATEIQGLQSVSGQSDSDKATEIQGLQSVEDTDTNKEKNKXFLNVMITGMKTPLRAHDYPNFQNSIDKSLLQEYSTVKEGSGHKRKTSPSEVDMQDVPQCQTMQPCQDIPKYPTLKSKKIRHVPGLICFICHEIGHYMRHCPQKPYMDALLQANMRTSRTPFYPQGSPNSQNVNTVRPTSPDDKRAKASCDMCQDIQEKKEMQEYKKRKVSSVEIQERESSRQKKNPPVQHNQGASQYPNSSGYMPRSTVSESSQHATMINSNSHEGSNSVSCPPPSKRRGYKAGVECFICHEMGHYSWDCLQKVKSKKVQPTTSLPNVSGQKNSKPPNNGSVSLTSPPVEQNRLNQVQEETNGEVMNLKQVEQNAQKERDPQ

SEQ ID NO: 19842 - protein, 2174 aa, Oryza sativa
  Clone ID: TF_OSC11379j.C1.p1.fg
MVNTRTGTGSGSGSGSGSGATNNGGDPTLAQILAQQTQLINLLVQQAQNQQANNQNQNPPPPPQNKLADFLRVRPPTFSSTTNPVEAGDWLHAVEKKLDLIQCTEQEKVSFASHQLHGPAAEWWDHFRQGRAEGELITWQEFTTAFKKTHIPSGVVALKKREFRALNQGSRSVTEYLHDVNRLARYAPEDVRTDEERQEKFLEGLNDELSYALMSTDFRDFQQLVDKAIRQEDKYNRMEQKKRRAAQFKAQQGSNQRPRLVTGPQAPSYPQGGSSSVVRPQRQFYNNNTGNRGNDNRNMVARPAATPAQNQPVRKEQGSKPVICFNCGDPGHYADKCPKPRHVKNAPAPNNSNVLAPKARVNHVAAAEAQNAPDVVLEIEEVLFPSSLILLESKDLDVILGMDWLSRHRGVIDCANRKVTLTSSNWETVSFFVSSPKYHGVNLNQVALQEIPIVQDYPDVFPEDLPAPGLEWYIPGLEIELCSRGGCSEWLGLYNRMPRYKPEYLFGVEGFVQELRTMSFVIGFGTAPFYAQIPHDRHEEKCRVRVTLNSNSEEVPSVMFEAGGRNYIHACQEVARIAIGELRDRYSDQLADTEYRYHPRQPQGSDRGSYLETEGIENDVTTKHLVEMLWAMDESRAETVLAAQDREDRNRGKICKLEDKVDRLEKELAALKGEAPPQKARIRLTARKRALFVPRYQLAPKMVNTRSNGNGPNNPNNNNNGENPTLAQVLAQQTQLMNMMMQQFQNQQNQGNNHAPPQNKLAEFLRVRPPVFSSTTNPVEASDWLHAIEKKLDLLQCTDQEKVSFASHQLHGPASEWWDHFRLNRTTAEPITWLEFTAAFRKTHIPSGVVSLKKKEFRSLSQGSRSVTEYLHEFNRLARYAPEDVRNDEERQEKFLGGLNDELSYPLMVGDYPDFQKLVDKAIRQEDKYNRMEQKKRRIAQFKTQQGNNQKPRLTLGPQPMPQGGSSSVVRPQRQFFNNNAGNNIRNQAPRPVAAPAQQQPAKREQGNKPVVCFNCGDPGHYADKCPKPRRVKVVPAQNNSAVPASKARVNHVAAAEAQDAPDVILGTFLVNSVPATVLFDSGATHSFLSTSFAGNHGMEVEDLRRPLMVSTPSNQALSLQRSPSVRIEIQGVPFLANLILLKSKDLDVILGMDWLARHKGVIDCANRKVTLNSYDGRVVTVHALSSESLRSRLNQITLEEIPIVREYPDVFPDDLPGMPPKRDIEFRIDLVPGTTPIHKRPYRMAANELAEVKRQVDDLLQKGYIRPSSSPWGAPVIFVEKKDHTQRMCVDYRALNDVTIKNKYPLPRIDDLFDQLKGATVFSKIDLRSGYHQLRIKEEDIPKTTFTTRYGLFECTVMSFGLTNAPAFFMNLMNKVFMEYLDKFVVVFIDDILIYSRTKEEHEEHLRLALEKLREHQLYAKFSKCEFWLSEVKFLGHVISAGGVAVDPSNVESVTNWKQPKTVSEIRSFLGLAGYYRRFIENFSKIAKPMTRLLQKDVKYKWSEECEQSFQELKSRLISAPILILPDPKKGFQVHCDASKLGLGCVLMQDGKVVAYASRQLRPHEKNYPTHDIELAAVVHALKIWHHYLFGTRTEVYTDHKSLKYIFTQPDLNMRQRRWLELIKDYDMGIHYHPGKANVVADALSRKGYCNATEGRQLPLELCKEFERLNLGIVDRGFVAALEAKPTLIDQVREAQINDPDIQEIKKNMRRGKAIGFLEDEHGTVWLGERICVPDNKDLKDAILKEAHDTLYSIHPGSTKMYQDLKERFWWASMKREIAEYVAVCDVCQRVKAEHQKPAGLLQPLKIPEWKWEEIGMDFITGLPRTSSGHDSIWVIVDRLTKVAHFIPVKTTYSGSRLAELYMARIVCLHGVPKKIVSDRGSQFTSNFWKKLQEEMGSKLNFSTAYHPQTDGQTERVNQILEDMLRACALDFGGSWDKNLPYAEFSYNNSYQASLQMAPYEALYGRKCRTPLLWDQTGERQVFGTDILREAEEKVKIIQERLRVAQSRHKSYADNRRRDLSFEEGDYVYLRVTPLRGVHRFHTKGKLAPRFVGPYKIVSRRGEVAYQLELPQSLAGVHNVFHVSQLKKCLRVPTEEANIEQIEVQEDLTYVEKPIRILETSERRTRNRVIRFCKVQWSNHSEEESTWEREDELKSAHPHLFASSSESRGRDSV

SEQ ID NO: 19843 - protein, 861 aa, Oryza sativa
  unsure (1)..(861): unsure at all Xaa locations
  Clone ID: TF_OSC400718j.C1.p80.np
RGPRNSARENHDLRDHRRRRRGFRRIPPSPRTIKRGKSLPVIPSLFSPAFPSLSPSGSFGFAPAIFAGASMAPEMAAAVSFPSGLSLSLPALYNRSPCPLLRFRRSPLALPVGIKPAPSSSLSAVAAELRFAAVVAPDLLPLRRRLLRLRRVFVDLVRSFVSPADRRSAAVLVDPNRAAASRRFGAVSVTAVDPGEPRTAASLPSSPLSRPPSAVPMAAAGDHRGAGAPPPVGRAGEAAFGRAPWLPGGARPSAARARGCGXRVGPTAPAGFAXSTCRISLTYIITAKDLDLLRSYPXFLICLSPLFSLSPSPNRNRWLTMRKAIRSEVRTLVPQAPEXMKHQTPVVXHWSNTINQNRLLIEILQQHQTPILNLSQIQPQVQLRQSKHSHHESACRQHPERPMVTCHMLTQKKQARECPQQKRKTPMRTEDARECPQQKRKTPMRTEDEVRKMIITSTEWPPPGMTKRQRRNTFRGAPQLTEHLLANGGRVFDSEDSDQVSSDDEDEMERKACSRCGEIGHVASSCATTCVHCEEDHPPDRCPTSRITCFFCEGTDHVLKDCQFSFLLTKKMANQPASSNGEKHQGNTNPRQDYSFSLTPVPGQRNQNERKCRVREDICCFNCQGMGHFADKCPKPRNIAAGPSVHATPCNQKLAPQRIVIHASRSSPIARVATAPTPASALPQGVNAQFQPQPSVDKTAALYLWMFQHSSQNQVQDEEPEQDHPPGECPTRKVTCFLCEETNHVPKDCQLSVLLTKTAEIQRTTLRLSHQLVSSNSNIDDIIHSTNAPPAPPNSATNHSTNTFSTNHSLHRQPQQRIVVDGRSCFPTPGRAKGNQPQEGDTKQKTVIRFNQQSEGSFSCE

SEQ ID NO: 19844 - protein, 574 aa, Oryza sativa
  Clone ID: TF_OSC30299j.C1.p3.fg
MDISEANEGYASCGSVIEMSRQMKTTRVGLGWLGTSWDPGRVASSVRIIVGLGLRQNKPNIHHNSKRLRSVKVLSLVSNLSLPFVFPLSLSKPLQQMADNEKGNKVRSQDIGTSSSRVNEAPDTSCVTLVQHLINQNRLLIEILQQHQTPILNLSQIQPQVQLEAVQALTPQVSAPPTSQKAPHAMPHVDSKEASIICFMCDEQGHYARNCPQQKRKAPMRTEDEVRKMIITSTEWPPPGMTKCQRRSSFRGAQQLTEHLLANGGRVSGSEDSDQVSSDDEDEKSPQGFNQNKIELKACSRCGEIGHVASSCASACVHGEEDHPPDRCPTSRITCFFCEGTDHVPKDCQFSFLLTKKMANQPASSNGEKHQGSTNPRQDYSFSLTPVPGQRNQNEKRKCRVREDICCFKCQGMGHFADKCPKPRNVAASTSVHATPRNQKLAPQRIVIHASRSSPIARVATAPTPMSALPQGVNAQFQPQPPADKTEVSICVVPLEVPIQQLRNQVQDEEPECKKVIVCYNCSEEGHYSKNCPQPRQNRPPHFRQFTGSNHANHQVVSGANAVPVKPSASQKQP

SEQ ID NO: 19845 - protein, 477 aa, Oryza sativa
  Clone ID: TF_OSC873j.C1.p1.fg
MADNEKGNKVRSQDIGTSSSRVNEAPDTSCVAVVQHLINQNKLLIEILQQHRMPILNPSQIQPQVQLEAVQALTPQVSAPPTSQKAPHAMPHVDPKEASIICFMCDEQGHYARNCPQQKRKAPMRTEDEVRKMIITSTEWPPPGMTKCQRRNSSRGAQQLTEHLLANGGRVSGSEDSDQVSSDDEDEKSPQGFNQNEIELKACSRCGEIGHVASSCASTCVHCEEDHPPDRCPMSRITCFFCEGTDHVPKDCRFSFLLTKKMANQPVSSNGEKHQGNTNPRQDYSFSLTPVPGQRKQNEKRKCRVREDICCFNCQGMGHFADKCPKPRNVAASTSVHANPRNQKLAPQRIVIHASRSSPIARVATAPISMSALPQGVNAQFQPQPPADKTEASICVVPLEVPIQQLRNQVQDEEPECKKVIVCYNCSEEGHYSKNCPQPRQNRPPHYRQFTRSRHSNRIVVTGANAVPVRPRVNQNP

SEQ ID NO: 19846 - protein, 1118 aa, Oryza sativa
  unsure (1)..(1118): unsure at all Xaa locations
  Clone ID: TF_OSC400680j.C1.p16.np
GRALKHKRQEYTVEGLIASLDVEEKARGKDVMSKDDGGQSSANVVHKAQNKNKGKYKPQQTTNFKQKKNNNNPNQDERTCFVCGXPGHLAKKCPQRKGMKAPTGQPSMTIGNTVDGSGYGNLPTVFSVNQSTNWCVDIGANLYVCADISLFSSYQVTRDSTVLMRNGLHASIHGAETVDLKFTSRKIVQLKNVQPVPTINRNLVSGSCLTRDGFKLVLXYNKVVVSKHFIGKGYECGGLFHFSISDFCNKSVNYICGSVDDEANVWHSRLCHINFRLMSQLSSMCFIPKFSIVKGSKCHSCVQSKQPRKPHKAAEERNLAPLELLHSDLREMNGVLTNGGKXYFMMLIDDATRVCYVYLLKMKDEALDYFKMYKTEVENXLDKKIKRLRSDRGGEFYSNEFDLFREKHSIIHERTPPYSPESNGIAERKNRTLTYLLNAMLDTAGLPKAWSGELSVLINSSRIKNHFPNRVKRAWPGAIWDGRKPISKELQGXACLAWSNLGWVTDREILPGCTRVRTKLVAYANHXHANSSRVHTSEVSRMQITNMQELQVNDYLRDNMLLKVTDSGGMEPSSTSWSQAVPPEENKKRLIYESRKHLRDARYLYIVCSDGLLRRCVLVDEGMKIIEKCCAAPYGGHYAFRTHTQIWQSGFFWPSIPSETFCKNLGLSTTLPSVSSPDKWTSRNEQQTNQKYSAKDCQXYGEDMEEQATXCTLGIXDCLXDAHGMSPYQLDGKTCHLPVELEHRAHGNPDLDVMMKKKEKKKKIAMHSPKFQKRKNKWRRRYTKGVIIISIFLCSHKFTIHMHILDQKVCCIFMDPLFDFAVYVEVNSVVESIAFTRDEQRLSVGVLLTVLKLIFDRQYLHIMKXNMVSNLVRVYYXSFPPVLVKYVYAGILRKTSVKRQTAPPRIQDTFTWIGGPISPEVFRALADLSVVVRNTNNDHWRALEXVVYLRDTMDLELHYTGYLAVLERYSDANWISDMDEIKATSGYVFTLGGGAVSLRSCKHTISMRSTMEVDTATVEAEWLRDLLMDMPIVEKPVPAILMNCDNXTVIIKVNSSKDNMKSSGYVKIRLKYVRKLRNSGVITLDYIQIGRNLANPFMKGLSRNMIDNSSNEMGLRPM

SEQ ID NO: 19847 - protein, 343 aa, Oryza sativa
  Clone ID: TF_OSC30459j.C1.p1.fg
MENTQFSRPKAVPYNDSWEIPNSDYILLYLNDKQTGKITCMVCGKEGHYTCECPMKNKEKYVICTLCGKVGHCHLWCCHQNESERRACRRCGEKGHYDNWHHLGCSSCEKHHPLGRCPMGKITCFLCEGNGHVPVQCHLSPMLTAITQNQRESFRATLRQALRETSNTAVTPITLTRELEPYNDKNGGQPKGDNEMVPRVLGFNQGEEGHSALRNPNRCHVPSSDKANVAADKAPNQSLGVTCFNCGGKGHYSNKCPQKQKQHGVRSTNAAAMKDKTPNLTGVTCFDCGDRGHFSYTCPQNLLEVMLTAELEPHDDTYERQPKADNGTVPTVLSLNCGEASHC

SEQ ID NO: 19848 - protein, 415 aa, Oryza sativa
  Clone ID: TF_OSC900137j.C1.p21.fg
MPLEDAHLIWTTLKERCNKSKCDDDIVFMEEPLEECSTSSPNCEEPQVTTFDDQDNHPASTLSSTHDYVEGDELVSKVDDRPIFPMDSNNTDNEIVILHCVVNSCISPSTKYVCEDDMDKCSTSYSTCGTNLLKEEVNEFQWTSEESTSQRCSSSISENYACFMGEDGDSEFDHLSKKDITMVIKLMEAIQKQQACTIKKNEEIMSLTEEHKKLKDFHSSLIMRSKIKSLNLNLTRSLTSKREKQIDHGLVCIAQPSQDNRESMVKKLEEGSTVACTKIHQRDSKSINAYTKGRSQKTIKSSITCFKCKKVGHHIRDCPSKKGNKLSKKEDIPHIKCFKCTEAGHFALRCPCTLDEQCKTSSERQTGNKQTNKQYRSNMGNILVKIVPWVTFLSQVSHLIIIYLGMPKKTFVLLG

SEQ ID NO: 19849 - protein, 637 aa, Oryza sativa
  Clone ID: TF_OSC14742j.C1.p1.fg
MSNEEFDRVSNLETAYEIWNKLAEIHEGPSEYKDAKLHFLKIQYKTFSMLPHESVNDMYGKLNVIVNDLKGLGANYTDLEVAQKMLRALPEKYETLVTMLINSDMSRMTPASLLGKINTNDMYKLKKKEMEEASPSKKCIALQAEVEDKSKSKVNEVNEDLEEEMVLLARRFNDLLGRRKERGRGSNSNRRRNRRPNKTLSNLRCFECGEKGHFASKCPSKDDDGDKSSKKKSGGYKLMKKLKKEGKKIEAFIGEWDSNEESSASSGSEEEGGDDASSKKKKMAVVAIKKAPSLFAPLCLMAKGSSKVTSLSDSESDDDCDDVSYDELVSMFEELHAYSEKEIVKFKALKKDHASLKVLYEELKTSHERLTISHEKFKEAHDNLLSTTQHGAHINVGISCDLLDDSATCHIAHVASSSISTSCDDLMDMPSPCSSSSSCVSICDASLAVENNELKEQVAKLNKSLERCFKGKNTLDKILSEQRCILNKEGLGFIPKKGKKPSHHATRFVKRNGKYCSKCREVGHLVSDCPGGKPPKTCMFDSHYMLTKAHDGSIVARYVGFPILGGKNNAIWMPKALVSNLQGPKQVWVNYRTDGSHWVLDSGCTQHMIGDRAMFTTFEVGGNEQEKVTFGDNSKGK

SEQ ID NO: 19850 - protein, 1753 aa, Oryza sativa
  Clone ID: TF_OSC401487j.C1.p9.fg
MSNEVNHVGKAPMFNGTNYSTWKIKMSTHLKAMSFHIWSIVDVGFAITGTPLTEIDHRNLQLNAQAMNALFNSLSQEEFDRVSNLETAYEIWNKLAEIHEGTSEYKDAKLHFLKIQYETFSMLPHESVNDMYGRLNVIVNDLKGLGANYTDLEVAQKMLRALPEKYETFVTMLINSDMSRMTPASLLGKINTNDMYKLKKKEIEEASPSKKCIALQAEVEDQSKSKVNEVNEDLEEEMVLLARRFNDLLGRRKERGRGSNSNRRKNRRPNKTLSNLRCFECGEKGHFASKCPSKDDDGDKSSKKKSGGYKLMKKLKKEGKKIEAFIGEWDSNEESSASSGSEEEGGDDASSKKKKMAVVAIKEAPSLFAPLCLMAKGSSKVTSLSDSESDDDCDDVSYDELVSMFEELHTYSEKEIVKFKALKKDHASLEVLYEELKTTHERLTISHEKLKEAHDNLLSTTQHGAHIDVDISCDLLDDSATCHIAHVASSSISTSCDNLMDMPSPCSSSSSCVSICDASLVVENNELKEQVSKLNKSLERCFKGKNTLDKILSEQRCILNKEGLGFIPKKGKKPSHHATRFVKRNGKYCSKCREVGHLVSDCPGSKPPKTCMFDSHYMLKKAHDGSIVARYVGSPILGGKKNAIWVPKALVSNLQGPKLVWVNYRTGGSHWVLDSGCTQHMTGDRAMFTTFEVGGNEQEKVTFGDNSKVKIILAILGVFFLHDKSIVAELFKKFAKRAQNEFSCTLVKIRSDNGSEFKNTNIEDYCDDLGIKHELSATYSPQQNGVVERKNRTLIEMARTMLDEYGVSDSFWAEAINTACHAINRLYLHRLLKKTSYELIVGRKPNVAYFRVFGCKCYIYHKGVRLTKFESRCDKGFLLGYASNSKAYRVYNKNKGDEGLMRAMKNMYIGDVKPIEVEDKPSTSTQDEPSTSASSSQAQVEVEDEKAQDPPMPPRIHTALSKDHPIDQVLGDISKGVQTRSRVASICEHYSFVSCLEPKHVDETLCDPDWMNAMHEELNNFARNKVWTLIERPRDHNVIGTKWIFRNKQDENGLVVRNKTRLVAQGFTQVEGLDFGEIFAPMARLEAIRILFAFASCFDIKLFQMDVKSAFLNGEIAELVFVEQPPGFEDPKNPNHVYKLSKALYGLKQAPRAWYERLKDFLLSKDFKIGKVDTTLFTKIIGDDFFVCQIYVDDIIFSSTNEVFCKEFGDMMSREFEMSMIGELSFFLGLQIKQLKDGTFVSQTKYIKDLLKRFGLEDAKPIKTPMATNGHLDLDEGGKLVDLKLYRFMIGSLLYLTASRPDIMFSICMCARFQAAPKECHLVAVKRIYPKGAKFQLVGYSDSDYTGCKVDRKSTSGSCQMLAMPPRTRHGRRAPTPDPVSENEESSGDEYVQSDEDNMENVEGDEMEVSDDGDDNESGNGEDDEASDDGSPLDSSIQFVLNLRNAQQYTIFRHHDQFRRPNDCNDPRFHTRFQKSVYVQVYANKAFAKHKWISWRHIGETPEFENLQEMFRTVGIDRIVTMKQPFDEDLIRQFYATVWVSGDCDAMKWMLGTLRCSINRREFKELLHIRFNNGDDLHDEHTHNPFPIDHFSQFYEEGGRHTYGKVAGLRALPSVINHIVRATILPRCGNNDDIRRVAWHVIDAIMDGRRFDVINLMMKEIAISKGTIGQGIYYALYIMRLPPPRRLVEELPGDLSEKIVEEARRRFVSGLEFTTFGVKEELPRVIEAWVVLSVGQLPPCPSLDEGGVRWLRG

SEQ ID NO: 19851 - protein, 1267 aa, Oryza sativa
  Clone ID: TF_OSC900326j.C1.p11.fg
MEGAEDSGFAITGTPLTEIDHRNLQLNAQAMHALFNSLSQEEFDRVSNLETAYEIWNKLAEIHEGTSEYKDAKLHFLKIQYETFSMLPHESVNDMYGRLNVIVNDLKGLGANYTDLELKKKEMEEASPSEKCIALQAEVEDKGKGKVNEANEDLEEEIALLARRFNDLLGRRKEKGMGSNSNRRRNRRPNKTLSNLRCFECGEKGHFASKCPSKDDDGDKSSKKKSGGYKLMKKLKKEGKKIEAFIGEWDSNEKSSASFGAPLRQHLLVIVSDDDCDDVSYDELVSMFEELHAYSKKEIVKFKALKKDHASLEVLYEELKTSHERLTISHEKLKEAHDNLLSTTQHGALIDVGISCDLLDDSVTCHISHVASSSISTSCDDLVDMPSSSSSSCVSICDASLVVENNELKEQEAKLNKSLERCFKGKNTLDKILSKQWCILNKEGLGFIPKKGKKPSHRATHFVKSNGKYCSKCREVGHLVSDCPGGKPSKTCIFDSHYMLRKAHDGSIVARYVGSPILGGKKNVIWVPKALVSNLQGWVNYRTGGSHWVLDSGCTQHMTDDRAMFTTFEVGGNEQEKVTFGDNSKGKSIVAELFKKFAKRAQNEFNCTLVKIRSDNGSEFKNTNIEDYYDDLGIKHELSATYSPQQNGAVERKNRTLIEMGVRLTKFESQCDEGFLLGYASNSKAYRVYNKNKGIVEETADVQFDENNGSQEGHENLDDVGDEGLMRAMKNMCIGDVKPIEVEDKPSTSTQAQQLCKKQGVDFASCFDIKLFQMDVKSAFLNGEIAEPVFVEQPPGFEDPKNPNHVYKLSKSLYGLKQAPRAWYERLRDFLLSKDFKIGKVDTNLFTKIIGDDFFVCQIYVDDIIFGSTNEVFCKEFGDMMSREFETSMIGELSFFLGLQIKQLKDETFVSQTKYIKDLLKRFGMEDAKPIKTPMATNGHLDLDEGGKPVDLKLYRSMIGSLLYLTASRPDIMFSVCMCARFQAAPKECHLAAVKRILRYLKHSSTIGLWYPKGAKFKLVGYSDLDYAGCKVDRNSTSGSCQMLGRSLVSWSSKKQNSVALSTAEAEYVSAVMPPHTRHGRRAPTPDPVSEPVESSGNEYAQSDEEVEANVEGASEEASGDDVSGSGEDEDEGTDDMHIDPSIQFVVNMRNPSQYTILRYHDQFLRPRDTPDPRFHTAFQKSVYEQVYAGKAFAEHKWISWRDINETLEFEGLQDLFETVGIDQIVTFKQDYNEDLIRQFYATVWVAGDYSEMNCFSSLQHTGILLV

SEQ ID NO: 19852 - protein, 564 aa, Oryza sativa
  Clone ID: TF_OSC13279j.C1.p6.fg
MDISEANEGYASCGSVIEMSRQMKTTRVGLGWLGTSWDPGRVASSVRIIVGLGLRQNKPNIHHNSKRLRSVKVLSLVSNLSLPFVFPLSLSKPLQQMADNEKGNKVRSQDIGTSSSRVNEAPDTSCVTLVQHLINQNRLLIEILQQHQTPMLNLSQIQPQVQLEAVQALTPQVSMPPTSRRTHDDMPHVDPKEASIICFMCDEQVHYARERPQQKRKTPMRTEDEVRKMIITSTEWPPPGMTRRQRRNTFRGAPQLTEHLLANGGRVSDSEDSDQVSSDDEDEMERKACSRCGEIGHVASSCATICVHCEEDHPPDRCPTSRITCFFCEGTDHVPKDCQFSFLLTKKMANQPASSNGEKHQGSTNPRQDYSFSLTPVPGQRNQNEKRKCRVREDICCFNCQGMGHFADKCPKPRNIAAGTSVHATPRNQKLAPQRIVIHASRSSPIARVATAPTPMSALPQGVNAQFQPQPPADKTEVSICVVPLEVPIQQLRNQVQDEEPECKKVIVCYNCSEEGHYSKNCPQPRQNRPPHFRQFTGSNHANHQVVSGANAVPVKPSASQKQP

SEQ ID NO: 19853 - protein, 1407 aa, Oryza sativa
  unsure (1)..(1407): unsure at all Xaa locations
  Clone ID: TF_OSC20836j.C1.p2.np
ISLACFPSLVFFLLRAPVLPLFYLPASDRLRAREIGTSRASGTTPSPEICTGRRVIRFLGSASAAAVAVPGAAAAVPGDGAPGGAATNVNVNEGSSASQSSGGTFSGSFSVVGFAAALKSYAFDGSNYKRWKARTLLWLTAMQCFYVSRGKRSEPPLSPEEEVKFEASDCLFRGALISVLADNIVDVYMHMPSGKDMWDALEAKFGVSDAGSELYVMEQFYDYKMVDDRSVVEQAHEIQMLAKELENNNCELSDKFVSGGIIAKLPPSWSDFATSLKHKRQEFSVSDLIGSLGVEEKARAKDNRGKKVEGGSSANMVQKKNPHASHNNKKVKPDVKPKATTNFKKKGKGKAKGDCFVCGKSGHWAKDCPKRKDRKSANMVISESGGTSAYGKILPIVLSVFHSPDWWVDTGANIHVCADISLFSSYQVGRGSSLLMGNRSLAAVHGVGTVDLKFTSGKTVQLKNVXLVPSIKKNLVSGSLLCREGFRLVFESNKCVVSKYGTFVRKGYDSGGLFRFSLDNMCNNHNFVNHISDNDESNVWHSQLCYVNFSCMTRLFNMSLIPKFTLVKGSKCHTCVQSKQPRKPHKASEARNLAPLELVHSDLYEMNSVLTKGGKKYFMTLIDDCTRFCYVYLLKTKDEALHYFKTYKAEVNQLERKIKRLRSDRGGEYFSNEFASFCKEFGIIHERTPPYSPQSNGVAERKNRTLTEMVNAMLDTAGLSKEWWGEAVLTACHVLNKIPMKHKEVTPFEEWERKKLNLSYLRTWGCLAKVSVPIAKKRKLGPNTVDCVFLGYAIHSVGYRFLIVNSGVPDMRVGTIIESRDATFFENEFPMKHTPSTSSQEIVIPHEHFAPIEHNDQTPEGNPKEDNIVDTRKSKRQRFAKSFGDDYIVYLVDDTPRTIEEAYSSPDADYWKEAVRSEMDSIMSNGTWEVVECPYGCKPEGCKWVFKKKLRPDGTIEKYKARLVAKGHTQKEGGDFFDTYSPVARLTTIRLVLALATSHGLLVHKMDVKTAFLNGELEKKIYMDQPDGYVLEGQEGMVCKLLKSLYGLKKAPKQWHEKFDTTLTSAGFGVSEADKCVYYRYGGGEAVILCLYVDDILIFGNSLNVIEEVKDFLSKGFEMKDLGEANVILNIKLLRGAEGGITLVQSHYVDMVLSRFGYSDCKPALTPYDPSVLLRKNRRIARDQLRYSQIIGTLMYLASATRPDISFAVSKLSRFVSNPGDDHWQALERVMRYLKGTMSYEIHYTGPKVLEGYSDSNWISDADEIKATSGYVFTLGGGVVSCKFCKQTILTRSTMEAELTALDTATVEAEWLRELLMDLLVVQKPVPAILMNCDNQTVIIKVNSSKDNMKSSRHIKRRLKSVRKQKNSGVISLDYVQTAKNLAGXFIKGLPHNVLDSASREMGLIPT

SEQ ID NO: 19854 - protein, 1232 aa, Oryza sativa
  Clone ID: TF_OSC400337j.C1.p8.fg
MSALVAAAASPRAGAAATVPGDGMPGAGAAVNDNVNGGSSASQSSGGTFSGSPHIVHVMIIVLIFWIKICRYMTIFPTIQKPDRSFSVVGFALKPHAFDGSNYKRWKARALLWLTAMQCFYVSRGKRSEPPLSPEEEVKFEASDCLFRGALISILADNIVDVYMHMPSGKDMWDALEAKFGVSDAGSELYVMEQFYDYKMVDDRSVVEQAHEIQMLAKELENNNCELSDKFVAGGIIAKLPPSWSDFATSLKHKRQEFSVSDLIGSLGVEEKARAKDNRHKKVEGGSSANMVQKKNPHASHNNKKVKPDGKPKATTNFKKKGKGKANGDCFVCGKSGHWAKDCPKRKDRKSANMVISKGGETSGYGKLLPTVLSVFHSSDWWVDTGANIHVGRGSSLSMGNGSLAAVHGVGMVDLKLTSGKTVQLKNVQHVLSIKKNLVSGSLLCREGFRLVFESNKCVVSKYGTFVGKGYDRGGLFRFSLDDMCNNHNVVNHISENGSKCHTCVQSKQSRKPHKASEARNLAPLELVHFDLKALHYFKTYKAEVENQLERKIKRLRSDRGGEYFSNEFASFCEEFGIIHERTPLYSPQSNGVAERKNRTLTEMVNAMLDTTGLSKEWWGEAVLTACHVLNKILMKHKDVTPFEEWERKKLNLSYLRTWGCLAKVSVPIAKKRKLGPNTVDCVFIGCAIHSVGYRFLIVNSGVPDMRVGTIIESRDATFFENEFPMKHTPRTSSQETVIPHEHFAPIEHNDQTPEGNPEEDNIVDTRKSKRQRVAKSFGDDYIVYLVDDTPRTIEEAYSSPDAYYWKEAVRSEMDSIMSNASHGLLVHQMDVKTAFLNGELEEEIYMDQPDEYVLEGQEGMGCKLLKSLYGLKQAPKQWHEKFDTTLISVGFVVNEADKCVYYRYGGGEGVILCLYVDDILIFGTSLNVIEEVKDFLSKSFEMKDLGVADVIINIKLLRGDEGGITLVQSHYVDKVLSRFGYSDCMPAPTPYDPSVLLRKNRRIARDQLRYSQIIGSLMYLASATRPDISFAVSKLSRFVSNPGDDHWQALERVMRYLKGTMSYGIHYTRYPKLLEGYSDSNWISDADEIKAASEYVFTLGGGVVSWKSCKQTILTRSTMEAELTALDTATVEAECLRELLMDLPMVEKPVPAILMNYDNQTMIIKVNSSKDNMKSSRHIKRRLKSVRKHKNSGVIAFDYVQTARNLADQFTKGLPRNVIDSASREMGLIPT

SEQ ID NO: 19855 - protein, 1342 aa, Oryza sativa
  Clone ID: TF_OSC400572j.C1.p23.fg
MSNTGDKEKETPVNTNGGNTASNSSGGLFLGYNLITLFQLEVLLLMFIAMSTLCHYVIVDAYSTLSMLMLITFTTITGSNPIVNIMFIILLFWIKICRIMTKFPTIQKPDRSFSVVGFAAALKPHAFDGSNYKRWKARALLWLTAMQCFYVSRGKRSEPPLSPEEEAKFEASDCLFRGALISVLADNIVDVYMHMPSGKDMWDALEAKFGVSDAGSELYVMEQFYDYKMVDDRSVVEQAHEIQMLAKELENNNCELPDKFVAGGIIAKLPPSWSDFATSLKHKRQEFSVPDLIGSLGVEEKARAKDVRGKKVEGGSSANMVQKKNPHASHNNKKVKPDVKPKAATNFKKKSKGKAKGDCFVCGKSGHWAKDCPKRKDRKSANMIISEGGGTSGYGKILPTVLSVFHSPDWWVDTGANIHVGRGSSLLMGNGSLAAVHGVGTVDLKFTSGKTVQLKNVQHVPSIKKNLVSGSLLCREGFRLVFESNKCVVSKYGTFVGKGYDSGGLFRFSLNDMCNNHNAVNHISENDESNVWHSRLCHVNFGCMTRLANMSLIPKFTLVKGSKCHTCVQSKQPRKPHKASEARNLAPLELVHSDLCEMNGVLTKGGKKYFMTLIDDCTRFCYVYLLKTKDEALHFFKIYKAEVENQLERKIKRLRSDRGGEYFSNEFASFCEEFGIIHEMTPPYSPQSNGVAERKNRTLTEMVNAMLDTAGLSKEWWGEAVLTACHVLNKIPMKHKEVTPFEEWERKKLNLSYLRTWGCLAKVNVPIAKKRKLGPKTVDCVFLGYAIHSVGYRFLIVNSGVPDMHVGIILESRDATFFENEFPMKYTPITSSKETVMPHEHFAPIEHNDQTPEENPEEDNIVDTRKSKRQRVAKSFGDDYIVYLVDDTPRTIEEAYSSPDADYWKEAVRSEMDSIMSNGTWEVVERPYGCKPVGCKWVFKKKLRPDGTIEKYKARLVAKGYTQKEGEDFFDTYSPVARLTTIRQAPKQWHEKFDTTLTSAGFVVNEADKCVYYRYGGGEGVILCLYVDDILIFGTSLNVIEEVKDYLSKSFEMKDLGEADVILNIKLQRGDEGGITLVQSHYVDKVLSRFGYSDCKPAPTPYDPSVLLRKNRRIARDQLRYSQIIGSLMYLASATRPDISFAVSKLSRFVSNPGDDHWQALERVMRYLKGTMSYGIHYTGYPKVLEGYSDSNWISDADEIKATSGYVFTLGGGAVSWKSCKQTILTRSTMEAELTALDTATVEAEWLRELLMDLPVVEKPVPAILMNCDNQTVIIKVNSSKDNMKSSRHIKRRLKSVRKQKNSGVIALDYVQTARNLADQFTKGLPRNVIDSASREMGLIPT

SEQ ID NO: 19856 - protein, 1246 aa, Oryza sativa
  Clone ID: TF_OSC401435j.C1.p29.fg
MERRPPIRPDWQANKRQAMEQGGGDWGIRDVREEEGLRRPLPNQPRVNPNVKPQGRQAAEMERGAGTMKIKCFKCGREGHHQANYTNPPLCYSCHNTGHIASHCPLISAKRCVKLCGFGIPGQGFYSLQVEISDAEVARAPVRGILTVIQGEASVSKVLAELKHLFVGLTWDWKIKQLNAKEFLKKFPSYEVRSQISTCKSFDFETSQIKASVVETGITEEAVDELVAVWVKIYGIPKMARSEDYIKSIVELVGEFEAVEVASIRRDGPVRVRVACKDPRELYFSIHLYINKVGYMIRWEPKGYLPYENRQNPPDDDDKDDKDDEGLEDDMNLDDEFKNHDISRGRPLKGEGSQHESRAGAFSAPPTYKGKVSSEQGGSIKMIASKKTSLLKHPDLFESCTSLVIWGDKKQEMIAEQESQELEAPELSQNETRPEFSTLLEFDEDLERCQIPTDSDIERLREEEDREEEDSFQEVSNRKKGKAKRTEPAVTSRMSLRHRELAVVPIPKRAKILTQRKNLEQPDSVELKKIDVAANIDLGSNPVEIDNNIETLKAKELVQAKLAELNWKNQLEKQKPQAGDVSVPAKVIESEDVSSIKELETDLRVEKDGISPEPNKRETHAGAFFLSNVIKLNYDNSCWEIMVIYGPVDNNLKQAFLDELNWHILYRSHHVVIGGDFNLYRFASEKSNTNTNSRNMDMFNSFIANLDLREIYRSGPKFTWTNKQDSLVQEVLDRILVTTDWDDMYPTALLSSILRVGSDHIPLLLDTCEGIIVKSKYFKFESAWLAEESFKELVIQRLLPRDNSYILEFWNKKQSSLRRFLVGWGKNNRSKKLREKRTLQCKIEELDKKALTEELTSDEWNQRYSWENDLEHIYEMEELYWHKRCGEQWILEGDRNTEFFHRVANGRKRKCHITSLMDGETELTSKSEIREHIVEYYKTLFRDVPTANIHLSQGVWTNHLNLSDASKENLTRPFVMAELDKVINEAKLNTAPGPDGFSIPFYRAFWPQVKNDLFEMLLMLHNEDLDLKRLNFGVISLIPKNNNPTDIKQFRPICVLNDCFKFLSKVVTNRLTEVADEVVSQTQTAFIPGRFILEGCVIIHEVLHELKSKNSEGIILKIDFEKAYDKVNWEFLIEVMERKNFPKKWISWIKSCVMGGRVCININGERTDFFRTFRGLRQGDPLSPLLFNLVSDALAAMFDSAKAAGVLCGLVPNIFPGGITHLQYADDTVLFVANDVNQIVATKFIL

SEQ ID NO: 19857 - protein, 361 aa, Oryza sativa
  Clone ID: TF_OSC14937j.C1.p3.fg
DATSVKPDKNTAEGPQEMPRYDDHYGSTRLYVGRLSSRTRSRDLEYLFGRYGRSCVFDLNDLVEGFSVFYTTREWKLQVGDAFEYLSHDGLLFGNHWCRIREVELKRDYAFIEFSDPRDADEARYNLDGRDVDGSRILVEFAKGVPRGAAGGSREYMGRGPPPGTGRCFNCGIDGHWARDCKAGDWKNKCYRCGERGHIERNCQNSPRNLSRSRSRSLSGSPRGRRDRDDRRSRSLSYSRSPRRSISPAANGKERNPSPNGRRSPRSPQDRVSPPPKDNDERNGDSPWGRENSRSPSDGYRSPVAANGRSPSPRNNGSPSPMDNNSRSPRDNGSPSPRDGNGDGGSRGGSRSPRASESPEA

SEQ ID NO: 19858 - protein, 324 aa, Oryza sativa
  Clone ID: TF_OSC2613j.C1.p1.fg
EMPRYDDRYGSTRLYVGRLSSRTRSRDLEYHFSRYGRIREVELKRDYAFIEFSDPRDAEEARYNLDGRDVDGNPILGEFAKGVPRGPGGSREYMGRGPPPGTGRCFNCGIDGHWARDCKAGDWKNKCYRCGERGHIERNCQNSPRNLRRERSYSCSPSPRRGRGRSRSYSRSRSRSRSYSRSRSRSLSGSPRARRELERSRSLSYSRSPRRSISPAANEKKRSPTPDGSRSPRSPQDQVSPPPKDNAERNGSDHGDSPRGRENSRSPSDGYRSPAAANGRSPSPRNNGSPSPMDNGSRSPRDGNGDGGSRGGSRSPRPSESPEA

SEQ ID NO: 19859 - protein, 323 aa, Oryza sativa
  Clone ID: TF_OSC400090j.C1.p17.fg
MPRYDDRYGSTRLYVGRLSSRTRSRDLEYHFSRYGRIREVELKRDYAFIEFSDPRDAEEARYNLDGRDVDGSRILVEFAKGVPRGPGGSREYMGRGPPPGTGRCFNCGIDGHWARDCKAGDWKNKCYRCGERGHIERNCQNSPRNLRRERSYSCSPSPRRGRGRSRSYSRSRSRSRSYSRSRSRSLSGSPRARRELERSRSLSYSRSPRRSISPAANEKKRSPTPDGSRSPRSPQDQVSPPPKDNAERNGSDHGDSPRGRENSRSPSDGYRSPAAANGRSPSPRNNGSPSPMDNGSRSPRDGNGDGGSRGGSRSPRPSESPEA

SEQ ID NO: 19860 - protein, 389 aa, Oryza sativa
  Clone ID: TF_OSC900030j.C1.p14.fg
MLRSRARLPLRLPPAVRRCRSPSAAKEKDATSVKPDKNTAEGPQEMPRYDDHYGSTRLYVGRLSSRTRSRDLEYLFGRYGRSCVFDLNDLVEGFSVFYTTREWKLQVGDAFEYLSHDGLLFGNHWCRIREVELKRDYAFIEFSDPRDADEARYNLDGRDVDGSRILVEFAKGVPRGAAGGSREYMGRGPPPGTGRCFNCGIDGHWARDCKAGDWKNKCYRCGERGHIERNCQNSPRNLSRSRSRSLSGSPRGRRDRDDRRSRSLSYSRSPRRSISPAANGKERNPSPNGRRSPRSPQDRVSPPPKDNDERNGDSPWGRENSRSPSDGYRSPVAANGRSPSPRNNGSPSPMDNNSRSPRDNGSPSPRDGNGDGGSRGGSRSPRASESPEA

SEQ ID NO: 19861 - protein, 128 aa, Oryza sativa
  Clone ID: TF_OSC13213j.C1.p5.np
CNVNIIHQGVDDSINDGTQNDNPSNWDSEKDSNGDSNYGTTDANVTKDFQPPIPTPSQNDRPQMDSSAKKTLICYNCKKPGHYSRDCLQSRQSRPPHYRQFTRSRHPNRIVVTGANAVPVRPRVNQNP

SEQ ID NO: 19862 - protein, 465 aa, Oryza sativa
  unsure (1)..(465): unsure at all Xaa locations
  Clone ID: TF_OSC14509j.C1.p1.np
MSWHKAGVLLLGGSILPACPGGSGRRGVGSVLLSMARMGWKLCHVFRPYTVVMFNREKEKNVRGYASSNSSFQLNPPLASRELTRAHPWSIPSMLLGSQLPLVGSQDQNQYVFDQAFATQVNELPMPEEHVPFCHDCREQGHYALNCPWVYAKEAPSFGLAGQTSLNPPPRTKSSLQPSVQGREPNGENPLNPENCFPPSLSYHVGSRTKQAKGKKSKSQKRKAPMRTKEEVRKMTITSAEWPPAGITIPRRQRGNTFRGARRLTQHLLSHGGRVSDQVSSDDEDESPRHLGEEEMESKACTRCGEIGHVASMCLTLCLHCEEDHPPDRCPTSRITCFFCEGTDHVPKDCQSSFLLTKKMANQPASSNGEKHQGNTNPRQDYIIHASRSSPIARVATAPTPASALPQGVNAQFQPQPSVDKTEASIVVPLDVPARSQRNQVQDEEPERKKVIAFTNCSTCXGSRH

SEQ ID NO: 19863 - protein, 1460 aa, Oryza sativa
  Clone ID: TF_OSC413089j.C1.p13.fg
MASRPRRAARAPARFGFEDGRVEPEANHESANERSHHSNRSHRTASRNAEVEQPRRSNRSHRTASRDAEIEQSHRSHRTASHNSGEERLPSPPHVENNMQHLMAVQTQILQGLAAAVAGFQHNAHGNGHPHTNNNRSKLTDFLRSRPPEFSQTVEPVEADDWLKDVDRKLNLVQCTPVEKTLYASHQLRGPAADWWENYCNAHPEPTNIAWDEFATAFRAAHVPESTIDMKKEEFNRLKQGNSSVNEYLSMFNKLARYAPEEVDTDKKKIRKFLKGIAVGMRLQLLAHDFPTFQYMINKALLLEDARKEATEEYKKRKSNHQGNSSRGAPHPRYGQPMQYHQSVTQANRQPGYAPRPQMNRPAPQPQQRAPSGNTAPNSVTSFKSPQGPTTVQCFRCDQMGHYARQCPQNPTNTNSGHANGSTARTPTPAAAQFRPSSQASGQGSRASNNFGRGRVNHIQAETAQDAPDVVMVHSPGRNIRATQICPEVNLRIEEVDFLAKPIVLDSQSLDIILGMDWFAKHKGQIDCAKKSITLQGPGGKQVRFTSNTPTASRSILTCLQVTSLESVPIVCEYPDVFPEELTSMPPDREIEFAIELAPGTAPIAKRPYRMAANELAEVKRQIEELESKGYVRPSSSPWGAPVLLVKKKDGSERMVIDYRALNEVTIKNKYPLPWIDDLFDQLKGARVFSKIDLRSGYHQLKIRSEDIPKTAFSTRYGLYEFTVMSFGLTNAPAFFMNLMNKIFMDYLDQFVVVFIDDILIYSKNEEEHAEHLRLIMEKLRDHQLFAKFSKCEFWLDRIAFLGHVISSSGVEVDPSKVEAVLAWNPPKNVSEIRSFLGLAGYYRRFIEGFSKLARPMTELLKKEKKFQWSAACEDSFQEMKKRLTTAPVLTLPDIRKDFEIFCDASRQGLGCVLMQERKVVAYASRQLRPHEVNYPTHDLELAAVVHALKIWRHYLIRNRCEVYTDHKSLKYIFTQTELNMRQRRWLELIKDYDLGIHYHPGKANVVADALSRKAYCNVAQIRPNQERLCRELEKLRLTVVQSGVPASLTVQPTLESQIREAQKDDEGIKELIKRIQEKKDTNFSIDDQGTVWCGPRICVPAKKELRDIILKEAHESAYSIHPGSTKMYQDIKAYFWWAGMKRDVAEYVALCDICQRVKAEHQRPAGLLQPLPIPEWKWEEIGMDFITGLPRTPSGYDSIWVIVDRLTKSAHFVLVKTTFDGKKLAELYMTHVVCRFGCPKKIVSDRGTQFTSRFWKQLHEALGTDLNFSTAYHPQTNGQTERVNQILEDMLRACALDFEGTWDRCLPYAEFSYNNSYQASIQMSPNEAMFGRKCRTPLCWNEVGEALVFGPNILKSAEEQVKLIRERLKTAQNRQKNYADNRRRDLEFEKGDHVYLRVSPLHGIRRFGMSGKLAPCYIGPYLITARRGEVAYQLELPEGLADVHNVFHVSQLKKCLRVP

SEQ ID NO: 19864 - protein, 694 aa, Oryza sativa
  unsure (1)..(694): unsure at all Xaa locations
  Clone ID: TF_OSC400545j.C1.p13.np
XAAVRWEAAGGGGAPPPPDPAGGEAGVRRREAGATGFINGDNYASQSSGGPFSGYNLILLFTALILIVFLFSAMFSMHCCMMDVYAYYILSMIRSLHLFNNCTSLFPVKVMIIILIIWIKICXIVTIFPTIQKPDRSFSVVGFAASLKPHAFDGSNYKRWKARALLWLTAMQCFFVSRGKLSKPPLSPEEEAKFEAADCIFRGALISVLIDNIVDVYMHMPRKEMWDALEAKFGVSDAGSELYVMEQFYDYKMVDDRSVVEQAHEIQMLAKELENNRYELPDMFVAGGIIAKLPPFWSDFATSLKHRQELSVTDLIGSLGVEEKARAKDNRGKKVEGSSSTNLVXKKNPQASHNNKKVKPDVKPKATTTFKKKGKGKAKGDCFVCGKPGHWAKDCPKRKDRKSANMVISKGGGTSGYGKFLPTVLPICHSPDWWVNTGVNIHVCADISLFSSYQVGRGSSLLMENGSLAAVLGVGTVDLKFTSGKTVQLKNVQHVPSIKKNLVSGSLLCRHDFRFVFESNKCVVSKYGTFIRKCYDSGGLFRFSLDHVSNDDESNVWHSRLCHVNFGCMTRLANMSLIPKFALVKGSKCHTCFQSKQPRKPHSASEARNLAPLELVHSDLCKMNSVLTKGGKKYFMILIDDCTRFCFVYLLKTKDEALHYFKIYKAEVENQLERKIQRLRSDRGGDRLTDTFRF

SEQ ID NO: 19865 - protein, 1200 aa, Oryza sativa
  Clone ID: TF_OSC401345j.C1.p5.fg
MSGVAAAAAAGGDGGGGAPPTGAGSGAGAGAPGGAMNDSNNGGNSASPSSGGLFSGMLLRYCYVPVPDIHDAHSMILVMLRSPYTAYAMIIALTFWIKICRLMTIFPTIQKPDRSFSVVGFAAALKPHAFDGSNYKRWKARALLWLTAMQCFYVSRGKRSEPPLSPEEEAKFEASDCLFRGALISVLADNIVDVYMHMPSGKDMWDALEAKFGVSDAGSELYVMEQFYDYKIFDDRSVVEQAHEIQMLAKELENNNCELPDKFVAGGIITKLPPSWSDFATSLKHKRQEFSISDLIGSLGVEEKARAKDVRGKKVEGGSSANMVQKKNPHASHNNKKVKPDVKPKAATNFKKKGKGKAKVDCFVCGKSGHWAKDCPERKDRKSANMVISEGGGTSGYGKILPIVLSVFHSPDWWVDTGANIHVGRGFSLLMGNGSLAAVHGVGTVDLKFTSGKTVQLKNVQHVPSIKKNLVPSAILAFNRNNLASLTRHLIDDCTRFCYVYLLKTKDEALHYFKIYKAEVENQLERKIKRLRSDRGGEYFSNEFAFFCEEFGIIHERMPPYSPQSNGVAERKNRTLTEMVNALLDTAGLSKEWWGEAVLTACHVLNKIPMKHKKVTPFEEWERKKLNLSYLRTWGCLAKVNVPIAKKRKLGPNTVDCVFLGYAIHSVSYRFLIVNSRVPDMHVGTILESRDATLFENEFPMKHTPSTSSKETVMPHEHFAPIKHNDQTPEENPKEDNIVDTRKSKRQRVAKSFGDDYIVYLVDDTPRTIEEVYSSLDADYWKEAVHSEMDSIMSNGTWEVVERPYGCKPVGCKWVFKKKLRPDGTIEKYKARLVAKGYTQKEGEDFFDTYSPVALLTTIRVLLALAASHGLLVHQMDVKTAFLNGELEEEIYMDQPDGYVLEGQEGMVCKLLKSLYGLKQAPKQWHEKFDTTHTSAGFVVNEADKCVYYHYGGGEGVILCLYVDDILIFGTSLNVIEEVKDYLSKSFEMKDLGEADVILNIKLQRGDEGGITLVQSHYVNKVLSRFGYSDCKPAPTPYDPSVLLRKNQRIARDQLRYSQIIGLLMYLASAMRPDISFAVSKLSRFVSNPGDDHWQALERVMRYLKGTMSYGIHYTGYPKVLEGYSDSNWISDADEIKATSGYVFTLGGGAVSWKSCKQTILTRSTIEAELTALDTATVETEWLRELLMDLPVVENQCQLS

SEQ ID NO: 19866 - protein, 415 aa, Oryza sativa
  Clone ID: TF_OSC21561j.C1.p2.hg
EWAAKIAISPLSPSGLIAILADGGRQRGRPTVCHVSLPPTNWAAGAISAIFLSISPSLRSRLLVSSAAAAAAAAEQRRSPPASSGAVAGFKMPRYDDRDRYDDRYGGNTRLYVGRLSSRTRTRDLEDLFGRYGRVRYVDMKHEFAFVEFSDARDADEARYNLDGRDFDGSRMIVEFAKGVPRGPGGSREYMGRGPPPGSGRCFNCGIDGHWARDCKAGDWKNRCYRCGDRGHIERDCRNSPKNLKRGRSYSRSPSPRRGRSRGRSYSRSRSRSYSRSQSPRRDSRNERRSRSPRDSRSPRGSPRDSRSPRGSPRDSRSPKGSPRDTQSPRGSPRDSRSPRRSASPPNGRNRSPTPNASRSPAPRDSRSPMRADSRSPADHERRDMSTAANGRSPSPRDYEDNGNHRASPRGSASP

SEQ ID NO: 19867 - protein, 118 aa, Oryza sativa
  unsure (1)..(118): unsure at all Xaa locations
  Clone ID: TF_OSC415629j.C1.p19.gp
MDMQETSAGGSSMGNYNSIAGNGSSECYKCKQPGHYARDCPGQSTGGLECFKCKQPGHFSRDCPVQSTGGSECFKCKQPGHFARDCPGQSTGAQHQTYGNNVAASRGYNRQSFVGGYX

SEQ ID NO: 19868 - protein, 1204 aa, Oryza sativa
  Clone ID: TF_OSC16296j.C1.p1.fg
MADQGHSVSDGYEMLLDDLYIMEQFHDYKMADNRFVVEQAHEIQTMVKELELLKCVLPDKFVAGCIIAKLPPSWRSFGTALKHKRQEYSVEGLIASLDVEEKAREKDAASKGDGGQSSANVVHKAQNKSKGKYKAQQTTNFKKQKKNNINPNQDERTCFVCRQPGHLARKCPQRKGMKAPAGQTSKSANVTIGNTGDGSRYGNLPTVFSVNQSTNWWVDTGANVARGSTVLMGTGSHASVHGVGTVDLKFTSGKIVQLKNMQHVPSIDRNLVSGSRLTRDGFKLVFVSNKVVVSKHGYFIGKGYECGGLFRFSFSDFCNKSVNHICGSVDDKTNVWHSRLCHINFGLMFRLSSMCLIPKFSIVKGSKCHSCVQSKQPRKPHKAAEERNLAPLELLHSDLCEINRVLTKGGKRYFMTLIDDATRFCYVYLLKTKDEALDYFKIYKTEVENQLDRKIKRLRSDRGGEFFSNEFNLFCEEHGIIHERTPPYSLESNGIAERKNRTLTDLVNAILDTAGLPKAWWGEALLTSNHVLNRVPNRNKDKTPYEIWIGRKSSLSYLRTLGCLAKVNVPITKKRKLRPKTVDCVFLGYAHHRIAYRFLIVKSEVPDMHVGTIMESRDATFFESFFPMKDTHSSSSQPSEVISSLITPPEQTEHTHEHVTEEDVSEAPRRSKRQRTAKSFGDDFTVYFVDDTPKSISEAYASPDADYWKEAVRSEMDSIIANGTWEVTERPYGCKSAGCKCVFKKKLRSDGTIEKYKARLVAKGYIQKEGEDFFDTYSPIARLTTIRVLLSLPASHGLLVHQMDVKTIFLNGELDEEIYMDQLDGFVVEGQEGKVCKLLKSLYGLKQAPKQWHEKFDKTLTSAGFAVNEADKCVYYRHGGGEGVILCLYVDDILIFGTNLEVINEVKSFLSQNFDMKDLGVADVILNIKLIRGENGITLLQSHYVEKILNRFGYIDSKPSPTPYDPSLLLRKNKRIAKNQLEYSQIIGSLMYLASAIRPNISFVVSKLSRFTSNPGDDHWRALERVMRYLKGTMELGLHYTGYPAVLEGYSDSNWISDVDEIKATSGYVLTLGGGAVSWRSCKQTILTRSTMEAELTALDTATVEAEWLRDLLMDLPIVEKPMPAILMNCDNQTVIVKVNSSKDNMKSSRHVKRRLKSVRKLRNSGVITLDYIQTARNLADPFTKGLSRNVIDNASKEMGLRPM

SEQ ID NO: 19869 - protein, 1204 aa, Oryza sativa
  Clone ID: TF_OSC16300j.C1.p2.fg
MADQGHSVSDGYEMLLDDLYIMEQFHDYKMADNRFVVEQAHEIQTMVKELELLKCVLPDKFVAGCIIAKLPPSWRSFGTALKHKRQEYSVEGLIASLDVEEKAREKDAASKGDGGQSSANVVHQAQNKSKGKYKAQQTTNFKKQKKNNINPNQDERTCFVCRQPGHLARKCPQRKGMKAPAGQTSKSANVTIGNTGDGSRYGNLPTVFSVNQSTNWWVDTGANVARGSTVLMGTGSHASVHGVGTVDLKFTSGKIVQLKNMQHVPSIDRNLVSGSRLTRDGFKLVFVSNKVVVSKHGYFIGKGYECGGLFRFSFSDFCNKSVNHICGSVDDKTNVWHSRLCHINFGLMFRLSSMCLIPKFSIVKGSKCHSCVQSKQPRKPHKAAEERNLAPLELLHSDLCEINRVLTKGGKRYFMTLIDDATRFCYVYLLKTKDEALDYFKIYKTEVENQLDRKIKRLRSDRGGEFFSNEFNLFCEEHGIIHERTPPYSLESNGIAERKNRTLTDLVNAILDTAGLPKAWWGEALLTSNHVLNRVPNRNKDKTPYEIWIGRKSSLSYLRTLGCLAKVNVPITKKRKLRPKTVDCVFLGYAHHRIAYRFLIVKSEVPDMHVGTIMESRDATFFESFFPMKDTHSSSSQPSEVISSLITPPEQTEHTHEHVTEEDVSEAPRRSKRQRTAKSFGDDFTVYFVDDTPKSISEAYASPDADYWKEAVRSEMDSIIANGTWEVTERPYGCKSAGCKCVFKKKLRSDGTIEKYKARLVAKGYIQKEGEDFFDTYSPIARLTTIRVLLSLPASHGLLVHQMDVKTIFLNGELDEEIYMDQLDGFVVEGQEGKVCKLLKSLYGLKQAPKQWHEKFDKTLTSAGFAVNEADKCVYYRHGGGEGVILCLYVDDILIFGTNLEVINEVKSFLSQNFDMKDLGVADVILNIKLIRGENGITLLQSHYVEKILNRFGYIDSKPSPTPYDPSLLLRKNKRIAKNQLEYSQIIGSLMYLASAIRPNISFVVSKLSRFTSNPGDDHWRALERVMRYLKGTMELGLHYTGYPAVLEGYSDSNWISDVDEIKATSGYVLTLGGGAVSWRSCKQTILTRSTMEAELTALDTATVEAEWLRDLLMDLPIVEKPMPAILMNCDNQTVIVKVNSSKDNMKSSRHVKRRLKSVRKLRNSGVITLDYIQTARNLADPFTKGLSRNVIDNASKEMGLRPM

SEQ ID NO: 19870 - protein, 593 aa, Oryza sativa
  Clone ID: TF_OSC421766j.C1.p6.gm
MEASARGNLRNGGARVSGTSAFDVLHREKAAIRRCDFTMAGFADALRLDKFTVQCQYFAQAQNKSKGKYKAQQTTNFKKQKKNNNNPNQDERTCFVCRQPGHLARKCPQRKGMKAPVGQTSKSANVTIGNTGDRSVARGSTVLMGNGSHASVHGVGTVDLKFTSEKIVQLKNSFFPMKDTHSSSSQPSEVIPSSITPPEQTEHTHEHVTEEDVSEAPRRSKRQRTAKSFGDDFTVYLVDDTPKSISEAYASPDADYWKKAVRNEMDSIIANVNEADKCVYYRHGGGEGVILCLYVDDILIFGTNLEVINESHYVEKMLNRFGYIDSKPSPTPYDPSLLLRKNKRIARNQLEYSQIIGSLMYLASATRPDISFAVSKLSRFTSNPGDDHWRALERVMRYLKGTIELGLHYTGYPAVLEGYSDSNWISDVDEIKATSGYVFTLGGGAVSWRSCKQTILTRSTMEAELTALDTATDEAEWLRDLLMDLPIVEKPVLAILMNCDNQTVSGTSAFDVLHREKAAIRFLGSASRDCSLFVRDGSPSSPLVCFAPSSTLATASSSYRATELIQMDSTWPSESEHTENQAPEAAANIALLA

SEQ ID NO: 19871 - protein, 323 aa, Oryza sativa
  Clone ID: TF_OSC401810j.C1.p39.fg
MAFSGGQLMMTGTSVSRQRLAVHGLGRLSGVHGNSSEMVRDAAGADDALRAPSSGAPAGVLFKQQDNHRLPGDRLLLSALPQRTRLLAGHRGKRENHMDHGLVDKAQPSQDNRGNMVKKLEKGSTVACTKSCQENNKSNNKSKGQIQSWIKTLITCFMCKKVGHYALICSNKIDDQVTLPKRRTRRSNRKCYGCNEKSHEVASCPHMKNHFVSSRKKLNIKVASSKVAEKMQDVVKKAPCKDKNRLCYNCRAKGHIGNNCPMGNIPKPNSSFDYDLPRDAKKDICAIRVISSPHASIKSIWVPKSHVTYLYGPNVVEDQNVLK

SEQ ID NO: 19872 - protein, 469 aa, Oryza sativa
  unsure (1)..(469): unsure at all Xaa locations
  Clone ID: TF_OSC101387j.C1.p4.np
MSWQRVGALLLGSVLPACPGGSGRRQIGSVLLSMARMGWKLCHVFRPYTVVMFNREKGKNVSGYASSNSSFQLNPPLASRELTRAHPWSIPSMPLSSQLPLVGSQDQNQYVFDRAFATQVNELPMPEEDVPFCHDCREQGHYALNCPWVYAKEAPSFGLAGQTSLNQPPHTKTSLQPSVQSREPNEENPLNPGNCSPPSLSYHVGSRTKHAKGKKSKNQKRKAPMRTEEEVRKMTITSTEWSTAGITIPRRQXGNTFRGARQLTQHLLSHGGRVSDSEGSDQVSSDYEDESPPHLGEEEMESKACPRCGEIGHIASMCLTLCPHCEEDHPPGECPTRKVTCFLCEGTNHVPKDCQLSVLLTKTAEIQRTTLRLSRQLVSSNSNIDDIIHSTNAPPAAPDSAINHSNNTFSTNHSRHRQPQQXIVVDGRSCFSPRPTPGRAKGNQHQEGDTKQKTVTHFNQQSEGIFLLX

SEQ ID NO: 19873 - protein, 1259 aa, Oryza sativa
  unsure (1)..(1259): unsure at all Xaa locations
  Clone ID: TF_OSC20344j.C1.p4.np
MAYCANALRLDKFSGIHFKGWXNRVTLWLTAMKCFWVSNGKSKGILIAEKQKKFINDRIGCIVSVLGNRLVEVYMHMIDTKELXDALNTKFDATDASNDLYVMEQFQDYKMIDNHSVVEQTHETHTKAKELELLKCVLPDKFVVGCIIAKLPSFWKNFNIALKHTRHEYYVEGLIASLDVEEKTREKDIASKRTCFVCGLPGHLAKNCPQRKGMKAPAGXSSKSSNVTIGNTGDESGYGNLPTIFSVNQSTNWWVDTGANVHVCADISLFCSYQVARDSTVLMENRSHASVHIDTVDLKFTSGKIVQLKNMQHVPTIDKNLVSVSHLCRDGFKLVFESNKVVVSKHGYFIGKGYECNEANVWHSHLCHILLGLMSRLYSMCLIHKFSIVKGSKCHNCVQSKGLMSRLYSMCLIHKFSIVKGSKCHNCVQSKQPRKPYKAAGERNLAPLELLRLDLCEMDGVLKGEKRYFMTLIDEATXFCYVYLLKTKDDGPDYFKIYKAEIENQLDRKIKRFRSDRSGEFFSNEFDLFCEKHGIIHERTPPCTLTDMVNAMLDTVGLAWWGEALLTSNHVLNRVPNRNKDKTPYEQWIERKPSLSYLCTWGFLVNVNVPITKKCKLGTNTVDRVFLGYAHYSIAYRFLIVKSEVPHMYVGTIMETHDATFFESFFPIKDTHSTSSQSCEIILSSITPPGQTEHTHEYITEEDDXGGXSETPWRSKKQRTTKSFSHDFTVYLVDDTPKSILEAYASPGADYXKEAIHSEMDSIIANRILEVTEXPYGCKHVGCKGVFKKKLWPNGTIEKYKDQLVAKGYTQKEGEDFFDTYSPVGRLTTIHVLSLAASHGLLIHQMDVKTAFLNVELDEIYMDQPYGFIVEGIEGKVCKLRRSSYQRTPIPSIWSTGIPRRQISVGFAVNDAKKYVYYHHGGGEGVIICLYVDDILIFWTNLELINDVKSFLSQNFDMKDLGVAAVILNIKLIRGEDGITLLQSHYVEKILSHFGYNSKPSPTPYDPSLLLRKKKRIARNQLEYSQIIGSLMYLPTTTRTDISFAVSKLSRFISNLGDDHWRALEXVMHCLKGTMELGLHCARYPALLEEYSGFNWISDVDEIKTTSGYVFTSGGGAVSXRSCKLTILMRSSIEAELMAEDTAIVEAEWLRVLLMDLSMVEKLKCEKTIELCKCEKTIELCQEIEKLRSYTIGLHPNSKQPGRLHEGTITKCDRQCIEGDGLRPCSILERTHICELDCWSQSMEILGESSRKLNKDQGV

SEQ ID NO: 19874 - protein, 1303 aa, Oryza sativa
  Clone ID: TF_OSC400810j.C1.p4.fg
MSDDGGRYTPPGRRGGGGGGGSGSGRGGASGSGAGDGADGANLPLVPQGRDAGHTARLPVLSRTNYPDWALLMRVNLQAQGLWTAIEPGYAEYRDDRAALSAILQAVPREMLRGLAKHDTAKAAWDAIKTMRVGVDRAMRFKDGETPEEFAMRLTAVVADIRDMGGVMEDEHINKKLLRVVPKKYKPVAISLEQLLDVKTMALEELVGRLSMVNSYSDDEEEGGGDKLYLTEEQWQARARKQEQEGSGGSSKSRGSSGTQNNRRGKAGGSPKGKETINSGNTSRDYSKVKCFNCDEFGHFARQCRKPRRQRRGEVNLTQGEEEPTLLMAHVMGVSLAGEETLGRTPGVHEVHLTEKKVKRSPSFLYILKLNMARPICLAANGTETAWRWHARFGHLNFQALRRLAQAEMVRGLPVIDHVDQLCDGCLAGKQRRVPFPDKARFRAQDALELVHGDLCGPIAPATPGGRKYFLLLVDDMSRFMWIRLLSGKHEAAAAIKQFKAGVEMESGRKLRALRTDRGGEFTSVEFTEFCADRGVSRQLTAPYSPQQNGVVKRRNLTIVAAARSMLKAAGMPAHFWGEAVVAAVYLLNRSPTKSLDGVTPYEAWHGRRPSVEHLKVFGCVGYVKTVKPNLRKLDDRGTRMVFIGYEQGSKAYRMYDPVSRRVYVSRDVVFDEAAMWPWRDPEVTQTGGEEDFTVEFFSTPLGGNRVPDVVVEHGGARETETAPSPLATPDAAPVWSPVTSSSPAGVEFCTPPSDASIESDGAPPRFRTVNNVLATTTPVLDFDYDDECLIAEQEPFSFKEAEKEQCWMKAMEEEMSSIEGNNTWFLCDLPSDHRAIGLKWVYKIKRSAEGEILKYKARLVAKGYVQQQGIDYEEVFAPVARMETVRLLVALAAHEGWQIHHMDVKSAFLNGELEEEVYVVQPPGFVVEHKENKVLKLKKALYGLKQAPRAWYAKLDSTLANLDFVRSATENAVYTRGEGNARLMVGVYVDDLIITGALGTEIAKFKEQMRSMFSMSDLGLLSYYLGMEVKQTEEGITMSQAGYAGRILEKAGMQGCNPCQVPMDARLKLKKGVEDCIDATQFRSIIGSLRYLVNTRPDLSYSVGYVSRYMENPGAEHWAAMKHILRYVAGSLNIGLKFRKGEEKFPRLVGYSDSDMAGDVDDRKSTTGVLFKLGENLITWQSQKQKIVALSSCEAEYIAATTAACQGIWLARLLGELQMKKPCCAMLKVDNKSAINLCKNPVLHDRSKHIDTRYHFIRERVERKEVEVEYTSSAEQLADILTKPLGKVRFLELRGKLGLSPV

SEQ ID NO: 19875 - protein, 1446 aa, Oryza sativa
  unsure (1)..(1446): unsure at all Xaa locations
  Clone ID: TF_OSC401706j.C1.p1.np
SARLLRSSSSSSASSSPTSNTGDNSNTGHKEKEAPANTNGGNTASNSSKGPFSGYNSTFIVFMFSQILLLGAMFSLHSHVTNVYAYSILSMICSQWQTXVXNTDLAAELALISCTSLFPADVILIVLIFXIKIYRIVTIFLTIQKPDRSFSVVGFAASLKPHAFDGSNYKRWKACAVLWLTAMQYFFVSRGKPSEPPLSPEEEAKFEAADCLFRGALISVLADNIVDVYMHMPLGKEMWDALEAKFRVSDPSSELYIMEQFYDXEMVDDRSVVEQAHEIQMLAKELENNRCELPYKFVAGGIIAKLPPSWSDFAISLKHKRQEFTVTDLICSLGVEEKARAKDNRGKRVEGSSSVNASHNNKKVKPDVKLKATNTFKKKGMGKPKGDCFVCGKPGHXAKDCPKRKDRKFANMVISEGGRTSGYGKFLPTIVSVCHSPDWWVDTGANIHVCANISLFSSYQARRGSSLLMGNGSLAAVLGVGTVDLKFTSGKTVQLKNMQHVLSIKKNLVSSSLLCRDGFRLVSESNKCVVSKYETFIGKGFDSGGLFRFSLDNMCNIVNYVSNDDESNVWHSRLCHVNFGCMTHLDNMSLIPKFTLVKGAKFHTCVQSKQPRKPHREFEARNLAPLELIHSDLCEMNGVXTKGGKKYFMTLIDDCTRFCYVYLLKTKDEALHYFKIYMAEVENQLERKIKRLRSDRGGEFSNELTSFCEEFGIIHERMPPYSPXSNGVAKRKNCTLTELVNAMLDTAGLSKESWGEAILIACHVLNRIPTKHKEVTPFEEWERRKLNLSYLLTWGCLAKVNISIGKLGPKTVDYVFLGYAIHSVGYRFLIVNSGVPDMRVGTITESRDATFSTSSEEPILTPEHFAPIEHIDQTPEGNPEEDNNVATRKSMRQSTAKSVCDDYIVYIVDNTPRTIEEAYSSPNANYWKEAVHSEMDSIMSNGTWEVIERPFGCKIGCKXVLKKNLRLDGTIEKYKARLVAKGYTQKEGEFFDIYSSVACLTTIRVLFATAASHGLLVHQMDVKIAFLNGELEEEIHMDQPNGYTLEGQEGIMCKLLKSLYTLEAVEVLKQAPKQWHEKFDKTLTSAGFVVNEADKCVFYRYGGGERVILCLYVNDMSIFGTSLNLIEEVKDFLSKSFEMKDLGVADVILNIKLLRGDEGGITLVQSHYVDKKVVPTPYDPRVLLRKNRRIARDQLSHYVDKKVVPTPYDPRVLLRKNRRIARDQLRYSQIIGSLMHLASATRPNISFAVSKLSRFVXNPGDDHWHAMERVMRYLKGTMSYGIHYAGYPKVPKGYSDSNWISDADEIKATSGYVSTLRDGAVPXKSCKQTILTRSTTEAELTALDTATVEAEWLRELLMDLPVVEKAVPAILMNYDNQTVIIKVNSSKDNMKSSRHVKRRLKSVRRQKNSRVIALDYVXTAKNLADQFTKGLTRNVKRPTSCTIVET

SEQ ID NO: 19876 - protein, 1360 aa, Oryza sativa
  Clone ID: TF_OSC413692j.C1.p3.fg
MSDDGGRYTPPGRRGGGGGGGSGSGRGGASGSGTGGGADGANLPLVPQGRDAGHTARLPVLSRTNYPDWALLMRVNLQAQGLWTAIEPGYAEYRDDRAALSAILQAVPREMLRGLAKHDTAKAAWDAIKTMRVGVDRVREAKEQGFRRQLEAMRFKDGETPEEFAMRLTAVVADIRDMGGVMEDEHINKKLLRVVPKKYKPVAISLEQLLDVKTMALEELVGRLSTVDSYSDDEEEGGGGKLYLTEEQWQARARKQEQEGSGGSSKSRGSSGTQNNRRGKAGGSPKGKETINSGNTSRDYSKVKCFNCDEFGHFARQCRKPRRQRRGEVNLTQGEEEPTLLMAHAMGVSLAGEETLGRTPGVHEVHLTEKKFGDGSVVDIRGRGTVLFQCKNGDHRSLEAVYFIPKLCKNIISIGRLDARGYDAHIYHGVCTLRDPDGLLLAKVKRSPSFLYILKLNMARPICLAANGTETAWRWHARFGHLNFQALRRLAQAEMVRGLPVIDHVDQLCDGCLAGKQRRVPFPDKARFRAQDALELVHGDLCGPIAPATPGGRKYFLLLVDDMSRFMWIRLLSGKHEAAAAIKQFKAGVEMESGRKLRALRTDRGGEFTSVEFTEFCADRGVSRQLTAPYSPQQNGVVERRNLTVVAAARSMLKAAEMPAQFWGEAVVAAVYLLNRSPTKSLDVKPNLRKLDDRGTRMVFIGYEQGSKAYRMYDPVSRRVYVSRDVVFDEAAMWPWRDPEVTQTGGEEDFTVEFFSTPLGGNRVPDVVVEHGGARETETAPSPLATPDAAPVWSPVTSSSPAGVEFCTPPSDASIESDGAPPRFRTVNNVLATTTPVLDFDYDDECLIAEQEPFSFKEAEKEQCWMKAMEEEMSSIEGNNTWFLCDLPSDHRAIGLKWVYKIKRSAEGEILKYKARLVAKGYVQQQGIDYEEVFAPVARMETVRLLVALAAHEGWQIHHMDVKSAFLNGELEEDVYVVQPPGFVVEHKENKVLKLKKALYGLKQAPRAWYAKLDSTLANLDFVRSATENAVYTRGEGNARLVVGVYVDDLIITGALGTEIAKFKEQMRSMFSMSDLGLLSYYLGMEVKQTEEGITMSQAGYAGRILEKAGMQGCNPCQVPMDARLKLKKGVEDCIDATQFRSIIGSLRYLVNTRPDLSYSVGYFSRYMENPGAEHWAAMKHILRYVAGSLNIGLKFRKGEEKFPRLVGYSDSDMAGDVDDRKSTTGVLFKLGENLITWQSQKQKIVALSSCEAEYIAATTAACQGIWLARLLGELQMKKPCCVMLKVDNKSAINLCKNPVLHDRSKHIDTRYHFIRERVERKEVEVEYTSSAEQLADILTKPLGKVRFLELRGKLGLSPV

SEQ ID NO: 19877 - protein, 1495 aa, Oryza sativa
  Clone ID: TF_OSC415431j.C1.p2.fg
MSDDGGRYTPPGRRGGGGGGGSGSGRGGASGSGAGGGADGANLPLVPQRRDAGHTARLPVLSRTNYPDWALLMRVNLQAQGLWTAIEPGYAEYRDDRAALSAILQAVPREMLRGLAKHDTAKAAWDAIKTMRVGVDRVREAKEQGFRRQFEAMRFKDGETPEEFAMRLTAVVADIRDMGGVMEDEHINKKLLRVVPKKYKPVAISLEQLLDVKTMALEELVGRLSMARARKQEQEGSGGSSKSRGSSGTQNNRRGKAGGSPKGKETINSGNTSRDYSKVKCFNCDEFGHFARQCRKPRRQRRGEVNLTQGEEELTLLMAHVMGVSLAGEETLGRTPGVHEVHLTEKKVILNHEVAEEEDNTTEWFLDTGATNHMTGSRSAFADLDTGVVGTVKFGDGSVVDIRGRGTVLFQCKNGDHRSLEAVYFIPKLCKNIISIGRLDARGYDAHIYHGVCTLRDPDGLLLAKVKRSPSFLYILKLNMARPICLAANGTETAWRWHARFGHLNFQALRRLAQAEMVRGLPVIDHVDQLCDGCLAGKQRRVPFPDKARFRAQDALELVHGDLCGPIAPATPGGRKYFLLLVDDMSRFMWIRLLSGKHEAAAAIKQFKAGVEMESGRKLRALRTDRGGEFTSVEFTEFCADRGVSRQLTAPYSPQQNGVVERRNLTVVAAARSMLKAAGMPAQFWGEAVMAAVYLWNRSPTKSLDGVTPYEAWHGRRPSVEHLKVFGCVGYVKTVKPNLRKLDDRGTRMVFIGYEQGSKAYRMYDPVSRRVYVSRDVVFDEAAMWPWRDPEVTQTGGEEDFTVEFFSTPLGGNRVPDVVVEHGGARETETAPSPLATPDAAPVWSPVTSSSPAGVEFCTPPSDASIESDGAPPRFRTVNNVLATTTPVLDFDYNDECLIAEQEPFSFKEAEKEQCWMKAMEEEMSSIEGNNTWFLCDLPSDHRAIGLKWVYKIKRSAEGEILKYKARLVAKGYVQQQGIDYEEVFAPVARMETVRLLVALAAHEGWQIHHMDVKSAFLNGELEEDVYVVQPPGFVVEHKENKVLKLKKALYGLKQAPRAWYAKLDSTLANLDFVRSATENAVYTRGEGNARLVVGVYVDDLIITGALGTEIAKFKEQMRSMFSMSNLGLLSYYLGMEVKQTEEGITMSQAGYAGRILEKAGMQGCNPCQVPMDARLKLKKGVEDCIDATQFRSIIGSLRYLVNTRPDLSYSVGYVSRYMENPGAEHWAAMKHILRYVAGSLNIGLKFRKGEEKFPRLVGYSDSDMAGDVDDRKSTTGVLFKLGENLITWQSQKQKIVALSSCEAEYIAATTAACQGIWLARLLGELQMKKPCCTMLKVDNKSAINLCKNPVLHDRSKHIDTRYHFIRERVERKEVEVEYTSSAEQLADILIKPLGKRYHGATEGDNVVRSQRVAAGLAGRQSRQHMLVYRADDELVVVVGVVLDHSEEAEAKALPPSRRESVGMHPAPVTVVLHGIDAFHKTGSDAPAVFLIVPA

SEQ ID NO: 19878 - protein, 746 aa, Oryza sativa
  unsure (1)..(746): unsure at all Xaa locations
  Clone ID: TF_OSC402671j.C1.p1.np
LRSLNRGSAFSHSLVAPPPPRIPPLPSAPRAIKRGINPRVPLPRFPLFPLSLSLGFVRIKPVIVAGAINGRIFRARPPSPAALSFPRRYLNPPRAPLFRFRRSPLTLAVGIVLAPXHLLSAVAAVLRLAAAAAPLLLPTRRHLPRHRRIAVDLVRASVSLADRRSTVVIVIPSRAAVSLRSGRRSRRRRCPGVSRGPPFAFPLPSSLSGAAPPRRWSPAVTIGARARRSRRPRRRGRPRARPRGCQVGPAVSRPRPRVRLTRGTHGADRRQPRAPGPPWTVGLTRGPHSPWTRANEGYTSCGPMADNEKGNKVRSQDIGTSSSRVNEAQDTSCAAVVQHLINQNKLLIEILQQHRMPILNPSQMQPQVQLEAVQALTPQVSAPPTSQKAPHAMPHVDPKEASIICFMCDEQGHYARNCPQQKRKAPMRTEGEVRKMIITSTEWPPPGMTRRQRRNTFRGAPQLTEHLLANGGRVSDSEDSDQVSSEDEDKMERKACSRCGEIGHVASSDKMERKACSRCGEIGHVASSCASTCVHCEEDHPPDRCPTSRITCFFCEGTDHVPKDCQFSFLLTKKMANQPAGFNGEKHQGNTNPRQDYSFSLTPVPGQRNQNEKRKCRVREDICCFNCQGMGHFADKCPKPRNIAAGTSVHATPCNQKLAPQRMVIHASRSSPIARVATAPIPMSALPQGVNAQFQPQQRIVVDGRSCVSPRPTPGRAKGNQPPEGDTKQKTVIRCNQQSEGSFSCE

SEQ ID NO: 19879 - protein, 1556 aa, Oryza sativa
  Clone ID: TF_OSC400353j.C1.p2.fg
MGCKMADHPPNHRGEGMIDFVAELARMTLVVGYPNAPEYTTVPPLSGELPHRVRLEVHGYVGTCLANMVVEASGGIADHACQEAAYLMMPRLRERHNYIFHDTAYQFHPRRASGDDVSTFRPTAGENDTTFGHMCAVMRGMDRMHSNLHKASKALNDGKLVRIIALKDEIARLKRENAQLKGLPAPGGVRIRTTPRKSTTAPMVYTRNGSRTTGEGSNGEERTDGVHPNSDFGNGPPPLPENPTLAQVMAHQTQMMTAMTQQASARWVVAQKKREFRALHQGNRTVTEYFHEFNRLARYAPEDVRTDAEKQEKFLAGLDDELTNQLISGDYADFERLVDKAIRQEDQRNKMDRKSKAAQFRSNQGSHQRPRFTPGQQSGPTTLIVHQHRPFNASNFHQGASGSQNHHGGQPNRSAAPRPQMALAQSATSAQAKKETGTKPGSCFNCGELGHFAKKCPKPRRAEPRFVQARVNHASTEEAQAAPEVVLGTFPVNSIPATILFDSGATHSFISKKFVGMHGLIREELSTPMRVHTPGNSSTSVQFSPSITIEIQRSPFLANLILLGSKDLDVILGMDWLTKFKGVIDCANRTVTLTNEKGETVVYKSPVSPKQGVSLNQIEVEIPVVTEEKNSRKLEEIPIVCEYPKVFPEDLTTMPPKREIEFRIDLAPGTAPIYKRPYRMAANELAEKKDKTKRMCVDYRALNEVTIKNKYPLPRIDDLFDQLKGAKVFSKIDLRSGYHQLRIREEDIPKTAFTTRYGLYECTVMSFGLTNAPAFFMNLMNKVFMEFLDKFVVVFIDDILIYSKSEEEHEQHLRLVLEKLKEHQLYAKSSKCDFWLSEVKFLRHVITAQGVAVDPSNVESITKWTPPKAVSQIRSFLGLAGYYRRFIENFSRIARPMTQLLKKDEKFKWTAECDKSFEELKKKLVSAPVLILPDQMKDFQVYCDASRHGLGCVLMQEGRVVSYASRQLRPHEGNYPTHDLELAAVVHALKIWRHYLIGNRCEVYTDHKSLKYIFTQPDLNLRQRRWLELIKDYDMSIHYHPGKANVVADALSRKSYCNALCIEGMCGELQQDLERLNVGIVEHGFVAALEAQPTLVDQVRAAQVNDPKIAELKKNMRVGKARDFLEDEHGTIWMGERLCVPDDKELKDLILIEAHQTQYSIHPGSTKMYKDLKEKFWWVSMRREIAEFVALCDVCQRVKAEHQRPAGLLQPLQIPEWKWEEIGMDFIIGLPRTSSGHDSIWVVVDRLTKVAHFIPVHTTYTCKREPIHFKVLAEIARGIGNPVKFQHSLPSADRWSDRRVNQILEDMLRACALDFGGAWDKSLPYAEFSYNNSYQASLQMALFKALYGRKCRTPLFWDQTGERQLFGTEVLAEAEEKVRTVRERLRIAQSRQKSYADNRRRELTFEAGDYVYLRVTPLRGVHRFQTKGKLAPRFVGPYKILEQRGEVAYQLELPSNMIGIHDVFHASQLKKCLRVPKEQANSEHIDIQEDMTYVERPVRILETSERRTRNKVTRFCRVQWSHHSEEEATWEREDELKATHPHLFASSSKSRGRDFI

SEQ ID NO: 19880 - protein, 283 aa, Oryza sativa
  Clone ID: TF_OSC24996j.C1.p1.fg
MWKTLTNLYSGEGNVMLMVEAQEKISVLRQGERSIAEYVAELKHLWSDLDHYDPLGLEHPDCIAKMRKWIERRRVIEFLKGLNSEFEGRRDAMFHQTTLTTLDEAIAAMAQEELKKKVLPSATPSSPSPTYVVAQSKETRECFNCGEMGHLIRDCRAPRKPSYGRGRFGDRGGARGGRGYAGRGNRGRGYEYKSDHRANVVTLEKGCSGSTNVDVANLVHSSSVLIQIGYLTRVHLDMSRERETGKKLGIDVRRDGLWYLDRKATSEDVCLALMASTSEEEAK

SEQ ID NO: 19881 - protein, 1680 aa, Oryza sativa
  Clone ID: TF_OSC401337j.C1.p10.fg
MSTSLAEVPQGGHIKEVIAEGSSGGLSSSTQLLATKRKLAASNPPTAKRRRSPIALPIVRSPGVRQIISQNEVIMERSQVAGQMSPSAESPRARSMSPVARFVSSPSAIPIELDVETQPRESTQSTPHVVTHRSGKRTLKSLIWKEFKPFYSSTGKVLYGKCIHCSKDWKFDPDVARAELLRMLVLQELPFSFVEHPGFRRFCASLNPYFRVLSRITIKGDCLAAYQEQKLALFEDWQIESKLFSITVDNASVNDSMVVELKGNLLGKLAMPCKGELFHFRCAAHILNLIVQDGLSTISGAISRIRESVKYIKASEACEQKFEEIIAQVGIVEEKRPSLDVSTRWNSTYLMLSSSLLFRRAFDSLDRFDPNFQDAPLFFDWDNAEVLCKHLKIFYDATVVVSGTSYPTVSRYFHEFWKVKVMLLNESNSEDVLVASMVSKMDTKFQKYWDLQFLQICVPVIFYPRFKLKFLEFRLKAGFGDKATGPNGYLSRIKRIVRSWFVEYSSQIGGPSAINSQEASTSGVNVGGSQFADWRQYLHDQSKSFGDPYSILTDTVEDDDVNMQLLGMRWPSAAANAATTSFVPCSFYFSNLVRLDALAVVIFVHVQSLLKIIQALQKAKQLIVSHESLSKIQPFQVFCLQKCVASVKGLEQVMGKLVEMLTKKFNEAPTTSSAVVPHTESVQKIELMQNDIKLEGVKNYLSWSRRALLILKTKGLEAYVTGEVKEPENISSVEWKTWRTTNSLVVAWLLTSLIPAIATTVETISSASEMWKTLTNLYSGEGNVMLMVEAQEKISVLRQGERSIAEYVAELKHLWSDLDHYDPLGLEHPDCIAKMRKWIERRRVIEFLKGLNSEFEGRRDAMFHQTTLTTLDEAIAAMAQEELKKKVLPSATPSSPSPTYVVAQSKETRECFNCGEMGHLIRDCRAPRKPSYGRGRFGDRGGARGGRGYAGRGNRGRGYEYRSDHRANVVTLEEGCSGSTNVDVANLVHSSSVLIQIGYLTRVHLDMSRERETGKKLGIDVRRDGLWYLDRKATSEDVCLALMASTSEEEAKEQEWRKPHEEKNLQVYTRRTRCPVIQQVEEDNQVEEDVSREQGSLESGGEEEEVKEESDLPIAIRKSVRSNAGKPPLRYGFEAQDEGDDENNISNYVSYDSLSSTYKAFVASLDSVQIPKDWREAKQDPRWHQAMLDELEALEKNKTWDLVPFPEGKKIVNCKWVYTVKQNPDGKVERYKVRLVAKRYSQTYGIDYDETFAPVAKMSMVRTLISCAANFDWPLHQLDVKNAFLHGDLQEEVYMDVPPGFATSQTKGKVLRLKKSLYGVKQSPRAWFDRFRHAMCAMDYKQCNGDHIVFYHHSGDHITILAVYVDDMVITGNDCLEITRLKRNLSKEFEVKDLGQLRYFLGIEIARSPRGIVISQRKYVLDLLSETGMLGCRPVSTPIDQNHKLCAESGDPVNRKRYQRLVGRLIYLCHTRPDIAYAVSMVSRYMHDPRSGHMEAVYRILRYLKGSPGKGLWFKKNGHLKIEGYCDADWASCLDDRRSTSGYCVYVGGNLVSWRSKKQSVVSRSTAEAEYRAMVVSLSELLWLRNLLVELKILENTPMKLLCDNKSAINIANNPVQYDRTKHVEIDRFFIKEKLDEGVLELGFVTSGGQVADCLTKGLGVKECNCSCDKMGMIDIYHPS

SEQ ID NO: 19882 - protein, 1739 aa, Oryza sativa
  Clone ID: TF_OSC418407j.C1.p7.fg
MSTSLAEVPQGGHIKEVIAEGSSGGLSSSTQLLATKRKLAASNPPTAKRRRSPIALPIVRSPGVRQIISQNEVIMERSQVAGQMSPSAESPRARSMSPVARFVSSPSAIPIELDVETQPRESTQSTPHVVTHRSGKRTLKSLIWKEFKPFYSSTGKVLYGKCIHCSKDWKFDPDVARAELLRMLVLQELPFSFVEHPGFRRFCASLNPYFRVLSRITIKGDCLAAYQEQKLALFEDWQIESKLFSITVDNASVNDSMVVELKGNLLGKLAMSCKGELFHFRCAAHILNLIVQDGLSTVSGAISRIRESVKYIKASEACEQKFEEIIAQVGIVEEKRPSLDVSTRWNSTYLMLSSSLLFRRAFDSLDRFDPNFQDAPLFFDWDNAEVLCKHLKIFYDATVVVSGTSYPTVSRYFHEFWKVKVMLLNESNSEDVLVASMVFKMDTKFQKYWDLQFLQICVPVIFYPRFKLKFLEFRLKAGFGDKATGPNGYLSRIKRIVRSWFVEYSSQIGGPSAINSQEASTSGVNVGGSQFADWRQYLHDQSKSFGDPYSILTDTVEDDDVNMQLLGMRWPSAAANAATTSFVPCSFYFSNLVRLDALAVVIFVHVQSLLKIIQALQKAKQLIVSHESLSKIQPFQVFCLQKCVASVKGLEQVMGKLVEMLTKKFNEAPTTSSAVVPHTESVQKIELMQNDIKLEGVKNYLSWSRRALLILKTKGLEAYVTGEVKEPENISSVEWKTWRTTNSLVVAWLLTSLIPAIATTVETISSASEMWKTLTNLYSGEGNVMLMVEAQEKISVLRQGERSIAEYVAELKHLWSDLDHYDPLGLEHPDCIAKMRKWIERRRVIEFLKGLNSEFEGRRDAMFHQTTLPTLDEAIAAMAQEELKKKVLPSATPSSPSPTYVVAQSKETRECFNCGEMGHLIRDCRAPRKPSYGRGRFGDRGGARGGRGYAGRGNRGRGYEYRSDHRANVVTLEEGCSGSTNVDVANLVHSSSVLIQIGYLTRVHLDMSRERETGKKLGIDVRRDGLWYLDRKATSEDVCLALMASTSEEEAKFIRTDNGGEYINNEFSSFLSSEGILHQTSCPDTPPQNGVAERKNRHLLETARSLMYTMNVPKFLWSEAVMTATYLINRTPSRILGMKTPCEMIFGKNEFVVPPKVFGCTCFVRDHRPSIGKLDPRAVKCIFVGYSSGQKGYKCWSPLERRTFEQEWRKPHEEKNLQVYTRRTRCPVIQQVEEDNQVEEDVSREQGSLESGGEEEEVREESDLPIAIRKSVRSNAASLDSVQIPKDWREAKQDPRWHQAMLDELEAPEKNKTWDLVPFPEGKKIVNSNFDWPLHQLDVKNAFLHGDLQEEVYMDVPPGFATSQTKGKVLRLKKSLYGVKQSPRAWFDRFRHAMCAMDYKQCNGDHIVFYHHSGDHITILAVYVDDMVITGNDCLEITRLKRNLSKEFEVKDLGQLRYFLGIEIARSPRGIVISQRKYVLDLLSETGMLGCRPVSTPIDQNHKLCAESGDPVNRKRYQRLVGRLIYLCHTRPDIAYAVSMVSRYMHDPRSGHMEAVYRILRYLKGSPGKGLWFKKNGHLKIEGYCDADWASCLDDRRSTSGYCVYVGGNLVSWRSKKQSVVSRSTAEAEYRAMVVSLSELLWLRNLLVELKILENTPMKLLCDNKSAINIANNPVQYDRTKHVEIDRFFIKEKLDEGVLELGFVTSGGQVADCLTKGLGVKECNCSCDKMGMIDIYHPS

SEQ ID NO: 19883 - protein, 648 aa, Oryza sativa
  Clone ID: TF_OSC416075j.C1.p3.np
MDEVGRRWTFSRANEGYTSCGPVVEMSYGGGLVNARGSVLPACPGIPAVGRIGSVLLSKARMGWKLCHIFTTGSKAMECGIKMCLVGWPGLAWDELGPRSGCQFGPNHRRPWVKAVLDGQLCEEEDVVSCLPKLRKTAGSASEAKEAVKPAVKQERRVSSFKVLSLVSNLSLPFVFPLSLSKPLQQMAGNEKGNKVRSQDIGTSSSRVNEAPDTSCVTLVQHLINQNRLLIEILQQHQTPILNLSQIQPQVQLEAVQALTPPVSMPPASRRTHGDVPHVDPKEASNICFTCDEQVHYARERPQQKRKTPMRTEDEVRKMIITSTEWPPPGMTRRQRRNTFRGAPQLTEHLLASGGRVSDSEDSDQVSSDDEDEERKACSRCGEVGHVASSCATTCVHCEEDHPPDRCPTSRITCFFCEGTDHVPKDCQFSFLLTKKMANQPASSNGEKHQGNTNPRQDYRFSLTPVPGQRNRNEKRKCRVREDICCFNCQGMGHFADKCPKPRNIAASTSVHATPCNQKLAPQRIVIHASQSSPMARAATASTPASALPQGVNAHFQPQQRIVVDGRSCVSPRPTPGRAKGNQPPEGDTKQKTVIRFNQQSEGSFSCECPITSSQNQSRMQSLEQCQHVSTFVIFSSLLITSKVCSNP

SEQ ID NO: 19884 - protein, 241 aa, Oryza sativa
  Clone ID: TF_OSC408704j.C1.p1.fg
MEQVCRCYNESIKEQEQQQEQKQKQKREQEQEQEQEQESQQEQEPKPKPSARKAAYCSANPPDLTHLNPQGILYARIAGGLVTLLGIANLLLHATDAIFQDTSQQNALLKLFVGTASSLATLLPNARMTPCVTPAARQVIWHVIAQVQDLPGHIARECTNEPVCNLCNVSGHLARNCQKTTISSEIQGGPFRDITCRLCGKPGHISRNCMTTMICGTCGGRGHMSYECPSARMFDRGLRRF

SEQ ID NO: 19885 - protein, 661 aa, Oryza sativa
  Clone ID: TF_OSC102121j.C1.p8.np
MDEVGGRWTFSRANEGYTSCGPVVEMSWQRVGALLLGWPACPGCPGRRGIGSVLLSMARMGWKLCHVFRLYTVVVSCLTTKIWNGWPGLAWDELGPRSGCQFGLNHRRPWVKAVLDGQVSEEEDIVSCLPKLRKTAGSASEVEEALKPAVKQDKRLRSVKVLSLVSNLSLPFVFPLSLSKPLQQMADNEKGNKVRSQDIGTSSSRVNEAPDTSCVTLVQHLINQNRLLIEILQQHQTPILNLSQIQPQVQLEAVQALTPRVSMPPASRRTHGDVPHVDSKEASIICFMCDEQGHYARECPQQKRKTPMRTEDEVRKMIITSTEWPPPGMTKRQRRNTFRGAPQLTEHLLANGGRVSDSEDSDQVSSDDEDEKSPQGFNQNKMERKACSRCGEIGHVASSCATTCVHCEEDHPPDRCPTSRITCFFCEGTDHVPKDCQFSLLLTKKMANQPASSNGEKHQGNTNPRQDYSFSLTPVPGQRNQNEKRKCRVREDICCFNCQGMGHFADKYPKPRDIAASTSVHATPCNQKLAPQRIVIHASRSSPIARVATAPTPASALPQGVNAQFQPQPPVDKTEASIGILPLDVPAQQPRNQVQDEEPSAKKTLICYNCKGPGHYSRDCLQPRQSRSPHYRQFTRSRHPNRIVVTGANAVPVRPRVNQNP

SEQ ID NO: 19886 - protein, 127 aa, Oryza sativa
  Clone ID: TF_OSC102216j.C1.p9.gm
MTLAAAATVAFERDGQRGGGRGSPLTRASKGAAVGDDDLSRIKAVDVTVPGGVALTDGSLPSGCEDRGYGGGGGGDRACYKCGKEAHMAKDCSQGSDNGAGGSSVMLRGPAASPRLGRHLLRPPYGV

SEQ ID NO: 19887 - protein, 909 aa, Oryza sativa
  unsure (1)..(909): unsure at all Xaa locations
  Clone ID: TF_OSC11382j.C1.p6.np
LVIAGFELGRPRPALRFRRRPPEHRRRSTRTSPPFQPRRRRRPVINDVVIGNNLFSSWFGMVYSWFGDRTVQPMPRFKPEYLFGTEGFVQELRTMSFAIGFGTAPLYAQIPHDRDEEKCRVKVTLNTNHEDIPSLMFEAGGGNYIHACQEVARIAIGELRDCYSDQLADTEYRYHPRQPQGSDRGSYLEPAGIENDATTRHLVEMLWAMDEFRAEIVLAAQDREDRNRGKICKLEDKVDRLEKELAALKGEAPPQKARVRLTTRKRALFVPRYQLAPKVRVVEEEAVSANPSVVNVSDDDGEESKRTHSKVEWGATQDDGGKPNEPSINRCPEDLDNGNGPNNNNNNNNNNGENPTLAQVLVQQAQLMNMMMQQFQNQQNQGNNHAPPQNKLAEFLRVRPPTFSSTTNPVEASDWLHAIEKKLDLLQCTNQEKVSFASHQLHGPASEWWDHFRLNRTTAEPITWLEFTAALRKTHIPSGVVSPKKKEFRTLTQGSRSVTEYLHEFNRLARYAPEDVRTDEERQEKFLEGLNDELSYPLMTGDYHDFQKLVDMAIRQEDKYNRMEQKKRRIAHFKAQQGNSQRPCLAMGPQAVSQGGSSLVARPQRQFFNNNSGNNNRNQAPRPVATLAQHQPAKREPGNKPRVCFNCGEPGHYSDKCPKPRRVKVVPAQNNSTAPVSKARVNHVAAAEAQGAPDVILGTFLVNSVPATVLFDSGATHSFLSMSFARNHGMEVEDLRRPLMVSTPSNQALSSQRSPSVRIEIQGVPFLANLILLESKDLDVILGMDWLARYKGVIDCANRKVTLTSNDGQVVTVYALPSEPLRSSLNQVSLEEIPIVQDYPDVFPDDLPGMPPKRDIEFRIDLVPRKTPIHKRPYRMAANELAEVKRQVDDLLQKGYMSHPKNPWSXLVM

SEQ ID NO: 19888 - protein, 1731 aa, Oryza sativa
  unsure (1)..(1731): unsure at all Xaa locations
  Clone ID: TF_OSC420875j.C1.p3.np
VPTFPESPILEGKILKNSRASKATPGLEWYIPGLEIELCSRNGCSGWLGLCNGMPRFKPEYLFGTEGFVQELRTMSFAIGFGTAPLYAQIPHDRDEEKCRVKVTLNTNHEDIPSLMFEAGGGNYIHACQEVARIAIGELRDCYSDQLADTEYRYHPRQPQGSDRGSYLEPAGIENDATTRHLVEMLWAMDEFRAEIVLAAQDREDRNRGKICKLEDKVDRLEKELAALKGEAPPQKARVRLTTRKRALFVPRYQLAPKMVLTHSNGNGPNNNNNNNNNNGENPTLAQVLVQQAQLMNMMMQQFQNQQNQGNNHAPPQNKLAEFLRVRPPTFSSTTNPVEASDWLHAIEKKLDLLQCTNQEKVSFASHQLHGPASEWWDHFRLNRTTAEPITWLEFTAALRKTHIPSGVVSPKKKEFRTLTQGSRSVTEYLHEFNRLARYAPEDVRTDEERQEKFLEGLNDELSYPLMTGDYHDFQKLVDMAIRQEDKYNRMEQKKRRIAHFKAQQGNSQRPCLAMGPQAVSQGGSSLVARPQRQFFNNNSGNNNRNQAPRPVATLAQHQPAKREPGNKPRVCFNCGEPGHYSDKCPKPRRVKVVPAQNNSTAPVSKARVNHVAAAEAQGAPDVILGTFLVNSVPATVLFDSGATHSFLSMSFARNHGMEVEDLRRPLMVSTPSNQALSSQRSPSVRIEIQGVPFLANLILLESKDLDVILGMDWLARYKGVIDCANRKVTLTSNDGQVVTVYALPSEPLRSSLNQVSLEEIPIVQDYPDVFPDDLPGMPPKRDIEFRIDLVPRKTPIHKRPYRMAANELAEVKRQVDDLLQKGYIRPSSSPWGAPVIFVEKKDHTERMCMDYRALNDVTIKNKYPLPRIDDLFVQLKGATVFSKIDLRSGQLRIKEEDIPKTDFTTQDGLFECTVMSFGLTNAPAFFMNLMNKVFMEYLDKFVVVFIDDILIYSRTKEEHEEHLRLALEKLREHQLYAKFSKCEFWLSEVKFLGHVISAGGVAVDPSNVEXVTNXKQPKTVSEIHSFLGLAGYYRRFIENFSKIAKPMTQLLXKDVKYKWSEECEQSFQELKSRLISTPILILPDPKKGFHVYYDASKLGLGCVLMQDGKVVAYASRQLHPHEKNYPSHDLELAAVVHALKIWRHYLFGTRTEVYTNHKGLKYIFTQPDLNMRQRRWLELIKDYDMGIHYHPGKANVVADALSRKGYCNATEGRRLPWELCKEFERLNLGIVSRGFVAALEAKPTLIDQVREAQINDPDIQEIKKNMRRGKAIGYLEDEQGTVWLGERICVPENKELKNAILKEAHDTLYSIHPGSTKMYQDLKEKFWWASIKREIAEYVAVCDVCXRVKAEHQKPTGLLQPLMIPEWKWEEIWMDFITGLPRTSSGHDSIWVIVDKLTKVAHFIPVRTTYSGSRLAELYMARIVCLHGVPKKIVSDRGSQFTSKFWKKLQEEMGSKLNFSTAYHPQTDGQIERVNQILEDMLRACALDFGGSWDKNLPYAEFSYNNSYQASLQMAPYEALYGRKCRTPLLWDQTRERQVFGTDILREVEEKVKITQERLRIAQSRHKSYADNRRRDLSFEEGDHVYLRVMPLWGVHRFHTKGKLAPRFVGPYKIVSRRGEVAYQLELPQCLAGVHNVFHVSXLKKCLRVHTEEANLEQIEIQEDLTYVEKPIRILETDERRTRNRVIRFCKVQWSNHSEEEATWEREEELKSAHPHLFASSSESRGRDSV

SEQ ID NO: 19889 - protein, 542 aa, Oryza sativa
  Clone ID: TF_OSC404471j.C1.p21.gm
MPPPRLGSAEPVSCRARAPAAPPRDRPIGFVPIRAVGSRGPAVDSLGGPGPRWTGAHVPLTGGARLPAPPLPLDDVSEEFPISAPKTPVKMRSRSPKITTAKSMSDQRKVSATCYDCGEQGHYIRNCPWKVFARSPEKDEKQCPGSNQAPSQSTNKKDGTLQHNFGANRKVIWKMDNGRTMIITSSEFTPEDAARIPKRQRGRNTFRGARQLTRHLIKYGPPRPEDDESGERFAADDDDDDTDDDDDTTLNSFMERGLEFKACARCGIVGHTASLCLPTCRCDHVPKDCQLNAVIAKTKKEQGTTVQPIRQPMTIDNSGHNPSALPPTPAPVEANHGRSNVTKDVHKSLLVPVSAAKVHNQKPAPRDQASRFCRNCRKPGHRFSDCPLPRAAKAVRRDSQVTSIAHDTNRHLNVQPPPQRIIVKGTVKGRIVPPATVSSLQHQRQQGKQCQENNSSLQLQRGGTLLRQHPRQVLSAPGRPTVVSSSNAPGIAPIWRPIDKSPLGNPTGKKILPVTADKTVAPPPSKINKQSNVPGETSGSRN

SEQ ID NO: 19890 - protein, 567 aa, Oryza sativa
  unsure (1)..(567): unsure at all Xaa locations
  Clone ID: TF_OSC900396j.C1.p8.np
LKFSLVXNKVRSQNKGASTSRVNEAPDTSCVVVVQRLINQNKLLIELLQQHQTPILNPSQMQPQVQFKEAQELTPQVSAPPASQLAHDAMPHVDSKEARIICFICDEQGHYARKCPQRKRKAPMRTEDEVRKMTITGTEWPPPGMTKRQRGNFFHGAPQLTQHLLANGGRVSDSEDSDQVSSRDEDEKSLQRFKQNKMEHKACSHCGEIGHIASSCVTTCVYCEEDHPPGECPTSKITCFLCEGTDHLPKDCQFSFLLTKKMDNQRSNREKHQGNAIPHQDYSFSLTLVPGQRNQNVKSKSRVRQDISCFNCREMGHFTDKCPKPTNTAASTSVHTTPCNQKLAPQRMVIHASGSSPIARIAIAPTPMSALPQGVNAPFQPHPPIDKTKASIRIVPLDVPVQQPRNQVLDEEPMKKDITPEIVHDQKKDITPEIVHDQSVTHAIIPDIMHEEDRITISGSLEQMQYVKPSARQAGVDACHEGGNLYEVDSNDMNYEKFWNXSPIQLPQPSRSQKGATRDKSGEEKIPSATGDQAKQFRVGKFCWKFVIKTQRKKSENKRRSPNQSSC

SEQ ID NO: 19891 - protein, 620 aa, Oryza sativa
  Clone ID: TF_OSC401303j.C1.p3.fg
MADNEKGNKVRSQDIGTSSSRVNETPDTSCVAVVQHLINQNQLLIEILQQHRMPILNPSQMQPQVQLEAVQALTPQVSAPPTSQKAPHAMPHVDPKEASIICFMCDEQGHYARNCPQQKRKAPMRTEDEVRKMIITSTEWPPPGMTKHQRRNSFRGAQQLTEHLLANGGRVSDSEDSDQVSSDDEDEMERKACSRWGEVGHVASLCATTCFHCEEDHPPGECPMSRITCFFCEGTDHVPKDCQFSFLLTKKMANQPASSNGEKHQGNTNPRQDHRFSLTPVPGQRNRNEKRKCRVREDICCFNCQGMGHFADKCPKPRNIAAGTSVHATPCNQKLAPQRIVLHASRSSPIARVATAPIPMSALPQGVDAQFQPQPPADKTEASICVVPLEVPIQQLRNQVQDEEPELKEGITPKTVPNQGKIDLHITANLHEADIPTVLWSLEQTPYPFHRKAASQRTSSSPEASAIHIKEYHLIEIGRKMIDKKRLAKMFSSMKEVGRKVIDKQKHVLHRSRKTPDCNCPATVTLSLSKQDDLVDNLSEVDSEDMNHEKFWNGSITALPQPSLSQPKGAPWSKSGEEKIPSATGGQAKQFRVVKFCWKFVKTQRKKSDKKRRPPNLSSC

SEQ ID NO: 19892 - protein, 664 aa, Oryza sativa
  unsure (1)..(664): unsure at all Xaa locations
  Clone ID: TF_OSC900144j.C1.p12.np
MDEVVATMDISEANEGYASCGSVIEMSRQMKATRVGARAQSWPACPGIPAVGRVGSVLLFTARMGKGLCHVFYDGSIAMECRVKACLVGWPGLAWDELGPRSGCQFGPNHRRPWVKAVLGGQLCEEEDVVNCLPKLRKTVGSASEAREAVKPDVKQEKKCSSVKVLSLVSDLSLPFVFPLSLSKLQQMADNEKGNKVRSQEMGTSSSRVNEAPDTNCVAVVQHLINQNKLLIEILQQHRMPILNPSQMQPQAQLEAIQALTPQVSAPPTSQKAPHAMSHVDSKEASIIGFMCDEQGHYARNCPQQKRKAPMRTEDEVRKMIITSTEWPPPGMTKRQRRNSFRGAPXLTEHLLANGGRVSDSEDSDQVSSDDEDEKSPQGFNQNKMEHKACSHCGEIGHVASSCATTCFHCKEDHPPGECPMSRITCFLCEGTDHVPKDCQLSFLLTKKMANQHARSNGEKHQGNTNPRQDYSFSLTPVPGQRNQNEKRKYXVRKDICCFNCQEMCHFTDKCPKPRNIATSTSVHATPHNQKLAPQRIVIHASRSIPIARVATAPTPVIALPQGVNAQFQPQPPVDKTEASICVVPLDVPAQQPRNQVQDEEPERKKVIVYFNCREEGHYSRDCPLPRQNQPPHFRQFTGSRHTNRQVVTGANAVPVKPSASQKQ

SEQ ID NO: 19893 - protein, 1429 aa, Oryza sativa
  Clone ID: TF_OSC100841j.C1.p2.fg
MAGFADALRPDKFTGVHFKRWQIRVTLWLTAMKCFWVSTGKPEGVLTAEQQKQFEEATTLFVGCILSVLGDRLVEVYMHMTDAKELWDALNTKFGATDASNDLYIMEQFHDYKMADNRSVVEQAHEIQTMAKELELLKCVLPDKFVAGCIIAKLPPSWRSFGTALKHKRQEYSVEGLIASLDVEEKAREKDAASKGDGGQSSANVVHKAQNKSKGKYKAQQTTNFKKQKKNNNNPNQDERTCFVCGQVGHLARKCPQRKGMKAPAGQTSKSANVTIGNTGDGSWYGNLPTVFSVNQSTNWWVDTGANVHVCGDISLFSSYQVARGSTVLMGNGSHASVHGVGTVDLKFTSGKIVQLKNVQHVPSIDRNLVSGSRLTRDGFKLVFESNKVVVSKHGYFIGKGYEYGGLFRFSLSDFCNKSVNHICGSVDDEANVWHSRLCHINFGLMSRLSSMCLIPKFSIVKGSKCHSCVQSKQPRKPHKAAEERNLAPLELLHSDLCEMNGVLTKGGKRYFMTLIDDATRFCYVYLLKTKDEALDYFKIYKAEVENQLDRKIKRLRSDRGGEFFSNEFDLFCEEHGIIHERTPPYSPESNGIAERKNRTLTDLVNAMLDTAGLPKAWLGEALLTSNHVLNRVPNRNKDKTPYEIWIGRKPSLSYLRTWGCLAKVNVPITKKRKLGPKTVDCVFLGYAHHSIAYRFLIVKSEVPDMHVGTIMESRDATFFESFFPMKDTHSGSNQPSEIIPSSITPPEQTEHTHELVSEEDVSEAPRRSKRQRTAKSFGDDFIVYLVDDTPKSISEAYASPDADYWKEAVRSEMDSIIANGTWEVTERPYGCKPVGCKWVFKKKLRPDGTIEKYKARLVAKGYTQKEGEDFFDTYSPVARLTTIRVLLSLAASHGLLVHQMDVKTAFLNGELDEEIYMDQPDGFVVEGQEGKVCKLLKSLYGLKQAPKQWHEKFDKTLTSAGFAVNEADKCVYYRHGGGEGVILCLYVDDILIFGTNLEVINEVKSFLSQNFDMKDLGVADVILNIKLIRGENGITLLQSHYVEKILNRFGYIDSKPSPTPYDPSLLLRKNKRIARNQLEYSQIIGSLMYLASATRPDISFAVSKLSRFTSNPGDDHWRALERVMRYLKDSKIWRALERVMRYLKGTVELGLHYTGYPAVLEGYSDSNWISDVDEIKATSGYVFTLGGGAVSWRSCKQTILTRSTMEAELTALDTATVEAEWLRDHWRALERVMRYLKGTVELGLHYTGYLAVLEGYSDSNWISDVDEIKATSGYIFTLGGGAVSWRSCKQTILTRSTMEAELTTLDTATVEAEWLRDLLMDLPVVEKPVPAILMNCDNQTTCEKTIEVCQEIKKLRSYNVGLHPNSEKHGRSLHEGTITKCDRQCIEGDGFETHSILEGTHLCELDCWSQSMKILGESSRKLTKDLGV

SEQ ID NO: 19894 - protein, 1441 aa, Oryza sativa
  Clone ID: TF_OSC101706j.C1.p9.fg
MARGGAACRTTNPSRRLRRRQQPTGTRPTGSDRAAAASSVERSAAPEAPSSQSTEDEEPTGRARRPPSSSMEAGGEATEAGGVGGGPLAPTSSPPPPHRPSRSNDAFMLVFICNVMIYLWNRLNHYMSIISTIQQPYYRHCDFTMAGFADALRPDKFTGVHFKRWQIRVTLWLTAMKCFWVSTGKPEGVLTAEQQKQFEEATTLFVGCILSVLGDRLVEVYMHMTDAKELWDALNTKFSATDASNDLYIMEQFHDYKIADNRSVVEQAHEIQTMAKELELLKCVLPDKFVAGCIIAKLPPSWRSFGTALKHKRQEYSVEGLIASLDVEEKAREKDVASKGDGGQSSANVVHKAQNKSKGKYKAQQTTNFKKQKKNNNNPNQDERTCFVCGQVGHLARKCPQRKGMKAPAGQTSKSANVTIGNTGDGSGYGNLPTVFSVNQSTNWWVDTGANVHVCADISLFSSYQVARGSTVLMENGSHAYVHGVGTVDLKFTSGKIVQLKNVQHVPSIDRNLVSGSRLTRDGFKLVFESNKVVVSKHGYFIGKGYECGGLFRFSLSDFCNKSVYHICGSVDDEANVWHSRLCHINFGLMSRLSSMCLIPKFSIVKGSKCHSCVQSKQPRKPHKAAEERNLAPLELLHSDLCEMNGVLTKGGKRYFMTLIDDATRFCYVYLLKTKDEALDYFKIYKAEVENQLDRKIKRLRSDRGGEFFSNEFDLFCEEHGIIHERTPPYSPESNGIAERKNRTLTDLVNAMLDTAGLPKAWWGEALLTSNHVLNRVPNRNKDKTPYEIWIGRKPSLSYLRTWGCLAKVNVPITKKRKLGPKTVDCVFLGYAHHSIAYRFLIVKSEVPDMHVGTIMESRDATFFESFFPIKDTHSGSNQPSEIIPSSITPPEQTEHTHELVSEEDVSEAPRRSKRQRTAKSFGDDFTVYLVDDTPKSISEAYASPDADYWKEAVRSEMDSIIANGTWEVTERPYGCKPVGCKWVFKKKLRPDGIIEKYKARLVAKGYTQKEGEDFFDTYSPVARLTTIRVLLSLAASHGLLVHQMDVKTTFLNGELDEEIYMDQPDGFVVEGQEGKVCKLLKSLYGLKQAPKQWHEKFDKTLTSAGFAVNETDKCVYYRHGGGEGVILCLYVDDILIFGTNLEVINEVKSFLSQNFDMKDLGVADVILNIKLIRGENGITLLRSHYVEKILNRFGYIDSKPSPTPYDPSLLLRKNKRIARNQLEYSQIIGSLMYLASATRPDISFAVSKLSRFTSNPGDDHWRALERVMRYLKGTVELGLHYTGYPAVLEGYSDSNWISDVDEIKATSGYVFTLGGGAVSWRSCKQTILTRSTMEAELTALDTATVEAEWLRDLLMDLPVVEKPVPAILMNCDNQTTCEKTIEVCQEIKKLRSYNVGLHPNSEKPGRSLHEGTITKCDKQCIEGDGFETHVNYTMVVTQSM

SEQ ID NO: 19895 - protein, 1216 aa, Oryza sativa
  Clone ID: TF_OSC101997j.C1.p18.fg
MAGFVDALRPDKFTGVHFKRWQIRVTLWLTAMKCFWVSTGKPEGVLTAEQQKQFEEATTLFVGCILSVLGDRLVEVYMHMTDAKELWDALNTKFGATDASNDLYIMEQFHDYKMADNRSVVEQAHEIQTMAKELELLKCVLPDNFVAGCIIAKLPPSWRSFGTALKHKRQEYSVEGLIASLNVEEKAREKDAASKGDGGQSSANVVHKAQNKSKGKYKAQQTTNFKKQKKNNNNPNQDERTCFVCGQVGHLARKCPQRKGMKAPAGQTSKSANVTIGNTGDGSGYGNLPTVFSVNQSTNWWVDTRANVHVCADISLFSSYQVARGSTVLMGNGSHASVHGVGTVDLKFTSGKIVQLKNVQHVPSIDRNLVSGSRLTRDGFKLVFESNKVVVSKHGYFIGKGYECGGLFRFSLSDFCNKSVNHICGSVDDEANVWHSRLCHINFGLMSRLSSMCLIPKFSIVKGSKCHSCVQSKQPRKPHKAAEERNLAPLELLHSDLCEMNGVLTKGGKRYFMTFIDDATRFCYVYLLKTKDEALDYFKIYKAEVENQLDRKIKRLRSDHGGEFFSNEFDLFCEEHGIIHEMTPPYSPESNGIAERKNRTLTDLVNAMLDTAGLPKAWWGEALLTSNHVLNRVPNRNKDKTPYEIWIGRKPSLSYLRTWGCLAKVNVPITKKRKLGPKTVDCVFLGYAHHSIAYRFLVVKSEVSDMHVGTIMESRDAIFFESFFPMKDTHSGSNQPSEIIPSSITPPEQTEHTHELVSEEDVSEAPRRSKRQRTAKSFGDDFTVYLVDDTPKSISEAYASPDADYWKEAVRSEMDSIIANGTWEVTERPYGCKPVGCKWVFKKKLRPDASHGLLVHQMDVKTAFLNGELDEEIYMDQPDGFVVEGQEGKVINEVKSFLSQNFDMKDLGVADVILNIKLIRGENGITLLQSHYVEKILNRFGYIDSKPSPTPYDPSLLLRKNKRIARNQLEYSQIIGSLMYLASATRPDISFAVSKLSRFTSNPGDDHWRALERVMRYLKGTVELGLHYTGYPVVLEGYSDSNWISDVDEIKATSGYVFTLGGGAVSWRSCKQTILTRSTMEAELTALDTATVEAEWLRDLLMDLPVVEKPVPAILMNCDNQTTCEKTIEVCQEIKKLRSYNVGLHPNSEKPGRSLHEGTITKCDRQCIEGDGFETHMSYTMVSILERTHLCELDCWSQSMKILGESSRKLTKDLGV

SEQ ID NO: 19896 - protein, 1247 aa, Oryza sativa
  Clone ID: TF_OSC102144j.C1.p1.fg
MAGFADALRPDKFTGVHFKRWQIRVTLWLTAMKCFWVSTGKPEGVLTAEQQKQFEEATTLFVGCILSILGDRLVEVYMHMTDAKELWDALNTKFGATDASNDLYIMEQFHDYKMADNRSVVEQAHEIQTMAKELELLKCVLPDKFVAGCIIAKLPPSWRSFGTALKHKRQEYSVEGLIASLDVEEKAREKDAASKGDGGQSSANVVHKAQNKSKGKYKAQQTTNFKKQKKNNNNPNQDERTCFVCGQVGHLARKCPQRKGMKAPAGQTSKSANVTIGNTGDGSGYGNLPTVFSVNQSTNWWVDTGANVHVCADISLFSSYQVARGSTVLMGNGSHASVHGVGTVDLKFTSGKIVQLKNVQHVPSIDRNLVSGSRLTRDGFKLVFESNKVVVSKHGYFIGKGYECGGLFRFSLSDFCNKSVNHICGSVDDEANVWHSRLCHINFGLMSLLSSMCLIPKFSIVKGSKCHSCVQSKQPRKPHKAAEERNLAPLELLHSDLCEMNGVLTKGGKRYFMTLIDDATRFCYVYLLKTKDEALDYFKIYKAEVENQLDRKIKRLRSDRGGEFFSNEFDLFCEEHGIIHERTPPYSPESNGIAERKNRTLTDLVNAMLDTAGLPKACIAYRFLIVKSEVPDMHVGTIMESRDATFFESFFPMKDTHSGLNQPSEIIPSSITPPEQTEHTHELVSEEDVSEAPRRSKRQRTAKSFGDDFTVYLVDDTPKSISEAYASPDADYWKEAVRSEMDSIIANGTWEVTERPYGCKPVGCKWVFKKKLRPDGTIEKYKARLVAKGYTQKEGEDFFDTYSPVARLTTIRVLLSLAASHGLLIHQMDVKTAFLNGELDEEIYMDQPDGFVLEGQEGKVCKLLKSLYGLKQAPKQWHEKFDKTLTSAGFAVNEADKCVYYRHGGGEGVILCLYVDDILIFGTNLEVINEVKSFLFQNFDMKDLGVADVILNIKLIRGENGITLLQSHYVEKILNRFGYIDSKPSPTPYDPSLLLRKNKRIARNQLEYSQIIGSLMYLASATRPDISFAVSKLSRFTSNPGDDHWRALERVMRYLKGTVELGLHYTRYPAVLEGYSDSNWISDVDEIKATSGYVFTLGGGAVSWRSCKQTILTRSTMEAELTALDTATVEAEWLRDLLMDLPVVEKPVPAILMNCDNQTTCEKTIEVCQEIKKLRSYNVGLHPNSEKPGRSLHEGTITKCDTQCIEGDGFETHSILEGTHLCELDCWSQSMKILGESSRKLTKDLGV

SEQ ID NO: 19897 - protein, 411 aa, Oryza sativa
  Clone ID: TF_OSC10364j.C1.p1.gm
SAGERERGGSGRGCEGDVDGVAREARTRGAAAVAGAAASGWSVHRRSGEQVSGTSAFDVLHQEKAAIRHCDFTMAGFADALRPDKFTGVHFKRWQIRVTLWLTAMKCFWVSTGKPEGVLTAEQQKQFEEATTLFVGCILSVLGDRLVEVYMHMTDAKELWDALNTKFGATDASNDLYIMEQFHDYKMADNRSVVEQAHEIQTMAKELELLKCVLPDKFMAGCIIAKLPPSWRSFGTALKHKRQEYSVEGLIASLDVEEKAREKDAASKGDGGQSSANVVHKAQNKSKGKYKAQQTTNFKKQKKNNNNPNQDERTCFVCGQVGHLARKCPQRKGMKAPAGQTSKSANVTIGNTGDGSGYGNLPTVARGSTVLMGNGSHASVHVVGTVDLKFTSGKIVQLKNVQHVPSIDRNL

SEQ ID NO: 19898 - protein, 324 aa, Oryza sativa
  Clone ID: TF_OSC12941j.C1.p2.hg
MHMTDAKELWDALNTKFGATDASNDLYIMEQFHDYKMADNRSVVEQAHEIQTMAKELELLKCVLPDKFVAGCIIAKLPPSWRSFGTALKHKRQEYSVEGLIASLDVEEKAWEKDAASKGDGGQSSANVVHKAQNKSKGKYKAQQTTNFKKQKKNNNNPNQDERTCFVCGQVGHLARKCPQRKGMKAPAGQTSKSANVARGSTVLMGNGSHASVHGVGTVDLKFTSGKIVQLKNVQHVPSIDRNLVSGSRLTRDGFNLITPPEQTEHTHELVSEEDVSEAPRRSKRQRTAKSFGDDFTVYLVDDTPKSISEAYASPDADYWKEAV

SEQ ID NO: 19899 - protein, 678 aa, Oryza sativa
  Clone ID: TF_OSC14597j.C1.p3.fg
MAGFADALRPDKFTGVHFKRWQIRVTLWLTAMKCFWVSTGKPEGVLTAEQQKQFEEATTLFVGCILSVLGDRLVEVYMHMTDAKELWDALNTKFGATDASNDLYIMEQFHDYKMADNRSVVEQAHEIQTMAKELELLKCVLPDKFVAGCIIAKLPPSWRSFGTALKHKRQEYSVEGLIASLDVEEKAREKDAASKGDGGQSSANIVHKAQNKSKGKYKAQQTTNFKKQKKNNNNPNQDERTCFVCGQVGHLARKCPQRKGMKAPAGQTSKSANVTIGNTGDGSGYGNLPTVFSVNQSTNWWVDTGANVHVCADISLFSSYQVARGSTVLMGNGSHASVHGVGTVDLKFTSGKIVQLKNVQHVPSINRNLVSGSRLTRDGFKLVFESNKVVVSKHGYFIGKGYECGGLFRFSLSDFCNKSVNHICGSVDDEANVWHSRLCHINFGLMSRLSSMCLIPKFSIVKGSKCHSCVQSKQPRKPHKAAEERNLAPLELLHSDLCEMNGVLTKGGKRYFMTLIDDATRFCYVYLLKTKDEALDYFKIYKAEVENQLDRKIKRLRSDRGGEFFSNEFDLFCEEHGIIHERTPPYSPESNGIAERKNRTLTDLVNAMLDTAGLPKAWWGEALLTSNHVLNRVPNRNKDKTPYEIWIGRKPSLSYLRTWGCLAKVNVPITKKRKLGPM

SEQ ID NO: 19900 - protein, 1281 aa, Oryza sativa
  Clone ID: TF_OSC15392j.C1.p2.fg
MAGFAGALRPDKFTGVHFKRWQIRVTLWLTAMKCFWVSTGKPEGVLTAEQQKQFEEATTLFVGCILSVLGDRLVEVYMHMTDAKELWDALNTKFGATDASNDLYIMEQFHDYKMADNRSVVEQAHEIQTMAKELELLKCVLPDKFVAGCIIAKLPPSWRSFGTALKHKRQEYSVEGLIASLDVEEKAREKDAASKGDGGQSSANVVHKAQNKSKGKYKAQQTTNFKKQKKNNNNPNQDERTCFVCGQVGHLARKCPQRKGMKAPAGQTSKSANVTIGNTGDGSGYGNLPTVFSVNQSTNWWVDTGANVHVCADISLFSSYQVARGSTVLMGNGSHASVHGVGTVDLKFTSGKIVQLKNVQHVPSIDKNLVSGSRLTRDGFKLVFESNKVVVSKHGYFIGKGYECGGLFRFSFSDFCNKSVNHICGSVDDEANVWHSRLCHINFGLMSRLSSMCLIPKFSIVKGSKCHSCVQSKQPRKPHKAAEERNLAPLELLHSDLCEMNGVLTKGGKRYFMTLIDDATRFCYVYLLKTKDEALDYFKIYKAEVENQLDRKIKRLRSDRGGEFFSNEFDLFCEEHGIIHERTPPYSPESNGIAERKNRTLTDLVNAMLDTAGLPKAWWGEALLTSNHVLNRVPNRNKDKTPYEIWIGRKPSLSYLRTWGCLAKVNVPITKKRKLGPKTVDCVFLGYAHHSIAYRFLIVKSEVPDMHVGTIMESRDATFFESFFPMKDTHSGSNQPSEIIPSSITPPEQTEHTHELVSEEDVSEAPRRSKRQRTAKSFGDDFTVYLVDDTPKSISEAYASPDADYWKEAVRSEMDSIIANGTWEVTEQPYGCKPVGCKWVFKKKLRPDGTIEKYKARLVAKGYTQKEGEDFFDTYSPVARLTTIRVLLSLAASHGLLVHQMDVKTAFLNGELDEEIYMDQPDGFAVNEADKCMYYRHGGGEGVILCLYVDDILIFGTNLEVINEVKSFLSQNFDMKDLGVADVILNIKLIRGENGITLLQSHYVEKILNRFGYIDSKPSPTPYDPSLLLRKNKRIARNQLEYSQIIGSLMYLASATRPDISFAVSKLSRFTSNPGDDHWRALERVMRYLKGTVELGLHYTGYPVVLEGYSDSNWISDVDEIKATSGYVFTLVGGAVSWRSCKQTILTRSTMEAELTALDTATVEAEWLRDLLMDLPVVEKPVPAILMNCDNQTTCEKTIEVYQEIKKLRSYNVGLHPNSEKPGRSLHEGTITKCDRQCIEGDGFETHSILEGTHLCELDCWSQSMKILGESSRKLTKDLGV

SEQ ID NO: 19901 - protein, 1258 aa, Oryza sativa
  Clone ID: TF_OSC16532j.C1.p1.fg
MAGFADALRPDKFTGVHFKRWQIRVTLWLTAMKCFWVSTGKPEGVLTAEQQKQFEEATTLFVGCILSILGDRLVEVYMHMTDAKELWDALNTKFGATDASNDLYIMEQFHDYKMADNRFVVEQAHEIQTMAKELELLKCVLPDKFVAGCIIAKLPPSWRSFGTALKHKRQEYSVEGLIASLDVEEKAREKDAASKGDGGQSSANVVHKAQNKSKGKYKAQQTTNFKKQKKNNNNPNQDERTCFVCGQVGHLARKCPQRKGMKAPAGQTSKSANVTIGNTGDGSGYGNLPTVFSVNQSTNWWVDTGANVHFCADISLFSSYQVARGSTVLMGNGSHASVHGVGTVDLKFTSGKIVQLKNVQHVPSIDRNLVSGSRLTRNGFKLVFESNKVVVSKHGYFIGKGYECGGLFRFSLSDFCNKSVNHICGSVDDEANVWHSRLCHINFGLMSRLSSMCLIPKFSIVKGSKCHSCVQSKQPRKPHKAAEERNLAPLELLHSDLCEMNGVLTKGGKRYFMTLIDDATRFCYVYLLKTKDEALDYFKIYKAEVENQLDRKIKRLRSDRGGEFFSNEFDLFCEEHGIIHERTPPYSPESNRIAERKNRTLTDLVNAMLDTAGLPKAWWGEALLTSNHVLNRVPNRNKDKTPYEIWIGRKPSLSYLRTWGCLAKVNVPITKKRKLGPKTVDCVFLGYAYHSIAYRFLLVKSEVPDMHVGTIMESRDATFFESFFPMKDTHSGSNQPSEIIPSSITPPEQTEHTHELVSEEDVSEAPRRSKRQRTAKSFGDDFTVYLVDDTPKSISEAYASPDADYWKEAVRSEMDSIIANGTWEVIERPYGCKPVGYKWVFKKKLRPDGTIEKYKARLVAKGYTQKEGEDFFDTYSPVARLTTIRVLLSLAPHMVFSFIKWTLRQLFLMESWMRRSIWINLMGFAVNEADKCVYYRHGGGEGVILCLYVDDILIFGTNLEVINEVKSFLSQNFDMKDLGVADIILNIKLIRGENGITLLQSHYVEKILNRFGYIDSKPSPTPYDPSLLLRKNKRIARNQLEYSQIIGSLMYLASATRPDISFAVSKLSRFTSNPGDDHWRALERVMRYLKGTVELGLHYTGYPAVLEGYSDSNWISDVDEIKATSGYVFTLGGGAVSWRSCKQTILTRSTMEAELTALDTATVEAEWLRDLLMDLPVVEKPVPAILMNCDNQTTCEKTIEVCQEIKKLRSYNVGLHPNSEKPGRSLHEGTITKCDRQCIEGDGLETHVSYTMVVTQSM

SEQ ID NO: 19902 - protein, 1302 aa, Oryza sativa
  Clone ID: TF_OSC21378j.C1.p19.np
MASFADALRPDKFTGVHFKRWQIRVTLWLTAMKCFWVSTGKPEGVLTAEQQKQFEEATTLFVGCILSVLGNRLVEVYMHMTDAKELWDALNTKFGATDGSNDLYIMEQFHDYKMADNRSVVEQAHEIQTMAKELELLKCVLPDKFVAGCIIAKLPPSWRSFGTALKHKRQEYSVEGLIASLDVEEKAREKDAASKGDGGQSSANVVHKAQNKSKGKYKAQQTTNFKKQKKNNNNPNQDERTCFVCGQVGHLARKCPQRKGMKAPAGQTSKSANVTIGNTGDGSGYGNLPTVFSVNQSTNWWVDTGANVHVCADISLFSSYQVARGSTVLMGNGSHASVHGVGTVDLKFTSGKIVQLKNVQHVPSIDRNLVSGSRLTRDGFKLVFESNKVVVSKHGYFIGKGYECGGLFRFSLSDFCNKSVNHICGSVDDEANVWHSRLCHINFGLMSRLSSMCLIPKFSIVKGSKCHSCVQSKQPRKPHKAAEERNLAPLELLHSDLCEMNGVLTKGGKRYFMTFIDDATRFCYVYLLKTKDEALDYFKIYKAEVENQLDRKIKRLRSDRGGEFFSNEFDLFCEEHGIIYEMTPPYSPESNGIAERKNRTLTDLVNAMLDTAGLPKAWWGEALLTSNHVLNRVPNRNKDKTPYEIWIGRKPSLSYLRTWGCLAKVNVPITKKRKLGPKTVDCVFLGYAHHSIAYRFLIVKSEVPDMHVGTIMESRDAIFFESFFPMKDTHSGSNQPFEIIPSSITPPEQTEHTHELVSEEDVSEAPRRSKRQRTAKSFGDDFTVYLVDDTPKSISEAYASPDADYWKEAVRSEMDSIIANGTWEVIERPYGCKPVGCKWVFKKKLRPDGTIEKYKARLVAKGYTQKEGEDFFDTYSPVARLTTIRVLLSLAASHGLLVHQMDVKTAFLNGELDEEIYMDQPDGFVVEGQERKVCKLLKSLYGLKQAPKQWHEKFDKTLTSAGFAVNEADKCVYYRHGGGEGVILCLYVDDILIFGTNLEVINEVKSFLSQNFDMKDLGVADVILNIKLIRGENGITLLQSHYVEKILNRFGYIDSKPSPTPYDPSLLLRKNKRIARNQLEYSQIIGSLMYLASATRPDISFAVSKLSRFTSNPGDDHWRALERVMRYLKGTVELGLHYTGYPAVLEGYSDSNWISDVDEIKATSGYVFTLGGGAVSWRSCKQTILTRSTMEAELTALDTATVEAEWLRDLLMDLPVVEKPVPAILMNCDNQTVIVKVNSSKDNMKSSRHVKRRLKSVRKLRNSGVITLDYIQTARNLADPFTKGLSRNVIDNASKEMGLRPI

SEQ ID NO: 19903 - protein, 1083 aa, Oryza sativa
  Clone ID: TF_OSC22414j.C1.p2.fg
MAERLRRIRGGGAMLVLILLAVVASAQQEYEVTSSSSSSPSRRGAGEGHRPPPWAQQEYDVTSAATTDYSIPLAGVHQRSGEQVSGTSAFDVLHREKAAIRLNRYMSIISTIQKPYYRHCDFTMAGFADALRPDKFTGVHFKRWQIRVTLWLTTMKCFWVSTGKSEGVLTAEQQKQFEEATTLFVGCILSVLGDRLVEVYMHMTDAKELWDALNTKFGATDASNDLYIMKQFHDYKMADNRSVVEQAHEIQTMAKELELLKCVLPDKFVAGCIIVKLPPSWRSFGTALKHKRQEYSVEGLIASLDVEEKAREKDAASKGDGGQSSANVVHKAQNKSKGKYKAQQTTNFKKQKKNNNNPNQDERTCFVCGQVGHLARKCPQRKGMKAPAGQTSKSANVTIGNTGDGSGYGNLPTVFSVNQSTNWWVDTGANVARGSTVLMGNGSHASVHGVGTVDLKFTSGKIVQLKNVQHVPSIDRNLVSGSRLTRDGFKLVFESNKVVVSKHGYFIGKGFECGGLFRFSLSDFCNKSVNHICGSVDDEVNVWHSRLCHINFGLMSRLSSMCLIPKFSIVKGSKCHSCVQSKQPRKPHKAAEERNLAPLELLHSDLCEMNGVLTKGGKRYFMTLIDDATRFCYVYLLKTKDEALDYFKIYKAEVENQLDRKIKRLRSDRGGEFFSNEFDLFCEEHGIIHERTPPYSPESNGIAERKNRTLTDLVNAMLDTAGLPKAWWGEALLTSNHVLNRVPNRNKDKTPYEIWIGRKPSLSYLRTWGCLAKVNVPITKKRKLGPKTVDCVFLGYAHHSIAYRFLIVKSEVPDMHVGTIMESRDATFFESFFPMKDTHSGSNQPSEIIPSSITPPEQTEHTHELVSEEDVSEAPRRSKRQRTAKSFGDDFTVYLVDDTPKSISEAYASPDADYWKEAVRSEMDSIIANGTWEVTERPYGCKPVGCKWVFKKKLRPDGTIEKYKARLVAKGYTQKEGEDFFDTYSPVARLTTIRVLLSLAASHGLLVHQMDVKTAFLNGELDEEIYMDQPDGFVVEGPCDAYCHAQKFPNRIPSRMCIKIPVQDQPGYTNDNVDIQIHVLQTS

SEQ ID NO: 19904 - protein, 1295 aa, Oryza sativa
  Clone ID: TF_OSC23264j.C1.p7.gm
MSTAAASETSSASAWWAALDSVPCAERRIGQRRHGQQPPPSTRVSCCWAEAAAVAEQAGLRWSSAHEAGSGSGSARGGGERERQAATGNKQIHDERVSDKADTRLTTRMTRWRRAAGNWQLPNSTVYALAKLAPLVASLFLSFSSCTINQSIDGSAHRSNYSIPLAGVHQRSGEQVSGTSAFNVLHREKAAIRHCDFTMAGFADALRPDKFTGVHFKRWQIRVTLWLTAMKCFWVSTGKPEGVLTAEQQKQFEEATTLFVGCILSVLGDRLVEVYMHMTDAKELWDALNTKFGATDASNDLYIIEQFHDYKMADNRSVIEQAHEIQTMAKELELRKCVLPDKFVAGCIIAKLPSSWRSFGTALKHKRQEYSVEGLIASLDVEEKAREKDAASKGDGGQSSANVVHKAQNKSKGKYKAQQTTNFKKQKKNNNNPNQDERTCFVCGQVGHLARKCPQRKGMKAPAGQTSKSANVTIGNTGDGSGYGNLPTVARGSTVLMGNGSQASVHGVGTVDLKFTSGKIVQLKNVQHVPSIDRNLVSGSRLTRDGFKLVFESNKVVVSKHGYFIGKGYECGGLFRFSLSDFCNKSVNHICGSVDDEANVWHSHYWKEAVRSEMDSIIANGTWEVTERPYGCKPVGCKWVFKKKLRPDGFAVNEADKCVYYRHGGGEGVILCLYVDDILIFGTNLEVINESHYVEKILNRFGYIDSKPSPTPYDPSLLLRKNKRIARNQLEYSQIIGSLMYLASATRPDISFAVSKLSRFTSNPGDDHWRALERVMRYLKGTVELGLHYTGYPAVLEGYSDSNWISDVDEIKATSGYVFTLGGGAVSWRSCKQTILTRSTMEAELTALDTATVEAEWLRDLLMDLPVVEKPVPAILMNCDNQTEIKKLRSYNVGLHPNSEKPGRSLHEGTITKCDKQCIEGDGFETHVSGTSAFDVLHREKAAIRYSSNTPALACPALRSGGGGDHGGETQQRGAPAAALLSLGGAATCTRFGSAGEPADCGTAAAGLRPTRLLFTPAMARLSCVQAAVTTCRLPLTNPWDTQQTKLWELSKTPSTVIGKASATYTWRARMRDADLCEDTHWQYHKVESSDTIDNVKAKIQDKEGIPPDQQRLIFAGKQLEDGRTLADYNIQKESTLHLVLRLRGGMQIFVKTLTRKTHHFGASLSLLASSLRMDKEGIPPDQQRLIFAGKQLKDGRTLADYNIQKESTLHLVLRLRGGMQIFVKTLTGKTITLEVESSDTIDNVKAKIQDKEGIPPDQQRLIFAGKQLEDGRTLAGYNIQKESTLHLALRLRGG

SEQ ID NO: 19905 - protein, 1459 aa, Oryza sativa
  Clone ID: TF_OSC26101j.C1.p4.fg
MDGRGRGRREVDLAAATGGEELGVSSGSGVSKAGPQAMRNRQRELREDGSRCGRPRMEERWEPESASSSSSATPPASMLDLTLLAALELRLIFLSRSGQSSTKPTRPSWPSSRHSSMRRWCSSIGELEPAARCRAEEDAEHVLRQVRPAAGCVRCSVFMCAPPWGKPPRSNDAFMLVFICNVMIYLWNKLNPYMPIISTIQKPYYRHCDFTMAGFADALRPDKFTGVHFKRWQIRVTLWLTAMKCFWVSTGKPEGVLTAEQQKQFEEATTLFVGCILSVLGDRLVEVYMHMTDAKELWDALNTKFGATDASNDLYIMEQFHDYKMADNRSVVEQAHEIQTMAKELELLKCVLPNKFVAGCIIAKLPPSWRSFGTALKHKRQEYSVEGLIASLDVEEKAREKDAASKGDGGQSSANVVHKAQNKSKGKYKAQQTTNFKKQKKNNNNPNQDERTCFVCGQVGHLARKCPQRKGMKAPAGQTSKSANVTIGNTGDGSGYGNLPTVFSVNQSTNWWVDTGANVARGSTVLMGNGSHASVHGVGTVDLKFTSGKIVQLKNVQHVPSIDRNLVSGSRLTRDGFKLVFESNKVVVSKHGYFIGKGYECGGLFRFSLSDFCNKSVNHICGSVDDEANVWHSRLCHINFGLMSRLSSMCLIPKFSIVKGSKCHSCVQSKQPRKPHKAAEERNLAPLELLHSDLCEMNGVLTKGGKRYFMTLIDDATRFCYVYLLKTKDEALDYFKIYKAEVENQLDRKIKRLRSDRGGEFFSNEFDLFCEEHGIIHERTPPYSPESNGIAERKNRTLTDLVNAMLDTAGLPKAWWGEALLTSNHVLNRVPNRNKDKTPYEIWIGRKPSLSYLRTWGCLAKVNVPITKKRKLGPKTVDCVFLGYAHHSIAYRFLIVKSEDVSEAPRRSKRQRTAKSFGDDFTVYLVDDTPKSISEAYASPDADYWKEAVRSEMDSIIANGTWEVTERPYGCKPVGCKWVFKKKLRPDGTIEKYKARLVAKGYTQKEDEDFFDTYSPVARLTTIRVLLSLAASHGLLVHQMDVKTVFLNGELDEEIYMDQPDGFVVEGQEGKVCKLLKSLYGLKQAPKQWHEKFDKTLTSAGFAVNEADKCVYYRHGGGEGVILCLYVDDILIFGTNLEVINEVKSFLSQNFDMKDLGVADVILNIKLIRGENGITLLQSHYVEKILNRFGYIDSKPSPTPYDPSLLLRKNKRIARNQLEYSQIIGSLMYLASATRPDISFAVSKLSRFTSNPGDDHWRALERVMRYLKGTVELGLHYTGYPAVLEGYSDSNWISDVDEIKATSGYVFTLGGGAVSWRSCKQTILTRSTMEAELTALDTATVEAEWLRDLLMDLPVVEKPVPAILMNCDNQTTCEKTIEVCQEIKKLRSYNVGLHPNSEKPGRSLHEGTITKCDRQCIEGDGFETHSILEGTHLCELDCWSQSMKILGESSRKLTKDLGV

SEQ ID NO: 19906 - protein, 884 aa, Oryza sativa
  Clone ID: TF_OSC28278j.C1.p3.gm
MPVRCNGRRVAAEVLGAVVGLLNELDAGQRQELHQLKANDYSIPLAGVHQRSGEQVSGTSVFDVLHREKAAIRHCDFTMAGFADALRPDKFTGVHFKRWQIRVTLWLTAMKCFWVSTGKPEGVLTAEQQKQFEEATTLFVGCILSVLGDRLVEVYMHMTDAKELWDALNSKFGATDASNDLYIMEQFHDYKMADNRSVVEQAHEIQAMAKELELLKCVLPDKFVAGCIIAKLPPSWRSFGTALKHKRQEYSVEGLIASLDVEEKAREKDAASKGDGGQSSANVVHKAQNKSKGKYKAQQTTNFKKQKKNNNNPNQDERTCFVCGQVGHLARKCPQRKGMKAPAGQTSKSANVTIGNTGDGSGYGNLPTVARGSTVLMGNGSHASVHGVGTVDLKFTSEKIVQLKNVQHVPSIDRNLVSGSQSRDAIFFESFFPMKDTHSGSNQPSEIIPSSITPPEQTEHTHELVSEEDVSEAPRRSKRQRTAKSFGDDFTVYLVDDTPKSISEAYASPDADYWKEAVRSEMDSIIANGTWEVTERPYGCKPVGCKWVFKKKLRPDASHGLLVHQMDVKTAFLNGELDEEIYMDQPDGFVVEGFAVNEADKCVYYRHGGGEGVILCLYVDDILIFGTNLEVINESHYVEKILNRFGYIDSKPSPTPYDPSLLLRKNKRIARNQLEYSQIIGSLMYLASATRPDISFAVSKLSRFTSNPGDDHWRALERVMRYLKGTVELGLHYTGYPAVLEGYSDSNWISDVDEIKATSGYVFTLGGGAVSWRSCKQTILTRSTMEAELTALDTATVEAEWLRDLLMDLPVVEKPVPAILMNCDNQTAAAAVPKVLIADDCYLSMPSPISSATSSATESPRPPHRLGPGSSSRRTLSAPPPAIR

SEQ ID NO: 19907 - protein, 1308 aa, Oryza sativa
  Clone ID: TF_OSC28278j.C1.p3.np
MAGFADALRPDKFTGVHFKRWQIRVTLWLTAMKCFWVSTGKPEGVLTAEQQKQFEEATTLFVGCILSVLGDRLVEVYMHMTDAKELWDALNSKFGATDASNDLYIMEQFHDYKMADNRSVVEQAHEIQAMAKELELLKCVLPDKFVAGCIIAKLPPSWRSFGTALKHKRQEYSVEGLIASLDVEEKAREKDAASKGDGGQSSANVVHKAQNKSKGKYKAQQTTNFKKQKKNNNNPNQDERTCFVCGQVGHLARKCPQRKGMKAPAGQTSKSANVTIGNTGDGSGYGNLPTVFSVNQSTNWWVDTGANVHVCADISLFSSYQVARGSTVLMGNGSHASVHGVGTVDLKFTSEKIVQLKNVQHVPSIDRNLVSGSRLTRDGFKLVFESNKVVVSKHGYFIGKGYECVGLFRFSLSDFCNKSVNHICGSVDDEANVWHSRLCHINFGLMSRLSSMCLIPKFSIVKGSKCHSCVQSKQPRKPHKAAEERNLAPLELLHSDLCEMNGVLTKGGKRYFMTFIDDATRFCYVYLLKTKDEALDYFKIYKAEVENQLDRKIKRLRSDRGGEFFSNEFDLFCEEHGIIHEMTPPYSPESNGIAERKNRTLTDLVNAMLDTAGLPKAWWGEALLTSNHVLNRVPNRNKDKTPYEIWIGRKPSLSYLRTWGCLAKVNVPITKKRKLGPKTVDCVFLGYAHHSIAYRFLIVKSEVPDMHVGTIIESRDAIFFESFFPMKDTHSGSNQPSEIIPSSITPPEQTEHTHELVSEEDVSEAPRRSKRQRTAKSFGDDFTVYLVDDTPKSISEAYASPDADYWKEAVRSEMDSIIANGTWEVTERPYGCKPVGCKWVFKKKLRPDGTIEKYKARLVAKGYTQKEGEDFFDTYSPVARLTTIRVLLSLAASHGLLVHQMDVKTAFLNGELDEEIYMDQPDGFVVEGQEGKVCKLLKSLYGLKQAPKQWHEKFDKTLTSAGFAVNEADKCVYYRHGGGEGVILCLYVDDILIFGTNLEVINEVKSFLSQNFDMKDLGVADVILNIKLIRGENGITLLQSHYVEKILNRFGYIDSKPSPTPYDPSLLLRKNKRIARNQLEYSQIIGSLMYLASATRPDISFAVSKLSRFTSNPGDDHWRALERVMRYLKGTVELGLHYTGYPAVLEGYSDSNWISDVDEIKATSGYVFTLGGGAVSWRSCKQTILTRSTMEAELTALDTATVEAEWLRDLLMDLPVVEKPTCEKTIEVCQKIKKLWSYNVGLHPNSEKPGRSLHEGTITKCDRQCIEGDGFETHSILERTHLCELDCWSQSMKILGESSRKLTKDLGV

SEQ ID NO: 19908 - protein, 1366 aa, Oryza sativa
  Clone ID: TF_OSC2875j.C1.p7.fg
MQPPFVTDPPSSRNICENQSRVCLLLCTAPSLVDYSIPLASVHQRSGEQVSGTSAFDVLHREKAAIRHCDFTMAGFADALRPDKFTGVHFKRWQIRVTLWLTAMKCFWVSTGKPEGVLTAEQQKQFEEATTLFVGCILSVLGDRLVEVYMHMTDAKELWDALNTKFGATDASNDLYIMEQFHDYKMADNRSVVEQAHEIQTMAKELELLKCVLPDKFVAGCIIAKLPPSWRKLGKKDAASKGDGGQSSANVVHKAQNKSKGKYKAQQTTNFKKQKKNNNNPNQDERTCFVCGQVGHLARKCPQRKGMKAPAGQTSKSANVTIGNTGDGSGYGNLPTVFSVNQSTNWWVDTGANLHVCADISLFSSYQVARGSTVLMGNGSHASVHGVGTVDLKFTSGKIVQLKNVQHVPSIDRNLVSGSRLTRDGFKLVFESNKVVVSKHGYFIGKGYECGGLFRFSLSDFCNKSVNHICGSVDDEANVWHSRLCHINFGLMSRLSSMCLIPKFSIVKGSKCHSCVQSKQPRKPHKAAEERNLAPLELLHSDLCEMNGVLTKGGKRYFMTLIDDATRFCYVYLLKTKDEALDYFKIYKAEVENQLDRKIKRLRSDRGGEFFSNEFDLFCEEHGIIHERTPPYSPESNGIAERKNRTLTDLVNAMLDTAGLPKAWWGEALLTSNHVLNRVPNRNKDKTPYEIWIGRKPSLSYLRTWGCLAKVNVPITKKRKLGPKTVDCVFLGYAHHSIAYRFLIVKSEVPDMHVGTIMESRDATFFESFFPMKDTHSGSNQPSEIIPSSITPTEQTEHTHELVSEEDVSEAPRRSKRQRTAKSFGDDFTVYLVDDTPKSISEAYASPDADYWKEAVRSEMDSIIANGTWEVTERPYGCKPVGCKWVFKKKLRPDGTIEKYKARLVAKGYTQKEGEDFFDTYSPVARLTTIRVLLSLAASHGLLVHQMDVKTAFLNGELDEEIYMDQPDGFVLEGQEGKVCKLLKSLYGLKQAPKQWHEKFDKTLTSAGFAVNEANKCVYYRHGGGEGVILCLYVDDILIFGTNLEVINEVKSFLSQNFDMKDLGVADVILNIKLIRGENGITLLQSHYVEKILNRFGYIDSKPSPTPYDPSLLLRKNKRIARNQLEYSQIIGSLMYLASATRPDISFAVSKLSRFTSNPGDDHWRALERVMRYLKGTVELGLHYTGYPAVLEGYSDSNWISDVDEIKATSGYVFTLGGGAVSWRSCKQTILTRSTMEAELTALDIATVEAEWLRDLLMDLPVVEKPVPAILMNCDNQTTCEKTIEVCQEIKKLRSYNVGLHPNSEKPGRSLHEGTITKCDRQCIEGDGFETHSILEGTHLCELDCWSQSMKILGESSRKLTKDLGV

SEQ ID NO: 19909 - protein, 334 aa, Oryza sativa
  Clone ID: TF_OSC29687j.C1.p1.fg
MAGFADALRPDKFTGVHFKRWQIRVTLWLTAMKCFWVSTGKPEGVLTAEQQKQFEEATTLFVGCILSVLGDRLVEVYMHMTDAKELWDALNTKFGATDASNDLYIMEQFHDYKMADNRSVVEQAHEIQTMAKELELLKCVLPDKFVAGCIIAKLPSSWRSFGTALKHKRQEYSVEGLIASLDVEEKAREKDAASKGDGGQSSANVVHKAQNKSKGKYKAQQTTNFKKQKKNNNNPNQDERTCFVCGQVGHLARKCPQRKGMKAPAGQTSKSANVTIGNTGDGSGYGRTGFHRPNGEWVTCFCSWCWHGRSEVYFGKDRAAEERAACPFYRQESC

SEQ ID NO: 19910 - protein, 285 aa, Oryza sativa
  Clone ID: TF_OSC30492j.C1.p1.fg
MAGFADALRPDKFTGVHFKRWQIRVTLWLTAMKCFWVSTGKPEGVLTAEQQKQFEEATTLFVGCILSVLGDRLVEVYMHMTDAKELWDALNTKFGATDASNDLYIMEQFHDYKMADNRSVVEQAHEIQTMAKELELLKCVLPDKFVAGCIIAKLPPSWRSFGTALKHKRQEYSVEGLIASLDVEEKAREKDAASKGDGGQSSANVVHKAQNKSKGKYKAQQTTNFKKQKKNNNNPNQDERTCFVCGQVGHLARKCPQRKGMKAPAGQTSKSANVTIGNTGDGSGY

SEQ ID NO: 19911 - protein, 453 aa, Oryza sativa
  Clone ID: TF_OSC3839j.C1.p1.gm
VIEKIIAVSISNAAMISTKKRIPRTPPARERAPLAGGAPTAKGRAPPLGGKAPLAWWRMPRLRHRAPSAGRSPWLRDYSIPLAGVHRRLGEQVSGTSAFDVLHREKAAIRHCDFTMAGFADALRPDKFTGVHFKRWQIRVTLWLTAMKCFWVSTGKPEGVLTAKQQKQFEEATTLFVGCILSVLGDRLVEVYMHMTDAKELWDALNTKFGATDASNDLYIMEQFHDYKMADNRSVVEQAHEIQTMAKELELLKCVLPDKFVAGCIIAKLPPSWRSFGTALKHKRQEYSVEGLIASLDVEEKAREKDAASKGDGGQSSANVVHKAQNKSKGKYKAQQTTNFKKQKKNNNNPNQDERTCFVCGQVGHLARKCPQRKGMKAPAGQTSKSANVTIGNTGDGSGYGNLPTVARGSTVLMGNGSHASVHGVGTVDLKFTSGKIVQLKNVQHVPSIDRNL

SEQ ID NO: 19912 - protein, 1029 aa, Oryza sativa
  Clone ID: TF_OSC400036j.C1.p96.gm
MAGFADALRPDKFTGVHFKRWQIRVTLWLTAMKCFWVSTGKPEGVLTAEQQKQFEEATTLFVGCILSVLGDRLVEVYMHMTDAKELWDALNTKFGATDASNDLYIMEQFHDYKMADNRSVVEQAHEIQTMAKELELLKCVLPDKFVAGCIIAKLPPSWRSFGTALKHKRQEYSVEGLIASLDVEEKAREKDAASKGDGGQSSANVVHKAQNKSKGKYKAQQTTNFKKQKKNNNNPNQDERTCFVCGQVGHLARKCPQRKGMKAPAGQTSKSANVTIGNTGDGSGYGNLPTVARGSTVLMGNGSHASVHGVGTVDLKFTSGKIVQLKNVQHVPSIDRNLVSGSRLTRDGFKLVFESNKVVVSKHGYFIGKGYECGGLFRFSLSDFCNNMCLIPKFSIVKGSKCHSCVQSKQPRKPHKAAEERNLAPLELLHSDLCEMNGVLTKEVENQLDRKIKRLRSDRGGEFFSNEFDLFCEEHGIIHERTPPYSPESNGIAERKNRTLTDLVNAMLDTAGLPKACEAPRRSKRQRTAKSFGDDFTVYLVDDTPKSISEAYASPDADYWKEAVRSEMDSIIANGTWEVTERPYGCKPVGCKWVFKKKLRPDASHGLLVHQMDVKTAFLNGELDEEIYMDQPDGFVVEGFAVNEADKCVYYRHGGGEGVILCLYVDDILIFGTNLEVINESHYVEKILNRFGYIDSKPSPTPYDPSLLLRKNKRIARNQLEYSQIIGSLMYLASATRPDISFAVSKLSRFTSNPGDDHWRALERVMRYLKGTVELGLHYTGYPAVLEGYSDSNWISDVDEIKATSGYVFTLGGGAVSWSKDVVLQSILEGTHLCELDCWSQSMKILDYSIPLAGVHQRSGEQVSGTSAFDVLHREKAAIRVLTWNDGFYNGEIKTRKIENNLVTELTAEQLLLQRSEQLRELYNSLLSGESADQQRRRPVTALSPEDLGNVEWYYVVCMTYAFRPGQCVPGKSFASNGCAWLCNAQSADSKAFPRKLLAKNASIQTIVCVPFMTGVLELGTTDPKTDTF

SEQ ID NO: 19913 - protein, 1320 aa, Oryza sativa
  Clone ID: TF_OSC400151j.C1.p72.fg
MAGFADALRPDKFTGVHFKRWQIRVTLWLTAMKCFWVSTGKPEGVLTAEQQKQFEEATTLFVGCILSVLGDRLVEVYMHMTDAKELWDALNTKFGATDASNDLYIMEQFHDYKMADNRSVVEQAHEIQTMAKELELLKCVLPDKFVAGCIIAKLPSSWRSFGTALKHKRQEYSVEGLIASLDVEEKAREKDAASKGDGGQSSANVVHKAQNKSKGKYKAQQTTNFKKQKKNNNNPNQDERTCFVCGQVGHLARKCPQRKGMKAPAGQTSKSANVTIGNTGDGSGYGNLPTVFSVNQSTNWWVDTGANVHVCADISLFSSYQVARGSTVLMGNGSHASVHGVGTVDLKFTSGKIVQLKNVQHVPSIDRNLVSGSRLTRDGFKLVFESNKVVVSKHGYFIGKGYECGGLFRFSLSDFCNKSVNHICGSVDDEANVWHSRLCHINFGLMSRLSSMCLIPKFSIVKGSKCHSCVQSKQPRKPHKAAKERNLAPLELLHSDLCEMNGVLTNGGKRYFMTLIDDATRFCYVYLLKTKDEALDYFKIYKAEVENQLDRKIKRLRSDRGGEFFSNEFDLFCEEHGIIHERTPPYSPESNGIAERKNRTLTDLVNAMLDTAGLPKAWWGEALLTSNHVSNRVPNRNKDKTPYEIWIGRKPSLSYLRTWGCLAKVNVPITKKRKLGPKTVDCVFLGYAHHSIAYRFLIVKSEVPDMHVGTIMESRDSIFFESFFPMKDTHSGSNQPSEIIPSSITPPEQTEHTHELVSEEDVSEAPRRSKRQRTAKSFGDDFTVYLVDDTPKSISEAYASPDADYWKEAVRSEMDSIIANGTWEVTERPYGCKPVGCKWVFKKKLRPDGTIEKYKARLVAKGYTQKEGEDFCDTYSPVARLTTIRVLLSLAASHGLLVHQMDVKTAFLNGELDEEIYMDQPDGFVVEGQEGKVCKLLKSLYGLKQAPKQWHEKFDKTLTSAGFAVNEADKCVYYRHGGGEGVILCLYVDDILIFGTNLEVINEVKSFLSQNFDMKDLGVADVILNIKLIRGENGITLLQSHYVEKILNRFGYIDSKPSPTPYDPSLLLRKNKRIARNQLEYSQIIGSLMYLASATRPDISFAVSKLSRFTSNPGDDHWRALERVMRYLKGTVELGLHYTGYPAVLEGYSDSNWISDVDEIKATSRYVFTLGGGAVSWRSCKQTILTRSTMEAELTALDTATVEAEWLRDLLMDLPVVEKLVPAILMNCDNQTTCEKTIEVCQEIKKLRSYNVGLHPNSEKPGRSLHEGTITKCDRQCIEGDVFETHSILERTHLCELDCWSQSMKILGESSRKLTKDLGV

SEQ ID NO: 19914 - protein, 1214 aa, Oryza sativa
  Clone ID: TF_OSC400226j.C1.p50.fg
MAGFADALRPDKFTGVHFKRWQIRVTLWLTAMKCFWVSTGKPEGVLTAEQQKQFEEATTLFVGCILSVLGDRLVEVYMHMTDAKELWDALNTKFGATDASNDLYIMEQFHDYKMADNRSVVEQAHEIQTMAKELELLKCVLPDKFVAGCIIAKLPPSWRSFGTALKHKRQEYSVEGLIASLDVEEKAREKDAASKGDGGQSSANVVHKAQNKSKGKYKAQQTTNFKKQKKNNNNPNQDERTCFVCGQVGHLARKCPQRKGMKAPAGQTSKSANVTIGNTGDGSGYGNLPTVFSVNQSTNWWVDTGANVARGSTVLMGNGSHASVHGVGTVDLKFTSGKIVQLKNVQHVPSIDRNLVSGSRLTRDGFKLVFESNKVVVSKHGYFIGKGYECGGLFRFSLSDFCNKSVNHICGSVDDEANVWHSRLCHINFGLMSRLSSMCLIPKFSIVKGSKCHSCVQSKQPRKPHKAAEERNLAPLELLHSDLCEMNGVLTKGGKRYFMTLIDDATRFCYVYLLKTKDEALDYFKIYKAEVENQLDRKIKRLRSDRGGEFFSNEFNLFCEEHGIIHERTPPYSPESNGIAERKNRTLTDLVNAMLDTAGLPKAWWGEALLTSNHVPDMHVGTIMESRDATFFESFFPMKDTHSGSNQPSEIIPSSITPPEQTEHTHELVSEEDVSEAPRRSKRQRTAKSFGDDFTVYLVDDTPKSISEAYASPDADYWKEAVRSEMDSIIANGTWEVTERPYGCKPVGCKWVFKKKLRPDGTIEKYKARLVAKGYTQKEGEDFFDTYSPVARLTTIRVLLSLAASHGLLVHQMDVKTAFLNGELDEEIYMDQPDGFVVEGQEGKVCKLLKSLYGLKQAPKQWHEKFDKTLTSAGFAVNEADKCVYYRHGGGEGVILCLYVDDILIFGTNLEVINEVKSFLSQNFDMKDLGVADVILNIKLIRGENGITLLQSHYVEKILNRFGYIDSKPSPTPYDPSLLLRKNKRIARNQLEYSQIIGSLMYLASATRPDISFAVSKLSRFTSNPGDDHWRALERVMRYLKGTVELGLHYTGYPAVLEGYSDSNWISDVDEIKATSGYVFTLGGGAVSWRSCKQTILTRSTMEAELTALDTATVEAEWLRDLLMDLPVVEKPVPAILMNCDNQTVIVKVNSSKDNMKSSRHVKRRLKSVRKLRNSGVITLDYIQTARNLADPFMKGLSRNVIDNASKEMGLRPM

SEQ ID NO: 19915 - protein, 1100 aa, Oryza sativa
  Clone ID: TF_OSC400282j.C1.p49.gm
MGGSGRFGRMQPPERSGEQGRTTCGSRHPSHHEASSAARQGDAMEASSTAAARVTRARRLGQAGDERGDELGDGRGDELGDEKGDEPATTGSGRAPARASDGGRGERIRGGEGGPEGNIPPRCRMGGSGRFGRMQPPERSGEQGRTTCGSRHPSHHEASSAARQGDAMEASSTAAARVTRARRLGQAGDERGDELGDGRGDELGDEKGDEPATTGSGRAPARASDGGRGERIRGGESTSYAVRRVAGSHYSIPLAGVHRRSGEQVSGTSAFDVLHREKAAIRVTLWLTAMKCFWVSTGKPEGVLTAEQQKQFEEATTLFVGCILSVLGDRLVEVYMHMTDAKELWDALNTKFGATDASNDLYIMEQFHDYKMADNRSVVEQAHEIQTMAKELELLKCVLPDKFVAGCIIAKLPPSWRSFGTALKHKRQEYSVEGLIASLDVEEKAREKDAASKGDGGQSSANVVHKAQNKSKGKYKAQQTTNFKKQKKNNNNPNQDERTCFVCGQVGHLARKCPQRKGMKAPAGQTSKSANVTIGNTGDGSGYGNLPTVFSVNQSTNWWVDTGANVHVCADISLFSSYQVARGSTVLMGNGSHASVHGVGMVDLKFTSGKIVQLKNVQHVPSIDRNLVSGSRLTRDGFKLVFESNKVVVSKHGYFIGKGYECGGLFRFSLSDFCNKSVNHICGKVENQLDRKIKRLRSDRGGEFFSNEFDLFCEEHGIIHERTPPYSPESNGIAERKNRTLTDLVNAMLDTAGLPKACEAPRRSKRQRTAKSFGDDFTVYLVDDTPKSISEAYASPDANYWKEAVRSEMDSIIANGTWEVTERPYGCKPVGCKWVFKKKLRPDASHGLLVHQMDVKTAFLNGELDEEIYMDQPDGFVVEGFAVNEADKCVYYRHGGGEGVILCLYVDDILIFGTNLEVINESHYVEKILNRFGYIDSKPSPTPYDPSLLLRKNKRIARNQLEYSQIIGSLMYLASATRPDISFAVSKLSRFTSNPGDDHWRALERVMRYLKGTVELGLHYTGYPAVLEGYSDSNWISDVDEIKATSGYVFTLGGGAVSWSEDVVLQSILERTHLCELDCWSQSIKILGESSRKLTKDLGV

SEQ ID NO: 19916 - protein, 1911 aa, Oryza sativa
  Clone ID: TF_OSC400302j.C1.p22.fg
MAGFADALRPDKFTGVHFKRWQIRVTLWLTAMKCFWVSTGKPEGVLTAEQQKQFEEATTLFVGCILSVLGDRLVEVYMHMTDAKELWDALNTKFGATDASNDLYIMEQFHDYKMADNRSVVEQAHEIQTMAKELELLKCVLPDKFVAGCIIAKLPPSWRSFGTALKHKRQEYSVEGLIASLDVEEKAREKDAASKGDGGQSSANVVHKAQNKSKGKYKAQQTTNFKKQKKNNNNPNQDERTCFVCGQVGHLARKCPQRKGMKAPAGQTSKSANVTIGNTGDGSGYGNLPTVFSVNQSTNWWVDTGANVHVCADISLFSSYQVARGSTVLMGNGSHASVHGVGTVDLKFTSGKIVQLKNVQHVPSIDRNLVSGSRLTRDGFKLVFESNKVVVSKHGYFIGKGYECGGLFRFSLSDFCNKSVNHICGSVDDEANVWHSRLCHINFGLMSRLSSMCLIPKFSIVKGSKCHSCVQSKQPRKPHKAAEERNLAPLELLHSDLCEMNGVLTKGGKRYFMTLIDDATRFCYVYLLKTKDEALDYFKIYKAEVENQLDRKIKRLRSDRGGEFFSNEFDLFCEEHGIIHERTPPYSPESNGIAERKNRTLTDLVNAMLDTAGLPKAWWGEALLTSNHVLNRVPNRNKDKTPYEIWIGRKPSLSYLRTWGCLAKVNVPITKKRKLGPKTVDCVFLGYAHHSIAYRFLIVKSEVPDMHVGTIMESRDATFFESFFPMKDTHSGSNQPSEIIPSSITPPEQTEHTHELVSEEDVSEAPRRSKRQRTAKSFGDDFTVYLVDDTPKSISEAYASPDADYWKEAVRSEMDSIIANGTWEVTERPYGCKPVGCKWVFKKKLRPDGTIEKYKARLVAKGYTQKEGEDFFDTYSPVARLTTIRVLLSLAASHGLLVHQMDVKTAFLNGELDEEIYMDQPDGFVLEGQEGKVCKLLKSLYGLKQAPKQWHEKFDKTLTFAGFAVNEADKCVYYRHGGGEGVILCLYVDDILIFGTNIEVINEVKSFLSQNFDMKDLGVADVILNIKLIRGENGITLLQSHYVEKILNRFGYIDSKPSPTPYDPSLSLRKNKRIARNQLEYSQIIGSLMYLASATRPDISFAVSKLSRFTSNPGDDHWRALERVMRYLKGTVELGLHYTGYPAVLEGYSDSNWISDVDEIKATSGYVFTLGGGAVSWRSCKQTILTRSTMEAELTALDTATVEAEWLRDLLMDLPVVEKPVPAILMNCDNQTVIVKVNNSKDNMKSSRHVKRRLKSVRKLRNSGVITLDYIQTARNLADPFTKGLSRNVIDNASKEMGLRPISNDAFMLVFICNVMTYLWNKLNHYMPIISTVLSHDKTCGYQSSGHLQKNKESGDTETDPLMPIPADIDLPILENMPKTKRGGDDLARSLHKNRKTCNGGRTDSLASGCLHGDPNEDVWTELNDVVKSNLSKSVASLSLRNGVAVDRQGRLTKFLTSASLVELLVRALNDTNKNHGDLELEVYHEGNEVCQGYLTDFDLDHNLAIVEIWTDFDVHVGLLQHAVEFLPHCKVIAIGREITGKLMARRVQLMDDLSVSEDSEDLDCKIKEAWEGAPLFSFDGNFVGMNLFLAMGRAFFLPWGTIQKHWASLQNKTGLPESNSLKVYRFGTSSTAEKSNSHPEVNNDILDPEQIHIDSMGYPKFPTHMFAAFCTTNNYAIMYLSPDGMILVNTFEETFGDLRGEGVWSKLSKKSCSNIDRSVVALASFSGERRFFACTGFFVEWNGSTVILTSASLVRSSGDENKIVDNLRIEVLLPNKQRVEGMLQHCNLHYNVALVSVGYRALRPAHGQLDWWGKSSKVVAVGRCFKSGALMAASGTVTPWTGTLDCDFLERSSCKITKAGIGGPVVTLDGDCIGMNFYDTRIGTPFLSWEVIVDIVASFEEKRWPVPMPY

SEQ ID NO: 19917 - protein, 1297 aa, Oryza sativa
  Clone ID: TF_OSC400397j.C1.p61.fg
MASFADALRPDKFTGVHFKRWQIRVTLWLTAMKCFWVSTGKPEGVLTAEQQKQFEEATTLFVGCILSVLGNRLVEVYMHMTDAKELWDALNTKFGATDGSNDLYIMEQFHDYKMADNRSVVEQAHEIQTMAKELELLKCVLPDKFVAGCIIAKLPPSWRSFGTALKHKRQEYSVEGLIASLDVEEKAREKDAASKGDGGQSSANVVHKAQNKSKGKYKAQQTTNFKKQKKNNNNPNQDERTCFVCGQVGHLARKCPQRKGMKAPAGQTSKSANVTIGNTGDGSGYGNLPTVFSVNQSTNWWVDTGANVHVCADISLFSSYQVARGSTVLMGNGSHASVHGVGTVDLKFTSGKIVQLKNVQHVPSIDRNLVSGSRLTRDGFKLVFESNKVVVSKHGYFIGKGYECGGLFRFSLSDFCNKSVNHICGSVDDEANVWHSRLCHINFGLMSRLSSMCLIPKFSIVKGSKCHSCVQSKQPRKPHKAAEERNLAPLELLHSDLCEMNGVLTKGGKRYFMTFIDDATRFCYVYLLKTKDEALDYFKIYKAEVENQLDRKIKRLRSDRGGEFFSNEFDLFCEEHGIIYEMTPPYSPESNGIAERKNRTLTDLVNAMLDTAGLPKAWWGEALLTSNHVLNRVPNRNKDKTPYEIWIGRKPSLSYLRTWGCLAKVNVPITKKRKLGPKTVDCVFLGYAHHSIAYRFLIVKSEVPDMHVGTIMESRDAIFFESFFPMKDTHSGSNQPFEIIPSSITPPEQTEHTHELVSEEDVSEAPRRSKRQRTAKSFGDDFTVYLVDDTPKSISEAYASPDADYWKEAVRSEMDSIIANGTWEVIERPYGCKPVGCKWVFKKKLRPDGTIEKYKARLVAKGYTQKEGEDFFDTYSPVARLTTIRVLLSLAASHGLLVHQMDVKTAFLNGELDEEIYMDQPDGFVVEGQERKVCKLLKSLYGLKQAPKQWHEKFDKTLTSAGFAVNEADKCVYYRHGGGEGVILCLYVDDILIFGTNLEVINEVKSFLSQNFDMKDLGVADVILNIKLIRGENGITLLQSHYVEKILNRFGYIDSKPSPTPYDPSLLLRKNKRIARNQLEYSQIIGSLMYLASATRPDISFAVSKLSRFTSNPGDDHWRALERVMRYLKGTVELGLHYTGYPAVLEGYSDSNWISDVDEIKATSGYVFTLGGGAVSWRSCKQTILTRSTMEAELTALDTATVEAEWLRDLLMDLPVVEKPVPAILMNCDNQTTCEKTIEVCQEIKKLRSYNVGLHPNSEKPGRSLHEGTITKCDRQCIEGDGFETHMSYTMVVTQSM

SEQ ID NO: 19918 - protein, 1320 aa, Oryza sativa
  Clone ID: TF_OSC400429j.C1.p5.fg
MAGFADALRPDKFTGVHFKRWQIRVTLWLTAMKCFWVSTGKPEGVLTAEQQKQFEEATTLFVGCILSVLGDRLVEVYMHMTDAKELWDALNTKFGATDASNDLYIMEQFHDYKMADNRSVVEQAHEIQTMAKELELLKCVLPDKFVAGCIIAKLPPSWRSFGTALKHKRQEYSVEGLIASLDVEEKAREKDAASKGDGGQSSANVVHKAQNKSKGKYKAQQTTNFKKQKKNNNNPNQDERTCFVCGQVGHLARKCPQRKGMKAPAGQTSKSANVTIGNTGDGSGYGNLPTVFSVNQSTNWWVDTGANVHVCADISLFSSYQVARGSTVLMGNGSHASVHGVGTVDLKFTSGKIVQLKNVQHVPSIDRNLVSGSRLTRDGFKLVFESNKVVVSKHGYFIGKGYECGGLFRFSLSDFCNKSVNHICGSVDDEANVWHSRLCHINFGLMSRLSSMCLIPKFSIVKGSKCHSCVQSKQPRKPHKAAEERNLAPLELLHSDLCEMNGVLTKGGKRYFMTLIDDATRFCYVYLLKTKDEALDYFKIYKAEVENQLDRKIKRLRSDRGGEFFSNEFDLFCEEHGIIHERTPPYSPESNGIAERKNRTLTDLVNAMLDTAGLPKAWWGEALLTSNHVLNRVPNRNKDKTPYEIWIGRKPSLSYLRTWGCLAKVNVPITKKRKLGPKTVDCVFLGYAHHSIAYRFLIVKSEVPDMHVGTIMESRDATFFESFFPMKDTHSGSNQPSEIIPSSITPPEQTEHTHELVSEEDVSEAPRRSKRQRTAKSFGDDFTVYLVDDTPKSISEAYASPDADYWKEAVRSEMDSIIANGTWEVTERPYGCKPVGCKWVFKKKLRPDGTIEKYKARLVAKGYTQKEGEDFFDTYSPVARLTTIRVLLSLAASHGLLVHQMDVKTAFLNGELDEEIYMDQPDGFVLEGQEGKVCKLLKSLYGLKQAPKQWHEKFDKTLTSAGFAVNEADKCVYYRHGGGEGVILCLYVDDILIFGTNIEVINEVKSFLSQNFDMKDLGVADVILNIKLIRGENGITLLQSHYVEKILNRFGYIDSKPSPTPYDPSLSLRKNKRIARNQLEYSQIIGSLMYLASATRPDISFAVSKLSRFTSNPGDDHWRALERVMRYLKGTVELGLHYTGYPAVLEGYSDSNWISDVDEIKATSGYVFTLGGGAVSWRSCKQTILTRSTMEAELSALDTATVEAEWLRDLLMDLPVVEKPVPAILMNCDNQTTCEKTIEVCQEIKKLRSYNVGLHPNSEKPGRSLHEGTITKCDRQCIEGDGFETHSILEGTHLCELDCWSQSMKILGESSRKLTKDLGV

SEQ ID NO: 19919 - protein, 1320 aa, Oryza sativa
  Clone ID: TF_OSC400522j.C1.p21.fg
MAGFADALRPDKFTGVHFKRWQIRVTLWLTAMKCFWVSTGKPEGVLTAEQQKQFEEATTLFVGCILSVLGDRLVEVYMHMTDAKELWDALNTKFGATDASNDLYIMEQFHDYKMADNRSVVEQAHEIQTMAKELELLKCVLPDKFVAGCIIAKLPPSWRSFGTALKHKRQEYSVEGLIASLDVEEKAREKDAASKGDGGQSSANVVHKAQNKSKGKYKAQQTTNFKKQKKNNNNPNQDERTCFVCGQVGHLARKCPQRKGMKAPAGQTSKSANVTIGNTGDGSGYGNLPTVFSVNQSTNWRVDIGANVHVCADISLFSSYQVARGSTVLMGNGSHASVHGVGTVDLKFTSGKIVQLKNVQHVPSIDRNLVSGSRLTRDGFKLVFESNKVVVSKHGYFIGKGYECGGLFRFSLSDFCNKSVNHICGSVDDEANVWHSRLCHINFGLMSRLSSMCLISKFYIVKGSKCHSCVQSKQPRKPHKAAEERNLAPLELLHSDLCEMNGVLTKGGKRYFMTLIDDATRFCYVYLLKTKDEALDYFKIYKAEVENQLDRKIKRLRSDRGGEFFSNEFDLFCEEHGIIHERTPPYSPESNGIAERKNRTLTDLVNAMLDTAGLPKAWWGEALLTSNHVLNRVPNRNKDKTPYEIWIGRKPSLSYLRTWGCLAKVNVPITKKRKLGPKTVDCVFLGYAHHSIAYRFLIVKSEVPDMHVGTIMESRDATFFESFFPMKDTHSGSNQPSEIIPSSITPPEQTEHTHELVSEEDVSEAPRRSKRQRTAKSFGDDFTVYLVDDTPKSISEAYASPDADYWKEAVRSEMDSIIANGTWEVTERPYGCKPVGCKWVFKKKLRPDGTIEKYKARLVAKGYTQKEGEDFFDTYSPVARLTTIRVLLSLAASHGLLVHQMDVKTAFLNGELDEEIYMDQPDGFVVEGQEGKVCKLLKSLYGLKQAPKQWHEKFDKTLTSAGFAVNEADKCVYYRHGGGEGVILCLYVDDILIFGTNLEVINEVKSFLSQNFDMKDLGVADVILNIKLIRGENGITLLQSHYVEKILNRFGYIDSKPSPTPYDPSLLLRKNKRIARNQLEYSQIIGSLMYLASATRPDISFAVSKLSRFTSNPGDDHWRALERVMRYLKGTVELGLHYTGYPAVLEGYSDSNWISDVDEIKATSGYVFTLGGGAVSWRSCKQTILTRSTMEAELTALDTATVEAEWLRDLLMDLPVVEKPVPAILMNCDNQTTCEKTIEVCQEIKKLRSYNVGLHPNSEKPGRSLHEGTITKCDRQCIEGDGFETHSILEGTHLCELDCWSQSMKILGESSRKLTKDLGV

SEQ ID NO: 19920 - protein, 1320 aa, Oryza sativa
  Clone ID: TF_OSC400522j.C1.p35.fg
MAGFADALRPDKFTGVHFKRWQIRVTLWLTAMKCFWVSTGKPEGVLTAEQQKQFEEATTLFVGCILSGLGDRLVEVYMHMTDAKELWDALNTKFGATDASNDLYIMEQFHDYKMADNRSVVEQAHEIQTMAKELELLKCVLPDKFVAGCIIAKLPPSWRSFGTALKHKRQEYSVEGLIASLDVEEKAREKDAASKGDGGQSSANVVHKAQNKSKGKYKAQQTTNFKKQKKNNNNPNQDERTCFVCGQVGHLARKCPQRKGMKAPAGQTSKSANVTIGNTGDGSGYGNLPTVFSVNQSTNWWVDTGANVHVCADISLFSSYQVARGSTVLMGNGSHASVHGVGTVDLKFTSEKIVQLKNVQHVPSIDRNLVSGSRLTRDGFKLVFESNKVVVSKHGYFIGKGYECGGLFRFSLSDFCNKSVNHICGSVDDEANVWHSRLCHINFGLMSRLSSMCLIPKFSIVKGSKCHSCVQSKQPRKPHKAAEERNLAPLELLHSDLCEMNGVLTKGGKRYFMTLIDDATRFCYVYLLKTKDEALDYFKIYKAEVENQLDRKIKRLRSDRGGEFFSNEFDLFCEEHGIIHERTPPYSPESNGIAERKNRTLTDLVNAMLDTAGLPKAWWGEALLTSNHVLNRVPNRNKDKTPYEIWIGRKPSLSYLRTWGCLAKVNVPITKKRKLGPKTVDCVFLGYAHHSIAYRFLIVKSEVPDMHVGTIMESRDATFFESFFPMKDTHSGSNQPSEIIPSSITPPEQTEHTHELVSEEDVSEAPRRSKRQRTAKSFGDDFTVYLVDDTPKSISEAYASPDADYWKEAVRSEMDSIIANGTWEVTERPYGCKPVGCKWVFKKKLRPDGTIEKYKARLVAKGYTQKEGEDFFDTYSPVARLTTIRVLLSLAASHGLLVHQMDVKTAFLNGELDEEIYMDQPDGFVVEGQEGKVCKLLKSLYGLKQAPKQWHEKFDKTLTSAGFAVNEVDKCVYYRHGGGEGVILCLYVDDILIFGTNLEVINEVKSFLSQNFDMKDLGVADVILNIKLIRGENGITLLQSHYVEKILNRFGYIDSKPSPTPYDPSLLLRKNKRIARNQLEYSQIIGSLMYLASATRPDISFAVSKLSRFTSNPGDDHWRALERVMRYLKGTVELGLHYTGYPAVLEGYSDSNWISDVDEIKATSGYVFTLGGGAVSWRSCKQTILTRSTMEAELTALDTATVEAEWLRDLLMDLPVVEKPVPAILMNCDNQTTCEKTIEVCQEIKKLRSYNVGLHPNSEKPGRSLHEGTITKCDRQCIEGDGFETHSILEGTHLCELDCWSQSMKILGESSRKLTKDLGV

SEQ ID NO: 19921 - protein, 1607 aa, Oryza sativa
  Clone ID: TF_OSC400525j.C1.p60.fg
MALRLAAVPESAAADLSAAANTLPCISYRDSIRSVAAVVSGGRGPLFQSEDSASTWSSSSYASDCSGHSSGVSAAAAAGFRALTAHELREVARRMVADGYAQRMVQAFDDAATVEVLEGEMLADCRLDDDIAKDYEARAAVREARAAREEAEARLQVATRAARLVAAEAEAARTAEAARQAAAAAATLRAEEEEERRDLELTDAARVRRDADRDRHIGRRDRDFSPHRRGSDLHRGEEERRDPWRDPRINRALETQRLREQAAAIEAQLDFDREQGGRDVGARSPRRQRASPSPDRRRGRRGRSGSPPVVQIVVKDVGGAWPMLTKTNYAEWAMVMKVKLQARHMWDAVRYGDVDYGEDRRALERLAQLGDTTIDEERAVEKLLCVVPEKYTQLALSIETLLDFTELTNEEVTGRLKAVDNRKQLPPSEPITIGGKLFFTKEKWLARQQERKKGEATSSSASGSSSSRKRRPRKWEKARSGALGGADGERKGSRNDTCHNCGKTGHWAKDCRQAKHGGQAHVAQAQEGDEVALFFVHGSIEPHFTPTPDATAPLHLDELWAHVFLSNGSCDDKIDGWCLDTGATHHMTGRREFFSKLDSSVQGSVKFEDASAVEIKGVGSILFTTKTGEHRLLTGVYYIPALRNSIISLGQLDENGLLVEIEDGVLRVWDRHRRLLVKVNRGANRLYVLHVQVAQPVCLAARRDDDAWRWHERFGHLNFEALKQLSNKEMVQGMPRVEHVEQFCDTCVLTKQRRLPFPRQASFCAKEKLELVHGDLCGPVTPATPGGRRFFLLLVDDVSCYMWVVLLDSKAVAADAIKHHQVAAEKECGRKLRVLHTDNGGEFTTAEFAAYCADERIQRHFSAPYTPQQNGVVERRNQTVVATARALLKQRGMPAIYWGEAVMTAVHLLNRSPTKALDGKTSYEAWHGRKPVVSHLRVFGCLAFAKELNHVGKLNDRSSPGVFIGYAEGVKAYRILDPSTQHVRISRDVVFDEGRGWASYKAVDDGSTSTLRDFVVDYVHFRAAGGASSSSSPSSSTSAPGSPSAPASPLPPTPPATPPSPATPRSPTPAPTPPVEFATPLSNDEDRVDAYHDDEPLRYRTMDNIFGDQPVPGLETRDFEAELHLAHEDGEPCSFAEANGDVAWRTAMQHEMDAVERNWTWVLADLPASHRAITLKWVYKLKKDEAGAVIKHKARLVARGFVQQEGVDFDDAFAPVARMESVRLLLALAAQEGWRVHHMDVKSAFLNGDLKEEVYVHQPPGFVIPGKENKVLRLRKALYGLRQALYAKLDSTLKQMGFQQNSHEAAVYQRGKDGNALLVGVYVDDLVITGTKEAEVEAFKEEMKATFQMSDLGLLSFYLGIEVHQDSSGISLRQTAYAKCIVELGGLTGCNPAYTPMEERLKLSRDSTAEEVDATQYRHIVGSLRYLVHTRPDLAFAVGYVSRFMQRPTTEHQQAVTSRAPPTTAFTTRGVPCLISWQSVKQQVVALSSCEAEYIATTTASTQALWLARLLGDLLGRNTEAVELRMDSKSALALAKNPVFHERSKHIRIKYHFIRSCLEEGSIKASYINTQDQLADLLTKSLGRVKFQEFRARIGMVQIPQKAPHMT

SEQ ID NO: 19922 - protein, 643 aa, Oryza sativa
  Clone ID: TF_OSC400758j.C1.p21.gm
MSDKTEAGIGGAVICAFFLTSSPVWSNSRGPHIACMLGGLGASQRPNGLEKCLCVYCIKLLDSASFACYNTGKPIQVVRCYSRKPNIIAKLEEDYSIPLAGVHQRSGEQVSGTSAFDVLHWEKAAIRHCDFTMAGFADALRPDKFTGVHFKRWQIRVTLWLTAMKCFWVSTGKPEGVLTAEQQKQFEEATTLFVGCILSVLGDRLVEVYMHMTDAKELWDALNTKFGATDASNDLYIMEQFHDYKMADNRSVVEQAHEIQTMAKELELLKCVLPDKFVAGCIIAKLPPSWRSFGTALKHKRQEYSVEGLIASLDVEEKAREKDAASKGDGGQSSANVVHKAQNKSKGKYKAQQTTNFKKQKKNNNNPNQDERTCFVCGQVGHLARKCPQRKGMKAPAGQTSKSANVTIGNTGDGSGYGNLPTVARGSTVLMGNGSHASVHGVGTVDLKFTSGKIVQLKNVQHVPSIDRNLDTHSGSNQPSEIIPSSITPPEQIEHTHELVSEEDVSEAPRRSKRQRTAKSFGDDFTVYLVDDTPKSISEAYASPDADYWKEAVRSEMDSIIANGTWEVTEQPYGCKPVGCKWVFKKKLRPDDYSIPLAGVHQRSGEQVSGTSAFDVLHWEKAAIRQHSMTGFGSCAVLTMTAT

SEQ ID NO: 19923 - protein, 1703 aa, Oryza sativa
  Clone ID: TF_OSC400763j.C1.p16.fg
MRLLVLMCLVIAAAMQMQAASGAPPTAAKLAHCLKSCGGANISYPYGVGAGCFRPGFELTCDHSTKPPKLLLLGVATNTNTTTTKIVDQYRDGYVQAYVSFNIATTPGVLGTYNRTWESPGRILSIGPDYYALVAVGCGIEVYLVDPDTEDMLGYCFSMCTDMAMMHKEAEGKACSGMGCCVVTFRRPVRAFRVSITQREATQPFQVANASTIKVFLSEESTTYHYNFTIGDLLSDEINETTVASTSAYLSTFIADQPNCTIAQKDPERYACGDNKCLDADDENGGYRCACIKYTNSNPYLDGDCDQDYSIPLAGVHQRSGEQVSGTSAFDVLHREKAAIRSNDAFMLVFICNVMTYLWNKLNHYMPIISTIQKPYYRHCDFTMAGFADALRPDKFTGVHFKRWQIRVTLWLTAMKCFWVSTGKPEGVLTAEQQKQFEEATTLFVGCILSVLGDRLVEVYMHMTDAKELWDALNTKFGATDASNDLYIMEQFHDYKMADNRSVVEQAHEIQTMAKELELLKCVLPDKFVAGCIIAKLPPSWRSFGTALKHKRQEYSVEGLIASLDVEEKAREKDAASKGDGGQSSANVVHKAQNKSKGKYKAQQTTNFKKQKKNNNNPNQDERTCFVCGQVGHLARKCPQRKGMKAPAGQTSKSANVTIGNTGDGSGYGNLPTVFSVNQSTNWWVDTGANVHVCADILLFSSYQVARGSTVLMGNGSHASVHGVGTVDLKFTSGKIVQLKNVQHVPSIDRNLVSGSRLTRDGFKLVFESNKVVVSKHGYFIGKGYECGGLFRFSLSDFCNKSVNHICGSVDDEANVWHSRLCHINFGLMSRLSSMCLIPKFSIVKGSKCHSCVQSKQPRKPHKAAEERNLAPLELLHSDLCEMNGVLTKGGKRYFMTLIDDATRFCYVYLLKTKDEALDYFKIYKAEVENQLDRKIKRLRSDRGGEFFSNEFDLFCEEHGIIHERTPPYSPESNGIAERKNRTLTDLVNAMLDTAGLPKAWWGEALLTSNHVLNRVPNRNKDKTPYEIWIGRKPSLSYLRTWGCLAKVNVPITKKRKLGPKTVDCVFLGYAHHSIAYRFLIVKSEVPDMHVGTIMESRDATFFESFFPMKDTHSGSNQPSEIIPSSITPPEQTEHTHELVSEEDVSEAPRRSKRQRTAKSFGDDFTVYLVDDTPKSISEAYASPDADYWKEAVRSEMDSIIANGTWEVTERPYGCKPVGCKWVFKKKLRPDGTIEKYKARLVAKGYTQKEGEDFFDTYSPVARLTTIRVLLSLAASHGLLVHQMDVKTAFLNGELDEEIYMDQPDGFVLEGQEGKVCKLLKSLYGLKQAPKQWHEKFDKTLTSAGFAVNEADKCVYYRNGGGEGVILCLYVDDILIFGTNIEVINEVKSFLSQNFDMKDLGVADVILNIKLIRGENGITLLQSHYVEKILNRFGYIDSKPSPTPYDSSLSLRKNKRIARNQLEYSQIIGSLMYLASATRPDISFAVSKLSRFTSNPGDDHWRALERVMRYLKGTVELGLHYTGYPAVLEGYSDSNWISDVDEIKATSGYVFTLGGGAVSWRSCKQTILTRSTMEAELTALDTATVEAEWLRDLLMDLPVVEKPVPAILMNCDNQTTCEKTIEVCQEIKKLRSYNVGLHPNSEKPGRSLHEGTITKCDRQCIEGDGFETHSILEGTHLCELDCWSQSMKILGESSRKLTKDLGV

SEQ ID NO: 19924 - protein, 1655 aa, Oryza sativa
  Clone ID: TF_OSC400772j.C1.p45.fg
MAPRKPNPASATGPDPGRIDDDSTAFLGASLVDDDELAKLVSAGPLVEGQAFLPGKAVVPKPGDNWTVVFAVFFGAGLRFSCNVLLLEILRLFQTLAKSFDQAAGLSVTSVSTGKPEGVLTAEQQKQFEEATTLFVGCILSVLGDRLVEVYMHMTDAKELWDALNTKFGATDASNDLYIMEQFHDYKMADNRSVVEQAHEIQTMAKELELLKCVLPDKFVAGCIIAKLPSSWRSFGTALKHKRQEYFVEGLIASLDVEEKAREKDAASKGDGGQSSANVVHKAQNKSKGKYKAQQTTNFKKQKNNNNNPNQDERTCFVCGQVGHLARKCPQRKGMKAPAGQTSKSANVTIGNTGDGSGYGNLPTVFLVNQSTNWWVDTGANVHVCADISLFSSYQVARGSTDLMGNGSHASVHGVGTVDLKFTSGKIVQLKNVQHVPSIDRNLVSGSRLTRDGFKLVFESNKVVVSKHGYFIGKGYECGGLFCFSLSDFCNKSVNHICGSVDDEANVWHSRLCHINFGLMSRLSSMCLIPKFSIVKGSKCHSCVQSKQPRKPHKAAKERNLAPLELLHSDLCEMNGVLTNGGKRYFMTLIDDATRFCYVYLLKTKDEALDYFKIYKAEVENQLDRKIKRLRSDRGGEFFSNEFDLFCEEHGIIHERTPPYSPESNGIAERKNRTLTDLVNAMLDTAGLPKAWWGEALLTSNHVLNRVPNRNKDKTPYEIWIGRKPSLSYLRTWGCLAKVNVPITKKRKLGPKTVDCVFLGYAHHSIAYRFLIVKSEVPDMHVGTIMESRDSIFFESFFPMKDTHSGSNQPFEIIPSSITPPKQTEHTHELVSEEDVSEAPRRSKRQRTAKSFGDDFTVFLVDDTPKSISEAYASPDADYWKEAVRSEMDSIIANGTWEVIELPYGCKPMGCKWVFKKKLRPDGTIEKYKARLVAKGYTQKEGEDFFDTYSPVARLTTIRVLLSLAASHGLLVHQMDVKTAFLNGELDEEIYMDQPDGFVVEGQEGKVCKLLKSLYGLKQAPKQWHEKFDKTLTSAGFAVNEADKCVYYRHGGGEGVILCLYVDDILIFGTNLEVINEVKSFLSQNFDMKDLGVADVILNIKLIRGENGITLLQSHYVEKILNRFGYIDSKPSPTPYDPSLLLRKNKRIARNQLEYSQIIGSLMYLASATRPDISFAVSKLSRFTSNPGDDHWRALERVMRYLKGTVELGLHYTGYPAVLEGYSDSNWISDVDEIKATSGYVFTLGGGAVSWRSCKQTILTRSTMEAELTALDTATVEAEWLRDLLMDLPVVEKPVPAILMNCDNQTTCEKTIEVCQEIKKLRSYNVGLHPNSEKPGRSLHEGTITKCDRQCIEGDGFETHKEEANKRLQGVQITTTAPIISHLLFADDSLLLFKATSVCADAVSRVLTNYCAASGQLVNFSKSCIFFSKKCDMAIREDIKRKVGMTNESITDRYLGLPTDVGRAKEGKFKYLKDRVWKRVQGWMEKTLSVGGKEVLIKSIVQAIPTYSMSCFRLPMGLCNHINSLIRKFWWASKQGSRKTNWVAWDKMTVPKFLGGMGFRDINIFNLVLLAKQGWRILQYPNSLAARVLKAVYFSNGDFLNAGLGSRPSHTWRAIIEGREILKLGIIRRIGSGKDTFIWDDNWIPRDWMLRPIRA

SEQ ID NO: 19925 - protein, 1306 aa, Oryza sativa
  Clone ID: TF_OSC400773j.C1.p24.fg
MAGFADALRPDKFTGVHFKRWQIRVTLWLTAMKCFWQKQFEEATTLFVGCILSVLGDRLVEVYMHMTDAKELWDALNTKFGATDASNDLYIMEQFHDYKMADNRSVVEQAHEIQTMAKELELLKCVLPDKFVAGCIIAKLPPSWRSFGTALKHKRQEYSVEGLIASLDVEEKAREKDAASKGDGGQSSANVVHKAQNKSKGKYKAQQTTNFKKQKKNNNNPNQDERTCFVCGQVGHLARKCPQRKGMKAPAGQTSKSANVTIGNTGDGSGYGNLPTVFSVNQSTNWWIDTGANVHVCADISLFSSYQVARGSTVLMGNGSHASVHGVGTVDLKFTSGKIVQLKNVQHVPSIDRNLVSGSRLTRDGFKLVFESNKVVVSKHGYFIGKGYECGGLFRFSLSDFCNKSVNHICGSVDDEANVWHSRLCHINFGLMSRLSSMCLIPKFSIVKGSKCHSCVQSKQPRKPHKAAEERNLAPLELLHSDLCEMNGVLTKGGKRYFMTLIDDATRFCYVYLLKTKDEALDYFKIYKAEVENQLDRKIKRLRSDRGGEFFSNEFDLFCEEHGIIHERTPPYSPESNGIAERKNRTLTDLVNAMLDTAGLPKAWWGEALLTSNHVLNRVPNRNKDKTPYEIWIGRKPSLSYLRTWGCLAKVNVPITKKRKLGPKTVDCVFLGYAHHSIAYRFLIVKSEVPDMHVGTIMESRDATFFESFFPMKDTHSGSNQPSEIIPSSITPPEQTEHTHELVSEEDVSEAPRRSKRQRTAKSFGDDFTVYLVDDTPKSISEAYASPDADYWKEAVRSEMDSIIANGTWEVTERPYGCKPVGCKWVFKKKLRPDGTIEKYKARLVAKGYTQKEGEDFFDTYSPVARLTTIRVLLSLAASHGLLVHQMDVKTAFLNGELDEEIYMDQPDGFVVEGQEGKVCKLLKSLYGLKQAPKQWHEKFDKTLTSAGFAVNEADKCVYYRHGGGEGVILCLYVDDILIFGTNLEVINEVKSFLSQNFDMKDLGVADVILNIKLIRGENGITLLQSHYVEKILNRFGYIDSKPSPTPYDPSLLLRKNKRIARNQLEYSQIIGSLMYLASATRPDISFAVSKLSRFTSNPGDDHWRALERVMRYLKGTVELGLHYTGYPAVLEGYSDSNWISDVNEIKATSGYVFTLGGGAVSWRSCKQTILTRSTMEAELTVLDTATVEAEWLRDLLMDLPVVEKPVPAILMNCDNQTTCEKTIEVCQEIKKLRSYNVGLHPNSEKPGRSLHEGTITKCDRQCIEGDGFETHSILEGTHLCELDCWSQSMKILGESSRKLTKDLGV

SEQ ID NO: 19926 - protein, 1289 aa, Oryza sativa
  Clone ID: TF_OSC400800j.C1.p51.fg
MAGFADALRPDKFTGVHFKRWQIRVTMWLTAMKCFWVSTGKPEGVLTAEQQKQFEEATTLFVGCILSVLVRSSWSTVFHDYKMADNRSVVEQAHEIQTMAKELELLKCVLPDKFVAGCIIAKLPPSWRSFGTALKHKRQEYSVEGLIASLDVEEKAREKDAASKGDGGQSSANVVHKAQNKSKGKYKAQQTTNFKKQKKNNHNPNQDERTCFVCGQVGHLARKCPQRKGMKAPAGQTSKSANVTIGNTGDGSGYGNLPSVFSVNQSTNWWVDTGANVHVCADISLFSSYQVARGSTVLMGNGSHASVHGVGTVDLKFTSGKIVQLKNVQHVPSIDRNLVSGSRLTRDGFKLVFESNKVVVSKHGYFIGKGYECGGLFRFSLSDFCNKSVNHICGSVDDEANVWHSRLCHINFGLMSRLSSMCLIPKFSIVKGSKCHSCVQSKQPRKPHKAAEERNLAPLELLHSDLCEMNGVLTKGGKRYFMTLIDDATRFCYVYLLKTKDEALDYFKIYKAEVENQLDRRINRLRSDRGGEFFSNEFDLFCEEHGIIHERTPPYSPESNGIAERKNRTLTDLVNAMLDTAGLPKAWWGEALLTSNYVLNRVPNRNKDKTPYEIWIGRKPSLSYLRTWGCLAKVNVPITKKRKLGPKTVDCVFLGYAHHSIAYRFLIVKSEVPDMHVGTIMESRDATFFESFFPMKDTHSGSNQPSEIIPSSITPPEQTEHTHELVSEEDVSEAPRRSKRQRTAKSFGDDFTVYLVDDTPKSISEAYASPDADYWKEAVRSEMDSIIANGTWEVTERPYGCKPVGCKWVFKKKLRPDGTIEKYKARLVAKGYTQKEGEDFFDTYSPVARLTTIRVLLSLAASHGLLVHQMDVKTAFLNGELDEEIYMDQPDGFVVEGQEGKVCKLLKSLYGLKQAPKQWHEKFDKTLTSAGFAVNEADKCVYYRHGGGEGVILCLYVDDILIFGTNLEVINEVKSFLSQNFDMKDLGVADVILNIKLIRGENGITLLQSHYVEKILNRFGYIDSKPSPTPYDPSLLLRKNKRIARNQLEYSQIIGSLMYLASATRPDISFAVSKLSRFTSNPGDDHWRVLERVMRYLKGTVELGLHYTGYPAVLEGYSDSNWISDVDEIKATSGYVFTLGGGAVSWRSCKQTILTRSTMEAELTALDTATVEAEWLRDLLMDLPVVEKPVPAILMNCDNQTTCEKTIEVCQEIKKLRSYNVGLHPNSEKPGRSLHEGTITKCDRQCIEGDGFETHSILEGTHLCELDCWSQSMKILGESSRKLTKDLGV

SEQ ID NO: 19927 - protein, 1302 aa, Oryza sativa
  Clone ID: TF_OSC400978j.C1.p6.fg
MAGFADALRPDKFTGVHFKRWQIRVTLWLTAMKCFWVSTGKPEGVLTAEQQKQFEEATTLFVGCILSVLGDRLVEVYMHMTDAKELWDALNTKFGATDASNDLYIMEQFHDYKMADNRSVVEQSHEIQTMAKELELLKCVLPDKFVAGCIIAKLPPSWRSFGTALKHKRQEYSVEGLIASLDVEEKAREKDAASKGDGGQSSANVVHKAQNKSKGKYKAQQTTNFKKQKKNNNNPNQDERTCFVCGQVGHLARKCPQRKGMKAPAGQTSKSANVTIGNTGDGSGYGNLPTVFSVNQSTNWWVDTGANVHVCADISLFSSYQVARGSTVLMWNGSHASVHGVGTVDLKFTSGKIVQLKNVQHVPSIDRNLVSGSRLTRDGFKLVFESNKVVVSKHGYFIGKGYECGGLFRFSLSDFCNKSVNHICGSVDDEAIVWHSRLCHINFGLMSRLSSMCLIPKFSIVKGSKCHSCVQSKQPRKPHKAAEERNLAPLELLHSDLCEMNGVLTKGGKRYFMTLIDDATRFCYVYLLKTKDEALDYFKIYKAEVENQLDRKIKRLRSDRGGEFFSNEFDLFCEEHGIIHERTPPYSPESNGIAERKNRTLTDLVNAMLDTAGLPKAWWGEALLTSNHVLNRVPNRNKDKTPYEIWIGRKPSLSYLRTWGCLAKVNVPITKKRKLGPKTVDCVFLGYAHHSIAYRFLIVKSEIPDMHVGTIMESRDATFFESFFPMKDTHSGSNQPSEIIPSLITPPEQTEHTHELVSEEDVSEAPRRSKRQRTAKSFGDDFTVYLVDDTPKSISEAYASPDADYWKEAVRSEMDSIIANGTWEVTERPYGCKPVGCKWVFKKKLRPDGTIEKYKARLVAKGYTQKEGEDFFDTYSPVARLTTIHVLLSLAASHGLLVHQMDVKTAFLNGELDEEIYMDQPDGFVVEGQEGKVCKLLKSLYGLKQAPKQWHEKFDKTLTSAGFAVNEADKCVYYRHGGGEGVILCLYVDDILIFGTNLEVINEVKSFLSQNFDMKDLGVADVILNIKLIRGENGITLLQSHYVEKILNRFGYIDSKPSPTPYDPSLLLRKNKRIARNQLEYSQIIGSLMYLASATRPDISFAVSKLSRFTSNPGDDHWRALERVMRYLKGTVELGLHYTGYPAVLEGYSDSNWISDVDEIKATSGYVFTLGGGAVSWRSCKQTILTRSTMEAELTALDTATVEAEWLRDLLMDLPVVEKPVPAILMNCDNQTVIVKVNSSKDNMKSSRHVKRRLKSVRKLRNSGVITLDYIQTARNLADPFTKGLSRNVIDNASKEMGLRPM

SEQ ID NO: 19928 - protein, 1810 aa, Oryza sativa
  Clone ID: TF_OSC401035j.C1.p18.fg
MSKRRGNCSSSNEEKKTCTNSRKKGDQTHFSGTGIVVRNKDEVTTSILTSANVIRCFDDDSKINPFLDVVLLALSLQIRVLLPNKQRVIGWMGHFDLNYNIAVVVIKYLPGLRAASFDHEVRFGSQSKDMAGGPLIDLDGNFVGMNFFSEERTPFLPRNKIYRSLVRSCTLWVEIDDECTSIIERCRSKMIHNNFVGTSRGVAKKRNQEQTVSITSFSEGTSDEENESETQKLPEYSTSDSEDFWEEELFPELIKPLPDDEFTQLLKKDLKSRNYPMPIRFWGGMRLKNTFEEEFAEDTWCKLSKKVALNTSQSVVSLASFKDYSIPLAGVHQRSGEQVSGTSAFDVLHREKAAIRSNDAFMLVFICNVMIYLWNKLNPYMPIISTIQKPYYRHCDFTMAGFADALRPDKFTGVHFKRWQIRVTLWLTAMKCFWVSTGKPEGVLTAEQQKQFEEATTLFVGCILSVLGDRLVEVYMHMTDAKELWDALNTKFGATDASNDLYIMEQFHDYKMADNRSVVEQAHEIQTMAKELELLKCVLPDKFVAGCIIAKLPPSWRSFGTALKHKRQEYSVEGLIASLDVEEKAREKDAASKGDGGQSSANVVHKAQNKSKGKYKAQQTTNFKKQKKNNNNPNQDERTCFVCGQVGHLARKCPQRKGMKAPAGQTSKSANVTIGNTGDGSGYGNLPTVFSVNQSTNWWVDTGANVARGSTVLMGNGSHASVHGVGTVDLKFTSGKIVQLKNVQHVPSIDRNLVSGSRLTRDGFKLVFESNKVVVSKHGYFIGKGYECGGLFRFSLSDFCNKSVNHICGSVDDEANVWHSRLCHINFGLMSRLSSMCLIPKFSIVKGSKCHSCVQSKQPRKPHKAAEERNLAPLELLHSDLCEMNGVLTKGGKRYFMTLIDDATRFCYVYLLKTKDEALDYFKIYKAEVENQLDRKIKRLRSDRGGEFFSNEFDLFCEEHGIIHERTPPYSPESNGIAERKNRTLTDLVNAMLDTAGLPKAWWGEALLTSNHVLNRVPNRNKDKTPYEIWIGRKPSLSYLRTWGCLAKVNVPITKKRKLGPKTVDCVFLGYAHHSIAYRFLIVKSEVPDMHVGTIMESRDATFFESFFPMKDTHSGSNQPSEIIPSSITPPEQTEHTHELVSEEDVSEAPRRKRPYGCKPVGCKWVFKKKLRPDGTIEKYKARLVAKGYTQKEGEDFFDTYSPVARLTTIRVLLSLAASHGLLVHQMDVKTAFLNGELDEEIYMDQPDGFVVEGQEGKVCKLLKSLYGLKQAPKQWHEKFDKTLTSAGFAVNEADKCVYYRHGGGEGVILCLYVDDILIFGTNLEVINVVKSFLSQNFDMKDLGVADVILNIKLIRGENGITLLQSHYVEKILNRFGYIDSKPSPTPYDPSLLLRKNKRIARNQLEYSQIIGSLMYLASATRPDISFAVSKLSRFTSNPGDDHWRALERVMRYLKGTMELGLHYTGYPAVLEGYSDSNWISDVDEIKATSGYVFTLGGGAVSWRSCKQTILTRSTMEAELTALDTATVEAEWLRDLLMDLPVVEKPVPAILMNCDNQTTCEKTIEVCQEIKKLRSYNVGLHPNSEKPGRSLHEGTITKCDRQCIEGDGFETHSILEGTHLCELDCWSQSMKILGEERFFACTGVFIDFNGSTSRVVTSASLVRISADENKIADNLKIKVYLPNKRIAVGELQHCNLSYNIAVVSVKGFCCLRTAELDKQMQIEPHREVVAIGRIFESGKLMATSGILSDEESKLDCRELMISTCKITKAGIGGPLIDFDGNFVGINFYGTKETHYLPRLMIQRLLKDFDG

SEQ ID NO: 19929 - protein, 1320 aa, Oryza sativa
  Clone ID: TF_OSC401137j.C1.p48.fg
MAGFADALRPDKFTGVHFKRWQIRVTLWLTAMKCFWVSTGKPEGVLTAEQQKQFKEATTLFVGCILSVLGDRLVEVYMHMTDAKELWDVLNTKFGATDASNDLYIMEQFHDYKMADNRSVVEQAHEIQTMAKELELIKCVLPDKFVAGCIIAKLPPSWRSFGTALKHKRQEYSVEGLIASLDVEEKAREKDAASKGDGGQSSANVVHKAQKKSKGKYKAQQTTNFKKQKKNNNNPNQDERTCFVCGQVGHLARKCPQRKGMKAPAGQTSKSANVTIGNTGDGSGYGNLPTVFSVNQSTNWWVDTGANVHVCADISLFSSYQVARGSTVLMGNGSHASVHGVGTVDLKFTSGKIVQLKNVQHVPSIDMNLVSGSRLTRDGFKLVFESNKVVVSKHGYFIGKGYECGGLFRFSLSDFCNKSVNHICGSVDDEANVWHSRLCHINFGLMSRLSSMCLIPKFSIVKGSKCHSCVQSKQPRKPHKAAEERNLAPLELLHSDLCEMNGVLTKGGKRYFMTFIDDATRFCYVYLLKTKDEALDYFKIYKAEVENQLDRKIKRLRSDRGGEFFSHEFDLFCGEHGIIHERTPPYSPESNGIAERKNRTLTDLVNAMLDTAGLPKAWWGEALLTSNHVLNRVPNRNKDKTPYEIWIGRKPSLSYLRTWGCLAKVNVPITKKRKLGPKTVDCVFLGYAHHSIAYRFLIVKSEVLDMHVGTIMESRDATFFESFFPMKDTHSGSNQPSEIIPSSITPPEQTEHTHELVSEEDVSEAPRRSKRQRTAKSFGDDFTVYLVDDTPKSISEAYASPDADYWKEAVHSEMDSIIANGTWEVTEQPYGCKPVGCKWVFKKKLRPDGTIEKYKARLVAKGYTQKEGEDFFDTYSPVARLTTIRVLLSLAASHGLLVHQMDVKTAFLNGELDEEIYMDQPDGFVVEGQEGKVCKLLKSLYGLKQAPKQWHEKFDKTLTSAGFGVNEADKCVYYRHGGGEGVILCLYVDDILIFGTNLEVINEVKSFLSQNFDMKDLGVADVILNIKLIRGENGITLLQSHYVEKILNRFGYIDSKPSPTPYDPSLLLRKNKRIARNQLEYSQIIGSLMYLASATRPDISFAVSKLSRFTSNPGDDHWRALERVIRYLKGTVELGLHYTGYPAVLEGYSDSNWISDVDEIKATSGYVFTLGGGAVSWRSCKQTILTRSTMEAELTALDTATVEAEWLRDLLMDLPVVEKPVPANLMNCDNQTTCEKTIEVCQEIKKLRSYNVGLHPNSEKPGRSLHEGTITKCDRQCIEGDGFETHSILERTHLCELDCWSQSMKILGESSRKLTKDLGV

SEQ ID NO: 19930 - protein, 1302 aa, Oryza sativa
  Clone ID: TF_OSC401186j.C1.p1.fg
MAGFADALRPDKFTGVHFKRWQIRVTLWLTAMKCFWVSTGKPEGVLTAEQQKQFEEATTLFVGCILSVLGDRLVEVYMHMTDAKELWDALNTKFGATDASNDLYIMEQFHDYKMADNRSVVEQAHEIKTMAKELELLKCVLPDKFVAGCIIAKLPPSWRSFGAALKHKRQEYSVEGLIASLDVEEKAREKDAASKGDGGQSSANVVHKAQNKSKGKYKAQQTTNFKKQKKNNNNPNQDERTCFVCGQVGHLARKCPQRKGMKAPAGQTSKSANVTIGNTGDGSGYGNLPTVFSVNQSTNWWVDTGANVHVCADISLFSSYQVARGSTVLMGNGSHASVHGVGTVDLKFTSGKIVQLKNVQHVPSIDRNLVSGSRLTRDGFKLVFESNKVVVSKHGYFIGKGYECGGLFRFSLSDFCNKSVNHICGSVDDEANVWHSRLCHINFVLMSRLSSMCLIPKFSIVKGSKCHSCVQSKQPRKPHKAAEERNLAPLELLHSDLCEMNGVLTKGGKRYFMTLIDDATRFCYVYLLKTKDEALDYFKIYKAEVENQLDRKIKRLRSDRGGEFFSNEFDLFCEEHGIIHERTPPYSPESNGIAERKNRTLTDLVNAMLDTAGLPKAWWGEALLTSNHVLNRVPNRNKDKTPYEIWIGRKPTLSYLRTWGCLAKVNVPITKKRKLGPKTVDCVFLGYAHHSIAYRFSIVKSEVPDMHVGTIMESRDATFFESFFPMKDTHSGSNQPSEIIPSSITPPEQTEHTHELVSEEDVSEAPRRSKRQRTAKSFGDDFTVYLVDDTPKSISEAYASPDADYWKEAVRSEMDSIIANGTWEVTERPYGCKPVGCKWVFKKKLRPDGTIEKYKARLVAKGYTQKEGEDFFDTYSHVARLTTIRVLLSLAASHGLLVHQMDVKTTFLNGELDEEIYMYQPDGFVVEGQEGKVCKLLKSLYGLKQAPKQWHEKFDKTLTSAGFAVNEADKCVYYRHGRGEGVILCLYVDDILIFKTNLEVINEVKSFLSQNFDMKDLGVADVILNIKLIRGENGITLLQSHYVEKILNRFGYIDSKPSPTPYDPSLLLRKNKRIARNQLEYSQIIGSLMYLASATRPDISFAVSKLSRFTSNPGDDHWRALERVMRYLKGTVELGLHYTGYPAVLEGYSDSNWISDVDEIKATSGYVFTLGGGAVSWRSCKQTILTRSTMEAELTALDTATVEAEWLRDLLMDLPVVEKPVSAILMNCDNQTVIVKVNSSKDNMKSSRHVKRRLKSVRKLRNSGVITLDYIQTARNLADPFTKGLSRNVIDNASKEMGLRPM

SEQ ID NO: 19931 - protein, 1320 aa, Oryza sativa
  Clone ID: TF_OSC401254j.C1.p2.fg
MAGFADALRPDKFTGVHFKRWQIRVTLWLTAMKCFWVSTGKPEGVLTAEQQKQFEEATTLFVGCILSVLGDRLVEVYMHMTDAKELWDALNTKFGATDASNDLYIMEQFHDYKMADNRSVVEQAHEIQTMAKELELLKCVLPDKFVAGCIIAKLPPSWRSFGTALKHKRQEYSVEGLIASLDVEEKAREKDAASKGDGGQSSANVVHKAQNKSKGKYKAQQTTNFKKQKKNNNNPNQDERTCFVCGQVGHLARKCPQRKGMKAPAGQTSKSANVTIGNTGDGSGYGNLPTVFSVNQSTNWWVDTGANVHVCADISLFSSYQVARGSTVLMGNGSHASVHGVGTVDLKFTSGKIVQLKNVQHVPSIDRNLVSGSRLTRDGFKLVFESNKVVVSKHGYFIGKGYECGGLFRFSLSDFCNKSVNHICGSVDDEANVWHSRLCHINFGLMSRLSSMCLIPKFSIVKGSKCHSCVQSKQPRKPHKAAEERNLAPLELLHSDLCEMNGVLTKGGKRYFMTLIDDATRFCYVYLLKTKDEALDYFKIYKAEVENQLDRKIKRLRSDRGGEFFSNEFDLFCEEHGIIHERTPPYSPESNGIAERKNRTLTDLVNAMLDTAGLPKAWWREALLTSNHVLNRVPNRNKDKTPYEIWIGRKPSLSYLRTWGCLAKVNVPITKKRKLGPKTVDCVFLGYAHHSIAYRFLIVKSEVPDMHVGTIMESRDATFFESFFPMKDTHSGSNQPSEIIPSSITPPEQTEHTHELVSEEDVSEAPRRSKRQRTAKSFGDDFTVYLVDDTPKSISEAYASPDADYWKEAVRSEMDSIIANGTWEVTERPYGCKPVGCKWVFKKKLRPDGTIEKYKARLVAKGYTQKEGEDFFDTYSPVARLTTIRVLLSLAASHGLLVHQMDVKTAFLNGELDEEIYMDQPDGFVVEGQEGKVCKLLKSLYGLKQAPKQWHEKFDKTLTSAGFAVNEADKCVYYRYGGGEGVILCLYVDDILIFGTNLEVINEVKSFLSQNFDMKDLGVADVILNIKLIRGENGITLLQSHYVEKILNRFGYIDSKPSPTPYDPSLLLRKNKRIARNQLEYSQIIGSLMYLASATRPDISFAVSKLSRFTSNPGDDHWRALERVMRYLKGTVELGLHYTGYPAVLEGYSDSNWISDVDEIKATSGYVFTLGGGAVSWRSCKQTILTRSTMEAELTALDTATVEAEWLRDLLMDLPVVEKPVPAILMNCDNQTTCEKTIEVCQEIKKLRSYNVGLHPNSEKPGRSLHEGTITKCDRQCIEGDGFETHSILEGTHLCELDCWSQSMKILGESSRKLTKDLGV

SEQ ID NO: 19932 - protein, 1296 aa, Oryza sativa
  Clone ID: TF_OSC401274j.C1.p11.fg
MAGFADALRPDKFTGVHFKRWQIRVTLWLTAMKCFWVSTGKPEGVLTAEQQKQFEEATTLFVGCILSILGDRLVEVYMHMTDAKELWDALNTKFGATDASNDLYIMEQFHDYKMADNRSVVEQAHEIQTMAKELELLKCVLPDKFVAGCIIAKLPPSWRSFGTALKHKRQEYSVEGLIASLDVEEKAREKDAASKGDGGQSSANVVHKAQNKSKGKYKAQQTTNFKKQKKNNNNPNQDERTCFVCGQVGHLARKCPQRKGMKAPAGQTSKSANVTIGNTGDGSGYGNLPTVFSVNQSTNWWVDTGANVHVCADISLFSSYQVARGSTVLMGNGSHASVHGVGTVDLKFTSGKIVQLKNVQHVPSIDRNLVSGSRLTRDGFKLVFESNKVVVSKHGYFIGKGYECGGLFRFSLSDFCSKSVNHICGSVDDEANVWHSRLCHINFGLMSRLSSMCLIPQFSIVKGSKCHSCVQSKQPRKPHKAAEERNLAPLELLHSDLCEMNRVLTKGGKRYFMTFIDDATRFCYVYLLKTKDEALDYFKIYKAEVENQLDRKIKRLRSDRGEEFFSNEFDLFCEEHGIIHEMTPPYSPESNGIAERKNRTLTDLVNAMLDTAGLPKAWWGEALLTSNHVLNRVPNRNKDKTPYEIWIGRKPSLSYLRTWGCLAKVNVPITKKRKLGPKTVDCVFLGYAHHSIAYRFLIVKSEVPDMHVGTIMESRDAIFFESFFPMKDTHSGSNQPSKIIPSSITPPEQTEHTHELVSEEDVSEAPRRSKRQRTAKSFDDDFTVYLVDDTPKSISEAYASPDADYWKEAVRSEMDSIIANGTWEVTERPYGCKPVGCKWVFKKKLRPDGTIENYKARLVAKGYTQKEGEDFFDTYSPVARLTTIRVLLSLAASHGLLVHQMDVKTAFLNGELDEEIYMDQPDGFVVEGQEGKVCKLLKSLYGLKQAPKQWHEKFDKTLTSAGFAVNEADKCVYYRHGGGEGVILCLYVDDILIFGTNLEVINEVKSFLSQNFDMKDLGVADVILNIKLIRGENGITLLQSHYVEKILNRFGYIDSKPSPTPYDPSLLLRKNKRIARNQLEYSQIIGSLMCLASATRPDISFAVSKLSRFTSNPGDDHWRALERVMRYLKGTVELGLHYTGYPAVLEGYSDSNWISDVDEIKATSGYVFTLGGGAVSWRSCKQTILTRSTMEAELTALDTATVEAEWLRDLLMDLPVVEKPVPAILMNCDNQTSILERTHLCELDCWSQSMKILGESSRKLTKDLEMKGTCVCAAEQRTQNTETHTRGMLRHRHSLK

SEQ ID NO: 19933 - protein, 1032 aa, Oryza sativa
  Clone ID: TF_OSC401369j.C1.p2.fg
MAGFADALRPDKFTGVHFKRWQIRVTLWLTAIKCFWVYMHMTDAKELWDALNTKFGATDGSNDLYIMEQFHDYKMADNRSVVEQAHEIQTMAKELELLKCVLPDKFVAGCIIAKLPPSWRSFGTALKHKRQEYSVEGLIASLDVEEKAREKDAASKGDGGQSSANVVHKAQNKSKGKYKAQQTTNFKKQKKNNNNPNQDERTCFVCGQVGHLARKCPQRKGMKAPAGQTSKSANVTIGNTGDGSGYGNLPTVFSVNQSTNWWVDTGANVARGSTVLMGNGSHASVHGVGTVDLKFTSGKIVQLKNVQHVPSIDRNLVSGSRLTRDGFKLVFESNKVVVSKHGYFIGKGYECGGLFRFSLSDFCNKSVNHICGSVDDEANVWHSRLCHINFGLMSRLSSMCLIPKFSIVKGSKCHSCVQSKQPRKPHKAAEERNLAPLELLHSDLCEMNGVLTKGGKRYFMTLIDDATRFCYVYLLKTKDEALDYFKIYKAEVENQLDRKIKRLRSDRGGEFFSNEFDLFCEEHGIIHERTPPYSPESNGIAERKNRTLTDLWVFKKKLRPDGTIEKYKARLVAKGYTQKEGEDFFDTYSPVARLTTIRVLLSLAASHGLLVHQMDVKTAFLNGELDEEIYMDQPDGFVVEGQEGKVCKLLKSLYGLKQAPKQWHEKFDKTLTSAGFAVNEADKCVYYRHGGGEGVILCLYVDDILIFGTNLEVINEVKSFLSQNFDMKDLGVADVILNIKLIRGENEITLLQSHYVEKILNRFGYIDSKPSPTPYDPSLLLRKNKRIARNHLEYSQIIGSLMYLASATRPDISFAVSKLSRFTSNPGDDHWRALERVMRYLKGTVELGLHYTGYLAVLEGYSDSNWISDVDEIKATSGYVFTLGGGAVSWRFCKQTILTRSTMEAELTALDTATVEAERLRDLLMDLPVVEKPVPAILMNCDNQTVIVKVNSSKDNMKSSRHVKRRLKSVRKLRNSGVITLDYIQTARNLADPFTKGLSRNVIDNASKEMGLRPIAFLKELTFVSLTVGRSL

SEQ ID NO: 19934 - protein, 1378 aa, Oryza sativa
  Clone ID: TF_OSC401437j.C1.p27.gm
MRKANSHRRSFSRVTPLPIVFTLQAPPAGRVDDTAEAAGREQWGTPSMRRRRRRRTPATAPRGDPAGKAFLGGGGGGGKAAGKGRRADGRGQCAGDGGRSCAWAAGDGGARVAGGGAARGLPRQSPRWALRWHSGAGIGIGIDLRAALQSRSNLLAWSTAAEVDSRRDYSIPLAGVHRRSGEQVSGTSAFDVLHREKAAIRVTLWLTAMKCFWVSTGKPEGVLTAEQQKQFEEATTLFVGCILSVLGDRLVEVYMHMTDAKELWDALNTKFGTTDASNDLYIMEQFHDYKMADNRSVVEQAHEIQTMAKELELLKCVLPDKFVAGCIIAKLPPSWRSFGTALKHKRQEYSVEGLIASLDVEEKAREKDAASKGDGGQSSANVVHKAQNKSKGKYKAQQTTNFKKQKKNNNNPNQDERTCFVCGQVGHLARKCPQRKGMKAPAGQTSKSANVTIGNTGDGSGYGNLPTVARGSTVLMGNGSHASVHGVGTVDLKFTSEKIVQLKNMQHVPSIDRNLVSGSRLTRDGFKLVFESNKVVVSKHGYFIGKGYECGGLFRFSLSDFCNKSVNHICGSVDDEANVWHSQVENQLDRKIKRLRSDRGGEFFSNEFDLFCEEHGIIHERTPPYSPKSNGIAERKNRTLTDLVNAMLDTAGLPKACEAPRRSKRQRTAKSFGDDFTVYLVDDTPKSISEAYASPDADYWKEAVRSEMDSIIANGTWEVTERPYGCKPVGCKWVFKKKLRPDASHGLLVHQMDVKTAFLNGELDEEIYMYQPDGFVVEGFAVNEADKCVYYRHGGGEGVILCLYVDDILIFGTNLEVINESHYVEKILNRFGYIDNKPSPTPYDPSLLLRKNKRIARNQLEYSQIIGLLMYLASATRPDISFAVSKLSRFTSNPGDDHWRALERVMRYLKGTVELGLHYTGYPAVLEGYSDSNWISDVDEIKATSGYVFTLGGGAVSWSSQRRQRLVLASRRHRACTCFLPLRLPAPTRSSRLAAINKPTPTPAFPRLPAVMAPVLERPHGVAVLTAFLPPRRHRQADVGFVLGRSSPASPRLCHASPLRRRRPPPPPLSRRRPPPLPSRVGYLADKRIYHGGYRVSSLHFRYSPPTSSSWICQAVTWSPRRWMAEQTMNKALLGGDSLRTASRMSKGRMDNGGDDSASTGKLSPRRLHPHLPPVAAVSVFRSSLALDGSFVEAAPSSSTSPPPFPSSSPFALPLWSCHRRPSPLACADLVDRGDFNRAHHVAACRARRRRPLGRGYKEGHSGDEGMTKTKEAMAAPDRDSDMCDTCGSHAESAVTSDNTGVKTTEWPKVNGAAAAAHFARGRSEEAHGRAFGEWAYRCRVQELKAPLGSLVVALKSSNESTSVLFPAIVVQRMLPVP

SEQ ID NO: 19935 - protein, 1210 aa, Oryza sativa
  Clone ID: TF_OSC401487j.C1.p3.fg
MAGFADALRPDKFTGVHFKRWQIRVTLWLTAMKCFWVSTGKPEGVLTAEQQKQFEEATTLFVGCILSVLGDRLVEVYMHMTDAKELWDALNTKFGATDASNDLYIMEQFHDYKMADNRSVVEQAHEIQTMAKELELLKCVLPDKFVAGCIIAKLPPSWRSFGTALKHKRQEYSVEGLIASLDVEEKAREKDAASKGDGGQSSANVVHKAQNKSKGKYKAQQTTNFKKQKKNNNNPNQDERTCFVCGQVGHLARKCPQRKGMKAPAGQTSKSANVTIGNTGDGSGYGRTGFHRPNGEWVTCFCSWCWHGRSEVYFGKDRAAEERAACPFYRQESCYECGGLFRFSLSDFCNKSVNHICGSVDDEANVWHSRLCHINFGLMSRLSSMCLIPKFSIVKGSKCHSCVQSKQPRKPHKAAEERNLAPLELLHSDLCEMNGVLTKGGKRYFMTLIDDATRFCYVYLLKTKDEALDYFKIYKAEVENQLDRKIKRLRSDRGGEFFSNEFDLFCEEHGIIHERTPPYSPESNGIAERKNRTLTDLVNAMLDTAGLPKAWWGEALLTSNHVLNRVPNRNKDKTPYEIWIGRKPSLSYLRTWGCLAKVNVPITKKRKLGPKTVDCVFLGYAHHSIAYRFLIVKSEVPDMHVGTIMESRDATFFESFFPMKDTHSGSNQPSEIIPSSITPPEQTEHTHELVSEEDVSEAPRRSKRQRTAKSFGDDFTVYLVDDTPKSISEAYASPDADYWKEAVRSEMDSIIANGTWEVTERPYGCKPVGCKWVFKKKLRPDASHGLLVHQMDVKTAFLNGELDEEIYMDQPDGFVVEGQEGKVCKLLKSLYGLKQAPKQWHEKFDKTLTSAGFAVNEADKCVYYRHGGGEGVILCLYVDDILIFGTNLEVINEVKSFLSQNFDMKDLGVADVILNIKLIRGENGITLLQSHYVEKILNRFGYIDSKPSPTPYDPSLLLRKNKRIARNQLEYSQIIGSLMYLASATRPDISFAVSKLSRFTSNPGDDHWRALERVMRYLKGTVELGLHYTGYPAVLEGYSDSNWISDVDEIKATSGYVFTLGGGAVSWRSCKQTILTRSTMEAELTALDTATVEAEWLRDLLMDLPVVEKPVPAILMNCDNQTTCEKTIEVCQEIKKLRSYNVGLHPNSEKPGRSLHEGTITKCDRQCIEGDGFETHSILEGTHLCELDCWSQSMKILGESSRKLTKDLGV

SEQ ID NO: 19936 - protein, 1152 aa, Oryza sativa
  Clone ID: TF_OSC401546j.C1.p23.fg
MAGFADALRPDKLTGVHFKRWQIRVTLWLTAMKCFWVSTGKPEGVLTAEQQKQFEEATTLFVGCILSVLGDRLVEVYMHMTDAKELWDALNTKFGATDASNDLYIMEQFHDYKMADNRSVVEQAHEIQTMARELELLKCVLPDKFVAGCIIAKLPPSWRSFGTALKHKRQEYSVEGLIASLDVEEKAREKDAASKGDGGQSSANVVHKAQNKSKGKYKAQQTTNFKKQKKNNNNPNQNERTCFVCGQVGHLARKCPQRKGMKAPAGQTSKSANVTIGNTGHGSGYGNLPTVFSVNQSTNWWVDTGANVHVCADISLFSSYQVARGSTVLIGNGSHASVHGVGTVDLKFTSGKIVQLKNMQHVPSIDRNLVSGSRLTRDGFKLVFESNKVVVSKHVYFIGKGYECGGLFRFSLSDFCNKSVNHICGSVDDEANVWHSRLCHINFGLMSRLSSMCLIPKFSIVKGSKCHSCVQSKQPRKPHKAAEERNLAPLELLHSDLCEMNGVLTKGGKRYFMTLIDDATRFCYVYLLKTKDEALDYFKIYKAEVENQLDRKIKRLRSDRGGEFFSNEFDLFCEEHGIIHERTPPYSPESNGIAERKNRTLTDLVNAMLDTAGLPKAWWGEALLTSNHVLNIVPNRNKDKTPYEIWIGKKPPLSYLRTWGCLAKVNVPITKKRKLGPKTVDCVFLGYAHHSIAYRFLIVKSEVPDMHVGTIMESRDSIFFESFFPMKDTHSGSNQPSEIIPSPITPPEQTEHTHELVSEEDVSEAPRRSKRQRTAKSFDDDFTVYLVDDTPKSISEAYASPDADYWKEAVRSEMDSIIANGTWEVTERPYGCKPVGCKWVFKKKLRPDGTIEKYKARLVAKGYTQKEGEYFFDTYSPVARLTTIRVLLSLAASHGLLVHQMDVKTAFLNGELDEEIYMDQPDGFVVEGQEGKVCKLLKSLYGLKQAPKQWHEKFDKTLTSAGFAVNEADKCVYYRHGGGEGVILCLYVDDILIFGTNLEVINEVKSFLSQNFDMKDLGVADVILNIKLIRGENGITLLQSHYVEKILNRFGYIDSKPSPTPYDPSLLLRKNKRIARNQLEYSQIIGSLMYLASATRPDISFAVSKLSRFTSNPGDDHWRALERVMRYLKGTVELGLHYTGYPAVLEGYSDSN

SEQ ID NO: 19937 - protein, 1196 aa, Oryza sativa
  Clone ID: TF_OSC401589j.C1.p1.fg
MRLCLDSIVCLFAKRTSRRGVDGMEQRTSIANVLLDYSCSKVLSTPSVSRFKYALYFWAEEKAREKDAASKGDGGQSSANVVHKTQNKSKGKYKAQQTTNFKKKKKNNNNPNQDERTCFVCGQVGHLARKCPQRKGMKAPAGQTSKSANVTIGNTGDGSGYGNLPTVFSVNQSTNWWVDTGTNVHVCADISLFSSYQVARGSTVLMGNGSHASVHGVGMVDLKFTSGKIVQLKNVQHVPSIDRNLVSGSRLTRDGFKLVFESNKVVVSKHGYFIGKGYECGGLFRFSLSDFCNKSVNHICGSVDDEANVWHSRLCHINFGLMSRLSSMCLIPKLSIVKGSKCHSCVQSKQPRKPHKAAEERNLAPLELLHSDLCEMNGVLTKGGKRYFMTLIDDATRFCYVYLLKTKDEALDYFKIYKAEVENQLDRKIKRLRSDRGGEFFSNEFDLFCEEHGIIHERTPPYSLESNGIAERKNRTLTDLVNAMLDTAGLPKAWWGEALLTSNHVLNRVPNRNKDKTPYEIWIGRKLSLSYLRTWGCLAKVNVPITKKRKLGPKTVDCVFLGYAHHSIAYRFLIVKSEVPDMHVGTIMESRDATFFESFFPMKDTHSGSNQPSEIILSSITPPEQTEHTHELVSEEDVSEAPRRSKRQRMAKSFGDDFTVYLVDDTPKSISEAYASPDADYWKEAVRSEMDSIIANGTWEVTERPYGCKPVGCKWVFKKKLRPDGTIEKYKARLVAKGYTQKEGEDFFDTYSPVARLTTIRVLLSLAASHGLLVHQMDVKTAFLNGELDEEIYMYQPDGFVVEGQEGKVCKLLKSLYGLKQAPKQWHEKFDKTLTSAGFAVNEADKCVYYRHGGGEGVILCLYVDDILIFGTNLEVINEVKSFLSQNFDMKDLGVADVILNIKLIRGENGITLLQSHYVEKILNRFGYIDSKPFPTPYDPSLLLRKNKRIARNQLEYSQIIGSLMYLASATRPDISFAVSKLSRFTSNPGDDHWRALERVMRYLKGTVELGLHYTGYPTVLEGYSDSNWISDVDEIKATSGYVFTLGGGAVSWRSCKQTILTRSTMEAELTALDTATVEAEWLRDLLMDLPVVEKPVPAILMNCDNQTTCEKTIEVCQEIKKLRSYNVGLHPNSEKPGRSLHEGTITKCDRQCIEGDGFETHSILERTHLCELDCWSQSMKILGESSRKLTKDLGV

SEQ ID NO: 19938 - protein, 1320 aa, Oryza sativa
  Clone ID: TF_OSC401620j.C1.p13.fg
MAGFADALRPDKFTGVHFKRWQIRVTLWLTAMKCFWVSTGKPEGVLTAEQQKQFEEATTLFVGCILSILGDRLVEVYMHMTDAKELWDALNTKFGATDASNDLYIMEQFHDYKMADNRSVVEQAHEIQTMAKELELLKCVLPDKFVAGCIIAKLPPSWRSFGTALKHKRQEYSVEGLIASLDVEEKAREKDAASKGDGGQSSANVVHKAQNKSKGKYKAQQTTNFKKQKKNNNNPNQDERTCFVCGQVGHLARKCPQRKGMKAPAGQTSKSANVTIGNTGDGSGYGNLPTVFSVNQSTNWWVDTGANVHVCADISLFSSYQVARGSTVLMGNGSHASVHGVGTVDLKFTSGKIVQLKNVQHVPSIDRNLVSGSRLTRDGFKLVFESNKVVVSKHGYFIGKGYECGGLFRFSLSDFCNKSVNHICGSVDDEANVWHSRLCHINFGLMSRLSSMCLIPKFSIVKGSKCHSCVQSKQPRKPHKAAEERNLAPLELLHSDLCEMNGVLTKGGKRYFMTLIDDATRFCYVYLLKTKDEALDYFKIYKAEVENQLDRKIKRLRSDRGGEFFSNEFDLFCEEHGIIHERTPPYSPESNGIAERKNRTLTDLVNAMLDTAGLPKAWWGEALLTSNHVLNRVPNRNKDKTPYEIWIGRKPSLSYLRTWGCLAKVNVPITKKRKLGPKTVDCVFLGYAHHSIAYRFLIVKSEVPDMHVGTIMESRDATFFESFFPMKDTHSGSNQPSEIIPNSITPPEQTEHTHELVSEEDVSEAPRRSKRQRTAKSFGDDFTVYLVDDTPKSISEAYASPDADYWKEAVRSEMDSIIANGTWEVTERPYGCKPVGCKWVFKKKLRPDGTIEKYKARLVAKGYTQKEGEDFFDTYSPVARLTTIRVLLSLAASHGLLVHQMDVKTAFLNGELDKEIYMDQPDGFVVEGQEGKVCKLLKSLYGLKQAPKQWHEKFDKTLTSAGFAVNEADKCVYYRHGGGEGVILCLYVDDILIFGTNLEVINEVKSFLSQNFDMKDLGVADVILNIKLIRGENGITLLQSHYVEKILNRFGYIDSKPSPTPYDPSLLLRKNKRIARNQLEYSQIIGSLMYLASATRPDISFAMSKLSRFTSNPGDDHWRALERVMRYLKGTVELGLHYTGYPAVLEGYSDSNWISDVDEIKATSGYVFTLGGGAVSWRSCKQTILTRSTMEAELTALDTATVEAEWLRDLLMDLPVVEKPVPAILMNCDNQTTCEKTIEVCQEIKKLRSYNVGLHPNSEKPGRSLHEGTITKCDRQCIEGDGFETHSILEGTHLCELDCWSQSMKILGESSRKLTKDLGV

SEQ ID NO: 19939 - protein, 1228 aa, Oryza sativa
  Clone ID: TF_OSC401828j.C1.p40.fg
MAGFADALRPDKFTGVHFKRWQIRVTLWLTAMKCFWVSTGKPEGVLTAEQQKQFEEATTLFVGCILSVLGDRLVEVYMHMTDAKELWDALNTKFGATDASNDLYIMEQFHDYKMADNRSVVEQAHEIQTMAKELELLKCVLPDKFVAGCIIAKLPPSWRSFGTALKHKRQEYSVEGLIASLDVEEKAREKDAASKGDGGQSSANVVHKAQNKSKGKYKAQQTTNFKKQKKNNNNPNQDERTCFVCGQVGHLARKCPQRKGMKAPAGQTSKSANVTIGNTGDGSGYGNLPTVFSVNQSTNWWVDTGANVHVCADISLFSSYQVARGSTVLMGNGSHASVHGVGTVDLKFTLGKIVQLKNVQHVPSIDRNLVSGSRLTRDGFKLVFESNKVVVSKHGYFIGKGYECGGLFRFSLSDFCNKSVNHICGSVDDEANVWHSRLCHINFGLMSRLSSMCLIPKFSIVKGSKCHSCVQSKQPRKPHKAAEERNLAPLELLHSDLCEMNGVLTKGGKRYFMTLIDDATRFCYVYLLKTKDEALDYFKIYKAEVENQLDRKIKRLRSDRGGEFFSNEFDLFCEEHGIIHERTPPYSPESNGIAKRKNRTLTDLVNAMLDTAGLPKAWWGEALLTSNHVLNRVPNRNKDKTPYEIWIGRKPSLSYLRTWGCLAKVNVPITKKRKLGPKTVDCVFLGYAHHSIAYRFLIVKSEVPDMHVGTIMESRDATFFESFFPMKDTHSGSNQPSEIIPSSITPPEQTEHTHELVSEEDVSEAPRRSKRQRTAKSFGDDFTVYLVDDTPKSISEAYASPDADYWKEAVRSEMDSIIANGTWEVTERPYGCKPVGCKWVFKKKLRPDGTIEKYKARLVAKGYTQKEGEDFFDTYSPVARLTTIRVLLSLAASHGLLVHQMDVKTAFLNGELDEEIYMDQPDGFVVEGQEGKVCKLLKSLYGLKQAPKQWHEKFDKTLTSAGFAVNEADKCVYYRHGGGEGVILCLYVDDILIFGTNLEVINEVKSFLSQNFDMKDLGVADVILNIKLIRGENGITLLQSHYVEKILNRFGYIDSKPSPTPYDPSLLLRKNKRIARNQLEYSQIIGSLMYLASATRPDISFAVSKLSRFTSNPGDDHWRALERVMRYLKGTVELGLHYTGYPAVLEGYSDSNWISDVDEIKATSGYVFTLGGGAVSWRSCKQTILTRSTMEAELTALDTATVEAEWLRDLLMDLPVVEKTGAGYPYEL

SEQ ID NO: 19940 - protein, 1170 aa, Oryza sativa
  Clone ID: TF_OSC401831j.C1.p15.gm
MGSALYPLGEMRRSQRADGLAAVLAIGTANPPNCVTQEEFPDFYFRVTNSDHLTALKDKFKRICQEMGVQRRYLHHTEEMLSAHPEFVDRDAPSLDARLDIAADAVPELAAEAAKKAIAEWGRPAADITHLVVTTNSGAHVPGVDFRLVPLLGLRPSVRRTMLHLNGCFAGCAALRLAKDLAENSRGARVLVVAAELTLMYFTGPDEGCFRTLLVQGLFGDGAAAVIVGADADDVERPLFEIVSAAQTIIPESDHALNMRFTERRLDGVLGRQVPGLIGDNVERCLLDMFGPLLGGDGGGGWNDLFWAVHPGSSTIMDQVDAALGLEPGKLAASRRVLSDYGNMSGATVIFALDELRRQRKEAAAAGEWPELGVMMAFGPGMTVDAMLLHATSHGDGGLLDFLDMWNIKAVARTSPKMHGGKTLGNYSIPLAGVHQRSGEQVSGTSAFDVLHREKAAIRHCDFTMAGFADALRPDKFTGVHFKRWQIRVTLWLTAMKCFWVSTGKPEGVLTAEQQKQFEEATTLFVGCIVSVLGDRLVEVYMHMTDAKELWDALNTKFGATDASNDLYIMEQFHDYKMADNRSVVEQAHEIQTMDKELELLKCVLPDKFVAGCIIAKLPPSWRSFGTALKHKRQEYSVEGLIASLDVEEKAREKDAASKGDGGQSSANVVHKAQNKSKGKYKAQQTTNFKKQKKNNNNPNQDERTCFVCGQVGHLARKCPQRKGMKAPAGQTSKSANVTIGNTGDGSGYGNLPTVARGSTVLMGNGSHASVHGVGTVDLKFTSGKIVQLKNVQHVPSIDRNLDTHSGSNQPSEIIPSSITPPEQTEHTHELVSEEDVSEAPRRSKRQRTAKSFGDDFTVYLVDDTPKSISEAYASPDADYWKEAVRSEMDSIIANGTWESHYVEKILNRFGYIDSKPSPTPYDPSLLLRKNKRIARNQLEYSQIIGSLMYLASATRPDISFAVSKLSRFTSNPGDDHWRALERVMRYLKGTVELGLHYTGYPAVLEGYSDSNWISDVDEIKATSGYVFTLGGGAVSWRSCKQTILTRSTMEAELTALDTAIVEAEWLRDLLMDLPVVEKPVPAILMNCDNQTEIKKLRSYNVGLHPNSEKPGRSLHEGTITKCDRQCIEGDGFETHSILEGTHLCELDCWSQSMKILGESSRKLTKDLGV

SEQ ID NO: 19941 - protein, 1394 aa, Oryza sativa
  Clone ID: TF_OSC401876j.C1.p5.fg
MQPPFAVLFCCKFGFVFVLETFRKIRSNDAFMLVFICNVMIYLWNRLNHYMSIISTIQKPYYRHCDFTLAGFADALRPDKFTGVHFKRWQIRVTLWLTVMKCFWVSTGKPEGVLTAEQQKQFEEATTLFVGCILSVLGDRLVEVYMHMTDAKELWDALNTKFGATDASNDLYIMEQFHDYKMADNRSVVEQAHEIQTMAKELELLKCVLPDKFVAGCIIAKLPPSWRSFGTALKHKRQEYSVEGLIASLDVEEKAREKDAASKGDGGQSSANVVHKAQNKSKGKYKAQQTTNFKKQKKNNNNPNQDERTCFVCGQVGHLARKCPQRKGMKAPAGQTSKSANVTIGNTGDGSGYGNLPAVFSVNQSTNWWVDTGANVHVCADISLFSSYQVARGSTVLMGNGSHASVHGVGTVDLKFTSGKIVQLKNVQHVPSIDRNLVSGSRLTRDGFKLVFESNKVVVSKHGYFIGKGYECGGLFRFSLSDFCNKSVNHICGSVDDEANVWHSRLCHINFGLMSRLSSMCLIPKFSIVKGSKCHSCVQSKQPRKPHKAAEERNLAPLELLHSDLCEMNGVLTKGGKRYFMTFIDDATRFCYVYLLKTKDEALDYFKIYKAEVENQLDRKIKRLRSDRGGEFFSNEFDLFCEEHGIIHEMTPPYSPESNGIAERKNRTLTDLVNAMLDTAGLPKAWWGEALLTSNHVLNRVPNRNKDKTPYEIWIGRKPSLSYLRTWGCLAKVNVPITKKRKLGPKTVDCVFLGYAHHSIAYRFLIVKSEVPDMHVGTIMESRDAIFFESFFPMKDTHSGSNQPSEIIPSSITPPEQTEHTHELVSEEDVSEAPRRSKRQRTAKSFGDDFTVYLVDDTPKSISEAYASPDADYWKEAVRSEMDSIIANGTWEVTERPYGCKPVGCKWVFKKKLRPDGTIEKYKARLVAKGYTQKEGEDFFDTYSPVARLTTIRVLLSLAASHGLLVHQMDVKTAFLNGELDEEIYMDQPDGFVVEGQEGKVCKLLKSLYGLKQAPKQWHEKFDKTLTSAGFAVNEADKCVYYRHGGGEGVILCLYVDDILIFGTNLEVINEVKSFLSQNFDMKDLGVADVILNIKLIRGENGITLLQSHYVEKILNRFGYIDSKPSPTPYKPSLLLRKNKRIARNQLEYSQIIGSLMYLASATRTDISFAVSKLSRFTFNPGDDHWRALERVMRYLKGTVELGLHYTGYPAVLEGYSDSNWISDVDEIKATSGYVFTLGGGAVSWRSCKQTILTRSTMEAELTALDTATVEAEWLRDLLMDLPVVEKPVPAILMNCDNQTTCEKTIEVCQEIKKLRSYNVGLHPNSEKPGRSLHEGTITKCDRQCIEGDGFETHMSYTMVSILERTHLCELDCWSQSMKILGESSRKLTKDLGV

SEQ ID NO: 19942 - protein, 1312 aa, Oryza sativa
  Clone ID: TF_OSC402429j.C1.p11.fg
MAGFADALRPDKFTGVHFKRWQIRVTLWLTAMKCFWVSTGKPEGVLTAEQQKQFEEATTLFVGCILSVLGDRLVEVYMHMTDAKELWDALNTKFGATDASNDLYIMEQFHDYKMADNRSVVEQAHEIQTMAKELELLKCVLPDKFVAGCIIAKLPPSWRSFGTALKHKRQEYSVEGLIASLDVEEKAREKDAASKGDGGQSSANVVHKAQNKSKGKYKAQQTTNFKKQKKNNNNPNQDERTCFVCGQVGHLARKCPQRKGMKAPAGQTSKSANVTIGNTGDGSGYGNLPTVFSVNQSTNWWVDTGANVHVCADISLFSSYQVARGSTVLMGNGSHASVHGVGTVDLKFTSGKIVQLKNVQHVPSIDRNLVSGSRLTRDGFKLVFESNKVVVSKHGYFIGKGYECGGLFRFSLSDFCNKSVNHICGSVDDEANVWHSRLCHINFGLMSRLSSMCLIPKFSIVKSSKCHSCVQSKQPRKPHKAAKERNLAPLELLHSDLCEMNGVLTKGGKRYFMTLIDDATRFCYVYLLKTKDEALDYFKIYKAEIENQLDRKIKRLRSDRGGEFFSNEFDLFCEEHGIIHERTPPYSPESNGIAERKNRTLTDLVNAMLDTAGLPKAWWGEALLTSNHVLNRVPNRNKDKTPYEIWIGRKPSLSYLRTWGCLAKVNVPITKKRKLGPKTVDCVFLGYAHHSIAYRFLIVKSEVPDMHVGTIMESRDATFFESFFPMKDTHSGSNQPSEIIPSSITPSEQTEHTHELVSEEDVSEAPRRSKRQRTAKSFGDDFTVYLVDDTPKSISEAYASPDADYWKEAICSEMDSIIANGTWEVTERPYGCKPVGCKWVFKKKLRPDGTIEKYKARLVAKGYTQKEGEDFFDTYSPVARLTTIRVLLSLAASHGLLVHQMDVKTAFLNGELDEEIYMDQPDGFVVEGQEGKVCKLLKSLYGLKQAPKQWHEKFDKTLISAGFAVNEADKCVYYRHGGGEGVILCLYVDDILIFGTNLEVINEVKSFLSQNFDMKDLGVADVILNIKLIRGENGITLLQSHYVEKILNRFGYIDSKPSPTPYDPSLLLRKNKRIARNQLEYSQIIGSLMYLASATRPDISFAVSKLSRFTSNPGDDHWRALERVMRYLKGTVELGFHYTGYPAVLEGYSDSNWISDVDEIKATSGYVFTLGGGAVSWRSCKQTILTRSTMEAELTALDTATVEAEWLRDLLMDLPVVEKPVPAILMNCDNQTTCEKTIEVCQEIKKLRSYNVGLHPNSEKSGRSLHEGTITKCDRQCIEGDGFETHIKSLYVYNLNTNNQKKQPFLGTDITT

SEQ ID NO: 19943 - protein, 1320 aa, Oryza sativa
  Clone ID: TF_OSC402924j.C1.p5.fg
MAGFADALRPDKFTGVHFKRWQIRVTLWLTAMKCFWVSTGKPEEVLTAEQQKQFEEATTLFVGCILSVLGDRLVEVYMHMTDAKELWDALNTKFGATDASNDLYIMEQFHDYKMADNRSVVEQAHEIQTMAKELELLKCVLPDKFVAGCIIAKLPPSWRSFGTALKHKRQEYSVEGLIASLDVEEKAREKDAASKGDGGQSSANVVHKAQNKSNGKYKAQQTTNFKKQKKNNNNPNQDERTCFVCGQVGHLARKCPQRKGMKAPAGQTSKSANVTIGNTGDGSGYGNLPTVFSVNQSTNWWVDTGANVHVCADISLFSSYQVARGSTVLMGNGSHASVHGVGTVDLKFTSGKIVQLKNVQHVPSIDRNLVSGSRLTRDGFKLVFESNKVVVSKHGYFIGKGYEYGGLFRFSLSDFCNKSVNHICGTVDDEANVWHSRLCHINFGLMSRLSSMCLIPKFSIVKGSKCHSCVQSKQPRKPHKAAEERNLAPLELLHSDLCEMNGVLTKGGKRYFMTLIDDATRFCYVYLLKTKDEALDYFKIYKAEVENQLDRKIKRLRSDRGGEFFSNEFDLFCEEHGIIHERTPPYSPESNGIAERKNRTLTDLVNAMLDTAGLPKAWWGEALLTSNHVLNRVPNRNKDKTPYEIWIGRKPSLSYLRTWGCLVKVNVPITKKRKLGPKTVDCVFLGYAHHSIAYRFLIVKSEVPDMHVGTIMESRDATFFESFFPMKDTNSGSNQPSEIIPSSITPPEQTEHTHELVSEEDVSEAPRRSKRQRTAKSFGDDFTVYLVDDTPKSISEAYASPDADYWKEAVRSEMDSIIANGTWEVTERPYGCKPVGCKWVFKKKLRPDGTIEKYKARLVAKGYTQKEGEDFFDTYSPVARLTTIRVLLSLAASHGLLVHQMDVKTAFLNGELDEEIYMDQPDGFVVEGQEGKVCKLLKSLYGLKQAPKQWHEKFDKTLTSAGFAVNEADKCVYYRHGGGEGVILCLYVDDILIFGTNLEVINEVKSFLSQNFDMKDLGVADVILNIKLIRGENGITLLQSHYVEKILNRFGYIDSKPSPTPYDPSLLLRKNKRIARNQLEYSQIIGSLMYLASATRPDISFAVSKLSRFTSNPGDDHWRALERVMRYLKGTVELGLHYTGYPAVLEGYSDSNWISDVDEIKATSGYVFTLGGGAVSWRSCKQTILTRSTMEAELTALDTATVEAEWLRDLLMDLPVVEKPVPAILMNCDNQTTCEKTIEVCQEIKKLRSYNVGLHPNSEKPGRSLHEGTITKCDRQCIEGDGFETHSILERTHLCELDCWSQSMKILGESSRKLTKDLGV

SEQ ID NO: 19944 - protein, 1536 aa, Oryza sativa
  Clone ID: TF_OSC403329j.C1.p39.gm
MYWSVSSAVMWGRTYVRQRRARDVRRAAARARSSPRRAVSPPPATSSPPPAAAPPSSDSSSGASCPPGMGDPNDLKTSVEALTTAMKEMQASIAANAKAIAALSSGRTSSSGATTDSGEPRTVRPPRFQKMDFPRYDGKSDPLTFLNWCESYFHQQRIMDEEKVWMASYNLEDGAQLWYMQVQADEGKPSWRRFRELLVLRYGPPLRSAPLFELADCRRTTTVEDYQDHFQALLPRAGRLTKAQRVQLFTGGLLPPLSLKVQMQNPQSLVTAMSLARQFELMEQCTATLAKAPGHGILPTLGPRQAPPQPPAPRAASPPVLIDGRPVKRLSQAEQDERRRLGLCFNYYSIPLAGVHQRSGEQVSGTSAFDVLHREKAAIRHCDFTMAGFADALRPDKFTGVHFKRWQIRVTLWLTAMKCFWVSTGKPEGILTAEQQKQFEEATTLFVGCILSVLGDRLVEVYMHMTDAKELWDALNTKFGATDASNDLYIMEQFHDYKMADNRSVVEQAQEIQTMAKELELLKCVLPDKFVAGCIIAKLPPSWRSFGTALKHKRQEYSVEGLIASLDVEEKAREKDAASKGDGGQSSANVVHKAQNKSKGKYKAQQTTNFKKQKKNNNNPNQDERTCFVCGQVGHLARKCPQRKGMKAPAGQTSKSANVTIGNTGDGSGYGNLPTVARGSTVLMGNGSHASVHGVGTVDLKFTSGKIVQLKNVQHVPSIDRNLVSGSRLTRDGFKLVFESNKVVVSKHGYFIGKGYECGGLFRFSLSDFCNNMCLIPKFSIVKGSKCHSCVQSKQPRKPHKAAEERNLAPLELLHSDLCEMNGVLTKEVENQLDRKIKRLRSDRGGEFFSNEFDLFCEEHGIIHERTPPYSPESNGIAERKNRTLTDLVNAMLDTAGLPKACEAPRRSKRQRTAKSFGDDFTVYLVDDTPKSISEAYASPDADYWKEAVHSEMDSIIANGTWEVTERPYGCKPVGCKWVFKKKLRPDASHGLLVHQMDVKTAFLNGELDEEIYMDQPDGFVVEVNEADKCVYYRHGGGEGVILCLYVDDILIFGTNLEVINESHYVEKILNRFGYIDSKPSPTPYDPSLLLRKNKRIARNQLEYSQIIGSLMYLASATRPDISFAVSKLSRFTSNPGDDHWRALERVMRYLKGTVELWLHYTGYPAVLEGYSDSNWISDVDEIKATSGYVFTLGGGAVSWSKDVVLQSILEGTHLCELDCWSQSMKILDYSIPLAGVHQRSGEQVSGTSAFDVLHREKAAISRGHNKICKHLFLLDCAMDDDDDTDAAEEPQDLESPVFSLHAIAGVPVADTMQVQVTVGATTLTALLDSGSTHSFIAEEAACRTGLPVQPRPRMTATVANGEKVACPGVIRQAVLSIDGSLFTVDLFVIPLAGYDMVLGTQWMASLGPIVWDFTERTMSFQYHGRTICWAGVPSSPAPRIRVTTAASESLLDELLADFGDVFAEPKGLPLQHARDHTIVLKPDAPPVAVRPYRYPAAHKDELERQCAAMIEQGIVRRSDSAFSSPVLLIKKADGS

SEQ ID NO: 19945 - protein, 1320 aa, Oryza sativa
  Clone ID: TF_OSC404997j.C1.p16.fg
MAGFADALRPDKFTGVHFKRWQIRVTLWLTAMKCFWVSTGKPEGVLTAEQQKQFEEATTLFVGCILSVLGDCLVEVYMHMTDAKELWDALNTKFGATDASNDLYIMEEFHDYKMADNRSVVEQAHEIQTMAKELELLKCVLPDKFVAGCIIAKLPPSWRSFGTALKHKRQEYSVEGLIASLDVEEKAREKDAASKGDGGQSSANVVHKAQNKSKGKYKAQQTTNFKKQKKNNNNPNQDERTCFVCGQVGHLARKCPQRKGMKAPAGQTSKSANVTIGNTGDGSGYGNLPTVFSVNQSTNWWVDTGANVHVCADISLFSSYQVARGSTVLMGNGSHASVHGVGTVDLKFTSGKIVQLKNVQHVPSIDRNLVSGSRLTRDGFKLVFESNKVVVSKHGYFIGKGYECGGLFRFSLSDFCNKSVNHICGSVDDEANVWHSRLCHINFGLMSRLSSMCLIPKFSIVKGSKCHSCVQSKQPRKPHKAAEERNLAPLELLHSDLCEMNGVLTKGGKRYFMTLIDDATRFCYVYLLKTKDEALDYFKIYKAEVENQLDRKIKRLRSDRGGEFFSNEFDLFCEEHGIIHERTPPYSPESNGIAERKNRTLTDLVNAMLDTAGLPKAWWGEALLTSNHVLNRVPNRNKDKTPYEIWIGRKPSLSYLRTWGCLAKVNVPITKKRKLGPKTVDCVFLGYAHHSIAYRFLIVKSEVPDMHVGTIMESRDATFFESFFPMKDTHSGSNQPSEIIPSSITPPEQTEHTHELVSEEDVSEAPRRSKRQRTAKSFGDDFTVYLVDDTPKSISEAYASPDADYWKEAVRSEMDSIIANGTWEVTERPYGCKPVGCKWVFKKKLRPDGTIEKYKARLVAKGYTQKEGEDFFDTYSPVARLTTIRVLLSLAASHGLLVHQMDVKTAFLNGELDEEIYMDQPDGFVVEGQEGKVCKLLKSLYGLKQAPKQWHEKFDKTLTSAGFAVNEADKCVYYRHGGGEGVILCLYVDDILIFGTNLEVINEVKSFLSQNFDMKDLGVADVILNIKLIRCENGITLLQSHYVEKILNRFGYIDSKPSPTPYDPSLLLRKNKRIARNQLEYSQIIGSLMYLASATRPDISFAVSKLSRFTSNPGDDHWRALERVMRYLKGTVELGLHYTGYPAVLEGYSDSNWISDVDEIKATSGYVFTLGGGAVSWRSCKQTILTRSTMEAELTALDTATVEAEWLRDLLMDLPVVEKPVPAILMNCDNQTTCEKTIEVCQEIKKLRSYNVGLHPNSEKPGRSLHEGTITKCDRQCIEGDGFETHSILERTHLCELDCWSQSMKILGESSRKLTKDLGV

SEQ ID NO: 19946 - protein, 1518 aa, Oryza sativa
  Clone ID: TF_OSC405015j.C1.p1.fg
MADSTARTVKDVNPHEFVKAYSAHLKRSGKMELPEWVDIVKTARFKELPPYDPDWYYTRAASIARKIYLRQGIGVGGFQKIYGGRQRNGSRPPHFCKSSGAISRNILQQLQKMGIIDVDPKGGRLITSQGRRDLDQVAGRVDESIRDRKVEATGQQSQTLDSTWTAKMHPNALPSNDAFMLVFICNVMIYLWNKLNHYMPIISTIQKPYYRHCDFTMAGFADALRPDKFTGVHFKRWQIRVTLWLTAMKCFWVSTGKPEGVLTAEQQKQFEEATTLFVGCILSVLGDRLVEVYMHMTDAKELWDALNTKFGATDASNDLYIMEQFHDYKMADNRSVVEQAHEIQTMAKELELLKCVLPDKFVAGCIIAKLPPSWRSFGTALKHKRQEYSVEGLIASLDVEEKAREKDAASKGDGGQSSANVVHKAQNKSKGKYKAQQTTNFKKQKKNNNNPNQDERTCFVCGQVGHLARKCPQRKGMKAPAGQTSKSANVTIGNTGDGSGYGNLPTVFSVNQSTNWWVDTRANVHVCADISLFSSYQVARGSTVLMGNGSHASVHGVGTVDLKFTSGKIVQLKNVQHVPSIDRNLVSGSRLTRDGFKLVFESNKVVVSKHGYFIGKGYECGGLFRFSLSDFCNKSVNHICGSVDDEANVWHSRLCHINFGLMSRLSSMCLIPKFSIVKGSKCHSCVQSKQPRKPHKAAEERNLAPLELLHSDLCEMNGVLTKGGKRYFMTLIDDATRFCYVYLLKTKDEALDYFKIYKAEVENQLDRKIKRLRSDRGGEFFSNEFDLFCEEHGIIHERTPPYSPESNGIAERKNRTLTDLVNAMLDTAGLPKAWWGEALLTSNHVLNRVPNRNKDKTPYEIWIGRKPLLSYLRTWGCLAKVNVPITKKRKLGPKTVDCVFLGYAHHSIAYRFLIVKSEVPDMHVGTIMESRDATFFESFFPMKDTHSGSNQPSEIIPSSITPPEQTEHTHELVSEEDVSEAPRRSKRQRTAKSFGDDFTVYLVDDTPKSISEAYASPDADYWKEAVRSEMDSIIANGTWEVTERPYGCKPVGCKWVFKKKLRPDGTIEKYKARLVAKGYTQKEGEDFFDTYSPVARLTTIRVLLSLAASHGLLVHQMDVKTAFLNGELDEEIYMDQPDGFVVEGQEGKVCKLLKSLYGLKQAPKQWHEKFDKTLTSAGFAVNEADKCVYYRHGGGEGVILCLYVDDILIFGTNLEVINEVKSFLSQNFDMKDLGVADVILNIKLIRGENGITLLQSHYVEKILNRFGYIDSKPSPTPYDPSLLLRKNKRIARNQLEYSQIIGSLMYLASATRPDISFAVSKLSRFTSNPGDDHWRALERVMRYLKGTVELGLHYTGYPAVLEGYSDSNWISDVDEIKATSGYVFTLGGGAVSWRSCKQTILTRSTMEAELTALDTATVEAEWLRDLLMDLPVVEKPVPAILMNCDNQTVIVKVNSSKDNMKSSRHVKRRLKSVRKLRNSGVITLDYIQTARNLADPFTKGLSRNVIDNASKEMGLRPM

SEQ ID NO: 19947 - protein, 786 aa, Oryza sativa
  Clone ID: TF_OSC405836j.C1.p5.gm
MSNQADKKLLLRLLPQHYHHHLKPKANDYSIPLAGVHRRSGEQVSRTFAFDVLHREKAAIRHCDFTMAGFSDALRPDKFTGVHFKRWQIRVTLWLTAMKCFWVSTGKPEGVLTAEQQKQFEEATTLFVGCILSVLGDRLVEVYMHMTDAKELWDALNTKFGATDASNDLYIMEQFHDYKMADNRSVVEQAHEIQTMAKELELLKCVLPDKFVAGCIIAKLPPSWRSFGTALKHKRQEYSVEGLIASLDVEEKAREKDAASKGDGGQSSANVVHKAQNKSKGKYKAQQTTNFKKQKKNKNNPNQDERTCFVCGQVGHLARKCPQRKGMKAPAGQTSKSANVTIGNTGDGSGYGNLPTVARGSTVLMGNGSHASVHGVGTVYLKFTSGKIVQLKNVQHVPSIDRNLVSGSRLTRDGFKLVFESNKVVVSKHGYFIGKGYECGCLFRFSLSDFCNKSVNHICGSVDDEANVWHSHYWKEAVHSEMDSIIANGTWEVTERPYGCKPVGCKWVFKKKLRPDDTIEKYKARLVAKGYTQKEGEDFFDTYSPVARLTTIRVLLSLAASHGLLVHQMDVKTAFLNGELDEEIYMDQPDGFVVEGFAVNEADKCVYYRHGGGEGVILCLYVDDILIFGTNLEVINESHYVEKILNRFGYIDSKPSPTPYDPSLLLRKNKRIARNQLEYSQIIGSLMYLASATRPDISFAVSKLSRFTSNPGDDHWRALERVMRYLKDYSIPLAGVHRRSGEQVSGTSAFDVLHREKAAISPPRSTPCRSSSPAAASYVIHASCRS

SEQ ID NO: 19948 - protein, 604 aa, Oryza sativa
  Clone ID: TF_OSC407908j.C1.p8.fg
MWDALEAKFGVFDAGSELYVIEQFYDYKMVDDHSIVEQAHEIQMLAKELENNNCKLLDKFVAGGIIAKLPPSWLDFATSLKHKRQEFSVSDLIGSLGVEEKARAKDKAKRLREKVKPDVKPKAATNFKKKGKGKAKGSCFVCGKSGHWAKDCPERKDKKSSNMVISEGGGTSGYGKILPTVLSVFHSPDWWVDTGANIHVGRGSSLLMGNGSLAAVHGVGSKCHTCVQSKQPRKPHKASEHKEMTPFEEWERKKLNLSYLRIWGCLAKSRDATFFENEFPMKHTPSTSSQETVMPHEHFAPIEHNDQTPEENPEEDNIVDTRKSKRQRVAKSFGDDYIVYLVDDTPRTIEEAYSSPDADYWKEAVRSEMDSIMSNGTWEVVERPYGCKPVGCKWVFKKKLRPDGTIEKYKARLVAKGYTQKEGEDFFDTYSPVARLTTIRVLLALAASHGFLVHQMDVKTAFLNGELEEEIYMDQPDGYVLEGQEGMVCKLLKSLYGLKQAPKQWHEKFDTTLTSVGFVVNEADKCVYYRYGGGEGVILCLYVDDILIFGTSLNVIEEVKDYLSKSFEMKDLGEADVILKGKVHFTPSNFYVCLKCTPKLQNRI

SEQ ID NO: 19949 - protein, 1241 aa, Oryza sativa
  Clone ID: TF_OSC408072j.C1.p12.fg
MAGFADALRPDKFTGVHFKRWQIRVTLWLTAMKCFWVSTGKPEGVLTAEQQKQFEEATTLFVGCILSVLGDRLVEVYMHMTDAKELWDALNTKFGATDASNDLYIMEQFHDYKMADNRSVVEQAHEIQTMAKELELLKCVLPDKFVAGCIIAKLPPSWRSFGTALKHKRQEYSVEGLIASLDVEEKAREKDAASKGDGGQSSANVVHKAQNKSKGKYKAQQTTNFKKQKKNNNNPNQDERTCFVCGQVGHLARKCPQRKGMKAPAGQTSKSAKVTIGNTGDGSGYGNLPTVFSVNQSTNWWVDTGANVYVCADISLFSSYQVARGSTVLMGNGSHASVHGVGTVDLKFTSGKIVQLKNVQHVPSIDRNLVSGSRLTRDGFKLVFESNKVVVSKHGYFIGKGYECGGLFRFSLSDFCNKSVNHICGSVDDEANVWHSRLCHINFGLMSRLSSMCLIPNFSIVKGSKCHSCVQSKQPRKPHKAAEERNLAPLELLHSDLCEMNGVLTKGGKRYFMTLIDDATRFCYVYLLKTKDEALDYFKIYKAEVENQLDRKIKRLRSDRGGEFFSNEFDLFCEEHGIIHERTPPYSPESNGIAERKNRTLTDLVNAMLDTAGLPKAWWGEALLTSNHVLNRVPNRNKDKTPYEIWIGRKPSLSYLRTWGCLAKVNVPITKKRKLGPKTVDCVFLGYAHHSIAYRFLIVKSEFITPPEQTEHTHELVSEEDVSEAPRRSKRQRTAKSFGDDFTVYLVDDTPKSISEAYASPDADYWKEVVHSEMDSIIANGTWEVTERPYGCKPVGCKWVFKKKLRPDGTIEKYKARLVAKGYTQKEGEDLFDTYSPVARLTTIRVLLSLAASHGLLVHQMDVKTAFLNGELDEEIYMYQPDGFVVEGQEGKVCKLLKSLYGLKQAPKQWHEKFDKTLTSAGFAVNEADKCVYYRHGGGEGVILCLYVDDILIFGTNLEVINEVKSFLSQNFDMKDLGVADVILNIKLIRGENGITLLQSHYVEKILNRLATLINKRIARNQLEYSQIIGSLMYLASATRPDISFAVSKLSRFTSNPGDDHWRAFERVMRYLKGTMELGLHYTGYPAVLEGYSDSNWISDVDEIKATSGYVFTLGGGAVSWRSCKQTILTRSTMEAELTALDTATVEAEWLRDLLMDLPVVEKPVPTILMNCDNQTTCEKTIEVCQEIKKLRSYNVGLHPNSEKPGRSLHEGTITKCDRQCIEGDGFETHVSYTMVVTQSM

SEQ ID NO: 19950 - protein, 1320 aa, Oryza sativa
  Clone ID: TF_OSC408663j.C1.p15.fg
MAGFADALRPDKFTGVHFKRWQIRVTLWLTAMKCFWVSTGKPEGVLTAEQQKQFEEATTLFVGCILSVLGDRLVEVYMHMTDAKELWDALNTKFGATDASNDLYIMEQFHDYKMADNRSVVEQAHEIQTMAKELELLKCVLPDKFVAGCIIAKLPPSWRSFGTALKHKRQEYSVEGLIASLDVEEKAREKDAASKGDGGQSSANVVHKAQNKSKGKYKAQQTTNFKKQKKNNNNPNQDERTCFVCGQVGHLARKCPQRKGMKAPAGQTSKSANVTIGNTGDGSGYGNLPTVFSVNQSTNWWVDTGANVHVCADISLFSSYQVARGSTVLMGNGSHASVHGVGTVDLKFTSGKIVQLKNVQHVPSIDRNLVSGSRLTRDGFKLVFESNKVVVSKHGYFIGKGYECGGLFRFSLSDFCNKSVNHICGSVDDEANVWHSRLCHINFGLMSRLSSMCLIPKFSIVKGSKCHSCVQSKQPRKPHKAAEERNLAPLELLHSDLCEMNGVLTKGGKRYFMTLIDDATRFCYVYLLKTKDEALDYFKIYKAEVENQLDRKIKRLRSDRGGEFFSNEFDLFCEEHGIIHERTPPYSPESNGIAERKNRTLTDLVNAMLDTAGLPKAWWGEALLTSNHVLNRVPNRNKDKTPYEIWIGRKPSLSYLRTWGCLAKVNVPITKKRKLGPKTVDCVFLGYAHHSIAYRFLIVKSEVPDMHVGTIMESRDATFFESFFPMKDTHSGSNQPSEIIPSSITPPEQTEHTHELVSEEDVSEAPRRSKRQRTAKSFGDDFTVYLVDDTPKSISEAYASPDADYWKEAVRSEMDSIIANGTWEVTERPYGCKPVGCKWVFKKKLRPDGTIEKYKARLVAKGYTQKEGEDFFDTYSPVARLTTIRVLLSLAASHGLLVHQMDVKTAFLNGELDEEIYMDQPDGFVLEGQEGKVCKLLKSLYGLKQAPKQWHEKFDKTLTSAGFAVNEADKCVYYHHGGGEGVILCLYVDDILIFGTNLEVINEVKSFLSQNFDMKDLGVADVILNIKLIRGENGITLLQSHYVEKILNRFGYIDSKPSPTPYDPSLSLRKNKRIARNQLEYSQIIGSLMYLASATRPDISFAVSKLSRFTSNPGDDHWRALERVMRYLKGTVELGLHYTGYPAVLEGYSDSNWISDVDEIKATSGYVFTLGGGAVSWRSCKQTILTRSTMEAELTALDTATVEAEWLRDLLMDLPVVEKPVPAILMNCDNQTTCEKTIEVCQEIKKLRSYNVGLHPNSEKPGRSLHEGTITKCDRQCIEGDGFETHSILEGTHLCELDCWSQSMKILGESSRKLTKDLGV

SEQ ID NO: 19951 - protein, 1409 aa, Oryza sativa
  Clone ID: TF_OSC409798j.C1.p5.fg
MQSRVCLLLCTAPSLVDYSIPLAGVHLRSGEQVSGTSAFDVLHREKAAIRSNDAFMLVFICNVMIYLWNKLNPYMPIISTIQKPYYRHCDFTMAGFADALRPDKFTGVHFKRWQIRVTLWLTAMKCFWVSTGKPEGVLTAEQQKQFEEATTLFVGCVLGDRLVEVYMHMTDAKELWDALNTKFGATDASNDLYIMEQFHDYKMADNRSVVEQAHEIQTMAKELELLKCVLPDKFVAGCIIAKLPPSWRSFGTALKHKRQEYSVEGLIASLDVEEKAREKDAASKGDGGQSSANVVHKAQNKSKGKYKAQQTTNFKKQKKNNNNPNQDERTCFVCGQVGHLARKCPQRKGMKAPAGQTSKSANVTIGNTGDGSGYGNLPTVFSVNQSTNWWVDTGANVHVCADISLFSSYQVARGSTVLMGNGSHASVHGVGTVDLKFTSGKIVQLKNVQHVPSIDRNLVSGSRLTRDGFKLVFESNKVVVSKHGYFIGKGYECGGLFRFSLSDFCNKSVNHICGSVDDEANVWHSRLCHINFGLMSRLSSMCLIPKFSIVKGSKCHSCVQSKQPRKPHKAAEERNLAPLELLHSDLCEMNGVLTKGGKRYFMTLIDDATRFCYVYLLKTKDEALDYFKIYKAEVENQLDRKIKRLRSDRGGEFFSNEFDLFCEEHGIIHERTPPYSPESNGIAERKNRTLTDLVNAMLDTAGLPKAWWGEALLTSNHVLNRIPNRNKDKTPYEIWIGRKPSLSYLRTWGCLAKVNVPITKKRKLGPKTVDCVFLGYAHHSIAYRFLIVKSEVPDMHVGTIMESRDATFFESFFPMKDTHSGSNQPSEIIPSSITPPEQTEHTHELVSEEDVSEAPRRSKRQRTAKSFGDDFTVYLVDDTPKSISEAYASPDADYWKEAVRSEMDSIIANGTWEVTERPYGCKPVGCKWVFKKKLRPDGTIEKYKARLVAKGYTQKEGEDFFDTYSPVARLTTIRVLLSLAASHGLLVHQMDVKTAFLNGELDEEIYMDQPDGFVVEGQEGKVCKLLKSLYGLKQAPKQWHEKFDKTLTSAGFAVNEADKCVYYRHGGGEGVILCLYVDDILIFGTNLEVINEVKSFLSQNFDMKDLGVADVILNIKLIRGENGITLLQSHYVEKILNRFGYIDSKPSPTPYDPSLLLRKNKRIARNQLEYSQIIGSLMYLASATRPDISFAVSKLSRFTSNPGDDHWRALERVMRYLKGTVELGLHYTGYPAVLEGYSDSNWISDVDEIKATSGYVFTLGGGAVSWRSCKQTILTRSTMEAELTALDTATVEAEWLRDLLMDLPVVEKPVPAILMNCDNQTTCEKTIEVCQEIKKLRSYNVGLHPNSEKPGRSLHKGTITKCDRQCIEGDGFETHSILEGTHLCELDCWSQSMKILGESSRKLTKDLGV

SEQ ID NO: 19952 - protein, 2830 aa, Oryza sativa
  Clone ID: TF_OSC409831j.C1.p21.gm
MPPPIVGNGRAKSGRLPLPPATIPVAVPAPPVAGSLPHPIKWDPHPPFSRFSPIPSLPVPSTSSTPRFRRNAIAANLYIRLAGVVRPPVPPRRAPVDHTSTTSGIAAASGVVLVVLVPVQPLPAVLVASSPVPVVVVVVVVILSSFPVVVAFVPPSSRSRSSSSLRQDRCSPVLVFVLGSASSSLVPAASRLRPRIAAEAVPSPFVSVVPVCLRRARSSLSFPRLVAWWANEGYTSCGPVVEMSYGGGLVPNARGSVLPACPGYPGRRAKEHALRENMTKIFCPCRHCKNQKLLVDPGEILGHIMEYGFTANYKVWTYHGEFANPEDDDEELSFEMNEAENFIIEDMSRERMIVDVSTDSDDFDGGFDLEDMLRHVEPEDRLKRLYSNPTDAELMRWHQESRKIDGMIRHPADARQWKTFDAKHPEFAKDPRNVRFALSTDGMNPFGDLSSSHSTWPVLLTMYNLPTWICQKRKYILLTILIQGPNQPGIDIDVFLEPLMEDMEELWKEGLRLWDEFKREHFNLRAIIFVTINDLPANFSLSGQIKGKTGCLICLEKTSYKYLTSSLKTVYMRHRRFLPQRHRYRKMARLFDNTVENDTAPVARGGTYVYEITKKIKVVYGKGKKKTVKRKKADGDNGTASPFKKHSIFFKYLDYWKDLEIRHAIDVMHLEKNVFDSTVGTLLDIPSPLQTFAVETVCQLEMYFPPSFLDMMEHLIVHIVPQIIELGPLYLHQMWAYERYMSILKGYVHNRAHPEGSMIEGYTTEEAVECCMDYIKDANAIGIPVHRHEGRLSGRGTVGRKQFFDNDYKKVSAAHNSVLQQLAIVEPFIERHLEEIKACFPGRSNDWISREHKRRFPLWLKDLNLPVGDSVEELTLQRLACGPSSIVNSWQGYDINGFTLSTTTKDMKSTSQNSGIRVEAIDTSGEKRSYYGTIQEIWELDYGLNIQIPVLRCEWVKDTIGVSVDDYGLTIVDHSKTGHKDDPWVLAERVAQVFYVKDPSDERKTIVISGKQQIVGIDNIEDPNDYNQFDDVPLFTDLPMRIKKVERTIDEANMSYVRADGVAKDLSPLAVAVAAARTSPPSPSPSPPAGRRRHCTELSPLAVAIPAARSSPPPSRPRYRRLLPEVAPPLAVADATARTSPPSPSPSPPHGPLPPRRCHRRRQVVAAARSSPPSLGASSEETWRTPSDPFPMEITQVAPRDDDPDYIPIEQAMVVRRRSKRKAGRNRTEQEVEMDTATSAPERTETSTSAGGSGKKRRGERSKNKLPKETYNVIALDQDGKPIEPPIVRSKFSNACGTLVRTRCPINVKLWETVDDNIKTLLWNELQKYFVFPPGSEADWDTFVADRTTAEALALRKKMSELAKKNKYPHRLGSSGYAGHVDQWREIEQRFAAAGKPLLVDPMVERSKNWVWARSTGQVSDEGDILFETPDIEEVTTNLQQIVEKERSGQFVPRRERDQLTAALGTAEHSGRVRGLSSKTSWKVGFPQDAPSYKKRDKYKEQLSDKIYAQVKEHFYSLAAENPTAFPRNSEKRKELAHVLSDSQKSVLAAQDEVQSWLSADVPETYEYGKPFLPTYLMNKLPWEMRVMHECMQFHEADRTGAKVGYVDPTRICKTQHTIELRQDCEQLVGKTPEEKEEYVKTLHKRKKLEVATYLAIAMLAHADKDVLMVPYQFTAHKYYRKRGGPVHIPSQKKLSVRTGWPIPEIPYIAQRFNHTTILNVAADLCRFIRRDVCNARGLFYDNQSVTPESASFADTGYDPPPKKWKGICQVGPSFEAISCNRKFIGARWYIDDEILSSISDNEVLSPRDVEGHGTHTASTAGGNIIHNVSFLGLAAGTVRGGAPRARLAIYKACWSGYGCSGATVLKAMDDAVYDGVDVLSLSIGGTKEDVGTLHVVANGISVVYAGGNDGPIAQTVENQSPWLVTVAATTIDRSLPVVITLGNGEKLVAQSFVLLETASQFSEIQKYTDEECNANNIMNSTVKGKIAFCFMGEMLNNKQQTSYPDVTTAVAAKGGRAPDIAAPGVSILAAAQIPYYKGVSYHFDSGTSMACPHVAGIIAVLKSIHPKWSPAALKSAIMTTDYSIPLAGVHQRSGEQVSGTSAFDVLHREKAAIRHCDFTMADFADALRPDKFTGVHFKRWQIRVTLWLTAMKCFWVSTGKPEGVLTAEQQKQFEEATTLFVGCILSVLGDRLVEEYSVEGLIASLDVEEKAREKDAASKGDGGQSSANVVHKAQNKSKGKYKAQQTTNFKKQKKNNNNPNQDERTCFVCGQVGHLARKCPQRKGMKAPAGQTSKSANVTIGNTGDGSGYGNLPTVARGSTVLMGNGSHASVHGVGTVDLKFTSGKIVQLKNVQHVPSIDRNLDTHSGSNQPSEIIPSSIIPPEQTEHTHELVSEEDVSEAPRRSKRQRTAKSFGDDFTVYLVDDTPKSISEAYASPDADYWKEAVRSEMDSIIANGTWEVTEQPYGCKPVGCKWVFKKKLRPDASHGLLVHQMDVKTAFLNGELDEEIYMDQPDGFVVEGFGVNEADKCVYYRHGGGEGVILCLYVDDILIFGTNLEVINESHYVEKILNRFGYIDSKPSPTPYDPSLLLRKNKRIARNQLEYSQIIGSLMYLASATRPDISFAVSKLSRFTSNPGDDHWRALERVMRYLKGTVELGLHYTGYPAVLEGYSDSNWISDVDEIKATSGYVFTLGGGAVSWRSCKQTILTRSTMEAELTALDTATVEAEWLRDLLMDLPVVEKPVPAILMNCDNQTEIKKLRSYNVGLHPNSEKPGRSLHEGTITKYYSMPLAGVHQRSGEQVSGTSAFDVLHREKAAIRHLRKVSTKQQI

SEQ ID NO: 19953 - protein, 1320 aa, Oryza sativa
  Clone ID: TF_OSC411700j.C1.p3.fg
MAGFADALRPDKFTAVHFKRWQIRVTLWLTAMKCFWVSTGKPEGVLTAEQQKQFEEATTLFVGCILSVLGDRLVEVYMHMTDAKELWDALNTKFGATDASNDLYIMEQFHDYKMADNRSVVEQAHEIQTMAKELELLKCVLPDKFVAGCIIAKLPPSWRSFGTALKHKRQEYSVEGLIASLDVEEKAREKDAASKGDGGQSSANVVHKAQNKSKGKYKAQQTTNFKKQKKNNNNPNQDERTCFVCGQVGHLARKCPQRKGMKAPAGQTSKSANVTIGNTGDGSGYGNLPTVFSVNQSTNWWVDTGANVHVCADISLFSSYQVARGSTVLMGNGSHASVHGVGTVDLKFTSGKIVQLKNVQHVPSIDRNLVSGSRLTRDGFKLVFESNKVVMSKHGYFIGKGYECGDLFRFSLSDFCNKSVNHICGSVDDEANVWHSRLCHINFGLMSRLSSMCLIPKFSIVKGSKCHSCVQSKQPRKPHKAAEERNLAPLELLHSDLCEMNGVLTKGGKRYFMTLIDDATRFCYVYLLKTKDDALDYFKIYKAEVENQLDRKIKRLRSDRGGEFFSNEFDLFCEEHGIIHERTPPYSPESNGIAERKNRTLTDLVNAMLDTAGLPKAWWGEALLTSNHVLNRVPNRNKDKTPYEIWIGRKPSLSYLRTWGCLAKVNVPITKKRKLGPKTVDCVFLGYAHHSIAYRFLIVKSEVPDMHVGTIMESRDSIFFESFFPMKDTHSGSNQPSEIIPSSITPPEQTEHTHELVSEEDVSEAPRRSKRQRTAKSFGDDFTVYLVDDTPKSISEAYASPDADYWKEAVRSEMDSIIANGTWEVTERLYGCKPVWCKWVFKKKLRPDGTIEKYKARLVAKGYTQKEGEDFFDTYSPVARLTTIRVLLSLAASHGLLVHQMDVKTAFLNGELDEEIYMDQPDGFVVEGQEGKVCKLFKSLYGLKQAPKQWHEKFDKTLTSAGFAVNEADKCVYYRHGGGEGVILCLYVDDILIFGTNLEVINEVKSFLSQNFDMRDLGVADVILNIKLIRGENGITLLQSHYVEKILNRFGYIDSKPSPTPYDPSLLLRKNKRIARNQLEYSQIIGSLMYLASATRPNISFAVSKLSRFTSNPGDDHWRALERVMRYLKGTVELRLHYTGCPAVLEGYSDSNWISDVDEIKATSGYVFTLGGGAVSWRSCKQTILTRSTMEAELTALDTATVEAEWLRDLLMDLPVVEKPVPAILMNCDNQTTCEKTIEVCQEIKKLRSYNVGLHPNSEKPGRSLHEGTITKCDRQCIEGDGFETHSILERTHLCELDCWSQSMKILGESSRKLTKDLGV

SEQ ID NO: 19954 - protein, 1320 aa, Oryza sativa
  Clone ID: TF_OSC412577j.C1.p22.fg
MAGFADALRPDKFTGVHFKRWQIRVTLWLTAMKCFWVSTGKPEGVLTAEQQKQFEEATTLFVGCILSVLGDRLVEVYMHMTDAKELWDALNTKFGATDASNDLYIMEQFHDYKMADNRSVVEQAHEIQTMAKELELLKCVLPDKFVAGCIIAKLPPSWRSFGTALKHKRQEYSVEGLIASLDVEEKAREKDAASKGDGGQSSANVVHKAQNKSKGKYKAQQTTNFKKQKKNNNNPNQDERTCFVCGQVGHLARKCPQRKGMKAPAGQTSKSANVTIGNTGDGSGYGNLPTVFSVNQSTNWWVDTGANVHVCADISLFSSYQVARGSTVLMGNGSHASVHGVGTVDLKFTSGKIVQLKNVQHVPSIDRNLVSGSRLTRDGFKLVFESNKVVVSKHGYFIGKGYECGGLFRFFLSDFCNKSVNHICGSVDDEANVWHSRLCHINFGLMSRLSSMCLIPKFSIVKGSKCYSCVQSKQPRKPHKAAEERNLAPLELLHSDLCEMNGVLTKGGKRYFMTLIDDATRFCYVYLLKTKDEALDYFKIYKAEVENQLDRKIKRLRSDRGGEFFSNEFDLFCEEHGIIHERTPPYSPESNGIAERKNRTLTDLVNAMLDTAGLPKAWWGEALLTSNHVLNRVPNRNKDKTPYEIWIGRKPSLSYLRTWGCLAKVNVPITKKRKLGPKTVDCVFLGYAHHSIAYRFLIVKSEVPDMHVGTIMESRDATFFESFFPMKDTHSGSNQPSEIIPSSITPPEQTEHTHELVSEEDVSEAPRRSKRQRTAKSFGDDFTVYLVDDTPKSISEAYASPDADYWKEAVRSEMDSIIANGTWEVTERPYGCKPVGCKWVFKKKLRPDGTIEKYKARLVAKGYTQKEGEDFFDTYSPVARLTTIRVLLSLAASHGLLVHQMDVKTAFLNGELDEEIYMDQPDGFVVEGQEGKVCKLLKSLYGLKQAPKQWHEKFDKTLTSAGFAVNEADKCVYYRHGGGEGVILCLYVDDILIFGTNLEVINEVKSFLSQNFDMKDLGVADVILNIKLIRGENGITLLQSHYVEKILNRFGYIDSKPSPTPYDPSLLLRKNKRIARNQLEYSQIIGSLMYLASATRPDISFAVSKLSRFTSNPGDDHWRALERVMRYLKGTVELGLHYTGYPAVLEGYSDSNWISDVDEIKATSGYVFTLGGGAVSWRSCKQTILTRSTMEAELTALDTATVEAEWLRDLLMDLPVVEKPVPAILMNCDNQTTCEKTIEVCQEIKKLRSYNVELHPNSEKPGRSLHEGTITKCDKQCIEGDGFETHSILERTHLCELDCWSQSMKILGESSRKLTKDLGV

SEQ ID NO: 19955 - protein, 1460 aa, Oryza sativa
  Clone ID: TF_OSC413111j.C1.p1.fg
MAGFADALRPDKFTGVHFKRWQIRVTLWLTAMKCFWVSTGKPEGVLTAEQQKQFEEATTLFVGCILSVLGDRLVEVYMHMTDAKELWDALNTKFGATDASNDLYIMEQFHDYKMADNRSVVEQAHEIQTMAKELELLKCVLPDKFVAGCIIAKLPPSWRSFGTALKHKRQEYSVEGLIASLDVEEKAREKDAASKGDGGQSSANVVHKAQNKSKGKYKAQQTTNFKKQKKNNNNPNQDERTCFVCGQVGHLARKCPQRKGMKAPAGQTSKSANVTIGNTGDGSGYGNLPTVFSVNQSTNWWVDTGANVHVCADISLFSSYQVARGSTVLMGNGSHASVHGVGTVDLKFTSGKIVQLKNVQHVPSIDRNLVSGSRLTRDGFKLVFESNKVVVSKHGYFIGKGYECGGLFRFSLSDFCNKSVNHICGSVDDEANVWHSRLCHINFGLMSRLSSMCLIPKFSIVKGSKCHSCVQSKQPRKPHKAAEERNLAPLELLHSDLCEMNGVLTKGGKRYFMTLIDDATRFCYVYLLKTKDEALDYFKIYKAEVENQLDRKIKRLRSDRGGEFFSNEFDLFCEEHGIIHERTPPYSPESNGIAERKNRTLTDLVNAMLDTAGLPKAWWGEALLTSNHVLNRVPNRNKDKTPYEIWIGRKPSLSYLRTWGCLAKVNVPITKKRKLGPKTVDCVFLGYAHHSIAYRFLIVKSEVPDMHVGTIMESRDATFFESFFPMKDTHSGSNQPSEIIPSSITPPEQTEHTHELVSEEDVSEAPRRSKRQRTAKSFGDDFTVYLVDDTPKSISEAYASPDADYWKEAVRSEMDSIIANGTWEVTERPYGCKPVGCKWVFKKKLRPDGTIEKYKARLVAKGYTQKEGEDFFDTYSPVARLTTIRVLLSLAASHGLLVHQMDVKTAFLNGELDEEIYMDQPDGFVLEGQEGKVCKLLKSLYGLKQAPKQWHEKFDKTLTSAGFAVNEADKCVYYRHGGGEGVILCLYVDDILIFGTNLEVINEVKSFLSQNFDMKDLGVADVILNIKLIRGENGITLLQSHYVEKILNRFGYIDSKPSPTPYDPSLSLRKNKRIARNQLEYSQIIGSLMYLASATRPDISFAVSKLSRFTSNPGDDHWRALERVMRYLKGTVELGLHYTGYPAVLEGYSDSNWISDVDEIKATSGYVFTLGGGAVSWRSCKQTILTRSTMEAELTALDTATVEAEWLRDLLMDLPVVEKPVPAILMNCDNQTTCEKTIEVCQEIKKLRSYNVGLHPNSEKPGRSLHEGTITKCDRQCIEGDGFETHSILEGTHLCELDCWSQSMKILGESSRKLTKDLGRQHQPRIEQQQSNQQRSKQQWWWRPAGGDGFGGGSSKSAAGGRFGCGSARNSARTPGGGEDSKTAVRSIPILLEDDDGGGTDSVVAQANPPPVVVWQSREHIQWWRRGRGELIAAVDGGSGCGSARSSARMPSGGEDSKTR

SEQ ID NO: 19956 - protein, 1428 aa, Oryza sativa
  Clone ID: TF_OSC413293j.C1.p2.fg
MAGFADALRPDKFTGVHFKRWQIRVTLWLTAMKYFWVSTGKPEGVLTAEQQKQFEEATTLFVGCILSVLGDRLVEVYMHMTDAKELWDALNTKFGATDASNDLYIMEQFHDYKMADNRSVVEQAHEIQTMAKELELLKCVLPDKFVAGCIIAKLPPSWRSFGTALKHKRQEYSVEGLIASLDVEEKAREKDAASKGDGGQSSANVVHKAQNKSKGKYKAQQTTNFKKQKKNNNNPNQDERTCFVCGQVGHLARKCPQRKGMKALAGQTSKSANVTIGNTGDGSGYGNLPTVFSVNQSTNWWVDTGANVHVCADISLFSSYQVARGSTVLMGNGSHASVHGVGTVDLKFTSGKIVQLKNVQHVPSIDRNLVSGSRLTRDGFKLVFESNKVVVSKHGYFISKGYECGGLFRFSLSDFCNKSVNHICGSVDDEANVWHSRLCHINFGLMSRLSSMCLIPKFSIVKGSKCHSCVQSKQPRKPHKAAEERNLAPLELLHSDLCEMNGVLTKGEKRYFMTLIDDATRFCYVYLLKTKDEALDYFKIYKAEVENQLDRKIKRLRSDRGGEFFSNEFDLFCEEHGIIHERTPPCSPESNGIAERKNRTLTDLVNAMLDTAGLPKAWWGEALLTSNHVLNRVPNRNKDKTPYEIWIGRKPSLSYLRTWGCLAKVNVPITKKRKLGPKTVDCVFLGYAHHSIAYRFLIVKSEVPDMHVGTIMESRDATFFESFFPMKDTHSGSNQPSEIIPSSITPPEQTEHTHELVSEEDVSEAPRRSKRQRTAKSFGDDFTVYLVDDTPKSISEAYASPDADYWKEAVRSEMDSIIANGTWEVTERPYGCKPVGCKWVFKKKLRPDGTIEKYKARLVAKGYTQKEGEDFFDTYSPVARLTTIRVLLSLAASHGLLVHQMDVKTAFLNGELDEEIYMDQPDGFVVEGQEGKVCKLLKSLYGLKQAPKQWHEKFDKTLTSAGFAVNEADKCVYYRHGGGEGVILCLYVDDILIFGTNLEVINEVKSFLSQNFDMKDLGVADVILNIKLIRGENGITLLQSHYVEKILNRFGYIDSKPSPTPYDPSLLLRKNKRIARNQLEYSQIIGSLMYLASATRPDISFAVSKLSRFTSNPGDDHWRALERVMRYLKGTVELGLHYTGYPAVLEGYSDSNWISDVDEIKATSGYVFTLGGGAVSWRSCKQTILTRSTMEAELTALDTATVEAEWLRDLLMDLPVVEKPVPAILMNCDNQTTCEKTIEVCQEIKKLRSYNVGLHPNSEKPGRSLHEGTITKCDRQCIEGDGFETHTTPSRSPACTSDREKQVSGTSAFDVLHREKAAIRYIGTTTTQDLSLTEVMSWDSEIYLPEIPNSLQMCNWGIYTGYRPNLLSPLTFASQQDDDEDEEDESGPFIRQLLCAIRHKKLLKRSLPMTSTNHTSGKRICSGNSCIC

SEQ ID NO: 19957 - protein, 943 aa, Oryza sativa
  Clone ID: TF_OSC413295j.C1.p5.fg
MAAICGETISVDELWREILLRAPTKDVARSCCVSTQWRGIVRDPSFRKLHHDRHAVPSKDDVPDALLVITVNADGQSVSTVVPAMVSPVSTSQRAPMYRVIKNGISYSLANVCNGFLCFASWSRAKVVVCNPITGEKLAIPRAPPIGPDYKSSRARIDVYTLPTSGGKICVMTATGTPSWHPPEIPTLGPVLVVDVASEKHRMYSPPDNGCPAADETSFTAFELHGRLCLAIRISMTNTVQFWTLSVEEDDDDDDDLPWQLLYTIKINMKDGYNNGFQELEPMNDWFNGGNNGFIQVPEPMDAWLDGETHTLATERAAHCTLDYSIPLAGVHQRSGEQVSGTSAFDVLHREKAAIRSNDAFMLVFICDVMIYLWNKLNPYMPIISTIQKPYYRHCDFTMAGFADALRPDKFTGVHFKRWQIRVTLWLTAMKCFWVSTGKPEGVLTAEQQKQFEEATTLFVGCILSVLGDRLVEVYMHMTDAKELWDALNTKFGATDASNDLYIMEQFHDYKMADNRSVVEQAHEIQTMAKELELLKCVLPDKFVAGCIIAKLPPSWRSFGTALKHKRQEYSVEGLIASLDVEEKAREKDAASKGDGGQSSANVVHKAQNKSKGKYKAQQTTNFKKQKKNNNNPNQDERTCFVCGQVGHLARKCPQRKGMKAPAGQTSKSANVTIGNTGDGSGYGNLPTVFSVNQSTNWWIDTGANIHVCADISLFSSYQVARGSTVLMGNGSHASVHGVGTVDLKFTSGKIVQLKNVQHVPSIDRNLVSGSRLTRDGFKLVFESNKVVVSKHGYFIGKGYECGGLFRFSLSDFCNKSVNHICGSVDDEANVWHSRLCHINFGLMSRLSSMCLIPKFSIVKGSKCHSCVQSKQPRKPHKAAEERNLAPLELLHSDLCEMNGVLTKGGKRYFMTLIDDATRFCYVYLLKTKDEALDFFKFFKAES

SEQ ID NO: 19958 - protein, 1409 aa, Oryza sativa
  Clone ID: TF_OSC413883j.C1.p1.fg
MAGFADALRPDKFTGVHFKRWQIRVTLWLTAMKCFWVSTGKPEGVLTAEQQKQFEEATTLFVGCILSVLGDRLVEVYMHMTDAKELWDALNTKFGATDASNDLYIMEQFHDYKMADNRSVVEQAHEIKTMAKELELLKCVLPDKFVAGCIIAKLPPSWRSFGAALKHKRQEYSVEGLIASLDVEEKAREKDAASKGDGGQSSANVVHKAQNKSKGKYKAQQTTNFKKQKKNNNNPNQDERTCFVCGQVGHLARKCPQRKGMKAPAGQTSKSANVTIGNTGDGSGYGNLPTVFSVNQSTNWWVDTGANVHVCADISLFSSYQVARGSTVLMGNGSHASVHGVGTVDLKFTSGKIVQLKNVQHVPSIDRNLVSGSRLTRDGFKLVFESNKVVVSKHGYFIGKGYECGGLFRFSLSDFCNKSVNHICGSVDDEANVWHSRLCHINFVLMSRLSSMCLIPKFSIVKGSKCHSCVQSKQPRKPHKAAEERNLAPLELLHSDLCEMNGVLTKGGKRYFMTLIDDATRFCYVYLLKTKDEALDYFKIYKAEVENQLDRKIKRLRSDRGGEFFSNEFDLFCEEHGIIHERTPPYSPESNGIAERKNRTLTDLVNAMLDTAGLPKAWWGEALLTSNHVLNRVPNRNKDKTPYEIWIGRKPTLSYLRTWGCLAKVNVPITKKRKLGPKTVDCVFLGYAHHSIAYRFSIVKSEVPDMHVGTIMESRDATFFESFFPMKDTHSGSNQPSEIIPSSITPPEQTEHTHELVSEEDVSEAPRRSKRQRTAKSFGDDFTVYLVDDTPKSISEAYASPDADYWKEAVRSEMDSIIANGTWEVTERPYGCKPVGCKWVFKKKLRPDGTIEKYKARLVAKGYTQKEGEDFFDTYSHVARLTTIRVLLSLAASHGLLVHQMDVKTTFLNGELDEEIYMYQPDGFVVEGQEGKVCKLLKSLYGLKQAPKQWHEKFDKTLTSAGFAVNEADKCVYYRHGRGEGVILCLYVDDILIFKTNLEVINEVKSFLSQNFDMKDLGVADVILNIKLIRGENGITLLQSHYVEKILNRFGYIDSKPSPTPYDPSLLLRKNKRIARNQLEYSQIIGSLMYLASATRPDISFAVSKLSRFTSNPGDDHWRALERVMRYLKGTVELGLHYTGYPAVLEGYSDSNWISDVDEIKATSGYVFTLGGGAVSWRSCKQTILTRSTMEAELTALDTATVEAEWLRDLLMDLPVVEKPVSAILMNCDNQTTCEKTIEVCQEIKKLRSYNVGLHPNSEKPGRSFHEGTITKCDRQCIEGDGFETHIKSLYVYNLNRLYLPLAPVCITSAPPLLRRRRASSARTLNSTADLAKHLPTGAVLAFEVLSPSSTADDSYTATNRALIACLVGAYALCCFLLSFTDSYRDGTGAVRYDFVTPKTYCAVRAARG

SEQ ID NO: 19959 - protein, 1377 aa, Oryza sativa
  Clone ID: TF_OSC414138j.C1.p4.fg
MAIRGIPSSREMTVDDFKNWLKQFDTDNDGRISRGELREAIRRRGGWFSGLKAGRAVRHADRDNSGFVDESEIENLVAFAQKTLGMKVTAWHCDFTMADFADALRPDKFTGVHFKRWQIRVTLWLTAMKCFWVSTGKPEGVLTAEQQKQFEEATTLFVGCILSVLGDRLVEVYMHMTDAKELWDALNTKFGATDASNDLYIMEQFHDYKMADNRSVVEQAHEIQTMAKELELLKCVLPDKFVARCIIAKLPPSWRSFGTALKHKRQEYSVEGLIASLDVEEKAREKDAASKGDGGQSSANVVHKAQNKSKGKYKAQQTTNFKKQKKNNNNPNQDERTCFVCGQVGHLARKCPQRKGMKAPAGQTSKSANVTIGNTGDGSGYGNLPTVFSVNQSTNWWVDTGANVARGSTVLMGNGSHASVHGVGTVDLKFTSGKIVQLKNVQHVPSIDRNLVSGSRLTRDGFKLVFESNKVVVSKHGYFIGKGYECGGLFRFSLSDFCNKSVNHICGSVDDEANVWHSRLCHINFGLMSRLSSMCLIPKFSIVKGSKCHSCVQSKQPRKPHKAAEERNLAPLELLHSDLCEMNGVLTKGGKRYFMTLIDDATRFCYVYLLKTKDEALDYFKIYKAEVENQLDRKIKRLRSDRGGEFFSNEFDLFCEEHGIIHERTPPYSPESNGIAERKNRTLTDLVNAMLDTAGLPKAWWGEALLTSNHVLNRVPNRNKDKTPYEIWIGRKPSLSYLRTWGCLAKVNVPITKKRKLGPKTVDCVFLGYAHHSIAYRFLIVKSEDTHSGSNQPSEIIPSSITPPEQTEHTHELVSEEDVSEAPRRSKRQRTAKSFGDDFTVYLVDDTPKSISEAYASPDADYWKEVVRSEMDSIIANGTWEVTERPYGCKPVGCKWVFKKKLRPDGTIEKYKARLVAKGYTQKEGEDFFDTYSPVARLTTIRVLLSLAASHGLLVHQMDVKTAFLNGELDEEIYMDQPDGFVLEGQEGKVCKLLKSLYGLKQAPKQWHEKFDKTLTSAGFAVNEADKCVYYRHGGGEGVILCLYVDDILIFGTNLEVINEVKSFLSQNFDMKDLGVADVILNIKLIRGENGITLLQSHYVEKILNRFGYIDSKPSPTPYDPSLSLRKNKRIARNQLEYSQIIGSLMYLASATRPDISFAVSKLSRFTSNPGDDHWRALERVMRYLKGTVELGLHYTGYPAVLEGYSDSNWISDVDEIKATSGYVFTLGGGAVSWRSCKQTILTRSTMEAELTALDTATVEAEWLRDLLMDLPVVEKPVPAILMNCDNQTTCEKTIEVCQEIKKLRSYNVGLHPNSEKPGRSLHEGTITKCDRQCIEGDGFETHSILEGTHLCELDCWSQSMKILGESSRKLTKDLGV

SEQ ID NO: 19960 - protein, 1607 aa, Oryza sativa
  Clone ID: TF_OSC417160j.C1.p3.fg
MALRLAAVPESAAADLSAAANTLPCISYRDSIRSVAAVVSGGRGPLFQSEDSASTWSSSSYASDCSGHSSGVSAAAAAGFRALTAHELREVARRMVADGYAQRMVQAFDDAATVEVLEGEMLADCRLDDDIAKDYEARAAVREARAAREEAEARLQVATRAARLVAAEAEAARTAEAARQAAAAAATLRAEEEEERRDLELTDAARVRRDADRDRHIGRRDRDFSPHRRGSDLHRGEEERRDPWRDPRINRALETQRLREQAAAIEAQLDFDREQGGRDVGARSPRRQRASPSPDRRRGRRGRSGSPPVVQIVVKDVGGAWPMLTKTNYAEWAMVMKVKLQARHMWDAVRYGDVDYGEDRRALERLAQLGDTTIDEERAVEKLLCVVPEKYTQLALSIETLLDFTELTNEEVTGRLKAVDNRKQLPPSEPITIGGKLFFTKEKWLARQQERKKGEATSSSASGSSSSRKRRPRKWEKARSGALGGADGERKGSRNDTCHNCGKTGHWAKDCRQAKHGGQAHVAQAQEGDEVALFFVHGSIEPHFTPTPDATAPLHLDELWAHVFLSNGSCDDKIDGWCLDTGATHHMTGRREFFSKLDSSVQGSVKFEDASAVEIKGVGSILFTTKTGEHRLLTGVYYIPALRNSIISLGQLDENGLLVEIEDGVLRVWDRHRRLLVKVNRGANRLYVLHVQVAQPVCLAARRDDDAWRWHERFGHLNFEALKQLSNKEMVQGMPRVEHVEQFCDTCVLTKQRRLPFPRQASFCAKEKLELVHGDLCGPVTPATPGGRRFFLLLVDDVSCYMWVVLLDSKAVAADAIKHHQVAAEKECGRKLRVLHTDNGGEFTTAEFAAYCADERIQRHFSAPYTPQQNGVVERRNQTVVATARALLKQRGMPAIYWGEAVMTAVHLLNRSPTKALDGKTSYEAWHGRKPVVSHLRVFGCLAFAKELNHVGKLNDRSSPGVFIGYAEGVKAYRILDPSTQHVRISRDVVFDEGRGWASYKAVDDGSTSTLRDFVVDYVHFRAAGGASSSSSPSSSTSAPGSPSAPASPLPPTPPATPPSPATPRSPTPAPTPPVEFATPLSNDEDRVDAYHDDEPLRYRTMDNIFGDQPVPGLETRDFEAELHLAHEDGEPCSFAEANGDVAWRTAMQHEMDAVERNWTWVLADLPASHRAITLKWVYKLKKDEAGAVIKHKARLVARGFVQQEGVDFDDAFAPVARMESVRLLLALAAQEGWRVHHMDVKSAFLNGDLKEEVYVHQPPGFVIPGKENKVLRLRKALYGLRQALYAKLDSTLKQMGFQQNSHEAAVYQRGKDGNALLVGVYVDDLVITGTKEAEVEAFKEEMKATFQMSDLGLLSFYLGIEVHQDSSGISLRQTAYAKCIVELGGLTGCNPAYTPMEERLKLSRDSTLREVDATQYRHIVGSLRYLVHTRPDLAFAVGYVSRFMQRPTTEHQQAVTSRAPPTTAFTTRGVPCLISWQSVKQQVVALSSCEAEYIATTTASTQALWLARLLGDLLGRNTEAVELRMDSKSALALAKNPVFHERSKHIRIKYHFIRSCLEEGSIKASYINTQDQLADLLTKSLGRVKFQEFRARIGMVQIPQKAPHMT

SEQ ID NO: 19961 - protein, 571 aa, Oryza sativa
  Clone ID: TF_OSC417394j.C1.p2.gm
MAGFADALRPDKFTGVHFKRWQIRVTLWLTAMKCFWVSTGKPEGVLTAEQQKQFEEATTLFVGCILSVLGDRLVEVYMHMTDAKELWDALNTKFGATDASNDLYIMEQFHDYKMADNRSVVEQAHEIETMAKELELLKCVLPDKFVAGCIIAKLPPSWRSFGTALKHKRQEYSVEGLIASLDVEEKTREKDAASKGDGGQSSANVVHKAQNKSKGKYKAQQTTNFKKQKKNNNNPNQDERTCFVCGQVGHLARKCPQRKGMKAPAGQTSKSANVTIGNTGDGSGYGNLPTVARGSTVLMGNGSHASVHGVGTVDLKFTSGKIVQLKNVQHVPSIDRNLVSGSRLTRDGFKLVFESNKIVVSKHGYFIGKGYECGGLFRFSLSDFCNKSVNHIYGTVDDEANVWHSHYWKEAVRSEMDSIIANGTWEVTERPYGCKPVGCKWVFKKKLRPDDYSIPLAGVHRRSGEQVSGTSAFDVLHREKAAIRLEHEDRASGIVPVRPLEVRFSDSRCVALATSDTGPLTVLRRIISPGSHDSGIVIEMELEAKQSLKIGMLWEPKGAISFANENYNVSN

SEQ ID NO: 19962 - protein, 1935 aa, Oryza sativa
  Clone ID: TF_OSC418579j.C1.p4.fg
MGMGSELYVATGWRERSAMQAVGRETRWCLRLAGGSGATHYSIPLAGVHQRSGEQVSGTSAFDVLHREKAAIRLNHYMSIISTIQKPYYRHCDFTMAGFADALRPDKFTGVHFKRWQIRVTLWLTAMKCFWVSTGKPEGVLTAEQQKQFEEATTLFVGCILSVLGDRLVEVYMHMTDAKELWDALNTKFGATDASNDLYIMEQFHDYKMADNRSVVEQAHEIQTMAKELELLKCVLPDKFVAGCIIAKLPPSWRSFGTALKHKRQEYSVEGLIASLDVEEKAREKDAASKGDGGQSSANVVHKAQNKSKGKYKAQQTTNFKKQKKNNNNPNQDERTCFVCGQVGHLARKCPQRKGMKAPAGQTSKSANVTIGNTGDGSGYGNLPTVFSVNQSTNWWVDTGANVHVCADISLFSSYQVARGSTVLMGNGSHASVHGVGTVDLKFTSGKIVQLKNVQHVPSIDRNLVSGSRLTRDGFKLVFESNKVVVSKHGYFIGKGYECGGLFRFSLSDFCNKSVNHICGSVDDEANVWHSRLCHINFGLMSRLSSMCLIPKFSIVKGSKCHSCVQSKQPRKPHKAAEERNLAPLELLHSDLCEMNGVLTKGGKRYFMTLIDDATRFCYVYLLKTKDEALDYFKIYKAEVENQLDRMIKRLRSDRGGEFFSNEFDLFCEEHGIIHERTPPYSPKSNGIAERKNRTLTDLVNAMLDTAGLPKAWWGEALLTSNHVLNRVPNRNKDKTPYEIWIGRKPSLSYLRTWGCLAKVNVPITKKRKLGPKTVDCVFLGYAHHSIAYRFLIVKSEVPDMHVGTIMESRDATFFESFFPMKDTHSGSNQPSEIIPSSITPPEQTEHTHELVSEEDVSEAPRRSKRQRTAKSFGDDFTVYLVDDTPKSISEAYASPDADYWKEAVRSEMDSIIANGTWEVTERPYGCKPVGCKWVFKKKLRPDGTIEKYKARLVAKGYTQKEGEDFFDTYSSVARLTTIRVLLSLAASHGLLVHQMDVKTAFLNGELDEEIYMDQPDGFVVEGQEGKVCKLLKSLYGLKQAPKQWHEKFDKTLTSAGFAVNEADKCVYYRHGGGEGVILCLYVDDILIFGTNLEVINEVKSFLSQNFDMKDLGVADVILNIKLIEKILNRFGYIDSKPSPTPYDSSLLLRKNKRIARNQLEYSQIIGSLMYLASATRPDISFAVSKLSRFTSNPGDDHWRALERVMRYLKGTVELGLHYTGYPAVLEGYSDSNWISDVDEIKATSGYVFTLGGGAVSWRSCKQTILTRSTMEAELTALDTATVEAEWLRDLLMDLPVVEKPVPAILMNCDNQTTCEKTIEVCQEIKKLRSYNVGLHPNSEKPGRSLHEGTITKCDKQCIEGDGFETHIKSLYVYNLNRAVHAFKPFDKLARRESPRVESIMSTTPTAASRRLVLILCTLAISCSSGIAGFAAGDDDAFIRCLAAAAVPPRLVHTPGSASYAPTLVSSIRNLRFVTPGTPRPLAIVAAAEAGHAQAAVRCGRRHGVRVRARSGGHDYEGLSYLSLDRRERFAVLDLAALRDVRVDADRAEAWVGSGATLGELYYAVGAASRTLAFPAGVCPTVGVGGHISGGGFGTLMRRYGLAADNVLDAVLVDADGRLLNRTTMGEGLFWAIRGGGGESFGVVLSWKLRLVRVPETVTVFTIRRPRNQSATDLITKWQEISPSLPRDVILRVVVQSQHAQFESLFLGRCRRLARLMRARFPELGMTQSDCEEITWIQSTVYFAFYSSSKPLELLLDRGTEPDRYFKAKSDYVQEPIPRHAWESTWPWLEEHDAGLLILDPYGGEMARVSPAATPFPHRKGNLYNLQYYSFWFEHGAETLERHLSWVRGLYGEMEPYVSKNPRTGYVNYRDMDLGRNEIEGNVTSYTKGKVWGEKYFRGNFERLAAVKAMVDPDDFFRNEQSIPPLPAAKGWSSI

SEQ ID NO: 19963 - protein, 967 aa, Oryza sativa
  Clone ID: TF_OSC418806j.C1.p3.gm
MALYTDCAWDMQIPGDMVVNAMMVAMAAHSGEQAQTIYHVTSSLSNPAPYAVLSDAGHRYFFANPPPRAGKNGRLRRMRFFSTVASFRAHMAINYKLPLEILRLVNIALCGMFSRRYDELSRKYKFVMHLVELYAPYTLFKGCFDDINTEKLRITMRKQEDKNDGGYCFDFDPKSIDWDEYFYKVHIPDYSIPLAGVHRRSGEQVSGTSAFDVLHREKAAIRVTLWLTAMKCFWVSTGKPEGVLTAEQQKQFEEATTLFMGCILSVLGDRLVEVYMHMTDAKELWDALNTKFGATYASNDLYIMEQFHDYKMADNRSVVEQAHEIQTMAKELELLKCVLPDKFVAGCIIAKLPPSWRSFGTALKHKRQEYSVEGLIASLDVEEKAREKDAASKGDGGQSSANVVHKAQNKSKGKYKAQQTTNFKKQKKNNNNPNQDERTCFVCGQVGHLARKCPQRKGMKAPAGQTSKSANVTIGNTGDGSGYGNLPTVARGSTVLMGNGSHASVHGVGTVDLKFTSGKIVQLKNVQHVPSIDRNLVSGSRLTRDGFKLVFESNKVVVSKHGYFIGKGYECGGLFRFSLSDFCNKFVNHICGSVDDEANVWHSPSHGLLVHQMDVKTAFLNGELDEEIYMDQPDGFVVEGFAVNEADKCVYYRHGGGEGVILCLYVDDILIFGTNLEVINESHYVEKILNRFGYIDSKPSPTPYDPSLLLRNNKRIARNQLEYSQIIGSLMYLASATRPDISFAVSKLSRFTSNPGDDHWRALERVMRYLKGTVELGLHYTGYPAVLEGYSDSNWISDVDEIKATSGYVFTLGGGAVSWRSCKQTILTRSTMEAELTALDTATVEAEWLRDLLMDLPVVEKPVPAILMNCDNQTSILERTHLCELDCWSQSMKILDYSIPLAGVHRRSGEQVSGTSAFDVLHREKAAISGYTMSFIFMGPEVVFLGRPIRWRRASMDHQVSYALSRR

SEQ ID NO: 19964 - protein, 1152 aa, Oryza sativa
  Clone ID: TF_OSC419888j.C1.p1.fg
MAGFADALRPDKFTGVHFKRWQIRVTLWLTAMKCFWVSTGKPEGVLIAEQQKQFEEATTLFVGCILSVLGNRLVEVYMHMTDAKELWDALNTKFGATDASNDLYIMEQFHDYKMADNRSVVKRAHEIQTMAKELELLKCVLPDKFVAGCIIAKLPPSWRSFGTALKHKRQEYSVEGLIASLDVEEKAREKDAASKGDGGQSSANVVHKAQNKSKGKYKAQQTTNFKKQKKNNINPNQDERTCFVCGQVGHLARKCPQRKGMKAPAGQTSKSANVTIGNTGDGSGYGNLPTVFSVNQSTNWWVDTGANIHVCADISLFSSYQVARGSTVLMGNGSHASVHGVGTVDLKFTSGKIVQLKNVQHVPSIDRNLVSGSRLTRDGFKLVFKSNKVVVSKHGYFIGKGYECGGLFRFSLSDFCNKSVNHIFGSMDDEANVWHSRLCHINFGLMSRLSSMCLIPKFSIVKGSKCHSCVQSKQPRKPHKAAEEINLAPLELLHSDLCEMNGVLTKGGKRYFMTLIDDATRFCYVYLLKTKDEALDYFKIYKAEVENQLDRKIKRLRSDRGGEFFSNEFDLFCEKHGIIHERTPPYSPESNGIGERKNRTLTDLVNAMLDTAGLPKAWWGEALLTSNHVLNRVPNRNKDKTPYEIWIGRKPSLSYLRTWGCLAKVNVPITKKRKLGPKTVDCVFLGYAHHSIAYRFLIVKSEVPDMHVGTIMESRDATFFESFFPMKDTHSGSNQPSEIIPNSITPPEQTEHTHELVSEEDVSEAPRRSKRQRTAKSFGDDFTVYLVDDTPKSISEAYASPDADYWKEAVRNEMDSIIANGTWEVTERPYGCKPVGCKWVFKKKLRPDGTIEKYKARLVAKGYTRKEGEDFFNTYSPVARLTTIRVLLSLAASHGLLVHQMDVKTAFLNGELDEEIYMYQPDGFVVEGQEGKVCKLLKSLYGLKQAPKQWHEKFDKTLTSAGFVVNEADKCVYYRHGGGEGVILCLYVDDILIFGTNLEVINEVKSFLSQNFDMKDLGVADVILNIKLIRGENGITLLQSHYVEKILNRFGYIDSKPSPTPYDPSLLLRKNKRIARNQLEYSQIIGSLMYLASATRPDISFAVSKLSRFTSNPGDDHWRALERVMRYLKGTMELGLHYTGYPAVLEGYSDSN

SEQ ID NO: 19965 - protein, 1320 aa, Oryza sativa
  Clone ID: TF_OSC420440j.C1.p14.fg
MAGFVDALRPDKFTGVHFKRWQIRVTLWLTAMKCFWVSTGKPEGVLTAEQQKQFEEATTLFVGCILSVLGDRLVEVYMHMTDAKELWDALNTKFGATDASNDLYIMEQFHDYKMADNRSVVEQAHEIQTMAKELELLKCVLPDKFVAGCIIAKLPPSWRSFGTALKHKRQEYSVEGLIASLDVEEKAREKDAASKGDGGQSSANVVHKAQNKSKGKYKAQQTTNFKKQKKNNNNPNQDERTCFVCGQVGHLARKCPQRKGMKAPAGQTSKSANVTIGNTGDGSGYGNLPTVFSVNQSTNWWVDTGANVHVCADISLFSSYQVARGSTVLMGNGSHASVHGVGTVDLKFTSGKIVQLKNVQHVPSIDRNLVSGSRLTRDGFKLVFESNKVVVSKHGYFIGKGYECGGLFRFSLSDFCNKSVNHICGSVDDEANVWHSRLCHINFGLMSRLSSMCLIPKFSIVKGSKCHSCVQSKQPRKPHKAAEERNLAPLELLHSDLCEMNGVLTKGGKRYFMTLIDDATRFCYVYLLKTKDEALDYFKIYKAEVENQLDRKIKRLRSDRGGEFFSNEFDLFCEEHGIIHERTPPYSPESNGIAERKNRTLTDLVNAMLDTAGLPKAWWGEALLTSNHVLNRVPNRNKDKTPYEIWIGRKPSLSYLRTWGCLAKVNVPITKKRKLGPKTVDCVFLGYAHHSIAYRFLIVKSEVPDMHVGTIMESRDATFFESFFPMKDTHSGSNQPSEIIPSSITPPEQTEHTHELVSEEDVSEAPRRSKRQRTAKSFGDDFTVYLVDDTPKSISEAYASPDADYWKEAVRSEMDSIIANGTWEVTERPYGCKPVGCKWVFKKKLRPDGTIEKYKARLVAKGYTQKEGEDFFDTYSPVARLTTIRVLLSLAASHGLLVHQMDVKTAFLNGELDEEIYMDQPDGFVLEGQEGKVCKLLKSLYGLKQAPKQWHEKFDKTLTSAGFAVNEADKCVYYRHGGGEGVILCLYVDDILIFGTNIEVINEVKSFLSQNFDMKDLGVADVILNIKLIRGENGITLLQSHYVEKILNRFGYIDSKPSPTPYDPSLSLRKNKRIARNQLEYSQIIGSLMYLASATRPDISFAVSKLSRFTSNPGDDHWRALERVMRYLKGTVELGLHYTGYPAVLEGYSDSNWISDVDEIKATSGYVFTLGGGAVSWRSCKQTILTRSTMEAELTALDTATVEAEWLRDLLMDLPVVEKPVPAILMNCDNQTTCEKTIEVCQEIKKLRSYNVGLHPNSEKPGRSLHEGTITKCDRQCIEGDGFETHSILEGTHLCELDCWSQSMKILGESSRKLTKDLGV

SEQ ID NO: 19966 - protein, 334 aa, Oryza sativa
  Clone ID: TF_OSC420751j.C1.p1.fg
MAGFADALRPDKFTGVHFKRWQIRVTLWLTAMKCFWVSTGKPEGVLTAEQQKQFEEATTLFVGCILSVLGDRLVEVYMHMTDAKELWDALNTKFGATDASNDLYIMEQFHDYKMADNRSVVEQAHEIQTMAKELELLKCVLPDKFVAGCIIAKLPPSWRSFGTALKHKRQEYSVEGLIASLDVEEKAREKDAASKGDGGQSSANVVHKAQNKSKGKYKAQQTTNFKKQKKNNNNPNQDERTCFVCGQVGHLARKCPQRKGMKAPAGQTSKSANVTIGNTGDGSGYGRTGFHRPNGEWVTCFCSWCWHGRSEVYFGKDRAAEERAACPFYRQESC

SEQ ID NO: 19967 - protein, 1320 aa, Oryza sativa
  Clone ID: TF_OSC422154j.C1.p1.fg
MAGFADALRPDKFTGVHFKRWQIRVTLWLTAMKCFWVSTGKPEGVLTAEQQKQFEEATTLFVGCILSVLGDRLVEVYMHMTDAKELWDALNTKFGATDASNDLYIMEQFHDYKMADNRSVVEQAHEIQTMAKELELLKCVLPDKFVAGCIIAKLPPSWRSFGTALKHKRQEYSVEGLIASLDVEEKAREKDAASKGDGGQSSANVVHKAQNKSKGKYKAQQTTNFKKQKKNNNNPNQDERTCFVCGQVGHLARKCPQRKGMKAPAGQTSKSANVTIGNTGDGSGYGNLPTVFSVNQSTNWWVDTGANVHVCADISLFSSYQVARGSTVLMGNGSHASVHGVGTVDLKFTSGKIVQLKNVQHVPSIDRNLVSGSRLTRDGFKLVFESNKVVVSKHGYFIGKGYECGGLFRFSLSDFCNKSVNHICGSVDDEANVWHSRLCHINFGLMSRLSSMCLIPKFSIVKGSKCHSCVQSKQPRKPHKAAEERNLAPLELLHSDLCEMNGVLTKGGKRYFMTLIDDATRFCYVYLLKTKDEALDYFKIYKAEVENQLDRKIKRLRSDRGGEFFSNEFDLFCEEHGIIHERTPPYSPESNGIAERKNRTLTDLVNAMLDTAGLPKAWWGEALLTSNHVLNRVPNRNKDKTPYEIWIGRKPSLSYLRTWGCLAKVNVPITKKRKLGPKTVDCVFLGYAHHSIAYRFLIVKSEVPDMHVGTIMESRDATFFESFFPMKDTHSGSNQPSEIIPSSITPPEQTEHTHELVSEEDVSEAPRRSKRQRTAKSFGDDFTVYLVDDTPKSISEAYASPDADYWKEAVRSEMDSIIANGTWEVTERPYGCKPVGCKWVFKKKLRPDGTIEKYKARLVAKGYTQKEGEDFFDTYSPVARLTTIRVLLSLAASHGLLVHQMDVKTAFLNGELDEEIYMDQPDGFVLEGQEGKVCKLLKSLYGLKQAPKQWHEKFDKTLTSAGFAVNEADKCVYYRHGGGEGVILCLYVDDILIFGTNIEVINEVKSFLSQNFDMKDLGVADVILNIKLIRGENGITLLQSHYVEKILNRFGYIDSKPSPTPYDPSLSLRKNKRIARNQLEYSQIIGSLMYLASATRPDISFAVSKLSRFTSNPGDDHWRALERVMRYLKGTVELGLHYTGYPAVLEGYSDSNWISDVDEIKATSGYVFTLGGGAVSWRSCKQTILTRSTMEAELTALDTATVEAEWLRDLLMDLPVVEKPVPAILMNCDNQTTCEKTIEVCQEIKKLRSYNVGLHPNSEKPGRSLHEGTITKCDRQCIEGDGFETHSILEGTHLCELDCWSQSMKILGESSRKLTKDLGV

SEQ ID NO: 19968 - protein, 878 aa, Oryza sativa
  Clone ID: TF_OSC4254j.C1.p16.gm
VTLWLTAMKCFWVSTGKPEGVLTAEQQKQFEEATTLFVGCILSVLGDRLVEVYMHMTDAKELWDALNTKFGATDASNDLYIMEQFHDYKMADNRSVVEQAHEIQTMAKELELLKCVLPDKFVAGCIIAKLPPSWRSFGTALKHKRQEYSVEGLIASLDVEEKAREKDAASKGDGGQSSANVVHKAQNKSKGKYKAQQTTNFKKQKKNNNNPNQDERTCFVCGQVGHLARKCPQRKGMKAPAGQTSKSANVTIGNTGDGSGYGNLPTVARGSTVLMGNGSHASVHGVGTVDLKFTSGKIVQLKNVQHVPSIDRNLVSGSRLTRDGFKLVFESNKVVVSKHGYFIGKGYECGGLFRFSLSDFCNNMCLIPKFSIVKGSKCHSCVQSKQPRKPHKAAEERNLAPLELLHSDLCEMNGVLTKEVENQLDRKIKRLRSNRGGEFFSNEFDLFCEEHGIIHERTPPYSPESNGIAERKNRTLTDLVNAMLDTAGLPKACEAPRRSKRQRTAKSFGDDFTVYLVDDTPKSISEAYASPDADYWKEAVRSEMDSIIANGTWEVTERPYGCKPVGCKWVFKKKLRPDASHGLLVHQMDVKTAFLNGELDEEIYMDQPDGFVVEGFAVNEADKCVYYRHGGGEGVILCLYVDDILIFGTNLEVINESHYVEKILNRFGYIDSKPSPTPYDPSLLLRKNKRIARNQLEYSQIIGSLMYLASATRPDISFAVSKLSRFTSNPGDDHWRALERVMRYLKGTVELGLHYTGYPAVLEGYSDSNWISDVDEIKATSGYVFTLGGGAVSWSKDVVLQSILERTHLCELDCWSQSMKILDYSIPLAGVHRRSGEQVSGTSAFDVLHREKATLAKSFDQAAGLSVTSVRVQYVAHI

SEQ ID NO: 19969 - protein, 1356 aa, Oryza sativa
  Clone ID: TF_OSC4267j.C1.p2.fg
MAGFADALRPDKFTGVHFKRWQIRVTLWLTAMKCFRVSTGKPEGVLTAEQQKQFEEATTLFVGCILSVLGDRLVEVYMHMTDAKELWDALNTKFGATDASNDLYIMEQFHDYKMADNRSVVEQAHEIQTMAKELELLKCVLPDKFVAGCIIAKLPPSWRSFGTALKHKRQEYSVEGLIASLDVEEKAREKDAASKSDGGQSSANVVHKAQNKSKGKYKAQQTTNFKKQKKNNNNPNQDERTCFVCGQVGHLARKCPQRKGMKAPAGQTSKSANVTIGNTGDGSGYGNLPTVFSVNQSTNWWVDTGANVHVCADISLFSSYQVARGSTVLMGNGSHASVHGLGTVDLKFTSGKIVQLKNVQHVPSIDRNLVSGSRLTRDGFKLVFESNKVVVSKHGYFIGKGYECGGLFRFSLSDFCNKSVNHICGSVDDEANVWYSRLCHINFGLMSRLSSMCLIPKFSIVKGSKCHSCVQSKQPRKPHKAAEKRNLAPLELLHSDLYEMNGVLTKGGKRYFMTLIDDATTFCYVYLLKMKDEALDYFKIYKAEVENQLDRKIKRLRSDRGGEFFSNEFDLFCEEHGIIHERTPPYSPESNGIAERKNRTLTDLVNAMLDTAGLPKAWWGEALLTSNHVLNRVPNRNKDKTPYEIWIGRKPSLSYLRTWGCLAKVNVPITKKRKLGPKTVDCVFLGYAHHSIAYRFLIVKSEVLDMHVGTIMESRDATFFESFFPMKDTHSGSNQPSEIIPSSITPPEQTEHTHELVSEEDVSEAPRRSKRQRTAKSFGDDFTVYLVDDTPKSISEAYASPDADYWKEAVRSEMDSIIANGIWEVTERPYGCKPVGCKWVFKKKLRPDGTIEKYKARLVAKGYTQKEGEDFFDTYSPIARLTTIRVLLSLAASHGLLVHQMDVKTAFLNGELDEEIYMDQPDGFVVEGQEGKVCKLLKSLYGLKQAPKQWHEKFDKTLTSAGFAVNEADKCVYYRHGGGKGVILCLYVDDILIFGTNLEVINEVKSFLSQNFDMKDLGVADVIINIKLIRGENGITLLQSHYVEKILNRFGYIDSKPSPTPYDPSLLLRKNNRIARNQLEYSQIIGSLMYLASATRPDISFAVSKLSRFTSNPGDDHWRALERIMRYLKGTVELGLHYTGYPAVLEGYSDSNWISDVDEIKATSGYVFTLGGGAVSWRSCKQTILTRSTMEAELTALDTATVEAEWLRDLLMDLPVVEKPVPAILMNCDNQTTCEKTIEVCQEIKKLRSYNVGLHPNSEKPGRSLHEGTITKCDRQCIEGDGFETHIQNGYYSISLVETTIEPNKVGYDLCVGITSLGYTQKDMYSQKVTTCVVFTFGSTTSPIAKIPPPFVESRQ

SEQ ID NO: 19970 - protein, 1432 aa, Oryza sativa
  Clone ID: TF_OSC4900j.C1.p8.fg
MAKTMEQEWREAKSRASALPGQRRLRRRVQGEDYLPKEDDFALASSPPRGPKKPFRPIKPRGNRAGDRQMAHQGPMSPYIIMYPCKCPFHKDYSIPLAGVHRRSGEQVSGTSAFDVLHREKAAIRHCDFTMAGFADALRPDKFTGVHFKRWQIRVTLWLTAMKCFWVSTGKPEGVLTAEQQKQFEEATTLFVGCILSVLGDRLVEVYMHMIDAKELWDALNTKFGATDASNDLYIMEQFHDYKMADNHSVVEQAHEIQTMAKELELLKCVLPDKFVAGCIIAKLPPSWRSFGTALKHKRQEYSVEGLIASLDVEEKAREKDAASKGDGGQSSANVVHKAQNKSKGKYKAQQTTNFKKQKKNNNNPNQDERTCFVCGQVGHLARKCPQRKGMKAPAEQTSKSANVTIGNTGDGSGYGNLPTVFSVNQSTNWWVDTGANVHVCADISLFSSYQVARGSTVLMGNGSHASVHGVGTVDLKFTSGKIVQLKNVQHVPSIDRNLISGSRLTRDGFKLVFESNKVVVSKHGYFIGKGYECGGLFRFSLSDFCNKSVNHTCGSVDDEANVWHSRLCHINFGLMSRLSSMCLIPKFSIVKGSKCHSCVQSKQPRKPHKAAEERNLAPLELLHSDLCEMNGVLTKGGKRYFMTLIDDATRFCYVYLLKTKDEALDYFKIYKAEVENQLDRKIKRLRSDRGGEFFSNEFDLFCEEHGIIHERTPPYSPESNGIAERKNRTLTDLVNAMLDTAGLPKAWWGEALLTSNHVLNRVPNRNKDKTPYEIWIGRKPSLSYLRTWGCLVKVNVPITKKRKLGPKTVDCVFLGYAHHSIAYRFLIVKSEVPDMHVGTIMESRDATFFESFFPMKDTHSGSNQPSEIIPSSITPPEQTEYTHELVSEEDVSEAPRRSKRQRTAKSFGDDFTVYLVDDTPKSISEAYASPDADYWKEAVRSEMDSIIANGTWEVTERPYGCKPVGCKWVFKKKLRPDGTIEKYKARLVAKGYTQKEGEDFFDTYSPVARLTTIRVLLSLAASHGLLVHQMDVKTAFLNGELDEEIYMDQPDGFVVEGQEGKVCKLLKSLYGLKQAPKQWHEKFDKTLTSAGFGVNEADKCVYYRHGGGEGVILCLYVDDILIFGTNLEVINEVKSFLSQNFDMKDLGVADVILNIKLIRGENGITLLQSHYMEKILNRFGYIDSKPSPTPYDPRLLLRKNKRIARNQLEYSQIIGSLMYLASATRPDISFAVSKLSRFTSNPGDDHWRALERVMRYLKGTVELGLHYTGYPAVLEGYSDSNWISDVDEIKATSGYVFTLGGGAVSWRSCKQTILTRSTMEAELTALDTATVEAEWLRDLLMDLPVVEKPVPAILMNCDNQTIIVKVNSSKDNMKSSRHVKRRLKSVRKLRNSGLITLDYIQTARNLADPFTKGLSRNVIDNASKEMGLRPM

SEQ ID NO: 19971 - protein, 1297 aa, Oryza sativa
  Clone ID: TF_OSC549j.C1.p1.fg
MAGFADALRPDKFTGVHFKRWQIRVTLWLTAMKCFWVSTGKPEGVLTAEQQKQFEEATTLFVGCILSVLGDRLVEVYMHMTDAKELWDALNTKFGATDASNDLYIMEQFHDYKMADNRSVVEQAHEIQTMAKELELLKCVLPDKFVAGCIIAKLPPSWRSFGTALKHKRQEYSVEGLIASLDVEEKAREKDAASKGDGGQSSANVVHKAQNKSKGKYKAQQTTNFKKQKKNNNNPNQDERTCFVCGQVGHLARKCPQHKGMKAPAGQTFKSANVTIGNTGDGSGYGNLPTVFSVNQSTNWWVDTGANVYVCADILLFSSYQVARGSTVLMGNGSHASVHGVGTVDLKFTSGKIVQLKNVQHVPSIDKNLVSGSRLTRDGFKLVFESNKVVVSKHGYFIGKGYECGGLFRFSLSDFCNKSVNHICGSVDDEANVWHSRLYHINFGLMSRLSSMCLIPKFSIVKGSKCHSCVQSKQPRKPHKAAEERNLAPLELLHSDLCEMNGVLTKGGKRYFMTLIDDATRFCYMYLLKTKDEALDYFKIYKAEVENQLDRKIKRLRSDRGGEFFSNKFDLFCEEHGIIHERTPPYSPESNGIAERKNRTLTDLVNAMLDTAGLPKAWWGEALLTSNHVLNRVPNRNKDKTPYEIWIGRKPSLSYLRTWGCLAKVNVPITKKRKLGPKTVDCVFLGYAHHSIAYRFLIVKSEVPDMHVGTIMESRDATFFESFFPMKDTHSGSNQPSEIIPSSITPPEQTEHTHELVSEEDVSEAPRRSKRQRTAKSFGDDFTVYLVDDTPKSISEAYASPDADYWKEAVRSEMDSIIANGTWEVTERPYGCKPVGCKWVFKKKLRPDGTIEKYKARLVAKGYTQKEGEDFFDTYSPVARLTTIRVLLSLAVSHGLLVHQMDVKTAFLNGELDEEIYMDQPDGFVVEGQEGKVCKLLKSLYGLKQAPKQCHEKFDKPLTSAGFAVNEADKCVYYRHGGGEGVILCLYVDDILIFGTNLEVINEVKSFLSQNFDMKDLGVADVILNIKLIRGENGITLLQSHYVEKILNRFGYIDSKPSPTPYDPSLLLHKNKRIARNQLEYSQIIGSLMYLASATRPDISFAVSKLSRFTSNPGDDHWRALERVMRYLKGTVELGLHYTGYPAVLEGYSDSNWISDVDEIKATSGYVFTLGGGAVSWRSCKQTILTRSTMEAELTALDTATVEAEWLRDLLMDLPIVEKPVPAILMNCDNQTTCEKTIEVCQEIKKLRSYNVGLHTNSEKPGRSLHEGTITKCDRQCIEGDGFETHVSYTMVVTQSM

SEQ ID NO: 19972 - protein, 551 aa, Oryza sativa
  Clone ID: TF_OSC549j.C1.p1.gm
YSIPLAGVHRRSGEQVSGTSAFDVLHREKAAIRHCDFTMAGFADALRPDKFTGVHFKRWQIRVTLWLTAMKCFWVSTGKPEGVLTAEQQKQFEEATTLFVGCILSVLGDRLVEVYMHMTDAKELWDALNTKFGATDASNDLYIMEQFHDYKMADNRSVVEQAHEIQTMAKELELLKCVLPDKFVAGCIIAKLPPSWRSFGTALKHKRQEYSVEGLIASLDVEEKAREKDAASKGDGGQSSANVVHKAQNKSKGKYKAQQTTNFKKQKKNNNNPNQDERTCFVCGQVGHLARKCPQHKGMKAPAGQTFKSANVTIGNTGDGSGYGNLPTVARGSTVLMGNGSHASVHGVGTVDLKFTSGKIVQLKNVQHVPSIDKNLVSGSHYWKEAVRSEMDSIIANGTWEVTERPYGCKPVGCKWVFKKKLRPDVSHGLLVHQMDVKTAFLNGELDEEIYMDQPDGFVVEGFAVNEADKCVYYRHGGGEGVILCLYVDDILIFGTNLEVINESHYVEKILNRFGYIDNYSIPLAGVHRRSGEQVSGTSAFDVLHREKAAI

SEQ ID NO: 19973 - protein, 1218 aa, Oryza sativa
  Clone ID: TF_OSC5516j.C1.p2.gm
MADLLGDPTWPQLHRRPCTDTPWPGLQCELAPDDARHLRATRLHFGPDVATPPCRPGARLAAPVLLGLPHLKTLSLFGCFVVADLSSEPIKSQEMRAHAAAAAAAVELPPALFTNASSLEQLVLKSNPGLTGRIPATLSDLRSLRVLSLSQNGFRGEIPPELGRLAPLQQLDLSYNNLTGEIPEEIGGMESLSILDLSWNSLAGGLPAALGSLRMLEKADLSHNELAGRVPAEVGSLRELVFLDLSHNELAGPLPASMAGLGKLQYLLLQENPIGTAVPAAVVGSLRRLQVVGMSGCGLTGPIPRGAFAALASLAALSLDRNRLDGPIPASLAALPRLGRLNLSQNRLAGEIALPAEFVARLGRRLDVRGNDKLCVGRERYGGAQASYLGAPPCAAAGGGSGAAVGGTSSSPVESSAGAAATAGRGFRVYGIAGMFGGMFCFAANAPSLVDYSIPLAGVHQRSGEQVFLLQFCFAANAPSLVDYSIPLAGVHQRSGEQVSGTSAFDVLHREKAAIRVTLSLTAMKCFWVSTGKPERVLTAEQQKQFEEATTLFVGCILSVLGDRLVEMYMHMTDAKELWDALNTKFGATDASNNLYIMEQFHDYKMADNRSVVEQAHEIQTMAKELELLKCVLPDKFVAGCIIAKLPPSWRSFGTALKHKRQEYSVEGLIASLDVEEKAREKDAASKGDGGQSSANVVHKAQNKSKGKYKAQQTTNFKKQKKNNNNPNQDERTCFVCGQVGHLARKCPQRKGMKAPAGQTSKSANVTIGNTGDGSGSHGLKNVQHVPSIDRNLVSGSRLTRDGFKLVFESNKVVVSKHGYFIGKGYECGGLFRFSLSDFCNKSVNHICGSVDDEANVWHSHYWKEAVRSEMDSIIANGTWEVTERPYGCKPVGCKWVFKKKLRPDASHGLLVHQMDVKTAFLNGELDEEIYMDQPDGFVVEGFAVNEADKCVYYRHGGGEGVILCLYVDDILIFGTNLEVINESHYVEKILNRFGYIDSKPSPTPYDPSLLLRKNKRIARNQLEYSQIIGSLMYLASATRPDISFAVSKLSRFTSNPGDDHWRALERVMRYLKGTVELGLHYTGYPAVLEGYSDSNWISDVDEIKATSGYVFTLGGGAVSWSKDVVLQSILEGTHLCELDCWSQSMKILGESSRKLTELGAPHRETAQAPLCRFGRGPWVRAAEKRNTLLLCFGGSVYEEATKCEPAPDRSGIVSSRL

SEQ ID NO: 19974 - protein, 646 aa, Oryza sativa
  Clone ID: TF_OSC6238j.C1.p1.gm
EYSVEGLIASLDVEEKAREKDAASKGDGGQSSANVVHKAQNKSKGKYKAQQTTNFKKQKKNNNNPNQDERTCFVCGQVGHLARKCPQRKGMKAPAGQTSKSADVTIGNIGDGSGYGNLPTVARGSTVLMGNGSHASVHGVGTVDLKFTSGKIVQLKNVQHVPSIDRNLVSDSRLIRDGFKLVFESNKVVVSKHGYFIGKGYECGGLFRFSLSDFCNKSVNHICGSVDDEANVWHSQVENQLDRKIKRLRSDRGGEFFSNEFDLFFEEHGIIHERTPPYSPESNGIAERKNRTLTDLVNAMLDTAGLPKACEAPRRSKRQRTAKSFGDDFTVYLVDDTPKSISEAYASPDADYWKEAVRSEMDSIIANGTWEVTERPYGCKPVGCKWVFKKKLRPDASHGLLVHQMDVKTAFLNGELDEEIYMDQPDGFVVEGFAVNEADKCVYYRHGGGEGVILCLYVDDILIFGTNLEVINESHYVEKILNRFGYIDSKPSPTPYDPSLLLRKNKRIARNQLEYSQIIGSLMYLASATRPDISFASILERTHLCELDCWSQSMKILDYSIPLAGVHQRSGEQVSGTSAFDVLHREKAAIRGVIGIIIDIHLITTQWGSDKHIFVSFLVHKAARFIAFHYSVPIALRALSNMCNPS

SEQ ID NO: 19975 - protein, 2623 aa, Oryza sativa
  Clone ID: TF_OSC8778j.C1.p2.fg
MSNEKVPSNAPIAPQEGNAPQNSGSNKHPGASSEETWRTPSDPFPMEITQVAPRDDDPDYIPIEQAMVVRRRSKRKAGRNRTEQEVEMDTATSAPERTETSTSAGGSGKKRRGERSKNKLPKETYNVIALDQDGKPIEPPIVRSKFSNACGTLVRTRCPINVKLWETVDDNIKTLLWNELQKYFVFPPGSEVRGRDYALKKMGDRWRQWKSDLNRDYVQKNLPPFTDYGHISQADWDTFVADRTTAEALALRKKMSELAKKNKYPHRLGSSGYAGHVDQWREIEQRFAAAGKPLLVDPMVERSKNWVWARSTGQVSDEGDILFETPDIEEVTTNLQQIVEKERSGQFVPRRERDQLTAALGTAEHSGRVRGLSSKTSWKVGFPQDAPSYKKRDKYKEQLSDKIYAQVKEHFYSLAAENPTAFPRLFPDSQQPTQSAQQTTNVPSSVGSVQTSTFPVDSITGPTPCSLVVPIGRAGKTKEVATGLAIPGRQFHNTAIPEDYARVQVAKVHSDHVSLELDIPAPEGIELLGDAVNQFILWHRRDIILSAAVLAAGSSTPSSSQAMTAAAPAPPSPPEPPSPRHPPSPPPLRSPARQPTPPPSPSQQPPLPTPQPVQASPTSPTKQHAPPAPPSVQTSPPTPQSALVEEVHIPDGTTSEPKSNTLEPRRIIPKLISTYDPKEIDKDKEKFMFSAFRNSEKRKELAHVLSDSQKSVLAAQDEVQSWLSADVPETYEYGKPFLPTYLMNKLPWEMRVMHEWYMKASRKGLGFISVAVPEGAFMSGPNGIFFISFQDLYALYKLDKMDVNLVAAFCLMQFHEADRTGAKVGYVDPTRICKTQHTIELRQDCEQLVGKTPEEKEEYVKTLHKRKKLEVATYLAIAMLAHADKDVLMVPYQFTDHYILFLVYPKDQLIISLDPAHYDKETFMEFLTILNLAHKYYRKRGGPVHIPSQKKLSVRTGWPCYKQPPGTNLCGYYVCEMLRVNGRYKTTSNRIPEIPYIAQRFNHTTILNVAADLCRFIRRDVCNARGVTPESASFADTGYDPPPKKWKGICQVGPSFEAISCNRKFIGARWYIDDEILSSISDNEVLSPRDVEGHGTHTASTAGGNIIHNVSFLGLAAGTVRGGAPRARLAIYKACWSGYGCSGATVLKAMDDAVYDGVDVLSLSIGGTKEDVGTLHVVANGISVVYAGGNDGPIAQTVENQSPWLVTVAATTIDRSLPVVITLGNGEKLVAQSFVLLETASQFSEIQKYTDEECNANNIMNSTVKGKIAFCFMGEMLNNKQQTSYPDVTTAVAAKGGRAPDIAAPGVSILAAAQIPYYKGVSYHFDSGTSMACPHVAGIIAVLKSIHPKWSPAALKSAIMTTDYSIPLAGVHQRSGEQVSGTSAFDVLHREKAAIRHCDFTMADFADALRPDKFTGVHFKRWQIRVTLWLTAMKCFWVSTGKPEGVLTAEQQKQFEEATTLFVGCILSVLGDRLVEVYMHMTDAKELWDALNTKFGATDASNDLYIMEQFHDYKMADNRSVVEQAHEIQTMAKSFGTALKHKRQEYSVEGLIASLDVEEKAREKDAASKGDGGQSSANVVHKAQNKSKGKYKAQQTTNFKKQKKNNNNPNQDERTCFVCGQVGHLARKCPQRKGMKAPAGQTSKSANVTIGNTGDGSGYGNLPTVFSVNQSTNWWVDTGANVARGSTVLMGNGSHASVHGVGTVDLKFTSGKIVQLKNVQHVPSIDRNLVSGSRLTRDGFKLVFESNKVVVSKHGYFIGKGYECGGLFRFSLSDFCNKSVNHICGSVDDEANVWHSRLCHINFGLMSRLSSMCLIPKFSIVKGSKCHSCVQSKQPRKPHKAAEERNLAPLELLHSDLCEMNGVLTKGGKRYFMTFIDDATRFCYVYLLKKKDEALDYFKIYKAEVENQLDRKIKRLRSDRGGEFFSNEFDLFCEEHGIIHERTPPYSPESNGIAERKNCTLTDLVNAMLDTAGLPKAWWGEVLLTSNHVLNRVPNRNKDKTPYEIWIGRKPSLSYLRTWGCLAKVNVPITKKRKLGPKTVDCVFLGYAHHSIAYRFLIVKSEVLDMHVGIIMESRDATFFESFFPMKDTHSGSNQPSEIIPSSIIPPEQTEHTHELVSEEDVSEAPRRSKRQRTAKSFGDDFTVYLVDDTPKSISEAYASPDADYWKEAVRSEMDSIIANGTWEVTEQPYGCKPVGCKWVFKKKLRPDGTIEKYKARLVAKGYTQKEGEDFFDTYSPVARLTTIRVLLSLAASHGLLVHQMDVKTAFLNGELDEEIYMDQPDGFVVEGFGVNYAYPCVYYRHGGGQGVILCLYVDDILIFGTNLEVINEVKSFLSQNFDMKDLGVADVILNIKLIRGENGITLLQSHYVEKILNRFGYIDSKPFPTPYDPSLLLRKNKRIARNQLEYSQIIGSLMYLASATRPDISFAVSKLSRFTSNPGDDHWRALERVMRYLKGTVELGLHYTGYPAVLEGYSDSNWISDVDEIKATSGYVFTLGGGAVSWRSCKQTILTRSTMEAELTALDTATVEAEWLRDLLMDLPVVEKPVPAILMNCDNQTTCEKTIEVCQEIKKLRSYNVGLHPNSEKPGRSLHEGTITKCDRQCIEGDGFETHVSYTMVVTQSM

SEQ ID NO: 19976 - protein, 1513 aa, Oryza sativa
  Clone ID: TF_OSC900007j.C1.p16.fg
MAGFADALRPDKFTGVHFKRWQIRVTLWLTAMKCFWVSTGKPEGVLTAEQQKQFEEATTLFVGCILSVLGDRLVEVYMHMTDAKELWDALNTKFGATDASNDLYIMEQFHDYKMADNRSVVEQAHEIQTMAKELELLKCVLPDKFVAGCIIAKQPPSWRSFGTALKHKRQEYSVEGLIASLDVEEKAREKDAASKGDGGQSSANVVHKAQNKSKGKYKAQQTTNFKKQKKNNNNPNQDERTCFVCGQVGHLARKCPQRKGMKAPAGQTSKWKRVARGSTVLMGNGSHASVHGVGTVDLKFTSGKIVQLKNVQHVPSIDRNLVSGSRLTRDGFKLVFESNKVVVSKHGYFIGKGYECGGLFRFSLSDFCNKSVNHICGSVDDEANVWHSRLCHINFGLMSRLSSMCLIPKFSIVKGSKCHSCVQSKQPRKPHKAAEERNLAPLELLHSDLCEMNGVLTKGGKRYFMTFIDDATRFCYVYLLKTKDEALDYFKIYKAEVENQLDRKIKRLRSDRGGEFFSNEFDLFCEEHGIIHERTPPYSPESNGIAERKNRTLTDLVNAMLDTAGLPKAWWGEALLTSNHVLNRVPNRNKDKTPYEIWIGRKPSLSYLRTWGCLAKVNVPITKKRKLGPKTVDCVFLGYAHHSIAYRFLIVKSEVLDMHVGTIMESRDATFFESFFPMKDTHSGSNQPSEIIPSSITPPEQTEHTHELVSEEDVSEAPRRSKRQRTAKSFGDDFTVYLVDDTPKSISEAYASPDADYWKEAVTEQPYGCKPVGCKWVFKKKLRPDGTIEKYKARLVAKGYTQKEGEDFFDTYSPVARLTTIRVLLSLAASHGLLVHQMDVKTAFLNGELDEEIYMDQPDGFVVEGQEGKVCKLLKSLYGLKQAPKQWHEKFDKTLTSAGFGVNEANKCVYYRHGGGEGVILCLYVDDILIFGTNLEVINEVKSFLSQNFDMKDLGVADVILNIKLIRGENGITLLQSHYVEKILNRFGYIDSKPSPTPYDPSLLLRKNKRIARNQLEYSQIIGSLMYLASATRPDISFAVSKLSRFTSNPGDDHWRALERVMRYLKGTVELGLHYTGYPAVLEGYSDSNWISDVDEIKATSGYVFTLGGGAVSWRSCKQTILTRSTMEAELTALDTATVEAEWLRDLLMDLPVVEKPVPAILMNCDNQTTCEKTIEVCQEIKKLRSYNVGLHPNSEKPGRSLHEGTITKCDRQCIERDGFETHMQPPFAVLFCCKFGFVFVLETFRKIRICENQSRVCLLLCTAPSLVDYSIPLAGVHQRSGEQVSGTSAFDVLHREKAAIRCSRRTQSTENVEEADDANQLAVVGVHHPHLRHADKATEATPSTTASARPNGCAAAGSEDDADDGSPSPSDSVPVEESDVADLWSTVTGFALPESGGLVWSTVTCSNDALAPLSCRGSGFALSASGDDSEWPENDGPPPPLLSTIGFMPPATGGEGEEPENEASSYGECPENTYGGRLLLSAVLPHYSRRRQRRLPSAPQRPPPQPPDGLHR

SEQ ID NO: 19977 - protein, 1028 aa, Oryza sativa
  Clone ID: TF_OSC900144j.C1.p23.gm
MGTKTNPDRWNGSLSQGLGEGGLFFEDESGYDDKVGVGSAGQTGRQASQASGTPAVRPTHDVGQTGLGRRLRVLLMLLEMVLQKLLLRPILIQNVDQLQKLLLLCTFTADIRRNTIIGNIGERTARLVWLLPVTRPNCGKGETSVKGNTGGKTYIRVLGNHVEHGGGVLELISKPHILKAQVSVLYYYSIPLAGVHQRSGEQVSGTSAFDVLHREKAAIRVTLWLTAMKCFWVSTGKPEGVLTAEQQKQFEEATTLFVGCILSVLGDRLVEVYMHMTDAKELWDALNTKFGATDASNDLYIMEQFHDYKMADNRSVVEQAHEIQTMAKELELLKCVLPDKFVAGCIIAKLPPSWRSFGTALKHKRQEYSVEGLIASLDVEEKAREKDAASKGDGGQSSANVVHKAQNKSKGKYKAQQTTNFKKQKKNNNNPNQDERTCFVCGQVGHLARKCPQRKGMKAPAGQTSKSANVTIGNTGDGSWYGNLPTVARGSTVLMGNGSHASVHGVGTVDLKFTSGKIVQLKNVQHVPSIDRNLVSGSRLTRDGFKLVFESNKVVVSKHGYFIGKGYEYGGLFRFSLSDFCNNMCLIPKFSIVKGSKCHSCVQSKQPRKPHKAAEERNLAPLELLHSDLCEMNGVLTKEVENQLDRKIKRLRSDRGGEFFSNEFDLFCEEHGIIHERTPPYSPESNGIAERKNRTLTDLVNAMLDTAGLPKACEAPRRSKRQRTAKSFGDDFIVYLVDDTPKSISEAYASPDADYWKEAVRSEMDSIIANGTWEVTERPYGCKPVGCKWVFKKKLRPDASHGLLVHQMDVKTAFLNGELDEEIYMDQPDGFVVEGFAVNEADKCVYYRHGGGEGVILCLYVDDILIFGTNLEVINESHYVEKILNRFGYIDSKPSPTPYDPSLLLRKNKRIARNQLEYSQIIGSLMYLASATRPDISFAVSKLSRFTSNPGDDHWRALERVMRYLKDYSIPLAGVHQRSGEQVSGTSAFDVLHREKAAIRFLGSASRDCSLFVRDGSPSSSLACFVPS

SEQ ID NO: 19978 - protein, 1247 aa, Oryza sativa
  Clone ID: TF_OSC900152j.C1.p4.fg
MAGFADALRPDKFTGVHFKRWQIRVTLWLTAMKCFWVSTGKPEGVLTAEQQKQFEEATTLFVGCILSVLGDRLVEVYMHMTDAKELWDALNTKFGATDASNDLYIMEQFHDYKMADNRSVVEQAHEIQTMAKELELLKCVLPDKFVAGCIIAKLPPSWRSFGTALKHKRQEYSVEGLIASLDVEEKAREKDAASKGDGGQSSANVVHKAQNKSKGKYKAQQTTNFKKQKKNNNNPNQDERTCFVCGQVGHLARKCPQRKGMKAPAGQTSKSANVTIGNTGDGSGYGNLPTVFSVNQSTNWWVDTGANVHVCADISLFSSYQVARGSTVLMGNGSHASVHGVGTVDLKFTSGKIVQLKNVQHVPSIDRNLVSGSRLTRDGFKLVFESNKVVVSKHGYFIGKGYECGGLFRFSLSDFCNKSVNHICGSVDDEANVWHSRLCHINFGLMSRLSSMCLIPKFSIVKGSKCHSCVQSKQPRKPHKAAEERNLAPLELLHSDLCEMNGVLTKGGKRYFMTLIDDATRFCYVYLLKTKDEALDYFKIYKAEVENQLDRKIKRLRSNRGGEFFSNEFDLFCEEHGIIHERTPPYSPESNGIAERKNRTLTDLVNAMLDTAGLPKACIAYRFLIVKSEVPDMHVGTIMESRDATFFESFFPMKDTHSGSNQPSEIIPSSITPPEQTEHTHELVSEEDVSEAPRRSKRQRTAKSFGDDFTVYLVDDTPKSISEAYASPDADYWKEAVRSEMDSIIANGTWEVTERPYGCKPVGCKWVFKKKLRPDGTIEKYKARLVAKGYTQKEGEDFFDTYSPVARLTTIRVLLSLAASHGLLVHQMDVKTAFLNGELDEEIYMDQPDGFVVEGQEGKVCKLLKSLYGLKQVPKQWHEKFDKTLTSAGFAVNEADKCVYYRHGGGEGVILCLYVDDILIFGTNLEVINEVKSFLSQNFDMKDLGVADVILNIKLIRGENGITLLQSHYVEKILNRFGYIDSKPSPTPYDPSLLLRKNKRIARNQLEYSQIIGSLMYLASATRPDISFAVSKLSRFTSNPGDDHWRALERVMRYLKGTVELGLHYTGYPAVLEGYSDSNWISDVDEIKATSGYVFTLGGGAVSWRSCKQTILTRSTMEAELTALDTATVEAEWLRDLLMDLPVVEKPVPAILMNCDNQTTCEKTIEVCQEIKKLRSYNVGLHPNSEKPGRSLHEGTITKCDRQCIEGDGFETHSILERTHLCELDCWSQSMKILGESSRKLTKDLGV

SEQ ID NO: 19979 - protein, 556 aa, Oryza sativa
  Clone ID: TF_OSC900192j.C1.p20.gm
MLLLSAVIRGGRCIIAGDCDADRAGSEIDVHDPDAEIWVTRDVQRSSEADVQRRGCAVLRISDRRQSRGGPTAGGGVRRAGGWGGAIWMGRTERWCSRTGTGTATEDRDEEAEAEAEGERRRRRPPIPSPSSYRCGFSHKGYPFYCPWAEPHSEHSVQPIEKEASSRIKLTSRSHLRRTWALPASTVRWPPLPSWRQAPGLPRFIKFDFNIAQTYPEADYSISLAGVHRRSGEQVSGTSAFDVLHREKAAIRVTLWLTAMKCFWVSTGKPEGVLTAEQQKQFEEATTLFVGCILSVLGDRLVEVYMHMTDAKELWDALNTKFGATDASNDLYIMEQFHDYKMADNRSVVEQAHEIQTMAKELELLKCVLLDKFVAGCIIAKLPPSWRSFGTALKHKRQEYSVEGLIASLDVEEKAREKDAASKGDGGQSSSNVVHKAQNKSKGKYKAQQTTNFKKQKKNNNNPNQDERTCFVCGQVGHLARKCPQRKGMKAPAGQTSKSANVTIGNTGDGSGYGNLPTVARGSTVLMGNGSHASVHGVGTVDLKFTSGKIVQLKNV

SEQ ID NO: 19980 - protein, 1320 aa, Oryza sativa
  Clone ID: TF_OSC900225j.C1.p25.fg
MAGFADALRPDKFTGVHFKRWQIRVTLWLTAMKCFWVSTGKPEGVLTAEQQKQFEEATTLFVGCILSVLGDRLVEVYMHMTDAKELWDALNTKFGATDASNDLYIMEQFHDYKMADNRSVVEQAHEIQTMAKELELLKCVLPDKFVAGCIIAKLPPSWRSFGTALKHKRQEYSVEGLIASLDVEEKAREKDAASKGDGGQSSANVVHKAQNKSKEKYKAQQTTNFKKQKKNNNNPNQDERTCFVCGQVGHLARKCPQHKGMKAPAGQTSKSANVTIGNTGDGSGYGNLPTVFSVNQSTNWWVDTGANVHVCADISLFSSYQVARGSTVLMGNGSHASVHGVGTVDLKFTSGKIVQLKNVQHVPSIDRNLVSGSRLTRDGFKLVFESNKVVVSKHGYFIGKGYECGGLFRFSLSDFCNKSVNHICGSVDDEANVWHSRLCHINFGLMSRLSSMCLISKFSIVKGSKCHSCVQSKQPRKPHKAAEERNLAPLELLHSDLCEMNGVLTKGGKRYFMTLIDDVTRFCYVYLLKTKDEALDYFKIYKAEVENQLDRKIKRLRSDRGGEFFSNEFDLFCEEHGIIHERTPPYSPESNGIAERKNRTLTDLVNAMLDTAGLPKAWWGEALLTLNHVLNRVPNRNKNKTPYEIWIGRKPSLSYLRTWGCLAKVNVPITKKRKLGPKTVDCVFLGYAHHSIAYRFLIVKSEVPDMHVGTIMESRDGTFFESFCPMKDTHSGSNQPSEIIPSSITPPEQTEHTHELVSEEDVSEAPRRSKRQRTAKSFGDDFTVYLVDDTPKSISEAYASPDADYWKEAVRSEMDSIIANGTWEVTERPYGCKPVGCKWVFKKKLRPDGTIEKYKARLVAKGYTQKEGEDFFDTYSPVARLTTIRVLLSLVASHGLLVHQMNVKTAFLNGELDEEIYMDQPDGFVVEGQEGKVCKLLKSLYGLKQAPKQWHEKFDKTLTSAGFAVNEADKCVYYRHGGGEGVILCLYVDDILIFGTNLEVINEVKSFLSQNFDMKDLGVADVILNIKLIRGENGITLLQSHYVEKILNRFGYIDSKPSPTPYDPSLLLHKNKRIARSQLEYSQIIGSLMYLASATRPDISFAVSKLSRFTSNPGDDHWRALERVMRYLKGTVELGLHYTGYPAVLEGYSDSNWISDVDEIKATSGYVFTLGGGAVSWRSCKQTILTRSTMEAELTALDTATVEAEWLRDLLMDLPVVEKPVPAILMNCDNQTTCEKTIEVCQEIKKLRSYNVGLHSNSEKSGRSLHEGTITKCDRQCIEGDGFETHSILERTHLCELDCWSQSMKILGESSRKLTKDLGV

SEQ ID NO: 19981 - protein, 1326 aa, Oryza sativa
  Clone ID: TF_OSC900345j.C1.p2.fg
MAGFADALRPDKFTGVHFKRWQIRVTLWLTAMKCFWVSTGKPEGVLTAEQQKQFEEATTLFVGCILSVLGDRLVEVYMHMTDAKELWDALNSKFGATDASNDLYIMEQFHDYKMADNRSVVEQAHEIQAMAKELELLKCVLPDKFVAGCIIAKLPPSWRSFGTALKHKRQEYSVEGLIASLDVEEKAREKDAASKGDGGQSSANVVHKAQNKSKGKYKAQQTTNFKKQKKNNNNPNQDERTCFVCGQVGHLARKCPQRKGMKAPAGQTSKSANVTIGNTGDGSGYGNLPTVFSVNQSTNWWVDTGANVHVCADISLFSSYQVARGSTVLMGNGSHASVHGVGTVDLKFTSEKIVQLKNVQHVPSIDRNLVSGSRLTRDGFKLVFESNKVVVSKHGYFIGKGYECVGLFRFSLSDFCNKSVNHICGSVDDEANVWHSRLCHINFGLMSRLSSMCLIPKFSIVKGSKCHSCVQSKQPRKPHKAAEERNLAPLELLHSDLCEMNGVLTKGGKRYFMTFIDDATRFCYVYLLKTKDEALDYFKIYKAEVENQLDRKIKRLRSDRGGEFFSNEFDLFCEEHGIIHEMTPPYSPESNGIAERKNRTLTDLVNAMLDTAGLPKAWWGEALLTSNHVLNRVPNRNKDKTPYEIWIGRKPSLSYLRTWGCLAKVNVPITKKRKLGPKTVDCVFLGYAHHSIAYRFLIVKSEVPDMHVGTIIESRDAIFFESFFPMKDTHSGSNQPSEIIPSSITPPEQTEHTHELVSEEDVSEAPRRSKRQRTAKSFGDDFTVYLVDDTPKSISEAYASPDADYWKEAVRSEMDSIIANGTWEVTERPYGCKPVGCKWVFKKKLRPDGTIEKYKARLVAKGYTQKEGEDFFDTYSPVARLTTIRVLLSLAASHGLLVHQMDVKTAFLNGELDEEIYMDQPDGFVVEGQEGKVCKLLKSLYGLKQAPKQWHEKFDKTLTSAGFAVNEADKCVYYRHGGGEGVILCLYVDDILIFGTNLEVINEVKSFLSQNFDMKDLGVADVILNIKLIRGENGITLLQSHYVEKILNRFGYIDSKPSPTPYDPSLLLRKNKRIARNQLEYSQIIGSLMYLASATRPDISFAVSKLSRFTSNPGDDHWRALERVMRYLKGTVELGLHYTGYPAVLEGYSDSNWISDVDEIKATSGYVFTLGGGAVSWRSCKQTILTRSTMEAELTALDTATVEAEWLRDLLMDLPVVEKPVPAILMNCDNQTTCEKTIEVCQKIKKLWSYNVGLHPNSEKPGRSLHEGTITKCDRQCIEGDGFETHMSYTMVSILERTHLCELDCWSQSMKILGESSRKLTKDLGV

SEQ ID NO: 19982 - protein, 1397 aa, Oryza sativa
  Clone ID: TF_OSC900387j.C1.p13.fg
MAKAAGQPPNDQPASSGSGSGAAACFHLPPHDYWPILVSWPASCTMRYSSVVLRTLNHYMSIISTIQKPYYRHCDFTMAGFADALRPDKFTGVHFKRWQIRVTLWLTAMKCFWVSTGKPEGVLTAEQQKQFEEATTLFVGCILSVLGDRLVEVYMHMTDAKELWDALNTKFGATDASNDLYIMEQFHDYKMADNRSVVEHAHEIQTMAKELELLKCVLPDKFVAGCIIAKLPPSWRSFGTALKRKRQEYSVEGLIASLDVEEKAREKDAASKGDGGQSSANVVHKAQNKSKGKYKAQQTTNFKKQKKNNNNPNQDERTCFVCGQVGHLARKCPQRKGMKAPAGQTFKSANVTIGNTGDGSGYGNLPTVFSVNQSTNWWVDTGANVHVCADISLFSSYQVARGSTVLMGNGSHASVHGVGTVDLKFTSEKIVQLKNVQHVPSIDRNLVSGSRLTRDGFKLVFESNKVVVSKHGYFIGKGYECGGLFRFSLSDFCNKSVNHICGSVDDEANVWHSRLCHINFGLMSRLSSMCLIPKFSIVKGSKCHSCVQSKQPRKPHKAAEERNLAPLELLHSDLCEMNGVLTKGGKRYFMTLIDDATRFCYVYLLKTKDEALDYFKIYKAEVENQLDRKIKRLRSDRGGEFFSNEFDLFCEEHGIIHERTPPYSPESNGIAERKNRTLTDLVNAMLDTAGLPKAWWGEALLTSNHVLNRVPNRNKDKTPYEIWIGRKPSLSYLRTWGCLAKVNVPITKKRKLGPKTVDCVFLGYAHHSIAYRFLIVKSEVPDMHVGTIMESRDATFFERFFPMKDTHSGSNQPSEIIPSSITPPEQTEHTHELVSEEDVSEAPRRSKRQRTAKSFGDDFTVYLVDDTPKSISEAYASPDADYWKEAVRSEMDSIIANGTWEVTERPYGCKPVGCKWVFKKKLRPDGTIEKYKARFVGKGYTQKEGEDFFDTYSPVARLTTIRVLLSLAASHGLLVHQMDVKTAFLNGELDEEIYMDQPDGFVVEGQEGKVCKLLKSLYGLKQAPKQWHEKFDKTLTSAGFAVNEADKCVYYRHGGGEGVILCLYVDDILIFGTNLEVINEVKSFLSQNFDMKDLGVADVILNIKLIRGENGITLLQSHYVEKILNRFGYIDSKPSPTPYDPSLLLRKNKRIARNQLEYSQIIGSLMYLASATRPDISFAVSKLSRFTSNPGDDHWRALERVMRYLKGTVELGLHYTGYPAVLEGYSDSNWISDVDEIKATSGYVFTLGGGAVSWRSCKQTILTRSTMEAELTALDTATVEAEWLRDLLMDLPVVEKPVPAILMNCDNQTTCEKTIEVCQEIKKLRSYNVGLHPNSEKPGRSLHEGTITKCDKQCIEGDGFETHSILERTHLCELDCWSQSMKILGESSRKLTKDLGV

SEQ ID NO: 19983 - protein, 702 aa, Oryza sativa
  Clone ID: TF_OSC9742j.C1.p1.fg
MAGFADALRPDKFTGVHFKRWQIRVTLWLIAMKCFWVSTGKPEGVLTAEQQKQFEEATTLFVGCILSVLGDRLVQVYMHMTDAKELWDALNTKFGATDASNDLYIMEQFHDYKMANNRSVVEQAHEIQTMAKELELLKCVLPDKFVAGCIIAKLAPSWRSFGTALKHKRQEYSVEGLIASLDVEEKAREKDAASKGDGGQSSANVVHKAQNKSKGKYKAQQTTNFKKQKKNNNNPNQDERTCFVCGQVGHLARKCPQRKGMKAPAGQTSKSANVTIGNTGDGSGYGNLPTVFSVNQSTNWWVDTGANVHVCADISLFSSYQVARGSTVLMGNGSHASVHGVGTVDLKFTSGKIVQLKNVQHVPSIDRNLVSGSRLTRDGFKLVFESNKVVVSKHGYFIGKGYECGGLFRFSLSNFCNKSVNHICGSVDDEANVWHSRLCHINFGLMSRLSSMCLIPKFSIVKGFKCHSCVQSKQSRKPHKAAEERNLAPLELLHSDLCEINGVLTKGGKRYFMTLIDDATRFCYVYLLKTKDEALDYFKIYKAEVENQLDRKIKRLRSDRGGEFFSNEFDLFCEEHGIIHERTPPYSPESNGIAERKNRTLTDLVNAMLDTAGLPKAWWGEALLTSNHVLNRVPNRNKDKTPYEIWIGRKPSLSYLRTWGCLAKVNVPITKKRKLGPKTVDCVFLGYAHHSIAYRFLIVKSE

SEQ ID NO: 19984 - protein, 1502 aa, Oryza sativa
  Clone ID: TF_OSC400737j.C1.p9.fg
MAQLSATLKVRRATNNATSPRSWPAGYTFADVLTAAACAPEGKPRGVLTAAACAPGGKPRGGNRAEGVSFDQIKGKAPLEAFGEVASSSATANSSALPATSHCHEGPSPQFPREKLDACSFNIHADFGAIQETRGGCYGDKLEDLFPRVSRGFREWVWVRKGSLSPQLGFPARSEEIRRFGDSARRIWRVLERRCDHRTFAQVVMKRRPPPGRPDWQANKRKAMESGDGGGDWGRQAGGDWGKQAGGSWAHREEEELRKQLLAKGNQVVGDPRRPGRPGQERRDWGDRGAGGSKPAMKCFKCGREGHHQASCTNPPLCYSCHSSGHISANFPMLQSKRGVKLCGFGIPGQGFYSLQVDVSDVEMAKHPASVVETGMTEDAIDELAVVWVKIFGVPKLARSEEHIKAIVELVGEFEMIDLSTLRRDGPVRERLACKDPRELHFAIHVYINKVGYMIRWEPEGYPPYDNSQFPPDDGDDKDKKGNGDNDDMNVDEDQNTQSPARGRSAHDRRSFMGGSRGDVQSAPPAYKGKKALEETCLSETQQCPTKRAACKKQSLLVVEKESMVDQEGDSKAMIVWEGNTTQDVEYESQEIDFPVTQKSTEEGDNEDVLTGILEFEKCDIPSLFDIAIQREEEELDEEDSFQEVSYKKNRPKKSEPAITSRMSLRNRDMASVPIPKIAELLTQKKNLETGGNSNPFVVFQIIDPVELNSIAIAANISLGSNEEEIANTIETIKAKELVQAKLAEMRWKKEKEKEMTDVDSLLRNEKELPDNMGEEVDNLNTPSQEMNNMEISSESLELKKRGLGNIARKKQLKEAWKSSRGASGGILIGTNDELIEKLGTHAGAFFLSVEFRYKKDNSVWEVIVVYGPVLESLKPDFLNELRWVGSDHSPPILNIGEDIERPPKYFRFESAWLTMENFHELVRQHMIPRDGSYILDYSNKKQSFLRRFLKGWELNLRQEKNQQKAVILTQIQELDAQADIRDLSPDEWNKRYEMEADLEHIYEMEELFWHKRCGEMTLLQGDRNTEFFHRMANGRRRKCLILSLEDEGRELTSKEDLKSHIIEYYKSLFRADNLSTVHLSPQIWQSELCLNADQKEAITRPFSMEELDKVIREAKLNIAPGPDGLNIHFYRAFWPEIKNDLFEMLLMLYEGKLDLKRLNFGVISLIPKSSDPTNIRQFRPICVLNDCFKFLSKVVTNRLSEVAPFVISQTQTAFIPGRFILEGCIILHEVLHEFKLKNQQGIILKIDFEKAYDRVSWNFLFEVLERKGFPKIWIDWIKACVMWDKVCVNINGERSDFFRTYRGLRQGDPLSPLLFNLVSDALAAMLDSAKRDSILTGLVPGIFPGGITHLQYADDTVIFIPFDVRQIVATKFLLYCFEEMAGMKINYHKSEIFTVRLIDAENEEVAKMLNCPRGKFPMKYLGLPISPDKILNQEFNFLPHKMEKRLSLWNGGNLTYAGRAVHINACLSSIPSYAMGFYQLPEGIHHKFDSLRGKYYWAGNR

SEQ ID NO: 19985 - protein, 296 aa, Oryza sativa
  Clone ID: TF_OSC25199j.C1.p1.np
DNEKGNKVRSQDIGTSSSRVIEAPDTSCVTLVQHLINQNRLLIEILQQHQTPILNLSQIQPQVQLEAVQALTPQVSMPPASRRTHGDVPHVDSKEASIICFMCDEQGHYARECPQQKRKTPMRTEDEVRKMIITSTEWPPPGMTKRQRRNTFRGAPQLTEHLLANGGRVSDSEDSDQVSSDDEDEMERKACSRCGEIGHVASSCATTCVHCEEDHPPDRCPTSRINCFFCEGTDHVPKDFQFSFLLTKKMANQPASFNGKKHQGNTNPRQDYSFSLTPVPGQRNQNEKRKCRVRKD

SEQ ID NO: 19986 - protein, 488 aa, Oryza sativa
  Clone ID: TF_OSC400610j.C1.p25.fg
MDISRTNEGYTSCGPVVEMSWHRAGVLLLGAQSCLPVPEVPAVGGVGSVLLFMARMGWEICHVFRPYTVVMFNREKGKNVSGYASSNSSFQLNPPLASRELTRAHPWSIPSMLLSSQLPLVGSQDQNQYVFDRAFATQVNELPMPEEDVPFCHDCRERGHYALNCPWVYAKEAPSFGLAGQTSLNQPPRTKSSLQPSVQSREPNGENPLNPENCFPPSLSYHVGSRTKQAKGKKSKNQQRKAPMRTEEEVRKMTITSTEWPPAGITIPRHQRGNTFRGARQLTQHLLSHGGRVSDSEGSDQVSSDDEDESPRHVGEEEMESKACTRCGEIGHIASMCLTLCPYCEEDHPPGECPTRKVTCFLCEGTNHVPKDCQLSVLLTKTAEIQRTTLRLSHQLVSSNSNIDDIIHSTNAPPAAPDSAINHSNNTFSTNHSLHRQPQQRIVIDGRSCVSPRPTPGRAKGNQPQEGDTKQKTVICFKQQSEGSFSCE

SEQ ID NO: 19987 - protein, 401 aa, Oryza sativa
  Clone ID: TF_OSC401914j.C1.p17.fg
MSSRAAAPLLPSPPLAAAAKSLSFPSLRRFMVNTRASGSGNNNNEENPTLAQVLAQQTQLINMLVQQMQNQQGNNNVNPPPPQNKLADFLRVRPPTFSSTTNPVEVGDWLHAVEKKLELLQCTDQEKVVFASHQLQGSASEWWDHFRMNRAEGQPITWAEFTEAFKKTHIPAGVVALKKREFRALKQKDRTVTEYLHEFNRLARYAPEDVRTDEERQEKFLEGLKDELSVMLISHDYEDFQELVDKAIRLEDKKNRMDNRKRGRIVFQEAQDSSQRQRIKPLQIGESSSAGQEQSQQLNIGGEINSETNASNEDNDGQATQSVSFQQDQSQEDNSSGREQQVCFSCYKPGHFARECPKSQHQQPQGQINNIVVTGANAVPVASSRVVSSSVTTQPPVSKRQ

SEQ ID NO: 19988 - protein, 793 aa, Oryza sativa
  Clone ID: TF_OSC900010j.C1.p11.fg
MAKELELLKFVLPDKFVVGCIIAKLPPSWRGFGTALEHKRHEYSVKGLIASLDVEEKAREKDAASKGDGGQSSANVVHKAQNKSKGKYKAQQTTNFKKQKKNNNNPNQDERTCFVCGQPGHLARKCLQRKGMKAPAGQTSKSANVTIGNTGDGSGYGNLPTVFSVNQSTNWWVDTRANVHVCADILLFSSYQVARGFTVLMGNGSHASVHGVGTVDLKFTSGKIVQLKNVQHVPSIDRNLVSGSRLTRDGFKLVFESNKVVVSKHGYFIGKGYECGGLFRFSLFDFCNKSVNHICGSVDDEANVWHSRLCHINFGLMSRLSSMCLIPKFFIVKGSKCHSCVQSKQPRKPHKAAEERNLAPLELLHSDLCEMNGVLTKGGKRYFMTLIDDATRFCYVYLLKTKDEALDYFKIYKADVENQLDRKIKRLRSDRGGEFFSNKFDLFCEEHGIIHERTPPCSPESNGIAERKNRTLTDLVNAMLDTAGLPKAWRGEALLTSNHVLNRVPNINKDKTPYEIWIGRKPSLSYLRTWGCLAKVNVPITKKRKLGPKTVDCVFLGYAHHSIAYRFLIVKSEVPDMHVGTIMESRDATFFESFFPMKDTHSSSSQPFEVIPSSITLPEQTEHTHEHVTEEDVSEAPRRSKRQRTAKSFGDDFTVYLVDDTPKSISQAYASLDVNYWKEAIRSEMDSIIANGTWEVTERPYGCKSVGCKWVFKKKLRPDGTIEKYKARLVAKGYTQKEGEDFFDTYSPIARLTTIRVLLSLAASHGLLVHQMDVKTAFLNGELDEEIYMDQSH

SEQ ID NO: 19989 - protein, 840 aa, Oryza sativa
  Clone ID: TF_OSC900327j.C1.p13.fg
MTDTKELWDALNTKFGATDASNDLYIMEQFHDYKMVDNRSIVEQAHEIHTMAKELELLKCVLPDKFVAGCIIAKLPPSWRGFGTALKHKRQEYSVEGLIASLDVKEKAREKDAASKGDGGQSTANVVHKAQNKSKGKHKAQQTTNFKKQKKNNNNPNLDERTCFVCGQPGHLARKCLQRKGMKAPAGQTSKSANVSIGNTGDGSGYVARGSTVLMGNGSHASVHGVSMAEVENQLNRKIKRLRTDRGREFFSNEFDLFREEHGIIHKRTPPYSHESNGIAERKNRTLTDLGLPKAWWGEALLTSNHVLNRVPNRNKDKTPYEISIGRKPSLSYLRTWGCLAKVNVPITKKRKLGPKTVDRVFLGYAHHNIAYRFLIVKSEVPDMHVGTIMESRDATFFESFFPMKDTHSSSSRPSKIIYSSISPPEQTEHTHEHVTEEDDSEAPRRSKRQRTAKSFGDDFTVYLVDDTPMSILEAYASPDADYWKEAVRSEMDFIIANGTWEVTERLYGCKLVGCKWVFKKKLRPDGTIEKYKARLVVINEVKSFLSQNFDMKDLGVADVILNIKLIRGENGITLLQSHYVEKILNRFGYIDSKPSPTPYDPSLLLRKNKRIARNQLEYSQIIGSLMYLASATRLDISFAMSKLSRFASNPGDDHWRALERVMHYLKGTMELGLHYTGYPAVLEGYSDSNWISDVDEIKATSGYVFTLGGGPVSWRSCKQTILTRSTMESELTAPDTTTVEAEWLRDLLMNLPIVEKPVPTILMKCDNQTVIVKVNSSKDNMKSSRHVKRRLKSVRKLRNSRVITLDYIQTARNLADPFTKGLSRNVIDNASKEMGLRPM

SEQ ID NO: 19990 - protein, 581 aa, Oryza sativa
  Clone ID: TF_OSC22542j.C1.p4.gm
MAKELELLKCVLPDKFVAGCIIAKLPPSWRSFGTALKHKRQEYSVEGLIASLDVEEKARKKDDASKGDGGQSSANVVHKAQNKSKGKYKAQQTTNFKKQKKNNNNPNQDEMTCFVCGQPGHLARKCPQRKGMKAPAGQTSKSANMTIGNIGDGSGYGNLPTVARGSTVLMGNGSHASVHGVGTVDLKFTSGKIVQLKNVHHVPSIDRNLVSGSHYWKEAVRSEMDSIIANGTWEVTERPYGCKPVGYKWVFKKKLRPDASHGLLVHQMDVKTAFLNRELDEEIYMDQPDGFVVEGFAVNEADKCVYYRHGGGEGVILCLYVDDILIFGTNLEVINEVKSFLSQKFDMKDLGVADVILNIKLIRGENEITLLQSHYVEKILNRFGYIDSKPSPTPYVPSLLLRKNKRIARNQLEYSQIIGSLMYLASATRPDISFAVSKLSWFTSNPGDDHWRALERVMRYLKGTMELGLHYSGYPAVLEGYSDSNWISDVDEIKATSGYVFTLVGGAVSWRSCKQTILTRSTMEAELTALDTATVEAEWLRDLLMDLPIVEKPVPAILMNYDNQTEVEKLRSYNVGLHPNN

SEQ ID NO: 19991 - protein, 1157 aa, Oryza sativa
  Clone ID: TF_OSC33907j.C1.p1.fg
MAKELELLKCVLPDKFVAGCIIAKLPPSWRSFGTALKHKRQEYSVEGLIASLDVEEKARKKDDASKGDGGQSSANVVHKAQNKSKGKYKAQQTTNFKKQKKNNNNPNQDEMTCFVCGQPGHLARKCPQRKGMKAPAGQTSKSANMTIGNIGDGSGYGNLPTVFSVNQSTNWWVDTGANVHVCADISLFSSYQVARGSTVLMGNGSHASVHGVGTVDLKFTSGKIVQLKNVHHVPSIDRNLVSGSRLTRDGFKLVFESNKVVVSKHGYFIGKGYECGGLFRFSLSDFCNKSVNHICGSVDDEANVWHSRLCHINFGLMSRLSSMCLIPKFSIVKGSKCHSCVQSKQPCKPHKAAEERNLAPLELLHSDLCEMNGVLTKGGKRYFMTLIDDAIRFCYVYLLKTKDEALDYFKIYKAEVENQLDRKIKRLRSDRGGEFFSKEFDLFCEEYGIIHERTPPYSPESNGIAERKNCTLTDLVNAMLDTAGLPKAWWGEALLTSSHVLNRVPNRNKDKTPYEIWIGRKPSLSYLRTWGCLAKVNVPITKKRKLGPKTVDCVFLGYAHHSIAYRFSIVKSEVPDMHVGTIMESRDATFFESFFPMKDTHSSSSQPSEIIPSSITPPEQTEHTHEHVTEEDDSEAPRRSKRQRTAKSFGDDFTVYLVDDTPKSISEAYASPDADYWKEAVRSEMDSIIANGTWEVTERPYGCKPVGYKWVFKKKLRPDGTIEKYKARLVAKGYTQKEGEDFFDTYSPVARLTTIRVLLSLAASHGLLVHQMDVKTAFLNRELDEEIYMDQPDGFVVEGQEDKVCKLLKYLYGLKQAPKQWHEKFDRTLTSAGFAVNEADKCVYYRHGGGEGVILCLYVDDILIFGTNLEVINEVKSFLSQKFDMKDLGVADVILNIKLIRGENEITLLQSHYVEKILNRFGYIDSKPSPTPYVPSLLLRKNKRIARNQLEYSQIIGSLMYLASATRPDISFAVSKLSWFTSNPGDDHWRALERVMRYLKGTMELGLHYSGYPAVLEGYSDSNWISDVDEIKATSGYVFTLVGGAVSWRSCKQTILTRSTMEAELTALDTATVEAEWLRDLLMDLPIVEKPVPAILMNYDNQTVIVKVNSSKDNMKSSRHVKRRLKSVRKLRNSGVITLDYIQTTRNLADPFTKGLS

SEQ ID NO: 19992 - protein, 660 aa, Oryza sativa
  Clone ID: TF_OSC400773j.C1.p145.fg
MDEVGGRWTFSRANEGYTSCGPVVEMSWHRVGALLLGGSVPPACPGGSGRRGIGSVLLSMARMGWKLCHVFRLYTVVMFNREKGKNVSGYASSNSSFQLNPPLASRELTRAHPWSIPSMLLSPQLPLVGSQDQNQYVFDRAFATQVDELPIPEEDVPFCHDCREQGHYALNCPWVYAKEAPSLGLTVQTSLNQPLRTKSSLQPSVQSREPNEENPLNPGNCFPPSPSYHVGSRTKQAKGKKSKNQRRKAPMRTEEEVRKMTITSTEWPPPGMTKRQRRNTFRGAPQLTEHLLANGGRVSDSEDSDQVSSDDEDQKSPQGFNQNKMERKACSRCGEIGHVASSCATTCVHCEEDHPPDRCPMSRITCFFCQGTDHVPKDCQFSFLLTKRMASQPASSNGEQHQGNTNPRQDYSFSLTSVPGQRNQNEERKCRVREDICCFNCQGMGHFADKWPKPRNIAAGTSVHATPCNQKLAPQRIVIHASRSSPIAPVATAPTPASTLPQGVNAQFQPQPPVDKTAALYLWMFQHSSQKKNQVQDEEPEPIIPSAPTILCADSLSRELSSMEEVVSLPDLLQAEQRAINLRRAIPSRRPSSASNSNQTEASPVNDSIMQSYHIITEPIKDAVTRTMPAISLQSQNEQPCLWFSVRYLSLRNRKFAAIM

SEQ ID NO: 19993 - protein, 333 aa, Oryza sativa
  unsure (1)..(333): unsure at all Xaa locations
  Clone ID: TF_OSC25200j.C1.p1.np
MERKACSRCGEIGHVASSCATTCVHCEEDHPPDRCPTSRITCFFCEGTDHVPKDCQFSFLLTKKMANQPAGFNGEKHQGNTNPRQDYSFSLTPVPGQRNQNEKRKCRVREDICCFNCQGMGHFADKCPKPRNIAAGTSVHATPCNQKLAPQRMVIHASRSSPIARVATAPIPMSALPQGVNAQFQPQPPADKTDASICVVPLEAPIQQLRNQVQDEEPECTTILCNDSLSKELSXMEGVVSLPDLLQAEPRAINLRRAIPSRRPSSAATNNQKEASPVNDSIMQSYHIITEPIKDAVTRTMPAISLQNQNEQPCLWFSVRYLSWCNRKFAAIM

SEQ ID NO: 19994 - protein, 469 aa, Oryza sativa
  unsure (1)..(469): unsure at all Xaa locations
  Clone ID: TF_OSC29052j.C1.p1.np
IRDEFIRTXQEGPQQKRKTPMRTEDEVRKMIITSTEWPPPGMTKRQRRNTFRGAPQLTEHLLANGGRVSDSEDSDQVSSDDEDEKSPQGFNQNKMERKACSRCGEIGHVASSCATTCVHCEEDHPPDRCPTSRITCFFCEGTDHVPKDCQFSFLLTKKMANQPVSSNGEKHQGNTNPRQDYSFSLTPVPGQRKQNEKRKCRVREDICCFNCQGMGHFADKCPKPRNVAASTSVHANPRNQKLAPQRIVIHASRSSPIARVATAPIPMSALPQGVNAQFQPQPPADKTEASICVVPLEVPIQQLRNQVQDEEPEKKGITPKTVPNQGKKGITPKTVPNQGKIDLHITANLHEADIPIVLWSLEQTPYQRVKSSTRYQMLHGVKSASTGYQVDAKDMNDKKFXNRSPTQPPQPSLGQLEVQPDKSGEEKIPSATGDRAKRSRVEKFCYKLVIKTERKKSDKKRRPPNLSSC

SEQ ID NO: 19995 - protein, 1248 aa, Oryza sativa
  Clone ID: TF_OSC401985j.C1.p4.gm
MELTSEQEQLIHRNAQASNAILSALSPEEFNKVDGLEEAKEIWDTLQLAHEGSPAVREAKIELLEGRLGRFVMDDKETPQEMYDRMMILVNKIKGLGSEDMTNHFVVKRLLRAFGPRNPTLVSMIRERKDFKRLTPNDILGRIVSHEMQEEEAREVRQMVKNAPMIKNQEVALKANQEEESSCEESEDEEMAFIVKRFKHFLRKSGYGKGRKDDDKGKRQSKRACFNCGEYGHFIADCPRSNEAKAKGGKKKPKRAHVAEAHMAEVWYSGDEKYPEVKPKPKSKDKVEGKGGVATIAFKSSSSSKERLFNNLSDDDDDSYHYSCFMAQGRKVMTQKPSHTSLDVDSSDEESDNELDDVLKSLSKPTMQHLAKLMRALDSKEQSLERQEELLILEKKRNLDLEESLAKECAKNEQLANDLNLANGSLASLRDVNETLQEKFACLDKSHKDLEVQFDTLWNSTSQPNVVSNSSNPSTSNGCVRCYNIYLNSYATNIDAMQALKKENERLGTLVKYGCMKTYHSKDALYKTITAHPNKDGHGLGFSGGSPVSKRVMAYSSGGSCWVVDNGCTNHMTGERSMFTSLDKENGTRENIVFGDDGKGKLGYNCLFTDEDVTVFRRDDSSVAFKGKLKGDLYLVDFDVDRVNPEACLIAKSSMGWLWHRRLAHVGMRNLATLLKGEHILGLTNVTFEKDRVCSACQAGKQVGNPHSIKNIMTTTCPFELLHMDLFRPVAYISIGDNKYGFVIVDDFSRFTWVYVLHDKSEAQDVFKRFAKQAQNLYDLTIKRVRSDNGGEFKNTQVEEFLDEQAQEGTFISQTKYVKDILKKFGMEDAKPIKTPMPTNGHLDLDDNGKCVDQKVGNAFVHQYYNILHQSPDLVHRFYQDGSRIGRPASPAAAEMDTVTTMEAINAKIVSMDIVRAEIKAVDAQESLGGGVTVLVTGHLTGSDDVRREFSQSFFLAPQEKGYFVLNDILRYVGGEGDQEVEPEPELELSFPPSQQPDSVPAPSANGTSVPREQEAFSQPEQHVADPAPNAQEADLNGEEVYNPPNNTEGPVVEETPIPEVIDEVPNNVAVAMPTPPAPAPAPVPQEEAPKKSPAPPKQEKQVAPAPVAPVADAPTFSPNPESSNIQEAEEFEDPSSVQSAIAGSPVTISDRQCYVEEKRTAGSRGGGRGRFAPGRGGNFRGEGMRGRGNYTGGRGYGRGEFNYRSDYGGRGAGRGGSSRGGDVGYQRVDHSAGRAARAPSGTSAVAK

SEQ ID NO: 19996 - protein, 1455 aa, Oryza sativa
  Clone ID: TF_OSC101306j.C1.p6.fg
MSLHSIRSPSLSSHASSTSSGRGSRRSAADAEGDGDATAAARVAQEAQAAAREARAACEEAEARLQAATRAARLAAAEAEAARTAEAARQAAAAAAVLRAEEEEEWRDLERADAARVRRDADRDRHAGRRDRDFSPHRGGADLHRGEEERRDPWRDPRIDRALEAQRLREQAAAIEAQLDFDREQGGRDVGARSPRRQRASPSPDRRRGRRGPSGSPPVVQTVVKDVGGAWPMLTKTNYVEWAMVMKVKLQARHMWDAVWYGDVDYGEDWRALEALLAAVPTEMQSSIVNKRIAKDAWDAIASARIGSDRARRSTLQKLRQDWENLAFKPGEDIDDFVLRFNSLQQRLAQLVDTTIDKERAVEKLLRVVPEKYTQLALSIETLLDFTELTIEEVTGRLKAVDNRKQLPPSEPITIGGKLFFTKEQWLARQQEQKKGEATGSSASGSSSSRKRRPRKWEKARSGTLGGADGERKGSRDNTCHNCGKTGHWAKDCRQATHGGQAHVAQALEGDEVALFFVHRSIEPHFTPAQDATTPLQLDEPRAHVFLSNGSCGDKIDGWCLDTGATHHMTGRREFFSELDSSVQGSVKFRDASAVEIKGVGSILFTAKTGEHRLLTGVYYIPALRNSTISLGQLDENGSRVEIEDGVLRVWDRHRRLLVKRFGHLNFEALKQLGNKEMVQGMPRVEHVEQFCNTCILTKQRRLPFPRQASFRAKEKLELVHGDLCGPVTPATPGGRRFFLLLVDDVSCYMWVVLLDSKAAAADTIKRHQVAAEKECGRKLRVLRTDNGIQRHFSVPYTPQQNSVVERRNQTVVATARALLKQRGMPAIYWGEAVMTAVHLLNRSPTKALDGKTPYEAWHGRKPVVSHLRIFGCLAFAKELNHIGKLDDRSSPGVFIGYAEGVKAYRILDPATQRVRISRDVVFDEGRGWAWDKAVDDGSTSTLRDFVVDYVHFGGARGASSSSSPSSSTSAPGSPSAPASPPPPTPPATPPSPATPRSPTPAPTPPVEFATPLSNDEDRVDAYHDDEPLRYRTVDSIFSDQPVLGLVTRDFEAELHLAHEDGEPCSFAEANGDVAWRTAMQHEMNAVERNRTWPPGFVIPGKENKVLRLRKALYGLRQAPRAWNAKLDSTLKQLGFQQSSHEAIVYRRGKDNNALLVGVYVNDLVITGTKEAEVEAFKEEMKATFQMSDLGLLSFYLGIEVHQDSSDISLRQTAYAKRIVELGGLTGCNPAYTPMEERLKLSRDNTAEEVDATQYRRIVGSLRYLVHTRPDLAFAVGYVSRFMQRPTTEHQQAVKRILRYVEGTTDYGLHYPRCPASSRSSNKWWQSVKQQVVALSSCEAEYITTTTASTQALWLARLLGDLLGRDAEAVELRVDSKSALAMAKNPVFHERSKHIRIKYHFIRSCLEEGSIKASYINTQDQLADLLTKSLGRVKFQEFRARIGMVQIPQKAPHKT

SEQ ID NO: 19997 - protein, 535 aa, Oryza sativa
  Clone ID: TF_OSC1821j.C1.p3.fg
MDNTGNKGYGNDGSDDSRTQANGNEKSINETSPELIQIVVNQTNMLATAFQLLQNRNNPAGATNVQVPTVQQQCKLSEFLKTGPPTFAMAVDPMEASDWLRTVEKKLGLIQCTDQERVGFATHQLVGPASEWWDSYEASRPEGHTITWNEFSSVFKRSHVPAGMITLRKREFRYLKQGDLTVTEYLHEFYRLAQYAPEDVETDEDKQEKFLQGLKDELAVQLLLEDYEDFEKLVDKAMQLESEHNRMTNCKRRMVNNPVFPGGNQRQRTEPLQITGSSVVYQEFLPQEDERNAGNNNSNTNADDTTNNHGSCPIHDHLDQACNVNIIHQDIDDSINEGTQNDNPSNFDSGKDSNGDSNNGTTDANVSKDSQPPIPTPSQNDRPQMDSSVKKTLICYNCKGPGHFSRDCPQPKRNLRHHSGHYARRRQVTRLVVTGANAVPVRPHVNSNPYGNLSEVDSEDMKHEKFWNGSITELPQPSLSQPKGAPWSKSGEEKIPSATGGQAKQFRVVKFCWKFVKTQRKKSDKKRRPPNLSSC

SEQ ID NO: 19998 - protein, 753 aa, Oryza sativa
  unsure (1)..(753): unsure at all Xaa locations
  Clone ID: TF_OSC23989j.C1.p1.np
LRSCGTLHHFLAPPPPRIPPLPSVPRAIKRGNIPRDSLPLSPHYSLPLSLGFVWKPSPNPAGAIDGARERHRFPFPPAALSPSQPYINTPRASLHRFRHSPLSLSARIELAPSLSLSAVTAELRSAAVVAPDLLPPRRRLLQLRRILADLVHPSISVADRRNAVDPVDPSRAAAFLRSGRRFRRRRRPGVSRGPPLHFPLPSPLSGAAPPRRWSPAATIGARARRSRRLCRRGRLRARPAAAMWGPAVSRPRPRVRLTRGTHGAGRRKPRAPGPPWTVRLPRGPLPWTRTNEGYTSCGPMADNEKGNKVRSQDIGTSSSLVNEAPDTSCVTLVQHLINQNRLLIEILQQHQTPILNLSQIQAQVQLEAVQSLTPQVSMPPASQKTHGGVPHVDSKEASIICFMCDEQGHYARNCPQQKRKTPMRTEDEVRKMIITSTEWPPPGMTKRQRRNTFRGAPQLTEHLLANGGRVSDSEDSDQVSPDDEDEMERKACSRCGEIGHVASSCATTCVHDDEDEMERKACSRCGEIGHVASSCATTCVHCEEDHPPDRCQTSRITCFFCEGTDHVPKDCQFSFLLTKKMANQPASSNGEKHQGNTNPRQDYSFSLTPVPGQRNQNEKRKCRVREDICCFNCQGRGHFADKCPKPRNIAASTSVQATPDNQKLAPQRIVIHASRSSPIVPVATAPTPASALPQGVNAQFQPQPPVDKIEASIGIVPLDVPAQQPRNQVQDEEPKPMGMRKASTKPRQSXSKL

SEQ ID NO: 19999 - protein, 1705 aa, Oryza sativa
  unsure (1)..(1705): unsure at all Xaa locations
  Clone ID: TF_OSC26838j.C1.p3.np
MSNEVNHVGKAPMFNGTNYTTWKIKMSTHLKAMSFHIWSIVDVGFAITGTPLTEIDHRNLXLNAQAMNALFNSLIQEXFDRVSNLETAYEIWNKLVEIHEGTSEYKDAKLHFLKIQYETFSMLPHEVNDMYGRLNVIVDDLKGLGANYTDLEVAQKMLRALPEKYETLVTMLINSDMSRMTPASLLGKINTNDMYKLKKKEMEETSPSKKCIARQAEVEDKGNGKVNEANENLEEEIALLARRFNDLLGRRKERGRGSNSNRRRNRRPNKTLSNLRCFECGEKGHFALKCPSKDDDGDKSSKKKSGGYKLMKKLKKXGKKIEAFIGEWDSNEESSASSGSEEEDGDDTSSKKKKMAVVAIKEAPSLFAPLCLMAKGSSKVTSLSDSESDDDCDDVSYDELVSMFEELYAYSEKEIVKFKALKKDHASLEVLYEELKTSHERLTISHEKLKEAQDNLISTTQHGALIDVGISCDLLGDSATCHIAHVASSSISTSCDDLVDMSSSSSTSCVSICDASLVVENNELKEQVAKLNKSLERCFKDKNTLDKILSEQRCILNKEGLGFIPKKGKKPSHCATRFVKSNGKYCSKCREVGHLVNDCPCGKPPKTCMFDSHYMLRKAHDGSIVARYVGSPILGGKKNAIWVPKALVSNLQGPKQVWIILAILVFFLHDKSIVAELFKKFAKRAQNEFSCTLVKIRSDNGSEFKNTNIEDYCDDLGIKHELSATYSPQQNGVVERKNRILIEMARTMLDEYSVSDSFWAEAINTACHTTNRLYLHRLLKKTSYELIVGRKPNVAYFXVFGCKCYIYRKGVRLTKFENRCDEGFLLGYASNSKAYQVYNKNKGDEGLMRAMKDEGLMRAMKNMSIGDVKPIEVEDKPSTSTQDKSSTSATPSQAQVEVEEEKAQDPPIPPRIHTALSKDHPIDQVLGDISKGVQTRSRVASICEHYSFVSCLEPKHVDEALCDLDWMNAMHEELNNFARNKVWTLVERPRDHNVIGTKWVFRNKQDENGLVVRNKARLVAQGFTQVEGLDFGETFAPVARLKAILILLAFASCFDIKLFQMDVKSAFLNGEIAELVFVEQPPSFXDPKNPNHVYKLSKALYGLKQAPRAWYERLRDFLLSKDFKIGKVDTTLFTKIIGDDFFVCQIYVDDIIFGSTNEVFCKEFGDMMSREFDMSMIGELSFFLGLQIKQLQDGTFVSQTKYIKDLLKRFGLEDAKPIKTHMATNGHLDLDEGGKPVDLKLYRSMIVSLLYLTASRPDIMFSVCMCARFQAAPKECHLVAYPKGYPKGAKFKLVGYSDSDYAGCKVDRKSTSCSFQMLVMPPRTRHGRRAPTPDPVSEPEESSGEDYAQRDEEVEANVEGASEEESGDDDSGSGEYEDEESDDMHIDPSIQFVVNMRNPSQYTILRHHDQFLRPRDTPDPRFHTAFQKSVYEQVYAGKAFAEHKWISWRDINETLEFEGLQDLFRTVGIDRIMTLKQDYNEDLIRQFYATVWVAGDYSEMKWMSDTLXCSISRRQFRRLLNIRLDFGDDLHEEHTHNPLSIDYLSQFYEDGARYTYGKVAGLRTIPSVVNKIVRATILPRLGNNDDIRGVAWHVIDAIIQGRQFDIVTLMLQEIAISKGTFTQGIYYAPYIMRLPPPSRLVEKLPGDLSEKIVEEARCRFVSGLEFTIFGVKEELPVIEAWVVLSVGRLSPCPPLDEGGVRWLRG

SEQ ID NO: 20000 - protein, 344 aa, Oryza sativa
  Clone ID: TF_OSC400501j.C1.p2.fg
MVNTRASGSGNNNNEGNPTLAQVLAQQTQLMNMMIQQMQNQLNQGNNNAPPTQNKLADFLRVRPPTFSSTTNPVEAGDWLHAVEKKLELLQCTDQEKVVFASHQLQGPASEWWDHFRMNRAEGQPINWEEFTEGFKKTHIPVGVVTLKKREFRALKQKDRTVAEYLHEFNRLARYAPEDVRTDEERQEKFLEGLKDELPVTLISHDYVDFQQLVDKEAQGSSQRQRIKPLQISEPFSAGQGQSQQLNIGGEIKSETNESNEVNIEQANQPVPVQQDQSQENNSSGREQQVCFNCYKAGHFARECPKPKHQQPQGQVYNIVVTGANAVPVVSSSVTTQPPVSKRQ

SEQ ID NO: 20001 - protein, 348 aa, Oryza sativa
  Clone ID: TF_OSC400817j.C1.p15.fg
MEFTTEQEKAIHLNAQAANAILSALSPEEFNKVDGLEEAMEIWDTLQLAHEGSPAVRESKIELLEGRVGRFVMDDKETPQEMYDRMMLLVNKIRGLGSEDMTNHFVKRLLRVFVPRNPILVSMIRERKDYKRLSPSDILGRIVSNEMLEEEARELKQMVKNAAMIKNQEIGLKANQEEDSSGGEESEDEEMALIVNRFKHFLRKSGYGKGRKEDDKGKRQSKRACFKCGEYGHFIADCPKTNEAKHKVVKKKPDRAHVAEAHMAEVWYSGDEGSPKAMEKGDGDGGVATVAIKSSSTKERLFNILSDDDNDSYHHSCFMDHGRKVMPIQKPSLDDDNTSDEDSDNELD

SEQ ID NO: 20002 - protein, 920 aa, Oryza sativa
  Clone ID: TF_OSC401828j.C1.p30.fg
MSAPTPRVSRSREPHQRRISRSPPHRRGRRRPGEDRELIPVQRVVKEVGGSANYPLLTKTNYGDWALMMKVMLQARGLWDAVEHGDADFQADRMAMEAILRAVPPEMLASLAVKPSAKEAWDAIKMMRVGVDRVCKSKAQMLQKQYDAMEFKDGETVEEFSLRLNGLVTNLATLGVHLEEGKVVEKFLNSVPDHLSQIALSIETLLDLDELTLEEVTGRLRNAEEKLPAKSSAAGGKLFLTEEQWTARWKEKQAAESSSGKAKSGGGNRRRRGGKKKAEAAAHDGDRAGGDTQEGREPNRDKCRNCGRTGHWAKDCRKPKRPAEAHQALADEDDDESALLMAHVVDAAPVSASSSSAPPASSPPSQPDKTIELVEPKVFAHLLTEKQTNGGVWHLDTGATNHMTGIREVFAELDLSMRGSVRFGDGSVVGIEGRGKIIFECRNQEHRALTGVYYIPKLNANLISLGQLDENGCDVRIYHGVCTIRDPAAQLLARVRRTRNRLYLIKLTIGQPVCLAAKAQECAWLWHARYGHLHFDALRRLASRDMVRGMPDIDHVKQLCDSCVISKQRRTPFPRRSMFRAEDRLELVHGDLCGPISPATPGGKTHFLLLVDDASRYMWITLLGRKSEAADAIKRFQARAEAESKQKLRILRTDNGGEFTSVEFATYCAEQGVSRHFSAPYSPQQNGVVERRNQTILGMARSLLKAKNMPARYWGEAVTTAVFLLNRAPTKSLANMTPYEAWHGKKPAVGYLRTFGCLAYVKDVRPHLPKLSDRSKPMVLIGYADGAKAYEVFDPVSGRVQVSRDVIFDEGAGWDWDAAGAAAVPGGGGCSDFTVEYLTTATSLSPSTSAPSSASSGASASRAVTPSSASTPATLASASTPATPTFVSPPPGIDENLDAEQDDCPLRYRSMGDLLGDARY

SEQ ID NO: 20003 - protein, 726 aa, Oryza sativa
  unsure (1)..(726): unsure at all Xaa locations
  Clone ID: TF_OSC401861j.C1.p3.np
MSHLEGDKELDENGDGSTSKGTSTPKGASISFDYNKLTIPSHNFVSVPSLRSPQFDGTYYAAWKHKMKLRHLISLHPSIWKVVCTCVDVPNEDMEFTTEQEKAIHLNAQAANAILSALSPEEFNKVDGLEEAMEIWDTLQLAHEGSPAVRESKIELLEGRVGRFVMDDKETPQEMYDRMMLLVNKIRGLGSEDMTNHFVKRLLRVFVPRNPILVSMIRERKDYKRLSPSDILGRIVSNEMLEEEARELKQMVKNAAMIKNQEIGLKANQEEMALIVNRFKHFLRKSGYGKMALIVNRFKHFLRKSGYGKGRKEDDKGKRQSKRACFKCGEYGHFIADCPKTNEAKHKVVKKKPDRAHVAEAHMAEVWYSGDEGSPKAMEKGDGDGGVATVAIKSSSTKERLFNILSDDDNDSYHHSCFMDHGRKVMPIQKPSLDDDNTSDEDSDNELDXMFKNFSKPAMKQLSKLMKALDSKERFLERQEDLLILEKKKNLALEEDLAKEGERIELLQYEISLLNDSMASLTSVNETLQEELVVLDKNHINLEVEIDTLRNSASSLNETPMTPMPSISVGCARCYNYDLSSYATNLEAMEALEKKNERLGTLVKYGCMKTYHSKDALYKTIATNPNKDGHELGFSDESPVSKRVVVNGKIFLMFVREGKAPQESEVTLPFVGQRPGASGQNVQNFLAPVRIIVLLAPGLAGPWPSAGPARAREGEGNGPAAHXGKN

SEQ ID NO: 20004 - protein, 324 aa, Oryza sativa
  Clone ID: TF_OSC900065j.C1.p2.fg
MVNTRASGSGNNNNEGNPTLAQVLAQQTQLMNMMIQQMQNQLNQGNNNAPPTQNKLADFLRVRPPTFSSTTNPVEAGDWLHAVEKKLELLQCTDQEKVVFASHQLQGPASEWWDHFRMNRAEGVVTLKKREFRALKQKDRTVAEYLHEFNRLARYAPEDVRTDEERQEKFLEGLKDELPVTLISHDYVDFQQLVDKEAQGSSQRQRIKPLQISEPFSAGQGQSQQLNIGGEIKSETNESNEVNIEQANQPVPVQQDQSQENNSSGREQQVCFNCYKAGHFARECPKPKHQQPQGQVYNIVVTGANAVPVVSSSVTTQPPVSKRQ

SEQ ID NO: 20005 - protein, 1546 aa, Oryza sativa
  Clone ID: TF_OSC401393j.C1.p1.fg
EHARQGRRPLPEHHEYDAEDESLGLCSDEGDHHRRPRHPPRRGPAFMDRVVDDIHRDNRNRRAARVPLDEGLDPEDYLQWEMRCDQIFNSHNYLEDKKARLASIEFTGYALSWWNQLQLKQGDLSVDAYYKEMELLMSHTGVTENDEATIARFLTGLNDDVKERVEISYYYDIQNMVHIAQRVEQQLTSRHTSRSCSFQRDGDGSAASKSMSFKLTTPSRDGSKPAASSVSKSKSKVESTATSSSKSRSVQCYTCGGRGHYMRDCPNQKKVLMTKEGYVSESILENSEGVQLDHTLTTGYRDIDDSSMDDGAEKNNGLSMLAYAVQRDGSNVDAKGQRCNIFQSECKIQEKLLLGRPWQFDRNATHEGRSNCYSWANGQAESSNKTLLKLVKKKIEEDPNKWHEVLSEALWAHRISKHGTTKVTPSELVYGQEAVLPVEALEEIEKEKKRVAKAYNKRVKAKLFQVGDLVRKTILPLGTRSREFGVAIVLVDLSKKLPTVCIAANCPTSFGMASWINSAWLLDVVCTKNFESPLDKLGFKEDAALVKRSWQPAPSSFNLRSILEKEKLTGTNFMDWTKQELRGLIPQSPCLRASLQKSLPPSFEPFIMNFNMNNLNKTLAELHEMQKTAEESIKKNSNHVMVMHKRKPNNKKSGQKRKLNYDGITSTSNSKTKVQKTGPAKDAECFFCKKTGHWKRNCKKYLEQLKQKQQDGKSSTSALCKNVISASCLQAEGYGFRSVDNGCSVYYNDIFYFHAPMMSGLYIVNLDGCSIYNINAKRQGPNDLNPTFIWHCRLGHINEKRMEKLHRDGLLHSLDFESFETCESCLLGKMTKAPFTGQSERTSELLVLVHTDVCGPMSSTARCGFGYFITFTDDFSRYGYVYLMRHKSESFEKFKEFQNELWGYALETAAFTLTRVPSKSVDKTPYEIWTGKRPSLSFLKIWGCEVYVKRLQSDKLTPKSNKCFFVGYPKETKGYYLYNREEGKVFVARHGVFLKKEFISRKDSGSIVRLEEIQETPENASTSTQPQQAEQDVVQQVEQVVVEPVVEAPASRRSERIRRTPARYALLTIGQRDILLLDNDEPTTYEEAMVGPDSEKWPGAMKSEIESMHVNQVWNLVDPPDGVKAIECKWVFKKKTYVDGNVHIYKARLVAKGFRQIQGVDYDETFSPVAMLKSIQIVLAIAAYFDYEIWQMDVKTAFLNGNLDEDKSIYGLKQASRSWNIRFDEVVKALGFVKNEEEPCVYKKISGSALVFLILYVDDILLIGNDIPMLESVKTSLKNSFSMKDLGEAAYIMGIRIYRDRSKRLIGLSQSTYIDKVLKRFNMQDSKKGFLPMSHGINHGKNQCPQTTDERNKMSVIPYAWAIGSIMYAMLCTRIDVSYALSATSRYQSDPGESHWIAVKNILKYLRRTKDMFLVYGGQEELVVNGYIDASFQTDKDDFRLQSGFVFCLNGRAVSWKSVMTSASSPMNLYCDNSGAIVQAKEHRSHQKSKHILRRYHLIHEIVGRGDVKICKIHTDLNVADLLTKPLPQPKHEAHTRAMGIRYVHD

SEQ ID NO: 20006 - protein, 486 aa, Oryza sativa
  Clone ID: TF_OSC18140j.C1.p1.fg
MADNEKGNKVRSQDIGTSSSRVNEAPDTSCVAVVQHLINQNKLLIEILQQHRMPILNPSQMQPQVQLEAVQALTPQVSAPPTSQKAPHAMPHVDPKEASIICFMCDEQGHYARNCPQQKRKAPMRIEDEVRKMIITSTEWPPPGMTKHQRRNSFRGAQQLTEHLLANGGRVSDSEDSDQVSSDDEDEKSPQGFNQNKMERKACSRCGEIGHVASSCATTCFHCEEDRPPGECPMSRITCFFCEGTDHVPKDCQFSFLLTKKMANQPTSSNGEKHQGNTNPRQDYRFSLTPVPGQRNRNEKRKCRVREDICCFNCQGMGHFADKCPKPRNIAASTSVHATPCNQKLAPQRIVIHASQSSPIARVATAPTPASALPQGVNAQFQPQPSVDKTEASIGIVPLDVPAQQPRNQVQDEEPKQKHEIMNELDKFIEGSMLGLQVLSGTEAPSSSAATQSKSAKGSTRDKSGEEKIPFATGDRAKQFGVEKLS

SEQ ID NO: 20007 - protein, 713 aa, Oryza sativa
  Clone ID: TF_OSC7923j.C1.p2.np
LAPPPPRIPPLPSTPRAIKRGINPRVPLPRFPLFPLSLSLGFVRIKPVIIAGAINGGRNLRGRFPSSPAAFSPFRRYKNVARAPLFRFRRSPLTLAVEIVLAPCSSLSAIAAELRSAAAAAPLPPTRRPLRPLRRDAVDPVRRSASPVDRRSTVVIVIPSRAAVFLRSVRRFHRLRRLGVSRGPPVRFPLPSSLLGAAPPRRWSPAATIGARARSSRRPRRRGRPRARPRGCQVGPAVSRPRPRVRLTRGTHGADRRQPRAPGPPWTERLTRGPHFPWTRANEGYTSCGPMADNEKGNKVRSQDIGTSSSRVNEAPDTSCVAVVQHLINQNKLLIEILQQHRMPILNPSRMQPQVQLEAVQALTPQVSAPPTSQKAPHAMPHVDPKEASIICFMCDEQGHYARNCPQQKRKAPMRTEDEVRKMIITSTEWPPPGMTRRQRRNTFRGAPQLTEHLLANGGRVSDSEDSDQVSSDDEDEMERKACSRCGEIGHVASSCATICVHCEEDHPPDRCPTSRITCFFCEGTDHVPKDCQFSFLLTKKMANQPASSNGEKHQGNTNPRQDYSSSLTPVPGQRNRNEKRKCRVREDICCFNCQGMGHFADKCPKPRNIAAGTTVHATPCNQKLAPQRIVIHASRSSPIARVATAPIPMNALPQGVNAQFQPQQRIVVDGRSCVSPRPTPGRAKGNQPPEGDTQQKTVIRFNQQSEGSFSCE

SEQ ID NO: 20008 - protein, 467 aa, Oryza sativa
  Clone ID: TF_OSC400948j.C1.p2.fg
MADNEKGNKVRSQDIGTSSSRVNEAPDTSRVTLVQHLINQNRLLIEILQQHQTPMLNLNQIQPQVQLEAVQALTPQVSMPPASRRTHDDVPPVDPKEASNICFTCDEQVHYARERPQQKRKTPMRTEDEVRKMIITSTEWPPPGMTRRQRRNTFRGAPQLTEHLLANGGRVSDSEDSDQVSSDDEDEMERKACSRCGEIGHVASSCATICVHCEEDHPPDRCPTSRITCFFCEGTDHVPKDCQFSFLLTKKMANQPASSNGEKHQGNTNPRQDYSFSLTPVPGQRNRNEKRKCRVREDICCFNCQGMGHFADKCPKPRNIAAGTSVHATPCNQKLAPQRIVIHASRSSPIARVATAPIPMNALPQGVNAQFQPQPPADKTEASICVVPLEIPIQQLRNQVQDEEPECKKVIVCYNCSEEGHYSENCPQPRQNRPPHYRQFTRSRHSNRIVVTGANAVPVRPRDNQNP

SEQ ID NO: 20009 - protein, 180 aa, Oryza sativa
  unsure (1)..(180): unsure at all Xaa locations
  Clone ID: TF_OSC1772j.C1.p2.np
MARLYVGNLDPRVTSGELEDEFRVFGVLRSVWVARKPPGFAFIDFDDKRDAEDALRDLDGKNGWRVELSRNSSSRGGRDRHGGSEMKCYECGETGHFARECRLRMGSGKRRSRSRSRSRSPQYRKSPTYGRRSYSPRDRSPRRRSVSPVRGRSYSRSPRGRGGSPYADGXGIFCXFYNSR

SEQ ID NO: 20010 - protein, 1113 aa, Oryza sativa
  Clone ID: TF_OSC19101j.C1.p1.fg
MSPFSGASLARSLSPDTHPRHHRLRPSPNPPLLPLPPDPPASLASPTLEFFPPVGPSRQPPTLPSLGVPASDPAFVSRRYRVPGTGCPFRSAVSSPDLQNPMLDSSSAPNPRLSSRCQGSPKGELPGFKRLYSDVVTAPPQPPAAKSSDFIAVQPPSRFSGAVAKDIRILQSGRLLDLSTQNLSASAQGTGDIQVGENPWKEVKGKRRWRNHSAFTTPNNLEQMHSRKARFLQHMEGKCFRCLSTKHKIVDCREPFRCWRCLKFGHLASSCSKKFAYKSTLPPLKTHTEAFPALAPLCFPPRSFPSPPKSPIMDDLTARPLLDSVVISATGEIERNRERFSAHSLVAWQVGAQEGRVELNTFADDVPSAFNIRRADIQFTKFHPEDFFITCSNQAAKVIGRKCSIHYVEEYSRRRNYNRTFDLWIWTDEPRAIPRGGTFAITSADEEGLATDIPLPDLEPLRNPPPSEPKKGWTYNVLVHVDTLEDLLSRKARAYKWDYDVQDDGTLYKEYPLPCRAEPDPTRGPADDDEDKDRDNHSRSRHRSRSLWDRLRRRSSSRSREPDRRDGHCQDNENRGRPRNRERSEHRSRSCRSRDPSEGSEEVLTLLESHLDPMLHEATVQHSIYSPDTSSPRAVSPVFVPSFAVQGTSQEELAATQASPVQEFIAALSTPVQPPLLPAPETQARRPGRAKVTIPALSSAQRHSERLLRKRRAGAKLESFAQEILSKNFGIMDERSSFDHNIKKIYLQRYKKPLSPASLKTIAELVEKGGCKSIRLKASKKATVAPLGLNSKAKQDSVRCILQQHGATIVCLQETKLSSISDRIILNTLGQRFLRHCVSLPATGTRGGVLLACDENYFSISDVLLGTYSVSAVLTMRGEGLQWSITVVYRPQLEPDKINFLSELEALQTSMKSAWLIIGDFNLIYKASDKNNDRHNRRMMQRFRGLIDKLQVKELYLPGRRFSWAGEGINPTQTKIDRAFVTTDWDMMFDCSNLYPLSSACSDHAPLLLVGNEKMNRFPSFRFEAFWLKIPGFLDIVTDSWTNPILSTNRLAIIRLKLRRLAQDLKRWSRNHVGDIKLQLAVATEVIFQLEDWLMESGLYCQTLKIEFLLCQC

SEQ ID NO: 20011 - protein, 174 aa, Oryza sativa
  Clone ID: TF_OSC900378j.C1.p23.fg
MARLYVGNLDPRVTSGELEDEFRVFGVLRSVWVARKPPGFAFIDFDDKRDAEDALRDLDGKNGWRVELSRNSSSRGGRDRHGGSEMKCYECGETGHFARECRLRIGPGGLGSGKRRSRSRSRSRSPQYRKSPTYGRRSYSPRDRSPRRRSVSPVRGRSYSRSPRGRGGSPYADG

SEQ ID NO: 20012 - protein, 246 aa, Oryza sativa
  Clone ID: TF_OSC401508j.C1.p1.fg
MDQSTSKNKNSSNLQDPQNMGINQPMLLFEDPPQASRNKGRVQASLKPEDYTINLNHLKQYSSNERCHLTPAKRRINATCYRCGEEGHCALDCPKKKLGNGQVRNIPRHPKRKMRAGIPPKPMPHSLYPKPMYQQFRRQGTTPHWWKGKRERKASSLITYAELDISKMGIEIGDLPEEVEELQLWQRKRDGCCFSCGQFGHYAIGCTQDTNEEQETLPSQISPEEHRVLDPSKEIRRLRHVVVAER

SEQ ID NO: 20013 - protein, 269 aa, Oryza sativa
  Clone ID: TF_OSC15242j.C1.p1.np
MKTWTNRHRKKNKNSSNLQDPQNVGINQPMLPFEDPPQASRNKGRVQASLKPEDYTINLNHLNQYPANGSCHLTTARRKTNVTSFGCGEKGHYANKCPQRRLRVGPRRNLPWHPICNIRPGILPTPMPCSGNPKLPYQPFPRQRTTQHWWKGEQKRKASSLITYAELDLSKMGIEIGNLPEEVEELQLWQRKRDGCCFSCGQFGHYAIGCTQDTNEEQETLPSQINPEEDRVPDPSKEVSKIKACSRCGEIGHYGSNCVTQCPYCDEDH

SEQ ID NO: 20014 - protein, 1310 aa, Oryza sativa
  Clone ID: TF_OSC402160j.C1.p18.fg
MVDGAELEHLSTDRISAEYVTALRRGWTERHNVSADRIGAVFQDLSAIGSGAEVLHPLAEPRPAARPFFLPPQWLSAEAQRRRTISLLPSKKSKKSPLNRRILEGKLLEDIVARDDSFDLNRTLFYDEPNYEAFDDEGAMKSQSVKSLTVEEVIESQGMGVDVNMQKKKAVDANEGRNQESDRVEINVELQKEEAVEANKARRLESEGVEVNVELQKEEATEVNEARSQVVPIVGNHVDDDNEVADGSMGGGGEERTTDAQLASLVRFCFRDKIYTRRECEETLLMNGLSVDLLHQHSKEYDDTHEEEGYEVEYAVDSDDDHLVAKMSQEEREVFEKLVGRNPEVVQFEDVSDYELAVVDGGVTYNGIIDAMGEEPKNGLEFKSLELLQIWLQSYSISVHRPFHVKHSNASKKYTVACIEESCEWQVRARKTKDGRWRVTGVGKEHTCCSAEASGNHLQLTSKFIGNRLQPFVRAEPTLTHVAIVEAVEAIWHYRPSYGKAWRAKQVAMKNIWGDWDEAYVRLPTLLNAIKAKNPTMHYVVEPHPERSRPVDGVMRRVFGRAAWIFRPAWTLAGIATDPEDVEEMNEYDTHTRARATVKYGPIRDRVTRELMRSVNDVGVALGTPAGSENEVGILRSALQRLKQRSRMLAARLGCRSTDAVDPQPRLMWTQAGETSQQRAEEEGEEEYDEGEEEDGQSDEEEEEQPEEIGSSQLAGAPQPSQPSQGRPQRKRAPVDRYTPSTSGRRAHPATQHPSGGNLSAKSASTEMADLSARFFGAEMRLRIPRVAISAPNQMALRWPTSVPDFPQCELVELSMAKQSLVLTLIMLAPQVDKETRADVIKAGRGAGKRDPHGSDSGRAVHGGSGPRTGEERRTTRRPRDGRTDGPDLPKGRSDGGGSSRPMFNREKGKNVSGYASSNSSFQLNPPLASRELTRAHPWSIPSMLLGSQLPLVGSQDQNQYVFDRTFATQVNELPMPEEDVPFCHDCREQGHYALNCPWVYVKEAPSFGLAGQTSLNQPPHTKSSLQPSVQSREPNGENPWNPGKCFPPSLSYHVGSRTKQAKVKKSKNQKRKAPMRTEEEVRKMTITSTEWPPAGITIPRRQRGNTFRGARQLTQHLLSHGGRVSDSEGSDQVSSDDEDESPRHVGEEEMESKACTRCGEIGHIASMCLTLCPHCEEDHPPGECPTRKVTCFLCEGTNHVPKDCQLSVLLTKTAEIQRTTLRLSHQLVSSNSNIDDIIHNTNAPPAAPDSAINHSNNTFSTNHSLHRQPQQRIVVDGRSCVSPRPTLGRAKGNQPQEGDTKQKTIIRFN

SEQ ID NO: 20015 - protein, 469 aa, Oryza sativa
  Clone ID: TF_OSC419186j.C1.p1.np
MSWHRAGVLLLGSILPTCPGGSGRRGVGSVLLFMARMGWELCHVFRPYTVVMFNREKGKNVSGYTSSNSSFQLNPPLASRELTRAHPWSIPSMLLSSQLPLVRSQDQNQYVFDRAFAPQVNELPMPEEDVPFCHDCREQGHYALNCPWVYAKEAPSFGLAVQTSLNQPPHTKSSLQPSVQSREPNGENPLNPGKCFPPSLSYHVGSRTKQAKGKKSKNQKRKAPMRTEEEVRKMTITSTEWPPAGITIPRRQRGNTFRGARQLTQHLLSHGGRVSDSEGSDQVSSDDEDESPRHLDEEEMESKACTRCGEIGHIASMCLTLCPYCEEDHPPGECPTRKVTCFLCEGTNHVPKDCQLSVLLTKTAEIQRTTLRLSHQLVSSNSNIDDIIHSTNAPPAAPDSAINHSNNTFSTNHSLHRQPQQRIVVDGRSCVSPRPTPGRAKGNQPQEGDTKQKTVIRFNQQSEGSFSCE

SEQ ID NO: 20016 - protein, 1858 aa, Oryza sativa
  Clone ID: TF_OSC400902j.C1.p24.fg
MANKTLREFAAPSADNVAIGPQVNIGDVDFDLKSSLITIAQANPFCGEPNEGSNADLQQFLEICSTYNIKGVNPDTVRLRLFPFSLLGRAKQWFYVMRTSTPTIHPHFHNYNFMLLVHLVLAGSRLLAGTNTLVVGLIVHPSRFTTTSGVGVTIAKAQHPRIVVVGSPTSLHPIDLSLSSKDRDTLEHIRWYQSPSCSFFFDSLHSPPIAPPVRLTLDRDSATKASIHLLQRFVQVRRLPSPPVWHDENWLVRDRTQGLEEDVCITNEKLGHVERTQIDSNTKLTTLEASVATVNTSLDGIVWRLDEMARASHHGSEMDDHDYVGDSEDDADQRRHRFNRRGVAHRRPRREVRNNDDSFGKIKFTIPAFDGKYDPDAYLSWELVVDQKFACHDVPEDKRVRAATSEFTDFASVWWCEYRRTHINALPPTWDDLKQIMRARFVPSYYARDMLNKLQQLKHGGTSVEEYYQALQMGRTPWTARSGAAPTDRSSVSTSTSAPSNSNSNKAWPTPSTARSRASEVAEKPTKSASSVASTGRTRDVQCHRCKGFRHMQRDCPSKHVLVVKADGEYSSASDFDEDTLTLLVANNIASEDEKHIGADVADQYESLIVQRVLSAQMGKAEQNQRHNLFQTKCVVHKRSCCTIIDGASCRNLVSTEMVTKLALQMKPHPHPYYIQWFNNSGRIKVTQLVRLNFAIGSYCDFVDCDVVPMHACSLLLGRPWQYDKDTLHHGRTNQYSFMHNGKKIVLHPLTPEAVFENNVARAEKEKNVEHAKSENQIVAKEQVHHNLKGSQSNRRKDSVIKLNGPCLLTTKSDIVNLDTSDIVCYAFICKDALFSFENIPLSFPPAVTNLLQEYEDVFPKDVPPGLPPVRGIEHQNDLIPGASLPNRAPYQTNPEETKEIQRQVQDLLDKGNGIEVDQAKVEAIQSWPIPKTISQEAHGGGLMGHFGAKKMVDILAEVVRLHGVSNTIVSDRDTKFLSHFWRTLWAKLGTKLLFSTICHPQTDGQTEVVNRTLSTMVRAVLKKNIKMWEECLPHIEFAYNRSLHSTTKMCPFQIVYGLLPRAPIDLMPLPSSEKMNFDAKLLFSTTCHPQTDGQTELVNRTLSTMVRAVSKKNIKMWEECLPHIEFAYNRSLHSTTKMCPFQIVYGLLPRAPIDLMPLPSSEKMNFDAKQHAELMLKLHETTKENIERMNAKYKFAGDKGRRELNFEPGDLVWLHLRKERFPDLRKSKLTPRADGRFKVLAKINENAYKLDLLADYGVSLTINVADLKPYLGAEDELESRTIQMQEREDDEDINTNGTSTLPQVQLHGPITRDHARQLNYQEQWRLSNGERNRTGWIRTAAQHKLLTAATTSCELRFGRARTNTLVLGLIVHPSRFTTASRVRVTIVKAQHPWIVVVGSPMSLRPIDLSLSSKDRDILEHITMQTVLLSIPRTNALRHSSQNSSRWAKTNALRGRILSFQQTRDESIPEAWERLQELTPMSHDHLDAEAGGAFFSKTVQGAVDLIEKMVSNMGWSEERHQTRQRGMHTVKETELLAAKLDLLMKRLDDHEKWPQGTIKALDSHVTCEVCGGTGHSGNDCPETREEAIYMGNNNNGYRPQGGHGWNQPRPYYQGGNNNGNFSNQPSLRDLIFAQAKTTDALSRKLAANDKVLENINVKLDGFASAFQNQLSFNKMIETQLAQLASLVPANETGRIPGQPYSSIENVKAVMTRGGKSTRDPPYPNHAGTNGISKEVPSNDSADKEVPLEKTVPQEYCDTRLLLFPQRSRKPSVDEQFARFVEVIQKIHINVPLLDAMQVPTYAHYLNNILNNKRPLPTMEVVKPTEQCSNVILHKLPGKYDPQSDYPKISDSLMLDQTV

SEQ ID NO: 20017 - protein, 554 aa, Oryza sativa
  Clone ID: TF_OSC2463j.C1.p1.fg
MADNEKGNKVRSQDIGISSSRVNEAPDTSCVTLVQHLINQNQLLIEILQQHQTPILNLSQIQPQAQLEAVQALTPQVSMPPASRRTHGEVPHVDSKEASIICFMCDEQGLYARECPQQKRKTPMRTEDEVRKMSITSTEWPPPGMTKRQRRNTFRGAPQLTEHLLANGGRVSDSEDSDQVSSDDEDEKSPQGFNQNKMERKACSRCGEIGHVASSCATTCVHCEEDHPPDRCPTSRITCFFCEGTDHVPKDCQFSFLLTKKTANQPASSNGEKYQGNTNPHQDYSFSLTPVPGQRNQNEKRKCRVRKDICCFNCQGMGHFADKCPKPRNIAASTSVHATPCNQKLAPQRTVIHASRSSPTARVATAPTPASALPQDVTAQFQPQPSVDETEASIGIVPLDVPAQQPRNQVQDEEPEHKKVIRHAPVVEKLDTLLACVSHSALTMKKTIHQGSVPLASLSKELSSMEEVVSLPDLLQAEQRAINLRRAIPSRRPSSASNSNQKEASPMNDSNMQSYHIITEPIKDDAVTRTMPAISLQKQNEQLRLWFSVRYLSL

SEQ ID NO: 20018 - protein, 453 aa, Oryza sativa
  Clone ID: TF_OSC404799j.C1.p20.fg
MADNEKGNKVRSQDIGTSSSRVNEAPDTSCAAVVQHLINQNKLLIEILQQHRMPTLNPSQMQPQVQLEAVQALTPQVSAPPTSQKAPHAMPHVDSKEASIICFRCDEQGHYARNCPQQKRKAPMRTEDEVRKMIITSTEWPPPGMTKHQRRNSFRGAQQLTEHLLANGGRVSDSEDSDQVSSDDEGAKPPQGFNQNKIELKACSRCGEIGHVASSCASTCVHCEEDHPPDSFLLTKKMANQPASSNGEKHQGNTNPRQDSSFSLTPVPGQRNRNEKRKCRVREDICCFNCQGMGHFADKCPKPRNIAAGTSVHATPCNQKLAPQRIVIHASRSSPIARVATAPTPMSALPQGVNAQFQPQPPADKTEASICVVPLEVPIQQLRNQVQDEEPECKKVIVCYNCSEEGHYSKNCPQPRQNRPPHYRQFTRSRHSNRIVVTGANAVPVRPRVNQNP

SEQ ID NO: 20019 - protein, 602 aa, Oryza sativa
  Clone ID: TF_OSC401368j.C1.p29.gm
MSITGDNNNTGDKEKEPPVNSNRGNTTSNSSKWPFSGVLPDSIVDVYMHMPLGKDMWDALEAKFGVSDAGSDLYVMELFYDYKMVDGRSVLEQDHEIQMLAKELENNNCELSDKFVAGGIIAKLPPSWTDFATSLKHKRQEFSVTDLIGSLGVEEKARAKDNRGKKIEGGSSANLVQKKNPHASHNNNKKVKPDVKPKATTNFKKKGKRKAKGVCFVCGKPGHWAKNCPYRKDKKSANMVISEGGGTLGFLIVNSGVPDMSVGTITESRDATFFENEFSMKNAPSTSSQEPILSPEHFALIEHIDQTLEENPEEDNILATRKSKRQRTAKSFGDDYIVYLVDDTPRTIEEAYSSSDADYWKEAIRSEMDSIMSNGTWEVVERPYGCKPVGCKWVFKKKLRLDGTIEKYKARLVAKGTMSYGIHYAGYPKVLEGYSDSNWISDADEIKATSGGRLHSTGILDGSDETNLFETSSTEKDFNSGNGQPPFRAAVNPEADQPDTPADPTPSRPPSPGADVIKAGRGADMRAPPVHGPGRSGAPRGGRTDGPDLPKGRSDGGGSSRPVRVGTAQTGPATMARDGAAHMRQRRKTAADDDRPATESGG

SEQ ID NO: 20020 - protein, 1194 aa, Oryza sativa
  unsure (1)..(1194): unsure at all Xaa locations
  Clone ID: TF_OSC101037j.C1.p2.np
MRAQVSTRMPSFISSRSNMRHSPCCLMSVNDMYGRLNVIVNDLKGLGANYTDLEVAQKMLRALPEKYETLVTMLINSDKSRMTPASLLGKINTNDMYKLKKKEMEEASPSKKCIALQAEVEDKGKGKVNEANEDLEEEIALLARRFNDLLGRRKERGRGSNSNRRRNRRPNKTLSNLRCFECGEKGHFASKCPSKDDDGDKSSKKKSGGYKLMKKLKNSKKKKMAVVAIKEALSLFAPLCLMAKGSSKVTSLSDSESNDNCNDVSYDELVSMFEELHAYSEKKIVKFMALKKDHASLEVLYEELKTSHERLTISPEKLKEAHDNLLSTTQHEALIDVGISCDLLDDSATCHIAHVASSSISTSCDDLVDMSSSRSSSCVSICDVSLVVENNELKEQVAKLNKSLERCFKGKNTLDKILSEQWCILNKEGLGFIPKKGKKPSHCATRFVKSNGKYCSKCREVGHLVNDCPGGKPPKTCMFDSHYMLRKAHDGSIVARYVGSPILGGKKNAIWVPKALVSNLQGPKQVWVNYRTGGSHWVLDSGVNYRTGGSHWVLDSGCTQHDRAMFTTFEVGGNEQEKVTFGDNSKGKVIGLGFFLGYASNSKVYRVYNKNKGIVEETADVQFDETNGSQEGHENLDDVGDEGLMRAMKNMSIGDVKPIEVEDKPSTSTQDEPSTSAMPSQAXVEVEEEKAQDPPMPLRIHTALSKDHPIDQVLGDISKGVQTRSRVASICELYSFVSCLEPKHVDEAPCDPDWMNAMHEELNNFARNKVWTLVERPRDHNVIGTKWVFRNKQDENGLVVRNKVRLVAQGFTQVEGLDFGETFAPVARLEDIRILLTFASCFDIKLFQIDVKNFKIGKVDTTIFTKIIGDDFFVCQIYVDDIIFGSTNEVFCKEFGDMMSREFEMSMIRELSFFLGLQIKQLKDGTFVSQTKYIKDLLKRFSLEDAKPIKTPMATNGHFDLDEGGKPVDLKLYRSMIGSLLYLTASRPDIMFSVCMCARFQAAPKECHLVAVKRILRYLKHSCTIGLWYPKGAKFKLVGYSDSDYAGCKVDRKSTSGSCQMLGRSLVSWSSKKQNSVDLSTAEAEYVSAGSYCAQLLWMKQTLLDYGISFTKTTLLCDNDSAIKIANNPVQHSRTKHIDIRHHFLRHHVAKCDIVISHIRTEDQLADIFTKPLDETHFCKLRNELNVIDFSNVA

SEQ ID NO: 20021 - protein, 1701 aa, Oryza sativa
  unsure (1)..(1701): unsure at all Xaa locations
  Clone ID: TF_OSC13136j.C1.p2.np
MSNEVNHVGKAPMFNGTNYSTWKIKMSTHLKAMSFHIWSIVDVGFAINGTPLTEIDHRNLQLNAQAMNALFNSLSQEEFDRVSNLETAYEIWNKLAEIHEGTSEYKDAKLHFVKIQYETFSMLPHESVNDMYGRLNVIVNDLKGLGANYTDLEVAQKMLRALPEKYETLVTMLINSDKSRMTPASLLGKINTNDMYKLKKKEMEEASPSKKCIALQAEVEDKGKGKVNEANEDLEEEIALLARRFNDLLGRRKERGRGSNSNRRRNRRPNKTLSNLRCFECGEKGHFASKCPSKDDDGDKSSKKKSGGYKLMKKLKKEGKKIEAFIGEWDSNEESSASSGSEEEGGDDASSKKKKMAVVAIKEALSLFAPLCLMAKGSSKVTSLSDSESNDNCNDVSYDELVSMFEELHAYSEKKIVKFMALKKDHASLEVLYEELKTSHERLTISPEKLKEAHDNLLSTTQHEALIDVGISCDLLDDSATCHIAHVASSSISTSCDDLVDMSSSRSSSCVSICDVSLVVENNELKEQVAKLNKSLERCFKGKNTLDKILSEQWCILNKEGLGFIPKKGKKPSHCATRFVKSNGKYCSKCREVGHLVNDCPGGKPPKTCMFDSHYMLRKAHDGSIVARYVGSPILGGKKNAIWVPKALVSNLQGPKQVWIILAILVFFLHVKSIVAELFKKFKRAQNKFNCTLVKIRSDNGSEFKNTNIEDYCDDLGIKHELSATYSPQQNGVVVRKNRTLIEMARTMLDEYSVSDSFWVEAINTACHATNRLYLHRLLKKTSYELIVGRKPNITYFQVFGCKCYIYRKGDSLTKFESRCDEGFFLGYASNSKVYRVYNKNKGDEGLMRAMKNMSIGDVKPIEVEDKPSTSTQDEPSTSAMPSQAXVEVEEEKAQDPPMPLRIHTALSKDHPIDQVLGDISKGVQTRSRVASICELYSFVSCLEPKHVDEAPCDPDWMNAMHEELNNFARNKVWTLVERPRDHNVIGTKWVFRNKQDENGLVVRNKVRLVAQGFTQVEGLDFGETFAPVARLEDIRILLTFASCFDIKLFQIDVKSAFLNGEIAELVFVEQPPGFEDPKNPNHVYKLSKALYGLKQAPRAWYERLRDFLLSKDFKIGKVDTTIFTKIIGDDFFVCQIYVDDIIFGSTNEVFCKEFGDMMSREFEMSMIRELSFFLGLQIKQLKDGTFVSQTKYIKDLLKRFSLEDAKPIKTPMATNGHFDLDEGGKPVDLKLYRSMIGSLLYLTASRPDIMFSVCMCARFQAAPKECHLVAYPKGAKFKLVGYYPKGAKFKLVGYSDSDYAGCKVDRKSTSGSCQMLGRSLVSWSSKKQNSVDPTAEAEYVSAGSYCAQTEDQLADIFTKPLDETHFCKLRNELNVIDFSNVAXDGAPWLLLLHIVYLLLFALMLWIYFHLVLHCENGACHIRGSFALLHVLYFLLYVSKSTKSAKTTISWKMFQKVPYMFSKPHIARKMIFMKMPFDPLLKKLDSYFWLKXDLDPWHGTLGEARVVLRFAPIEGSFLVXFNSSNRRSDRRIRPVXPAVHARSDRPTGGRDSAARGGRYRANGAVVDQTEPMAVXPSRGRSDRQLNVVIHLVCXRVDXPRVKCIASICRASVALDXSSPRRVIACYSWRLPPPRRLVEELPGDLSEKIVEEARRRFVSGLEFTTFGVKEELPVIEAWVVLSVGRLPPCPPLDEGGVRWLRG

SEQ ID NO: 20022 - protein, 1426 aa, Oryza sativa
  Clone ID: TF_OSC400450j.C1.p1.gm
MGRSRLAHPLTKGACGGFVVERWSWARLNGGLVSLDWASPPREKMSNEVNHVGKAPMFNGTNYSTWKIKMSTHLKAMSFHIWSIVDVGFAINGTPLTEIDHRNLQLNAQAMNALFNSLSQEEFDRVSNLETAYEIWNKLAEIHEGTSEYKDAKLHFVKIQYETFSMLPHESVNDMYGRLNVIVNDLKGLGANYTDLEVAQKMLRALPEKYETLVTMLINSDKSRMTPASLLGKINTNDMYKLKKKEMEEASPSKKCIALQAEVEDKGKGKVNEANEDLEEEIALLARRFNDLLGRRKERGRGSNSNRRRNRRPNKTLSNLRCFECGEKGHFASKCPSKDDDGDKSSKKKSGGYKLMKKLKKEGKKIEAFIGEWDSNEESSASSGSEEEGGDDASSKKKKMAVVAIKEALSLFAPLCLMAKGSSKVTSLSDSESNDNCNDVSYDELVSMFEELHAYSEKKIVKFMALKKDHASLEVLYEELKTSHERLTMWILWLSGRSAASPLCRLVFATAIADNNNDFTDRPASVAAEWCLRLHGWPIMPPLLGVYDFTAGLPPSPPSGVYDFTAGLPRPPPTGASAYTAGLLCRRCWASTTSPTGRLVRRRLVSSPARLAYYAAAVGRLRLHRRRASVAAEWCLRLHGWPIMPPLLGVYDFTAGLPPSPPIGASAYTAGLLCRRCWASTTSPPACLRRRRVVPPPTRLAYYAAAVGRLRLHRRPASVAAEWCLRLHGWPIMPPLLGVYDFTAGLPPSPPIGASAYTAGLLCRRCWASTTSPPACLRRRRLVPPPTRLAYYAAAVGRLRLHRRPASVAADWCLRLHGWPIMPPLLGVYDFTAGLPPSPPSGVPAYTEWISQNITTGRLVRRRLVFSPARLAYYAAVVGRLRLHRPACLRRRRLVFPPARLAFMPPLLGVYVFTDRPPRPPPTGASACTAGLYAAVVGRLRLHRPAASSAADWCFRLHGWPLCRRCWASTSSPTGLPSPLPTGVSACTAGLYAAVVGRLSLHRPAASSAADWCFRLHGWPIMPPLLGVYVFTDRLAFAAADWCFRLHGWPLCRRCWASASSPTGLPSPPPTGVSACTAGLYADVVGRLRLHRPAASSAADWCFRLHGWPIMPPLLGVYVFTDRLAFAAADWCFRLHGWPLCRRCWASTSSPTGLPSPPPTGVSACTAGLYAAVVGRLRLHRPAASSAADWCFRLHGWPIMPPLLGVYVVTDRPPRPPPTVKVLFGFIKQLIGYNIIAFCHPSTVFRFGKSTRETMTKMIEALGFGVICSCVSICDVSLVVENNELKEQVAKLNKSLERCFKGKNTLDKILSEQWCILNKEGLGFIPKKGKKPSHCATRFVKSNGKYCSKCREVGHLVNDCPGGYASNSKVYRVYNKNKGIVEETADVQFDETNGSQEGHENLDDVGDEGLMRAMKNMSIGDVKPIE

SEQ ID NO: 20023 - protein, 1570 aa, Oryza sativa
  Clone ID: TF_OSC408405j.C1.p11.fg
MSFHIWSIVDVGFAITGTSLTEIDNRNLQLNAQAMNALFNSLSQEEFDRVSNLETAYEIWNKLAEIHEDTSEYKDAKLHFLKIQYETFSMLPHESVNDMYGRLNVIVNDLKGLGVNYTDLEVAQKMLRALPEKYETLVTMLINSDMSRMTPASLLGKINTNDMYKLKKKEMEEASPSKKCIALQAEVEDKGKGKVNEANEDLEEEIALLARRFNDLLGRRKERGRGSNSNRRRNRRPNKTLSNLRCFECGEKGHFASKCPSKDDDGDKSSKKKSGGYKLMKKLKKEGKKIEAFIGEWDSNEESSASSGSEEEGGDDASSKKKKMAVVAIKVTSLSDSESDDDCDDVSYDELVLYEELKTSHERLTISHEKLKEAHDNLISTTQLGALIDVGISCDLLDDSATRHIAHVASSSISTSCDDLVDMSSSSSSSCVSICDASLVVEKNELKEQMAKLNKSLERCFKGKNTLDKILSEQRCILNKEGLGFIPKKGKKPSHRATRFVKSNGKYCSKCREVGHLVNDCPGGKPPKTCMFDSHYMLRKAYDASIVARYVDYPILGGKKNAIWVPKALVSNLQVNYHTGGSHWVLDSGCTQHMTGDRAMFTTFEVGGNEQEKVTFGDNSKGKVIGLGKIAISNDLSIDNVSLVKSLNFNLLSVAQICDLGLSCAFFPQEVIVSSLLDKSCVFKGFRYGNLYLVDFNSSEANLKTCLVAKTSLGWLWHRRLAHVGMNQLSKLSKRDLVVGLKNVKFEKDKLCSACQAGKQVACSHPTKSIMSTSRPLELLHMDLFGPTTYKSIGGNSHCLVIVDDYSRYTWVFFLHDKSIVAELFKKFAKRVQNEFNCTIVKIISDNGSEFKNTNIEDYCDDLGIKHELSATYSPQQNGVMERKNRTLIEMAWTMLDEYGVSDFFWVEAINTACHATNRLYLHRLLKKTSYELIVGRKPNVAYFRVFGCKCYIYRKGVRLTKFESRCDEGFLLGYASKSKAYRVYNKNKGIVEETADVQFDETNGSQEGYENLDDVCDEGLMRAMKNMSIGDVKPIEVEDKPSTSTQDEPSTSATPSQAQVEVEEEKAQDPPMPPRIHTALSKDHPIDQVLGDISKGVQTRSRVASICEHYSFVSCLEPKHVDEALCDPDWMNAMHEELNNFARNKVWTLVERPRDHNVIGTKWVFRNKHDENGLVVRNKARLVAQGFTQVEDPKNPKHVYKLSKALYGLKQAPRAWYERLRDFLLSKDFKIGKVDTTLFTKIIGDDFFVCQIYVDDIIFGSTNEVFCKEFGDMMSREFEMSMIGELSFFLGLQIKQLKDGTFVSKTKYIKDLLKRFGLEDAKPIKTPMATNGYLDLDEGGKPVDLKLYRSMIGSLLYLTASRPDIMFSVCMCARFQAAPKECHLVAMKRILRYLKHSSTIGLWYPKGAKFKLVGYSDSDYAGCKVDRKSTSGSCQMLGRSLVSWSSKKQNSVALSTAEAEYVSVCSCCAQLLWMKQTLLDYGISFTKTPLLCDNDSAIKIANNPVQHSRTKHIDIRHHFLRDHVAKCDIVISHIRTEDQLADIFTKPLDETRFCKLRNELNVIDFSNVA

SEQ ID NO: 20024 - protein, 1641 aa, Oryza sativa
  unsure (1)..(1641): unsure at all Xaa locations
  Clone ID: TF_OSC900301j.C1.p6.np
IMCAHMSTYGLKIDGTKLKEEKTVNLCFHLKLIEALFNSLSQEEFDRVSNLETAYEIXNKLAEIHEGTSEYKDAKLHFLKIQYETFSMLPHXSVNDMYGRLNVIVNDLKGLGANYTDFEVAQKMLRALPEKYETLVTMLINSDMSRMTPASLLGKINTNDMYKLKKEMEEASPSKKCIALQAEVEDKGKGKVNKANEDLEEEIALFARRFNDHLGRRKERGRGSNSNRRRNRRPNKTLSNLRCFECGEKGHFASKCPSKDDDGDKSSKKKSGGYELMKKLKKERKKIEAFIGEWDSNEESLASSRSEEEGGDDASSKKKKMAVVTIKEAPSLFAPLCLMAKGSSKVTSLSDSESDDNCDDVSYDELVSMFEELHAYSEKEIKFKALKKDHASLEILYEELKTSHERLIISHEKLKEAHDNLLSTTQHGARIDVGISCDLLDDSATCYIAHVASSSISTSCDDLVDMPSSSSCVSICDVSLVVENNELKEQVAKLNKSLERCFKGKNTLDKILSEQRCILSKEGLGFILKKGKKPSHRATRFVKSNGKYCSKCREVGHLVNDCPGGKLSKTCMFDSHYMLRKAHDGSIVARYVGSPILGGKKNTIWVSKALISNLQGPKYVWIILAILGCFFHDKSIVAELFKKFAKRAQNEFNCTLLKIRSDDGSEFKNTNIEDYCDDLGIKHELSATYSPQQNGVVERKNRTLIEMARTMLNEYGVSDSFWVEAINTACHATNRLYLHRLLKKTSYELIVGRKPNVAYFRVFGCKCYIYXKDVRLTKFESRCDEGFLLGYASNTRVYNKNKGDEGLMRAMKNMSIGDVKPIEVEDKPSTSTQDEPSTSASPSQAQVEVEEEKAQDPPMSPRIHTALSKDHPIDQASGDISKGVQTRSRVASICEHYSFVSCLEPKHVDELCDPDWMNSMHEELNNFARNKVWTLVERPKDHNVIGTKWVFRNKQDENGLVVRNKARLVAQGFTQVEGLDFGETVAPVARLEVIRILLAFALCFDIKLFQMDKSVFLNGEIAELVFVEQPPGFKDPKNPNHVYKLSKALYGLKQAPRAWYERLRDFLLSRYTKSTLCRVHLQAIFPGSLKNLSQIGYVVFYFFRLNNHIINIDFNQADQIMIYIXFIALWYVSQTKYIKVSQTKYIKDLLKMFGLEDAKPIKTPMATNAHRSMIGSLLYLTASRPDIMFSVCICARFQAAPKECHLVAYPKGAYPKGAKFKLVGYSDSDYAGCKVDRKNTSGSCQMLAMPPHTRHGRREPTPNPISENEESSGDYVQSEDENMENVEGDEVEVSGDDNGSDGGDVNGSGDGEDDEASDDGSPLDPTIHFVLNLRNAQQYTILRHDQFRRPNDCNDPRFHTRFQKSVYEQVYANKAFTEHKWISWRHIGETPEFVDLQEMFWAVGIDRIVTMKQPFDEDLIRQFYATVWVSGDCDAMKWMSGTLRCSINRREFKELLHICFNNGDDLHDEHNHNPFMIDYFSQFYEEGGRHTYGKVGGLRAIPSVINRIVRATILPRCGNNDDIRGVAWHVIDAIMDDRRFDVINLMMKEIAISKGTIGQGVYYALYIMRLPPPRRLVEELPGDLSEKIMEEARCRFVSGLEFTTFGVKEELPVIEAWVVLFVGRLPPCPPLDEGGVRWLRG

SEQ ID NO: 20025 - protein, 690 aa, Oryza sativa
  unsure (1)..(690): unsure at all Xaa locations
  Clone ID: TF_OSC405422j.C1.p3.np
SAFIWTTLKERYDESKCDDVLFLEEPLEERSTSSPNCEEPQVTTFDDQDNHPTSTLSSTHNYVEGNELVSKVDDRPILPLDSNNTDNEIVIWHCVVDSYISPSTKYVCEDNMDKCSTSYSTCGTNLLKEKVNKHQWTSEESTSPRCSSSISEDYACFMSEDGDSEFDHLSKKDITMVIKLMEAIEKQQACTIKKNEEIMSLTEEHKKLKDFHSSLTMRYEKLENEFACATNSIACVASLEKQNQELKSQLDEITNKYVDLQERHDELLCSHENLVDSHAMLEVSHEVIIATVKSYEPHVQVDLTCTNPCCAQANISPSTIYDLDCVGKREKQIDHGLVCIAQPSQDNCEGMVKNLEEGSTVACTRIHQRDSKSINAYTKGRNQKMIKSSITCFKCKKVGHHARDCPWKKGNKLSKKKDIPHIKCFKCTEVGHFASRSPCTLDEQCKTSSERQTGNKQTEKQYRSKSRLCYNCRAKGHIGKNFPMGNIPKTSLSFDHNLLRNAKNDICATRVICSPHTSIKAIWVSKSLVTNLYGPNVVGDQNVLKFYSGTKGFGKTARFAMKLIYHHALEPGGSGKIPRRLREDSLVTRRIXARGSKFTRTCILKCYPSVXESRVXPQEVHDDQGGLLDQPQSTQVNLPQLSMKNMKTCFWKEDGANAKPDRVMALQEEHKHYQDVDCDQRVKHVRDGKA

SEQ ID NO: 20026 - protein, 467 aa, Oryza sativa
  Clone ID: TF_OSC403976j.C1.p1.fg
MADNEKGNKVRSQDVGTSSSRVNEAPDTSCVTLVQHLINQNRLLIEILQQHQTPILNLSQIQPQVQLEAVQALTPQVSMPPASRRTHGDVPHVDPKEASNICFMCDEQGHYARERPQQKRKTPMRTEDEVRKMIITSTEWPPPGMTRRQRRNTFRGAPQLTEHLLANGGRVSDSEDSDQVSSDDEDEMECKACSRCGEIGHVASSCATICVHCEEDHPPDRCPTSRITCFFCEGTDHVPKDCQFSLLLTKKMANQPASSNGEKHQGNTNPRQDHRFSLTPVPGQRNQNEKRKCRVREDICCFNCQGMGHFADKCPKPRNTAASTSVHATPCNQKLAPQRIVIHASRSSPIARVATAPTPMSALPQGVNAQFQPQPPADKTEASICVVPLEVPIQQLRDQVQDEEPECKKVIVCYNCSEEGHYSKNCPQPRQNRPPHYRQFTRSRHSNRIVVTGANAVPVRPRVNQNP

SEQ ID NO: 20027 - protein, 1532 aa, Oryza sativa
  Clone ID: TF_OSC100049j.C1.p2.fg
MVRCGGLCYARGIVTAPFRAPGLEWYIPGLEIDLYSRMPRYKPEYLFGVEGFVQELRTMSIAIGFGTAPFYAQIPHDRHEEKCRVKVTLNSNSEDIPSVMFEAGGKNYIHACQKVARIAIGELRDRYSDQLADTEYRYHPRQPQGKTVLAAQDREDRNRGKICKLEDKVDHLEKELAALKGEAPPQKARIRLTARKRALFVPRYQLAPKVRVVEKEVTPALADPPVVNMVLTRSNGNGPNNNNNNNNNNNGENPTLAQVLAQQAQLMNMMMQQLQNQQNQGNNHAPPQNKLAEFLRVRPPIFSSTTNPVEAGDWLHVIEKKLDLLQCTDQEKVSFASHQLHGPASEWWDHFRLHRTTAEPITWLEFTAAFRKTHIPSGVVSLKKREFRSLTQGSRSVTEYLHEFNRLAHYAPEEKLVDKAIRQEDKYNRMEQKKRRIAQFKTQQGNNQKPRLTLGPQSMPQGGSSSVVRPQRQFFNNNAGNNIRNQAPCPVAASTQQQPAKREQGSKPVVCFNCGDPGHYADKCPKPRRVKVVPTQGNSTAPASKARVNHVAAAEAQDAPDVILGTFLVNLVPATVLFDSGATHSFLSMSFAGNHGMEVEDLRRPMMVSTPSNQALSLQRSPSVRIEIQGVPFLANLILLESKDLDVILGMDWLARYKGVIDCANRKVTLTSNDGRVVTVYALSSESLRSRLNQITLEEIPIVREYPDVFPDDLPGMPPKRDIEFRIDLVPGTTPIHKRPYRMAANELAEVKRQVDDLLRKGYIRPSSSPWGAPVIFVEKKDHTQRMCVDYRALNDVTIKNKYPLPRIDDLFDQLKEEHEQHLRLALEKLREHQLYAKFSKCEFWLSEVKFLGHVISAGGVAVDPSNVESVTNWKQPKTVSEIRNFLGLAGYYRRFIKNFSKIAKPMTRLLQKDVKYKWSEECEQSFQELKNRLISAPILILPDPKKGFQVYCDASKFGLGCVLMQDEKVVAYASRQLRPHEKNYPTHDLELAAVVHALKIWRHYLFGTRTEVYTDHKSLKYIFTQPDLNMRQRRWLELIKDYDMGIHYHPGKANVVADALSRKGYCNATEGRQLPLELCKEFERLNLGIVSRGFVAALEAKPTLIDQVREAQINDPDIQEIKKNMRRGKAIGFLKDEQGTVWLGERICVPDNKDLKDAILKEAHDTLYSIHPGSTKMYQDLNEGFWWASMKREIAEYVAVCDVCQRVKAEHQKPAGLLQPLKIPEWKWEEIGMDFITGLPRTSSGHDSIWVIVDRLTKVAHFIPTDGQTERVNQILEDMLRACALDFGGSWDKNLPYAEFSYNNSYQASLQMAPYEALYGRKCRTPLLWDQTGERQVFGTDILREAEEKVKIIQERLRVAQSRHKSYADNRRRDLSFGEGDYVYLRITPFRGVHRFHTKEKLAPRFVGPYKIVNRRGEVAYQLELPQSLAGVHNVFHVSQLKKCLRVPTEETNLEQIEVQEDLTYIEKPIGILEIDERRTRNRVIRFCNVQWSNHSEEESTWEREDELKSAHPHLFASSSESRGRDSVKGG

SEQ ID NO: 20028 - protein, 1528 aa, Oryza sativa
  Clone ID: TF_OSC100172j.C1.p1.fg
MDEVGRRWTFSRANEGYTSCGPGSDRGSYLETEGIENDATTRYLVEMLWAMDESRAESVLAAQDREDRNRGKICKLEDKVDRLEKELAALKGEAPPQKARIRLTARKRALFVPRYQLAPKMVNTRSNGNGPNNPNNNNNGENPTLAQVLAQQTQLMNMMMQQFQNQQNQGNNHAPPQNKLAEFLRVRPPVFSSTTNPVEAGDWLHAIEKKLDLLQCTDQEKVSFASYQLHGPASEWWDHFRLNRTTAEPITWLEFTAAFRKTHIPSGVVSLKKKEFRSLTQGSRSVTEYLHEFNRLARYAPEDVRTDEERQEKFLEGLNDELSYPLMTGDYSDFQKLVDKAIRQEDKYNRMEQKKRRIAHFKAQQGSNQKPRLALGPQPMPQGGSSSVVRPQRQFFNNNAGNNIRNQAPRPVAAPAQQQPAKREQGSKPVVCFNCGDPGHYADKCPKPRRVKVVPAQSNSTVPASKARVNHVAAAEAQDAPDMILGTFPVNSVPATVLFDSGATHSFLSMSFAGNHGMEVEDLRRPLMVSTPGNQALSLQRSPSVRIEIKGVPFLANLILLESKDLDVILGMDWLARHKGVIDCANRKVTLTSNDGRVVTVNALSSESLRSRLNQITLEEIPIVREYSDVFPDDLPGMPPKRDIEFRIDLVPGTTPIHKRPYRMAANELAEVKRQVDDLLQKGYIRPSSSLWGAPVIFWEKKDHTQRMCVDYRALNDVTIKNKYPLPRIDDLFDQLKGATVFSKIDLRSGYHQLRIKEEDIPKTAFTTRYGLFECTVMSFGLTNAPAFFMNLMNKVFMEYLDKFVVVFIDDILIYSRTKEEHEEHLRLALEKLREHQLYAKFSKCEFWLSEVKFLGHVISAGGVAVDPSNVESVTNWKQPKTVSEIRSFLGLAGYYRRFIENFSKIAKPMTRLLQKDVKYKWSEECEQSFQELKSRLISAPILILPDPKKGFQVYCDASKLGLGCVLMQDGKVVAYASRQLRPHEKNYPTHDLELAAVVHALKIWRHYLFGTRTEVYTDHKSLKYIFTQPDLNMRQRRWLELSKDYDMGIHYHPGKANVVADALSRKGYCNATEGRQLPLELCKEFERLNLGIVSRGFVAALEAKPTLIDQVREAQINDPDIQEIKKNMRRGKAIGFLEDEHGTRVKAEHQKPAGLLQPLKIPEWKWEEIGMDFITGLPRTSSGHDSIWVIVDRLTKVAHFIPVKTTYSGSRLAKLYMARIVCLHGVPKKIVSDRGSQFTSNFWKKLQEEMGSKLNFSTAYHPQTDGQTERVNQILEDMLRACALDFGGSWDKNLPYAEFSYNNSYQASLQMAPYEALYGRKCRTPLLWDQTGERQVFGTDILREAEEKVKIIQERLRVAQSRHKSYADNRRRDLSFEEGDYVYLRVTPLRGVHRFHTKGKLAPRFVGPYKIVSRRGEVAYQLELPQSLAGVHNVFHVSQLKKCLRVPTEEANLEQIEVQEDLTYVEKPIRILETNERKTRNRVIRFCKVQWSNHSEEESTWEREDELKSAHPHLFASSSESRGRDSV

SEQ ID NO: 20029 - protein, 1882 aa, Oryza sativa
  unsure (1)..(1882): unsure at all Xaa locations
  Clone ID: TF_OSC101716j.C1.p1.np
DAITGNNLISSWFGMVYSWFGDRTVQPMPRYKPEYLFGVEGFVQELRTMSFVIGFGTAPFYAQIPHDRHEEKCRVKVTLNSNSEDIPSVMFEAGGRNYIHACQEVARIAIGELRDRYSDQLADTEYRYHPRQPQGSDRGSYLETEGIENDATTRHLVEMLWAMDESRAETVLAAQDREDWNRGKICKLEDKVDRLEKELAALKGEAPPQKARIRLTARKRALFVPRYQLAPKVRVVEKEVAPTLADPPVIIISDDEEEESKRNHSKIEWVATQDDEDEPNEPSIDLRCSEELDNGNGPNNNNNNNNNKNPTLAQVLAQQTQLMNMMMQQLQNQQNQGNNHAPPQNKLAEFLRVRPPIFSSTTNPVEAGDWLHAIEKKLDLLQCTDQEKVSFASHQLHGPASEWWDHFRLNRTTAEPITWLEFTAAFRKTHIPSGVVSLKKKEFRSLTQGSRSVTEYLHEFNRLARYAPEDVRNDEERQEKFLEGLNDELSYPLMTGDYSDFQKLVDKAIRQEDKYNRMEQKKRRIAQFKTQQGNNQKPRLTLGPQSVPQGGSSSVVRPQRQFFNNNAGNNIRNQAPRPVAAPTQQQPAKREQGNKPVVCFNCGDPGHYADKCPKPRRVKVVPVQSSSTALALKARVNHVAAAEAQDAPDVILGTFPVNLVPATVLFDSGATHSFLSMSFAGNHGMEVEDLRRPLMVSTPSNQALSLQRSPSVRIEIQGVPFLANLILLESKDLDVILGMDWLARHKGVIDCANRKVTLTSNDGRVVTVHVLSSESLRSRLNQITLEEIPIVREYPDVFPDDLPGMPPKRDIEFRIDLVPGTTPIHKRPYRMAANELAEVKRQVDDLLQKGYIRPSSSPWGAPVIFVEKKDHTQRMCVDYRALNDVTIKNKYPLPRIDDLFDQLKGATVFSKIDLRSGYHQLRIKEYGLFECTVMSFYGLFECTVMSFGLTNAPAFFMNLMNKVFMEYLDKFVVVFIDDILIYSRTKEEHEEHLRLALEKLREHQLYAKFSKCEFWLSEVKFLGHVISAGGVAVPSNVESVTNWKQPKTVSEIRSFLGLAGYYRRFIENFSKIAKPMTRLLQKDVKYKWSEXCEQSFQELKNRLISAPILILPDPKKGFQEYCDASKLGLGCVLMQDGKVVAYASRQLRPHEKNYPTHDLELAAVVHALKIWRHYLFGTRTEEFERLNLGIVSRGFVAALEAKPTLIDQVREAQINDPDIQEIKKNMRRGKAIGFMEDEQGTVWLGERICVPDNKDLKDAILKEAHDTLYSIHPGSTKMYQDLKERFWWASMKREIAEYVAVCDVCQRVKAEHQKPAGLLQPLKIPEWKWEEIGMDFITGLPRTSSGHDSIWVIVDRLTKVAHFIPVKTTYSGSRLAELYMARIVCLHGVPKKIVSDRGSQFTSNFWKKLQEEMGSKLNFSTAYHPQTDGQTERVNQILEDMLRACALDFGGSWDKNLPYAEFPYNNSYQASLQMAPYEALYGRKCRTPLLWDQTGERQVFGTDILREAEEKVKIIQERLRVAQSRHKSYADNRRRDLSFEEGDYVYLRVTPLRGVHRFHTKGKLAPRFVGPYKIVSRRGEVAYQLELPQSLAGVHNVFHVSQLKKCLRVPTEEANLEQIEVQEDLTYVEKPIRILEIDERRTRNRVIRFCKVQWSNHSEEESTWEREDELNRGIEFDSDGLFPSSPSSSPAAVGLRRRLRAPLKGPSSSLPAATLAFASRRRKCPSAPCAAAVPDVAVAREGRHRGPCAAAVPDVAVAREGRHRGRQVVAVLVCRFATVGDRRSIVAAVDPKSFAASSSSPSPSVDLPPSLWSPCRRSPASVRRPSRCRRSPASVRRPSRRAAAAGGDITADVIGAVRHSVFSGESVFAGEEFEEFQGQQGK

SEQ ID NO: 20030 - protein, 511 aa, Oryza sativa
  Clone ID: TF_OSC101716j.C1.p2.gm
MVNTRSNGNGPNNNNNNNNNNEGNPTLAQVLAQQTQLMNMMMQQLQNQQNQGNNHAPPQNKLAEFLRVRPPIFSSTTNPVEAGDWLHAIEKKLDLLQCTDQEKVSFASHQLHGPASEWWDHFRLNRTTAEPITWLEFTAAFRKTHIPSGVVSLKKKEFRSLTQGSRSVTEYLHEFNRLARYAPEDVRNDEERQEKFLEGLNDELSYPLMTGDYSDFQKLVDKAIRQEDKYNRMEQKKRRIAQFKTQQGNNQKPRLTLGPQSVPQGGSSSVVRPQRQFFNNNAGNNIRNQAPRPVAAPTQQQPAKREQGNKPVVCFNCGDPGHYADKCPKPRRVKVVPVQSSSTALALKARVNHVAAAEAQDAPDVILALEAKPTLIDQVREAQINDPDIQEIKKNMRRGKAIGFMEDEQGTPLKIPEWKWEEIDVAVAREGRHRGRQVVAVLVCRFATVGDRRSIVAAVDPKSFAASSSSPSPSVDLPPSLWSPHGSLRGTRLRSGGDKPTGVAGESMPCL

SEQ ID NO: 20031 - protein, 1096 aa, Oryza sativa
  Clone ID: TF_OSC102284j.C1.p1.fg
MWGCVLWVQWYTSDQSKTIRIAVPAVMAPGLEWYIPGLKIELCSRDGCSEWLGLCNRIPHDRHEEKCRVKVTLNSNSEDIPSVMFEAGGRNYIHACQEVARIAIGELRDRYSDQLADTEYRYHSRQPQGSDRGSYLETEGIENDATTRHLVEMLWAMDETRAETVLAAQDREDRNRGKICKLEDKVDRLEKELAALKGEAPPQKARICLTARKRALFVPRYQLAPKVRVVEKEVTPALADPPVVNMVVTRSNGNGPNNNNNNNNNGENPTLAQVLAQQAQLMNMMMQQLQNQQNQGNNHAPPQNKLAEFLRVRPPTFSSTTNPVEAGDWLHAIEKKLDLLQCTDQEKVSFASHQLHGPASEWWDHFRLNRTTAEPITWLEFTAAFRKMHIPSGVVSLKKKEFRSLTQGSRSVTEYLHEFNRLARYAPEDVRTDEEHQEKFLEGLNDELSYPLMTGDYHDFQKLVDKAIRQEDKYNRMEQKKRRIAQFKTQQGNNQRPHLTLGPQSMPQGGYSSVVRPQRQFFNNNAGNNIRNQVPRPVAASTQQQPAKREQGSKPVVCFNCGDPGHYADKCPKPRCVKVVPAQSNSTVSASKARVNHVAAAEAQGAPDVILGTFLVNSVPATVLFDSGATHSFLSMSFAGNHGMEVEDLRCPLMVSTPSNQALSLQRSPSVRIEIQGVPFLANLILLESKDLDVILGMDWLARHKGVIDCANRKVTLTSNDGRVVTVHALSSESLRSILNQITLEEIPIVREYPDVFSDDLPGMPPKRDIEFRIDLVPGTTPIHKRPYRMAANELAEVKRQVDDLLQKGIDDLFDQLKGATVFSKIDLRSGYHQLRIKEEDIPKTAFTTRYGLFECTVMSFGLTNAPAFFMNLMNKVFMEYLDKFVVVFIDDILIYSRTKEEHEEHLRLALEKLREHQLYAKFSKCEFWLSEVKFLGHVISAGGVAVDPSNVESVTNWKQPKTVSEIRSFLGLAGYYRRFIENFSKIAKPMTRLLQKDVKYKWSEECEQSFQELKNRLISAPILILPDPKKGFQVYCDASKLGLGCVLMQDGKVVAYASRQLRPHEKNYPTHDLELAAVVRALKIWRHYLFGTRTE

SEQ ID NO: 20032 - protein, 1536 aa, Oryza sativa
  Clone ID: TF_OSC10947j.C1.p2.fg
MSFVISLTLLTIVNDAITGNNLISSWFGMMPRYKPEYLFGVEGFVQELRTMSFVIGFGTAPFYAQIPHDRHEEKCRVKVTLNSNSEDIPSVMFEAGGRNYIHACQEVARIAIGELRDRYSDQLADTEYRYHPRQPQGSDRGNYLETEGIENDATTRHLVEMLWAMDESRAETVLAAQDREDRNRGKICKLEDKVDRLEKELAALKGEAPPQKARIRLTAMKRALFVPRYQLAPKMVNTRSNGNGPNNNNNNNNNSGENPTLAQVLAQQTQLMNMMMQQLQNQQNQGNNHAPPQNKLAEFLRLHGPASEWWDHFRLNRITAEPITWLEFTAAFRKTHIPSGVVSLKKKEFRSLTQGSRSVTEYLHEFNRLARYAPEDVRNDEERQEKFLEGLNDELSYPLMTGDYPDFQKLVDKAIRQEDKYNRMEQKKRRIAQFKTQQGNNQRPRLTLGPQSVPQGGSSSIVRPQRQFFNNNAGNNIRNQVPRPVAAPTQQQPAKREQGSKPVVCFNCGDPGHYADKCPKPRRVKVVPTQSNSTAPASKARVNHVAAAEAQDAPDVILGTFLVNLVPATVLFDSGATHSFLSMSFAGNHGMEVEDLRHPLMVSTPSNQALSLQRSPSVRIEIKGVPFLANLILLESKDLDVILGMDWLARHKGVIDCANRKVTLTSNDGRVVTVHALSSESLRSRLNQITLEEIPIVQEYPDVFPDDLPGMPPKRDIEFRIDLVPGTTPIHKRPYRMAANELAEVKRQVDDLLQKGYIRPSSSPWGAPVIFVEKKDHTQRMCVDYRALNDVTIKNKYPLPRIDDLFDQLKGATVFSKIDLRSGYHQLRIKEEDIPKTAFTTRYGLFECTVMSFGLTNAPAFFMNLMNKVCMEYLDKFVVVFIDDILIYSRTKEEHKEHLRLALEKLREHQLYAKFSKCEFWLSEVKFLGHVISAGGVAVDPSNVESVTNWKQPKTVSEIRSFLGLAGYYRRFIENFSKIAKPMTRLLQKDVKYKWSEECEQSFQELKNRLISAPILILPDPKKGFQDGKVVAYASRQLRPHEKNYPTHDLELAAVVHALKIWRHYLFGTRTEANVVADALSRKGYCNATEGRQLPLELCQEFERLNLGIVSRGFVAALEAKPTLIDQVREAQINDPDIQEIKKNMRRGKAIGFLEDEQGTVWLGERICVPDNKDLKDVILKEAHDTLYSIHPGSTKMYQDLKERFWWASMKREIAEYVAVCDVCQRVKAEHQKPAGLLQPLKIPEWKWEEIGMDFITGLPRTSSGHDSIWVIVDRLTKVAHFIPVKTTYSGSRLAELYMARIVCSHGVPKKIVSDRGSQFTSNFWKKLQEEMGSKLNFSTAYHPQTDGQTERVNQILEDMLRACALDFGGSWDKNLPYAEFSYNNSYQASIQMAPYEALYGRKCRTPLLWDQTGERQVFGTDILREAEEKVKIIQERLRVAQSRHKSYADNRRRDLSFEEGDYVYLRVTPFRGVHRFHTKGKLAPRFVGPYKIVSRRGEVAYQLELPQSLAGVHNVFHVSQLKKCLRVPTEEANLE

SEQ ID NO: 20033 - protein, 1678 aa, Oryza sativa
  Clone ID: TF_OSC11372j.C1.p1.fg
MPRYKPEYLFGVEGFVQELRTMSFVIGFGTAPFYAQIPHDRHEEKCRVRVTLNSNSEEVPSVMFEAGGRNYIHACQEVARIAIGELRDRYSDQLADTEYRYHPRQPQGSDRGSYLETEGIENDVTTKHLVEMLWAMDESRAETVLAAQDREDRNRGKICKLEDKVDRLEKELAALKGEAPPQKARIRLTARKRALFVPRYQLAPKMVNTRSNGNGPNNPNNNNNGENPTLAQVLAQQTQLMNMMMQQFQNQQNQGNNHAPPQNKLAEFLRVRPPVFSSTTNPVEASDWLHAIEKKLDLLQCTDQEKVSFASHQLHGPASEWWDHFRLNRTTAEPITWLEFTAAFRKTHIPSGVVSLKKKEFRSLSQGSRSVTEYLHEFNRLARYAPEDVRNDEERQEKFLGGLNDELSYPLMVGDYPDFQKLVDKAIRQEDKYNRMEQKKRRIAQFKTQQGNNQKPRLTLGPQPMPQGGSSSVVRPQRQFFNNNAGNNIRNQAPRPVAAPAQQQPAKREQGNKPVVCFNCGDPGHYADKCPKPRRVKVVPAQNNSAVPASKARVNHVAAAEAQDAPDVILGTFLVNSVPATVLFDSGATHSFLSTSFAGNHGMEVEDLRRPLMVSTPSNQALSLQRSPSVRIEIQGVPFLANLILLKSKDLDVILGMDWLARHKGVIDCANRKVTLNSYDGRVVTVHALSSESLRSRLNQITLEEIPIVREYPDVFPDDLPGMPPKRDIEFRIDLVPGTTPIHKRPYRMAANELAEVKRQVDDLLQKGYIRPSSSPWGAPVIFVEKKDHTQRMCVDYRALNDVTIKNKYPLPRIDDLFDQLKGATVFSKIDLRSGYHQLRIKEEDIPKTTFTTRYGLFECTVMSFGLTNAPAFFMNLMNKVFMEYLDKFVVVFIDDILIYSRTKEEHEEHLRLALEKLREHQLYAKFSKCEFWLSEVKFLGHVISAGGVAVDPSNVESVTNWKQPKTVSEIRSFLGLAGYYRRFIENFSKIAKPMTRLLQKDVKYKWSEECEQSFQELKSRLISAPILILPDPKKGFQVHCDASKLGLGCVLMQDGKVVAYASRQLRPHEKNYPTHDIELAAVVHALKIWHHYLFGTRTEVYTDHKSLKYIFTQPDLNMRQRRWLELIKDYDMGIHYHPGKANVVADALSRKGYCNATEGRQLPLELCKEFERLNLGIVDRGFVAALEAKPTLIDQVREAQINDPDIQEIKKNMRRGKAIGFLEDEHGTVWLGERICVPDNKDLKDAILKEAHDTLYSIHPGSTKMYQDLKERFWWASMKREIAEYVAVCDVCQRVKAEHQKPAGLLQPLKIPEWKWEEIGMDFITGLPRTSSGHDSIWVIVDRLTKVAHFIPVKTTYSGSRLAELYMARIVCLHGVPKKIVSDRGSQFTSNFWKKLQEEMGSKLNFSTAYHPQTDGQTERVNQILEDMLRACALDFGGSWDKNLPYAEFSYNNSYQASLQMAPYEALYGRKCRTPLLWDQTGERQVFGTDILREAEEKVKIIQERLRVAQSRHKSYADNRRRDLSFEEGDYVYLRVTPLRGVHRFHTKGKLAPRFVGPYKIVSRRGEVAYQLELPQSLAGVHNVFHVSQLKKCLRVPTEEANIEQIEVQEDLTYVEKPIRILETSERRTRNRVIRFCKVQWSNHSEEESTWEREDELKSAHPHLFASSSESRGRDSV

SEQ ID NO: 20034 - protein, 1566 aa, Oryza sativa
  unsure (1)..(1566): unsure at all Xaa locations
  Clone ID: TF_OSC13115j.C1.p5.np
MPPHSPRNLIEVLGFVRELRLMVFEVGYEVAPEYRQISHDPDEEKCHVRVTLASDREDLPSIKFEAGGRSYSHACQEAALVAIGELRQRFEEELDSSAFXYHPHKPHGQDYGTYICPDGEESATLMHVVHMLSAMDAVSVERDKAAHDRENWNRGKICKLESKVYRLQKELAELKGETPPPTPKLRLVARKRTCPPPRLQLASKIRVMEAVPDRAEPVIDIISDEEEEEDPEEREATPEEEDPSLRSDTRRVSRLARSLPXFAVLVSAYRQMVNTRTGSGSGSGSGATNNGGDPTLAQILAQQTQLINLLVQQAQNQQANNQNHPPPQNKLADFLRVRPPTFSSTTNPVEAGDWLHAVEKKLDLIQCTEQEKVSFASHQLHGPAAEWWDHFRQGRAEGEPITWQEFTAAFKKTHIPAGVVALKKREFRALNQGSRSVTEYLHDFNRLARYAPEDVRTDEERQEKFLEGLNDELSYALMSTDFRDFQQLVDKAIRQEDKYNRMEQKKRRAAQFKAQQGSNQRPRLVIGPQAPSYPQGGSSSVIRPQRQFYNNNSGNDNRNVVARPAATPAQNQPVRKEQGSKPVVCFNCGDPGHYADKCPKPRRVKNAPAPNNSNVPVPKARVNHVVAAEAQNAPYVVLGTFPVNSIPATVLFDSGATHSFLSKSFASNHGMEVVSLGRPLLVNTPGNQVFSTQYCPSATIEIEEVPFPSSLILLESKDLDVILGMDWLSRHRGVIDCVNRKVTLTSSNGETVSFFVSSPKSHGVNLNQVALQEIPIVQDYPDVFPEDLPGLPPKRDIEFRIDLVPGTNPIHKRPYRMAANELAEVKRQKDHTQRMCVDYRALNEVTIKNKYPLPRIDDLFDQLKGATVFSKIDLRSGYHQLRIREEDIPKTAFTTRYGLFECTVMSFGLTNAPAFFMNLMNKVFMEYLDKFVVVFIDDILIYSKTKEEHEEHLRLALEKLREHQLYAKFSKCEFWLSEVKFLGHVISSGGVAVDPSNVESVLSWKQPKTVSEIRSFLGLARYYRRFIENFSKIARPMTRLLQKEVKYKWTEDCERSFQELKKRLVTAPVLILPNSRKGFQVYCDASRHGLGCVLMQEGKVVAYASRQLRPHENNYPTHDLELAAVVHALKIWRHYLFGNRTEMYTDHKSLKYIFTQPDLNMRQRRWLELIKDYDMEIHYHPGKANVVADALSRKSYCNMSEGRRLPWKLCQEFEKLNLGIVSKGFVATLEAQPTLFDQVREAQVNDPDIQEIKKNMRRGKAIGYVEDEQGTVWLGERICVPENKELKDTIMKEAHETLYSIHPGSTKMYQDLKQQFWWASMRREIAEYVALCDVCQRVKAEHQKPAGLLQPLKIPEWKWEEIGMDFITGLPRTSAGHDSIWVVVDRLTKVAHFIPVKTTYTGNKLAELYMARVTDGQTERVNQILEDMLRACVLDFGGSWDKNLPYAEFSYNNSYQASLQMAPYEALYGIHDVFHVSQLKKCLRVPTEEADPDRIELQEDLTYVEKPVRILEVSERNTRNRVIRFCKVQWSNHSEEEATWEREDELKSAHPHLFVSSSESRGRDSV

SEQ ID NO: 20035 - protein, 744 aa, Oryza sativa
  Clone ID: TF_OSC13206j.C1.p1.fg
GSDRGSYLETEGIENDATTRHLVEMLWAMDESRAETVLAAQDREDRNRGKICKLEDKVDRLEKELAALKGEAPPQKARIRLTARKRALFVPRYQLAPKFPPVSLLVPCPCQMVITRSNGNGPNNPNNNNEGNPTLAQVLAQQTQLMNMMMQQLQNQQNQGNNHAPPQNKLAEFLRVRLPIFSSTTNPVEAGDWLHAIEKKLDLLQCTDQEKVSFASHQLHGPASEWWDHFRLNRTTAEPITWLEFTAAFRNTHIPSGVVSLKKKEFRSLTQGSRSVTEYLHEFNCLARYAPEDEDKYNRMEQKKRRIAQFKTQPGNNQRPRLTLGPQSMPHGGSSSVVRPRRQFFNNNAGNNIRNLAPRPVAVSTQQQPAKREQGSKPVVCFNCGDPGHYADKCPKPRRVKVVPAQSNSTAPASKARINHVAAAEAQDAPDVILGTFLVNSVPATVLFDSGATHSFLSMSFAGNHGMEVEDLRRPLMVSTPSNQALSLQRSPSVRIEIKGVPFLANLILLEPKDLDVILGMDWLARHKGVIDCANRKVTLTSNDGRVVTVHALSSESLRSRLNQITLEEIPIVREYPDVFPDDLPGMPPKRDIEFRIDLVPGTTPIHKRPYRMAANELAEVKRQVDDLLQKGYIRPSSSPWGAPVIFVGKKDHTQRMCVDYRALNDVTIKNRYPLPRIDDLFDQLKGATVFSKIDLRSGYHQLRIKEEDIPKTAFTARYGLFECTVMSFGLTNAPAFFMNFMNK

SEQ ID NO: 20036 - protein, 1267 aa, Oryza sativa
  Clone ID: TF_OSC13283j.C1.p1.fg
MPCYKPEYLFGVEGFVQELRTMSFVIGFGNAPFYAQIRHDRHEEKCRVKVTLNSNSEDIPSVMFEAGGRNYIHACQEVARIAIGELRDRYSDQLVDTEYRYHPRQPQGSDRGSYLETEGIENDVTTRHLVEMLWAMDESRAETVLAAQDREDRNRGKICKLEDKVDRLEKELAALKGEAPPQKARIRLTARKRALFVPRYQLAPKVRVVEKEVAPAQADPPVIIISSDEEEESKRINSKIEWVATQDDEDEPSIDLLCSEELEKLESLVVWESSVCNNETQLRSIKVKMVNTRSNGNGPNNPNNNINGENPTLAQVLAQQTQLMNMMMQQFQNQQNQGNNHAPPQNKLAEFLRVRPPVFSSTTNPVEASDWLHAIEKKLDLLQCTDQEKVSFASHQLHGPASEWWDHFRLNRTTAEPITWLEFTAAFRKTHIPSGVVSLKKKEFRSLTQGSRSVTEYLHEFNRLARYAPEDVRNDEERQEKFLGGLNDELSYPLMVGDYPDFQKLVDKAIRQEDKYNRMEQKKRRIAQFKTQQGNNQKPRLTLGPQSMPQGGSSSVVRPQRQFFNNNAGNNIRNQAPRPVAAPAQQQPAKREQGSKPVVCFNCGDPGHYADKCPKPQRVKVVPAQSNSAVPASKARVNHIAAAEAQGAPDVILGTFLVNSVPATVLFDSGATHSFLSMSFAGNHGMEVEDLRRPLMVSTPSNQALFLQRSPSVRIEIQGVPFLANLILLESKDLDVILGMDWLARHKGVIDCANRKVTLNSYDGRVVTVHALSSESLRSRLNQITLEEIPIVREYPDVFPDDLPGMPPKRDIEFRIDLVPGTTPIHKRPYRMAANELAEVKRQVDDLLQKGYIRPSSSPWGAPVIFVEKKDHTQRMCVDYRALNDVTIKNKYPLPRIDDLFDQLKDKFVVVFIDDILIYSRTKEEHEEHLRLALEKLREHQLYAKFSKCEFWLSEVKFLGHVISAGGVAVDPSNVESVTNWKQPKTVSEIRSFLGLAGYYRRFIENFSKIAKPMTRLLQKDVKYKWSEECERSFQELKSRLISAPILILPDPKKGFQVYCDASKLGLGCVLMQDGKVVAYASRQLRPHEKNYPTHDIELAAVVHALKIWRHYLFGTRTEVYTDHKSLKYIFTQPDLNMRQRRWLELIKDYDMGIHYHPGKANVVADALSRKGYCNATEGRQLPLELCKEFERLNLGIVGRGFVAALEAKPTLIDQVREAQINDPDIQEIKKNMRRGKAIGFLEDEHGTVWLGERICVCHVLINSSQN

SEQ ID NO: 20037 - protein, 474 aa, Oryza sativa
  Clone ID: TF_OSC14137j.C1.p1.fg
MPQGGSSSVVRPQRQFFNNNVGNNIRNQALRPVAAPTQQQPAKREQGSKPVVCFNCGDPGHYADKCPKPRRMKVVPTQSNSTVPASKARVNHVAAAEAQDAPDVILESKDLDVILGMDWLARHKGVIDCANRKVTLTSNDGRVVTVHALSSESLRSRLNQITLEEIPIVREYPDVFPDDLPGMPPKRDIEFRIDLVPGTTPIHKRPYRMAANELAEVKRHVDDLLQKGYIRPSSSPWGAPVIFVEKKDHTQRMCVDYRALNDVTIKNKYPLPRIDDLFDQLKGATVFSKIDLRSGYHQLRIKEEDIPKTAFTTRYGLFECTVMSFGLTNAPAFFMNLMNKVFMEYLDKFVVVFIDDILIYSRTKEEHEEHLRLALEKLREHQLYAKFSKCEFWLSEVKFLGHVISAGGVAVDPSNVESVTNWKQPKTVSEIRSFLGLAGYYRRFIENFSKIAKPMTRLLVTTGNNPTGVLTCVH

SEQ ID NO: 20038 - protein, 225 aa, Oryza sativa
  Clone ID: TF_OSC15745j.C1.p1.fg
KTHIPSGVVSLKKKEFRSLTQGSRSVTEYLHEFNRLARYAPEDVRNGEERQEKFLEGLNDELSYPLMTGDYHDFQKLVDKAIRQEDKYNRMEQKKRRIAQFKTQQGNNQKPRLTLRPQSMPHGGSSFVVRPQRQFFNNNAGNNIRNQAPRPVAAPTQQQPAKREQGSKPVVCFNCGDPGHYADKCPKPRRVKVVPTQSNSTVPASKARVNHVAAARGSRCSRCDF

SEQ ID NO: 20039 - protein, 474 aa, Oryza sativa
  Clone ID: TF_OSC15754j.C1.p1.fg
MPQGGSSSVVRPQRQFFNNNVGNNIRNQALRPVAAPTQQQPAKREQGSKPVVCFNCGDPGHYADKCPKPRRMKVVPTQSNSTVPASKARVNHVAAAEAQDAPDVILESKDLDVILGMDWLARHKGVIDCANRKVTLTSNDGRVVTVHALSSESLRSRLNQITLEEIPIVREYPDVFPDDLPGMPPKRDIEFRIDLVPGTTPIHKRPYRMAANELAEVKRQVDDLLQKGYIRPSSSPWGAPVIFVEKKDHTQRMCVDYHALNDVTIKNKYPLPRIDDLFDQLKGATVFSKIDLRSGYHQLRIKEEDIPKTAFTTRYGLFECTVMSFGLTNAPAFFMNLMNKVFMEYLDKFVVVFIDDILIYSRTKEEHEEHLRLALEKLREHQLYAKFSKCEFWLSEVKFLGHVISAGGVAVDPSNVESVTNWKQPKTVSEIRSFLGLAGYYRRFIENFSKIAKPMTRLLVTTGNNPTGVLTCVH

SEQ ID NO: 20040 - protein, 1732 aa, Oryza sativa
  unsure (1)..(1732): unsure at all Xaa locations
  Clone ID: TF_OSC15782j.C1.p1.np
VLRRRSSCRRRSGRPPSSSPSRRRPRPPLRSRRNPPELRRRRQPEDAXTGNNLISSWFGMVHSWFGDRTVQPMPRYKPEYLFGVEGFVQELRTMSFVIGFGTAPFYAQIRHDRHEERCRVKVTLNSNSEDIPSVMFEAGGRNYIHACQEVARIAIGELRDRYSDQLADTEYRYHPRQPQGSDRGSYLETEGIENDATTRHLVEMLWAMDESRAETVLAAQDREDRNRGKICKLEDKVDRLEKELAALKGEAPPQKARIRLTARKRTLFVPRYQLAPKIRVVEKEVAPANPPVIIISSDEEEESKRNHSKIEWVATQDDEDEPSIDLRCLEELDNGNGPNLNNPNNNNNGENPTLAQVLAQQTQLMNMMMQQFQNQQNQGNNHVPPQNKLAEFLRVRPPVFSSTTNPVEASDWLHAIEKKLDLLQCTDQEKVSFASHQLHGPASEWWDHFRLNRTTAEPITWLEFTAAFRKTHIPSGVVSLKKKEFRSLSQGSRSVTEYLHEFNRLARYAPEDVRNDEERQEKFLGGLNDELSYPLMVGDYPDFQKLVDKAIRQEDKYNRMEQKKRRIAQFKTQQGNNQKPRLTLGPQPMPQGGSSSVVRPQRQFFNNNAGNNIRNLAPRPVAVPAQQQPAKREQGNKPVVCFNCGDPGHYADKCPKPRRVKVVPAQNNSAVPTSKARVNHVAAAEAQDAPDVILGMFLVNSVPATVLFDSGATHSFLSMSFAGNHGMEVEDLRCPLMVSTPSNQALSLQRSPSVRIEIQGVPFLANLILLESKDLDVILGMDWLARHKGVIDCANRKVTLNSYDGRVVTVHALSSESLRSRLNQITLEEIPIVREYPDVFPDDLPGMPPKRDIEFRIDLVPGTTPIHKRPYRMAANELAEVKRQVDDLLQKGYIRPSSSPWGAPVIFVEKKDHTQRMCVDYRALNDVTIKNKYPLPRIDDLFDQLKGATVFSKIDLRSGYHQLRIKEYGLFECTVMSFGLTNAPAFFMNLMNKVFEYGLFECTVMSFGLTNAPAFFMNLMNKVFMEYLDKFVVVFIDDILIYSRTKEEHEEHLRLALEKLREHQLYAKFSKCEFWLSEVKFLGHIISAGGVAVDPSNVESVTNWKQPKTVSEIRSFLGLAGYYRRFIENFSKIAKPMTRLLQKDVKYKWSEECEQSFQELKSRLISAPILILPDPKKGFQVYCDASKLGLGCVLMQDGKVVAYASRQLRPHEKNYPTHDIELAAVVHALKIWRHYLFGTRTEEFERLNLGIVGRGFVAALEAKPTLIDQVREAQINDPDIQEIKKNMRRGKAIGFLEDEHGTVWLGERICVPDNKDLKDAILKEAHDTLYSIHPGSTKMYQDLKERFWWASMKREIAEYVAVCDVCQRVKAEHQKPAGLLQPLKIPEWKWEEIGMDFITGLPRTSSGHDSIWVIVDRLTKVAHFIPVKTTYSGSRLAELYMARIVCLHGVPKKIVSDRGSQFTSNFWKKLQEEMGSKLNFSTAYHPQTDGQTERVNQILEDMLRACALDFGGSWDKNLPYAEFSYNNSYQASLQMAPYEALYGRKCRTPLLWDQTGERQVFGTDILREAEEKVKIIQERLRVAQSRHKSYADNRRRDLSFEEGDYVYLRVTPLRGVHRFHTKGKLAPRFVGPYKIVSRRGEVAYQLELPQSLAGVHNVFHVSQLKKCLRVPTEEANIEQIEVQEDLTYVEKPIRILETNERRTRNRVIRFCKVQWSNHSEEESTWEREDELN

SEQ ID NO: 20041 - protein, 1742 aa, Oryza sativa
  unsure (1)..(1742): unsure at all Xaa locations
  Clone ID: TF_OSC15871j.C1.p1.np
RKSAQNLLSLSPGPIPTFPESPFSQEKNLKSSKASKATPGLEWYIPGLEIELYSRDGCSEWLGLYNRMPCYKPEYLFGVEGFVQELRTMSFAIGFGTTPFYAQIPHDRHEEKCRVKVTLNSNSEDIPSVMFEAGGRNYIHACQEVARIAIGELRDRYSDQLADTEYLYHPQPQGSDRGSYLETEGIENDATTKHLVEMLWAMDETRAETVLAAQDREDRNHGKICKLXDKVDRLEKELAALKGEAPPQKARIRLTARKRALFVPRYQLAPKMVLTRSNGNGPNNNNNNNNGENPTLAQVLAQQVQLMNIMMQQLQNQQNQGNNHAPPQNKLAEFLHVRPPTFSSTTNPVEAGDWLHAIEKKLDLLQCTDQEKVSFASHQLHGLASEWWDHFRLNRTTTEPITWLEFTAAFRKTHIPSGVVSLKKKEFRSLTQGSRSVTEYLHEFNRLARYAPEDVRTDEERHERFLEGLNDELSYPLMTGDYHDFQKLVDKAIRQEGKYNRMEQKKRRIAQFKAQQGNSQRPRLTLGPQSMRQGGSSSVVRPQRQFFNNNAGNNIRNQAPRPVAASTQQQPAKKEQGSKPVVCFNCGDPGHYADKCPKPRRVKVVPAQSNSTVPASKARVNHVAAAEAQGAPDVILGTFLVNLVPATVLFDSGATHSFLSMSFAGNHGMEVEDLRRPLMVSTPSNQALSLQRSPSVRIEIQGVPFLANLILLESKDLDVILGMDWLARYKGVIDCANRKVTITSNDGRVVTVHALSSEPLRSRLNQITLEEIPIVREYPDVFPDDLPGMPPKRDIEFRIDLVPGTTPIHKRPYRMAANELAEVKRQVDDLLQKGYIRPSSSPWGAPVIFVEKKDHTQRMCVDYRALNDVTIKNKYPLPRIDDLFDQLKGAIVFSKIDLRSGYHQLRIKEEDIPKTAFTTRYGLFECTVMSFGLTNAPAFFINLMNKVFMEYLDKFVVVFIDDILIYSRTKEEHEEHLRLALEKLREHQLYAKFSKCEFWLSEVKFLGHVISAGGVAVDPSNVESITNWNQPKTVSKIRSFLGLQEYNRFIENFSKIAKPMTRLLQKDVKYKWSECKQSFQELKNRLISAPILILPDPKKGFQVYCDASQLGLGCVLMQDGKVVAYASRQLRPHEKNYPTHDLELAAVIHALKIWRHYLFGTCIEVYTDHKSLKYIFTQPDLNMRQRRWLELIKDYDMGIQYHPGKANVVADALSRKGYCNATEGRQLPLELCKEFERLNLGIVRRGFVAALEAKPTLIDQVREAQINDPDIQEIKKNMRRGKAIGFLEDEQGTVWLGERICVPDNKDLKDAILKEAHDTLYSIHPGSTKMYQDLEERFWWASMKREIAEYVAVCDVCQRVKAEHQKPAGLLQPLKIPEWKWEEIGMDFITGLPRTSSGHDSIWVVVDRLTKVAHFIPVKTTYSGSWLAELYMARIVCLHGVPKKIVSDRGSQFTSNFWKKLQEEMGSKLNFSTAYHPXTDGQTERVNQILEDMLRACALDFGGSWDRNLPYAEFSYNNSYQASLQMAPYEALYGRKCRTPLLWDQTGERQVFGTDILREAEEKVKIIQERLRVAQSRHKSYADNRRRDLSFDEGDYVYLRVTPLRGVHRFHTKGKLVPHFVGPYKIVNRRGEVAYQLELPQSLAGVHNVFHVSQLKKCLRVPTEEANLEQIEVQEDLTYVQKPIRILEIEERRTRNRVIRFYKVQWSNHSEEESTWEREDELKSAHPHLFASSSESRGRDSV

SEQ ID NO: 20042 - protein, 1452 aa, Oryza sativa
  Clone ID: TF_OSC1652j.C1.p1.fg
MTRLLQKDVKYKWSEECEQSFQELKSRLISAPILILPDPKKGFQVYCDASKLGLGCVLMQDGKVVAYASRQLRPHEKNYPTHDIELAAVVHALKIWRHYLFGTRTEVYTDHKSLKYIFTQPDLNMRQRRWLELIKDYDMGIHYHPGKANVVADALSRKGYCNATEGRQLPLELCKEFERLNLGIVGRGFVAALEAKPTLIDQVREAQNNDPDIQEIKKNMRRGKAIGFLEDEHGTVWLGERICVPDNKDLKDAILKEAHDTLYSIHPGSTKMYQDLKERFWWASMKREIAEYVAVCDVCQRVKAEHQKPAGLLQPLKIPEWKWEEIGMDFITGLPRTSSGHDSIWVIVDRLTKVAHFIPTDGQTERVNQILEDMLRACALDFGGSWDKNLPYAEFSYNNSYQASLQMAPYEALYGRKCRTPLLWDQTGERQVFGTDILREAEEKVKIIQERLRVAQSRHKSYADNRRRDLSFEEGDYVYLRVTPLRGVHRFHTKGKLAPRFVGPYKIVSRRGEVAYQLELPQSLAGVHNVFHVSQLKKCLRVPTEEANIEQIEVQEDLTYVEKPIRILETTPGLEWYIPGLEIELCSRGGCSEWLGLYNRMPRYKPEYLFGVEGFVQELRTMSFVIGFGTAPFYTQIPHDRHEEKCRVKVTLNSNSEDIPSVMFEAGGRNYIHACQEVARIAIGELRDRYSDQLADTEYRYHPRQPQGSDRGSYLETEGIENYVTTRHLVEMLWAMDESRAETVLAAQDREDRNHGKICKLEDKVDRLEKELAALKGEAPPQKARIRLTARKRALFVPRYQLAPKMVNTRSNGNGPNNPNNNNGENPTLAQVLAQQTQLMNMMMQQFQNQQNQGNNHAPPQNKLAEFLRVRPPVFSSTTNPVEASDWLHAIEKKLDLLQCTDQEKVSFASHQLHGPASEWWDHFRLNRTTAEPITWLEFTAAFRKTHIPSGVVSLKKKEFRSLTQGSRSVTEYLHEFNRLARYAPEDVRNDEERQEKFLGGLNDELSYPLMVGDYPDFQKLVDKAIRQEDKYNRMEQKKRRIAQFKTQQGNNQKPRLTLGPQSMPQGGSSSVVRPQRQFFNNNAGNNIRNKAPRPVAAPVQQQPAKREQGSKPVVCFNCGDPGHYADKCPKPRRVKVVPAQSNSAVPVSKARVNHVAAAEAQDAPDVILGTFLVNSVPATVLFDSGATHSFLSMSFAGNHGMEVEDLRRPLMVSTPSNQALSLQRSPSVRIEIKGVPFLANLILLESKDLDVILGMDWLARHKGVIDCANRKVTLNSYDGRVVTVHALSSESLRSRLNQITLEEIPIVREYSDVFPDDLPGMPPKRDIEFRIDLVPGTTPIHKRPYRMAANELAEVKRQVDDLLQKGYIRPSSSPWGAPVIFVEKKDHTQRMCVDYRALNDVTIKNKYPLPRIDDLFDQLKGATVFSKIDLRSGYHQLESKRKIYLRQLLPL

SEQ ID NO: 20043 - protein, 1039 aa, Oryza sativa
  Clone ID: TF_OSC1666j.C1.p2.fg
MSNEKVPSNAPIAPQEGNAPQNSGSNKQPDASSEETWRTPSDPFPMEITQVAPRDDDPDYIPIEQAMVVRRRSKRKAERNRTEQEVEMDTATSAPERTETSTSAGGSGKKRCGERSKNKLPKETYNVIALDQDGKPVEPPIVRSKFSNACGTLVRTRCPINVKLWETVDDNIKTLLWNELQKYFVFPPGSEVRGRDYALKKMGDRWRQWKSDLNRDYVQKNLPPFTDYGHISQADWDTFVADHTTAEALALRKKMSYAGHVDQWREIEQRFAAAAENPTAFPRLFPDSQQPTQSAQQTTNVPSSVGSVQTTTFPVDSITGPPPCSLIVPIGRAGKTKEVAMGFAIPGRQFHNTAIPEDYARIQVAKTEPQTKPYPLDMWKYGSALQQRPEDRSLYGRAPGLEWYIPGLEIELCSRGGCSEWLGLYNRMPRYKPEYLFGVEGFVQELRTMSFVIGFGTAPFYTQIPHDRHEEKCRVKVTLNSNSEDIPSVMFEAGGRNYIHACQEVARIAIGELRDRYSDQLADTEYRYHPRQPQGSDRGSYLETEGIENYVTTRHLVEMLWAMDESRAETVLAAQDREDRNHGKICKLEDKVDRLEKELAALKGEAPPQKARIRLTARKRALFVPRYQLAPKMVNTRSNGNGPNNPNNNNGENPTLAQVLAQQTQLMNMMMQQFQNQQNQGNNHAPPQNKLAEFLRVRPPVFSSTTNPVEASDWLHAIEKKLDLLQCTDQEKVSYASHQLHGPASEWWDHFRLNRTTAEPITWLEFTAAFRKTHIPSGVVSLKKKEFRSLTQGSRSVTEYLHEFNRLARYAPEDVRNDEERQEKFLGGLNDELSYPLMVGDYPDFQKLVDKAIRQEDKYNRMEQKKRRIAQFKTQQGNNQKPRLTLGPQSMPQGGSSSVVRPQRQFFNNNAGNNIRNKAPRPVAAPVQQQPAKREQGSKPVVCFNCGDPGHYADKCPKPRRVKVVPAQSNSAVPVSKARVNHVAAAEAQDAPDVILGTFLVNSVPATVLFDSGATHSFLSMSFAGNHGMEVEDLRRPLM

SEQ ID NO: 20044 - protein, 976 aa, Oryza sativa
  Clone ID: TF_OSC17324j.C1.p1.fg
GGSSSIVRPQRQFFNNNAGNNIRNQVPRPVAAPTQQQPAKREQGSKPVVCFNCGDPGHYADKCPKPRRVKVVPTQSNSTAPASKARVNHVAAAEAQDAPDVILGTFLVNLVPATVLFDSGATHSFLSMSFAGNHGMEVEDLRHPLMVSTPSNQALSLQRSPSVRIEIKGVPFLANLILLESKDLDVILGMDWLARHKGVIDCANRKVTLISNDGRVVTVHALSSESLRSRLNQITLEEIPIVREYPDVFPDDLPGMPPKRDIEFRIDLVPGTTPIHKRPYRMAANELAEVKRQVDDLLQKGYIRPSSSPWGAPVIFVEKKDHTQRMCVDYRALNDVTIKNKYPLPRIDDLFDQLKGATVFSKIDLRSGYHQLRIKEEDIPKTAFTTRYGLFECTVMSFGLTNAPAFFMNLMNKVFMEYLDKFVVVFIDDILIYSRTKEEHEEHLRLALEKLREHQLYAKFSKCEFWLSEVKFLGHVISAGGVAVDPSNVESVTNWKQPKTVSEIRSFLGLAGYYRRFIENFSKIAKPMTRLLQKDVKYKWSEECEQSFQELKNRLISAPILILPDPKKGFQVYCDASKLGLGCVLMQDGKVVAYASRQLRPHEKNYPTHDLELAAVVHALKIWRHYLFGTRTEDYDMGIHYHPGKANVVADALSRKGYCNATEGRQLPLELCQEFERLNLGIVSREIKKNMRRGKAIGFLEDEQGTVWLGERICVPDNKDLKDVILKEAHDTLYSIHPGSTKMYQDLKERFWWASMKREIAEYVAVCDVCQRVKAEHQKPASLLQPLKIPEWKWEEIGMDFITGLPRTSSGHDSIWVIVDRLTKVAHFIPVKTTYSGSRLAELYMARIVCLHGVPKKIVSDRGSQFTSNFWKKLQEEMGSKLNFSTAYHPQTDGQTERVNQILEDMLRACALDFGGSWDKSLPYAEFSYNNSYQASLQMAPYEALYGRKCRTPLLWDQTGERQVFGTDILREAEEK

SEQ ID NO: 20045 - protein, 744 aa, Oryza sativa
  Clone ID: TF_OSC17993j.C1.p1.gm
MEPENSAAGFLSLRPPSLSPVAIKSIPELRSSVSATRRSLSPSESSPHRRTFSPPSPPCSGSPPSSLRTSSRLGVTSIGFAALPSTPSAPPFRPPTAGAPSSSSSRTAPPPLAASVVVSAALVVPGWDPAVSRPRPRVRLTRGTHGADRRQPRAPDAAASEDPLFVEVEAAPRPYKDRSSGLCCNALPYFHMSSGANEGYTSCGPEKVSFASHQLHGPASEWWDHFRLNRTTAEPITWLEFTAAFRKTHIPSGVVSLKKKEFRSLTQGSRSVTEYLHEFNRLARYAPEDVRNDEERQEKFLGGLNDELSYPLMVGDYPDFQKLVDKAIRQEDKYNRMEQKKRRIAQFKTQQGNNQKPRLTLGPQSMPQGGSSSVVRPQRQFFNNNAGNNIRNQAPRPVAAPAQQQPAKREQGSKPVVCFNCGDPGHYADKCPKPRRVKVVPVQNNSAVPASKARVNHVAAAEAQDAPDVVLVREYPDVFPDDLPANELAEVKRQVDDLLQKGYIRPSSSPWGAPVIFVEKKDHTQRMCVDYRALNDVTIKNKYPLPRIDDLFDQLKGATVFSKIDLRSGYYQLRIKEEDIPKTAFTTRYGLFECTVMSFGLTNAPAFFMNLMNKVFMEYLDKFGVVFIDDILIYSRTKEEHEEHLRLALEKLREHQLYAKFSKCEFWLSEVKFLGHVISAGGVAVDPSNVESVTNWKQPKTVSEIRSFLGLAGYYRRFIENFSKIAKPMTRLLQKDVKYKWSEE

SEQ ID NO: 20046 - protein, 1564 aa, Oryza sativa
  unsure (1)..(1564): unsure at all Xaa locations
  Clone ID: TF_OSC18197j.C1.p1.np
FGDRTVQPMPRYKPEYLFGVEGFVQELRTMSFVIGFGTAPFYAQIPHDRHEEKCRVKVTLNSNSEEVPSVMFEAGGRNYIHACQEVARIAIGELRDRYSDQLADTEYRYHPRQPQGSDRGSYLETEGIENDVTTKHLVEMLWAMDESRAETVLAAQDREDRNRGKICKLEDKVDRLEKELAALKGEAPPQKARIRLTARKRALFVPRYQLAPKVRVVEKEVAPAQADPPVIIISSDEEDESKRNHSKIEWVATQDDEDEPSIDLRCLEELDNGNGPNNPNNNNGENPTLAQVLAQQTQLMNMMMQQFQNQQNQGNNHAPPQNKLAEFLRVRPPVFSSTTNPVEASDWLHAIEKKLDLLQCTDQEKVSFASHQLHGPASEWWDHFRLNRTTAEPITWLEFTAAFRKKHIPSGVVSLKKKEFRSLSQGSRSVTEYLHEFNRLARYARKDVRNDEERQKKFLRELNDELSYPLMVGDYPDFQKLVDKAIRQEDKYNRMEQKKRRIAQFKTQQGNNQKPRLTLGPQPMPQGGSSSVVRPQRQFFNNNAGNNIRNQAPRPVAAPAQQQPAKREQGNKPVVCFNCGDPGHYADKCPKPRRVKVVSAQSNSAVPASKARVNHVAAAEAQDAPDVILGTFLVNSVPATVLFDSGATHSFLSMSFAGNHGMEVEDLRRPLMVSTPSNQALSLQRSPSVRIEIQGVPFLANLILLESKDLDVILGMDWLARHKGVIDCANRKVTLNSYDGRVVTVHALSSESLRSRLNQITLEEIPIVREYPDVFPDDLPGMPPKRDIEFRIDLVPGTTPIHKRPYRMAANELAEVKRQVDDLLQKGYIRPSSSPWGAPVIFVEKKDHTQRMCVDYRALNDVTIKNKYPLPRIDDLFDQLKGATVFSKIDLRSGYHQLRIKEYGLFECTVMSFGLTNAPAFFMNLQLRIKEYGLFECTVMSFGLTNAPAFFMNLMNKVFMEYLDKFVVVFIDDILIYSRTKEEHEELLRLALEKLREHQLYAKFSKCEFWLSEVKFLGHVISAGGVAVDPSNVESVTNWKQPKTVSEIRSFLGLAXYYRRFIENFSKIAKPMTRLLQKDVKYKWSEECEQSFQELKSRLISAPILILPDPKKGFQVYCDASKLGLGCVLMQDGKVVAYASRQLRPHEKNYPTHDIELAAVVHALKIWRHYLFGTHTEEFERLNLGIVGRGFVAALEAKPTLIDQVREAQINDPDIQEIKKNMRRGKAIGFLEDEQGTVWLGERICVPDNKDLKDAILKEAHDTLYSIHPGSTKMYQDLKERFWWASMKREIAEYVAVCDVCQRVKAEHQKPAGLLQPLKIPEWKWEEIGMDFITGLPRTSSGHDSIWVIVDRLTKVAHFIPVKTTYSGSRLAELYMARIVCLHGVPKKIVSDRGSQFTSNFWKKLQEEMGSKLNFSTAYHPQTDGQTERVNQILEDMLRACALDFSGSWDKNLPYAEFSYNNSYQASLQMAPYEALYGRKCRTPLLWDQTGERQVFGTDILREAEEKVKIIQERLRVAQSRHKSYADNRRKDLSFEEGDYVYLRDGTLYNLQNFQTRKSLCKRN

SEQ ID NO: 20047 - protein, 340 aa, Oryza sativa
  Clone ID: TF_OSC18999j.C1.p1.gm
SLTQGSRSVTEYLHEFNRLARYAPEDVRTDEERQEKFLEGLNDELSYPLMTGDYPDFQKLVDKAIRQEDKYNRMEQKKRRIAQFKTQQGSNQKPRLTLGHQSMPQGGSSSVVRPQRQFFNNNAGNNIRNQAPRPVAAPTQQQPAKREQGSKPVVCFNCGDPGHYADKCPKPRRVKVVPTQSNSTVPASKARVNHVAAAEAQDAPDVILVKFLGHVISAGGVAVDPSNVESVTNLKQPKTVSEIRCFLGLAGYYRSTLAPSSIEPPSPPLLQPCAAAVPVIVVAREDCRRGRQVAAVLVRLFVAAEDRRSTVAAVDPIFSAVSTSSPSPSVGLPPLLWSPI

SEQ ID NO: 20048 - protein, 1687 aa, Oryza sativa
  Clone ID: TF_OSC19032j.C1.p3.fg
MPRYKPEYLFGVDGFVQELRTMSFVIGFETAPFYAQIRHDRHEEKCRVKVTLNSNSEDIPSVMFEAGGRNYIHACQEVARIAIGELRDRYSDQLADTEYRYHPRQPQGSDRGSYLETEGIENDATTRHLVEMLWAMDESRAETVLAAQDREDRNRGKICKLEDKVDRLEKELAELKGEAPPQKARIRLTARKRALFVPRYQLAPKIRVVEKEVAPTLADPPVIIISDDEEEESKRNNSKIEWFSPVSLLVPCPCLMVNTRSNGNGPSNNNNGENPTLAQVLAQQTQLMNMMMQQLQNQGNNHASPQNKLAEFLRVRPPIFSSTTNPVEAGDWLHAIDKKLDLLQCTDQEKVSFASHQLHGPASEWWDHFRLNRTTAEPITWLEFTAAFRKTHIPSGVVSLKKKEFRSLTQGSRSVTEYLHEFNRLARYAPEDVRNDEERQEKFLEGLNDELSYPLMTGDYADFQKLVDKAIRQEDKYNRMEQKKRRIAQFKTQQGNNQRPRLTLGPQSMPQGGSSSVVRPQRQFFNNNAGNNIRNQAPRPVAAPTQQQPAKREQGSKSVVCFNCGDPGHYADKCPKPRRVKARVNHVAAAEAQDAPDVILGTFLVNSVHATVLFDSGATHSFLSMSFAGNHGMEVEDLRRPLMVSTPSNQALSLQRSPSVRIEIQGIPFLANLILLESKDLDVILGMDWLARYKGVIDCANRKVTLTSNDGRVVTVHALSSETLRSRLNQITLEEIPVVREYSDVFPDDLPGMPPKRDIEFRIDLVPGTTPIHKRPYRMAANELAEVKRQVDDLLQKGYIRPSSSPWGAPVIFVEKKDHTQRMCVDYRALNDVTIKNKYPLPRIDDLFDQLKGATVFSKIDLRSGYHQLRIKEEDIPKTAFTTRYGLFDVFMEYLDKFVVVFIDDILIYSRTKEEHEEHLCLALEKLREHQLYAKFSKCEFWLSEVKFLGHVISAGGVAIDPSNVESVTNWKQPKTVSEIRSFLGLAGYYRRFIENFSKIAKPMTRLLRKDVKYKWSEECERSFQELKNRLISAPILILPDPKKGFQVYCDASKLGLGCVLMQNGKVVAYASRQLRPHEKNYPTHDIELAVVVHALKIWRHYLFGTRTEVYTDHKSLKYIFTQPDLNMRQRRWLELIKDYDMGIHYHPGKANVVADALSRKGYCNATEGRQLPLELCKEFERLNLGIVSRGCVAALEAKPTLIDQVREAQINDPDIQEIKKNMRRGKAIGFLEDEQGTVWLGERICVPDNKDLKDAILQEAHDTLYSIHPGSTKMYQDLKERFWWASMKREIAEYVVVCDVCQRVKAEHQKPAGLLQPLKIPEWKWEEIGMDFITGLPRTSSGHDSIWVIVDRLTKVAHFIPVKTTYSRSRLAELYMARIVCLHGVPKKIVSDRGSQFTSNFWKKLQEEMGSKLNFSTAYHPQTDGQTERVNQILEDMLRACALDFGGSWDKNLPYAEFSYNNSYQASLQMAPYEALYGRKCRTPLLWDQTGERQVFGTDILREAEEKVKIIQERLRVAQSRHKSYADNRCRDLSFEEGDYVYLRVTPLRGVHRFHTKGKLAPRFVGPYKIVSRRGEVAYQLELPQSLAGVHNVFHVSQLKKCLRVPTEEANLEQIEVQEDLTYVEKPIRILETNERRTRNRVIRFCKVQWSNHSEEESTWEREDELKSAHPHLFASSSESRGRDSV

SEQ ID NO: 20049 - protein, 1269 aa, Oryza sativa
  Clone ID: TF_OSC19140j.C1.p2.fg
MMMQQLQNQQNQGNNHAPPQNKLAEFLRVRPPIFSSTTNPVEAGDWLHAIEKKLDLLQCTDQEKVSFASHQLHGPASEWWDHSRLNRITAEPITWLEFTAAFRKTHIPSGVVSLKKKEFRSLTQGSRSVTEYLHEFNRLARYALEDVRTDEERQEKFLEGLNDELSYPLMTGDYPDFQKLVDKAIRQEDKYNRMEQKKRRIAQFKTQQGNNQRPRLTLGPQSMPQGGSSSVVRPQRQFFNNNAGNNIRNQAPRPVAAPTQQQPAKREQGSKPVVCFNCGDPGHYADKCPKPRRVKAVPAQSNSTAPAPKARVNHVAATEAQGAPDVILGTFLVNLVPATVLFDSGATHSFLSMSFAGNHVMEVEDLRRPLMVNTPSNQALSLQRSPSVRIEILRSLFLANLILLESKDLDVILGMDWLARYKGVIDCANRKVTLTSDDGRVVTIHALSSESLRSRLNQITLEEIPIVREYPDVFPDDLPGMPPKRDIEFRIDLVPGTTPIHKRPYRMAANELAEVKRQVDDLLQKGYIRPSSSPWGAPVIFVEKKDHTQRMCVDYRALNDMTIKNKYPLPRIDDLFDQLKGATVFSKIDLRSGYHQLRIKEEDIPKTAFTTRYGLFECTVMSFGLTNAPAFFMNLMNKVFMEYLDKFVVVFIDDILIYSRTKEEHIEHLRLALEKLREHQLYAKFSKCEFWLSEVKFLGHVISAGGVAVDPSNVESVTNWKQPKTVSEIRSFLGLAGYYRRFIENFSKIAKPMTRLLQKDVKYKWSEECEQSFQELKNRLISAPILILPDPKKGFQVYCDASKLGLGCVLMQDGKVVAYASRQLRPHEKNYPTHDLELAAVVHALKIWHHYLFGTRTEVYTDHKSLNRGFVAALEAKPTLIDQVREAQINDPDIQEIKKNMRRGKAIGFLEDEQGTVWLGERICVPDNKDLKDAILKEAHDTLYSIHPGSTKIYQDLKERFWWASMKREIAEYVAVCDVCQRIKAEHQKPAGLLQPLKIPEWKWEEIGMDFITGLPRTSSGHDSIWVIVDRLTKVAHFIPVKTTYSGSRLAELYMARIVCLHGVPKKIVSDQGSQFTSKFWKKLQEEMGSKLNFSTAYHPQTDGQTERVNQILEDMLRACALDFGGSWDKNLPYAEFSYNNSYQASLQMAPYEALYGRKCRTPLLWDQTGERQVFGTDILREAEEKVKIIQERLRVAQSRHKSYADNRRRDLSFDAGDYVYLHVTPLRGVHRFHTKGKLAPRFVGPYKIVSRRGEVAYQLELPQFGRRP

SEQ ID NO: 20050 - protein, 540 aa, Oryza sativa
  Clone ID: TF_OSC19159j.C1.p1.gm
MMMQQLQNQQNQGNNHAPPQNKLAEFLRVRPPIFSSTTNPVEAGDWLHAIEKKLDLLQCTDQEKVSFASHQLHGPASEWWDHSRLNRITAEPITWLEFTAAFRKTHIPSGVVSLKKKEFRSLTQGSRSVTEYLHEFNRLARYALEDVRTDEERQEKFLEGLNDELSYPLMTGDYPDFQKLVDKAIRQEDKYNRMEQKKRRIAQFKTQQGNNQRPRLTLGPQSMPQGGSSSVVRPQRQFFNNNAGNNIRNQAPRPVAAPTQQQPAKREQGSKPVVCFNCGDPGHYADKCPKPRRVKAVPAQSNSTAPAPKARVNHVAATEAQVREYPDVFPDDLPERIHQTEFISMGSSSNFCGKERPYPEDLKGATVFSKIDLRSGYHQLRIKEEDIPKTAFTTSLAPPLSPPLQPCSAVAPVVAVARGGRHRGRRRVAVLVRPFAVAEDRRSIVAVVKPKVDAASSSTPSPSVDLPPPFWSLVSSPRRPLRPGALRSRRRAIVRRRACAPEPPQVVTSPLTSSSSSLVVRPWIGEEFEEFQGGDYDPGK

SEQ ID NO: 20051 - protein, 1293 aa, Oryza sativa
  Clone ID: TF_OSC20818j.C1.p1.np
MVHCGELCCAKGIVTISPFAAPGLEWYIPGLEIELYSRMSRYKPEYLFGVEGFVQKLRTMSFVIGFGTAPFYAQIPHDRHEEKCRVKVTLNSNSEDIPSVMFEAGGRNYIHACQEVARIAIGELRDRYSDQLADSEYRYHPRQPQGSDRGSYLETEGIENDATTKHLVEMLWAMDETRAETVLAAQDREDRNRGKICKLEDKVDRLEKELAALKGEAPPQKARIRLTARKRALFVPRYQLAPKVRVVEKEVTPALADPPVINMVLTRSNGNGPNNTNNNNNNGENPTLAQVLAQQTQLMNMMMQQLQNQQNQGNNHAPPQNKLAEFLRVRPPIFSSTTNPVEAGDWLHAIEKKLDMLQCTDQEKVSFASHQLHGPASEWWDHFRLNRTTAEPITWLEFTAAFRKTHIPSGVVSLKKKEFRSLTQGSRSVTEYLHEFNRLARYAPEDVHTDEERQEKFLEGLNDELSYPLMTGDYPDFQKLVDKAIRQEDKYNRMEQKKRRIAQFKTQQGNNQKPRLTLGPQSMPQGGFSSVVRPQRQFFNNNAGNNIRNQAPRPVAAPTQQQPAKKEQGSKLVVCFNCGDPGHYADKCPKPRRVKVVPAQSNSTAPASKARVNHVAAAEAQDAPDVILGTFLVNLVPATVLFDSGATHSFLSMSFAGNDGMEVEDLRRHLMVSTPSNQALSLQHSPSVRIEIQGVPFLANLILLESKDLDVILGMDWLARHKGVIDCANRKVTLTSNDGRVVTIHALSSESLRPSLNQITLEEIPTVREYPDVFPDDLPGMPTKRDIEFRIDLVPGTTPIHKRPYRMAANELAEVKRQVDDLLQKGYIRPSSFPWGAPVIFVEKKDHTQRMCVDYRALNDVTIKNKYPLPRIDDLFDQLKGATVFSKIDLRSRYHQLRIKEEDIPKTAFTTRYGLFECTVMSFGLTIAPAFFMNLMNKVFMEYLDKFVLVFIDDILIYSRTKEEHEEHLRLVLEKLREHQLYAKFSKCEFWLSEVKFLGHVISAGGVAVDPSNVESVTNWKQPKTVSEIRSFLGLAGYYRRFIENFSKIAKPRTRLLQKDVKYKWSEECEQSFQELKNRLISAPILILPDPKKGFQVYCDASKHGLGCVLMQDGKVVAYASRQLRPHEKNYPTHDLELAAVVHALKIWRHYLFGTRTEVYTDHKSLKYIFTQPDLNMRQRRWLELIKDYDMGIHYHPGKANVVADALSRKGYCNATEGRQLPLELCKEFERLNLGIVRRGFVAALEAKPTLIDQVREAQINDLDIQEIKKNMRRGKAIGFMEDEQGTVWLGER

SEQ ID NO: 20052 - protein, 1325 aa, Oryza sativa
  Clone ID: TF_OSC20854j.C1.p2.fg
MVITRSNGNGPNNPNNNNEGNPTLAQVLAQQTQLMNMMMQQLQNQQNQGNNHAPPQNKLAEFLRVRPPIFSSTTNPVEAGDWLHAIEKKLDLLQCTDQEKVSFASHQLHGPASEWWDHFRLNRTTAEPITWLEFTAAFRKTHIPSGVVSLKKKEFRSLTQGSRSVTEYLHEFNRLARYAPEDVRNDEERQEKFLEGLNDELSYPLMAGDYPDFQKLVDKAIRQEDKYNRMEQKKRRIAQFKTQPGNNQRPRLTLGPQSMPHGGSSSVVRPRRQFFNNNAGNNIRNQAPRPVAVSTQQQPAKREQGSKPVVCFNCGDPGHYADKCPKPRRVKVVPAQSNSTASASKARVNHVAAAEAQDAPDVILESKDLDVILGMDWLARHKGVIDCANRKVTLTSNDGRVVTVHALSSESLRSRLNQITLEEIPIVREYPDVFPDDLPGMPPKRDIEFRIDLVPGTTPIHKRPYRMAANELAEVKRQVDDLLQKGYIRPSSSPWGAPVIFVKKKDHTQRMCVDYRALNDVTIKNKYPLPRIDDLFDQLKGATVFSKIDLRSGYHQLRIKEEDIPKTAFTTRYGLFECTVMSFGLTNAPAFFMNLMNKVFMEYLDKFVVVFIDDILICSRTKEEHEEHLRLVLEKLREHQLYAKFSKCEFWLSEVKFLGHVISAGGVAVDPSNVESVTNWKQPKTVSEIRSFLGLAGYYRRFIENFSKIAKPMTRLLQKDVKYKWSEECEQSFQELKNRLISAPILILPDPKKGFQVYCDASKLGLGCVLMQDGKVVAYASRQLRPHEKNYPTHDIELAAVVHALKIWRHYLFGTRTEANVVADALSRKGYCNATEGRQLPLELCKEFERLNLGIVSRGFVAALEAKPTLIDQVREAQINDPDIQEIKKNMRRGKAIGFLEDEQGTVWLGERICVPDNKDLKDAILKEAHDTLYSIHPGSTKMYQDLKERFWWASMKREIAEYVAVCDVCQRVKAEHQKPAGLLQPLKIPEWKWEEIGMDFITSLPRTSSGHDSIWVIVDRLTKVAHFIPVKTTYSGSRLAELYMARIVCLHGVPKKIVSDRGSQFTSNFWKKLQEEMGSKLNFSTAYHPQTDGQTERVNQILEDMLRACALDFGGSWDKNLPYAEFSYNNSYQASLQMAPYEALYGQKCRTPLLWDQTGERQVFGTDILREAEEKVKIIQERLRVAQSRHKSYADNRRRDLSFEEGDYVYLRVTPLRGVHCFHTKGKLSPRFVGPYKIVSRRGEVAYQLELPQSLAGVHNVFHVSQLKKCLRVPTEEANLEQIEVQEDLTYVEKPIRILETDERRTRNQVIRFCKVQWSNHSEE

SEQ ID NO: 20053 - protein, 1754 aa, Oryza sativa
  Clone ID: TF_OSC22342j.C1.p3.fg
MKITSSKLIRPVPVQQDQSQENNSSGRKQQSTRLRSGGDKPTGVAGESIPLVFEGMTMIREWCTVHGSLRGTRLRSGGDKPTGVAGESMPLVFEGVIMIQEAPGLEWLIPGLEVELCSRDGCSEWLGLYNRMPRYKHEYLFGVEGFVQELRTMSFVIGFGTAPFYAQIPHDRHEEKCRVKVTLNSNSEDVPSVMFEAGGRNYIHACQEVARIAIGELRDRYSDQLADTEYRYHPRQPQGSDRGSYLEIEGIENDATTRHLVEMLWAMDESRAETVLAAQDREDRNRGKICKLEDKVDRLEKELAALKGEAPPQKARIRLTARKRALFVPRYQLAPKMVNTRSNGNGPNHPNNNNNGENPTLAQVLAQQTQLMNMMMQQFQNQQNQGNNHVPPQNKLAEFLRVRPPVFSSTTNPVEAGDWLHAIEKKLDLLQCTDQEKVSFASHQLHGPASEWWDHFRLNRINAEPITWLEFAAAFRKTHIPSGVVSLKKKEFRSLTQGSRSVTEYLHEFNRLARYAPEDVRNDEERQEKFLGGLNDELSYPLMGGSSSVVRPQRQFFNNNAGNNIRNQAPRPVAAPTQQQPTKREQGSKPVVCFNCGDPGHYADKCPKPRRVKVVPAQNNSAVPASKARVNHVAAAEAQDAPDVILGTFPVNSVPATVLFDSGATHSFLSMSFAGNNGMEVEDLRRPLMVSTPSNQALSLQCSPSVRIEIQGIPFLANLILLESKDLDVILGMDWLARHRGVIDCANRKVTLTSNDGRVVTVHALSSESLRSRLNQITLEEIPIVREYPDVFPDDLPGMPPKRDIEFRIDLVPGTTPIHKRPYRMAANELAEVKRQVDDLLQKGYIRPSSSPWGAPVIFVEKKDHTQRMCVDYRALNDVTIKNKYPLPRIDDLFDQLKGATVFSKIDLRSGYHQLRIKEEDIPKTAFTTRYGLFECTVMSFGLTNAPAFFMNLMNKVFMEYLDKFVVVFIDDILIYSRTKEEHEEHLRLALEKLREHQLYAKFSKCEFWLSEVKFLGHVISAGGVAVDPSNVESVTNWKQPKTVSEIRSFLGLAGYYRRFIENFSKIAKPMTRLLQKDVKYKWSEECEQSFQELKSRLISAPILILPDPKKGFQVYCDASKFGLGCVLMQDGKVVAYASRQLRPHEKNYPTHDLELAAVVHAFKIWRHYLFGTRTEVYTDHKSLKYIFTQPDLNMRQRRWLELIKDYDMGIHYHPGKANVVADALSRKSYCNATEGRQLPLELCKEFERLNLGIVSRGFVTALEAKPTLIDQVREAQINDPDIQEIKKNMRRGKAIGFLEDEQGTIWLGERICVPDNKDLKDAILKEAHDTLYSIHPGSTKMYQDLKERFWWASMKREIAEYVAVCDVCQRVKAEHQKPAGLLQPLKIPEWKWEEIGMDFITGLPRTSSGHDSIWVIVDRLTKVAHFIPVKTTYSESRLAELYMARIVCSHGVPKKIVSDRGSQFTSNFWKKLQEEMGSKLNFSTAYHPQTDGQTERVNQILEDMLRACALDFGGNWDKNLPYAEFSYNNSYQASIQMAPYEALYGRKCRTPLLWDQTGERQVFGTDILREAEEKVKIIQERLRVAQSRHKSYADNRRRDLSFEEGDYVYLRVTPFRGVHRFHTKGKLAPRFVGPYKNVSRRGEVAYQLELPQSLAGVHNVFHVSQLKKCLRVPTEEANLEQIEVQEDLTYVEKPIRILETNERRTRNRVIRFCKVQWSNHSEEESTWEREDELKSAHPHLFASSSESRGRDSV

SEQ ID NO: 20054 - protein, 1709 aa, Oryza sativa
  unsure (1)..(1709): unsure at all Xaa locations
  Clone ID: TF_OSC23002j.C1.p1.np
PLFSLSSAQIPSFPESPFSQKKSLKSSKASKATPGLEWYIPGLEIELCSRGGCSEWLGLYNRMPRYKPEYLFGVEGFVQELRTMSFVIRFGTAPFYAQIPHDRHEEKCRVKVTLNSNSEDIPSVMFEAGGRNYIHACQEVARIAIGELRDRYSDQLADTEYRYHPRQPQGSDRGSYLETEGIENDATTKHLVEMLWAMDESRAETVLAAQDREDRNRGKICKLEDKVDRLEKELAALKGEAPPQKARIRLTARKRALFVPRYQLAPKMVNTRSNGNGPNNPNNNNNGENPTLAQVLAQQTQLMNMMMQQFQNQQNQGNNHAPPQNKLAEFLRVRPPVFSSTTNPVEASDWLHAIEKKLDLLQCTDQEKVSFASHQLHGPASEWWDHFRLNRITAEPITWLEFTAAFRKTHIPSGVVSLKKKEFRSLTQGSRSVTEYLHEFNRLARYAPEDVRNDEERQEKFLGGLNDELSYPLMVGDYPDFQKLVDKAIRQEDKYNRMEQKKRRIAQFKTQQGNNQKPRLTLGPQPMPQGGSSSVVRPQRQFFNNNAGNNIRNQAPRPVAAPAQQQPAKREQGNKPVVCFNCGDPGHYADKCPKPRRVKVVPVQNNSAVPASKARVNHVAAAEAQDAPDVILGTFLVNSVPATVLFDSGATHSFLSMSFAGNHGMEVEDLRRPLMVSTPSNQALSLQRSPSVRIEIQGVPFLANLILLESKDLDVILGMDWLARHKGVIDCANKKVTLTSYDGRVVTVHALSSESLRSRLNQITLEEIPIVREYPDVFPDDLPGMPPKRDIEFRIDLVPGTTPIHKRPYRMAANELAEVKRQVDDLLQKGYIRPSSSPWGAPVIFVEKKDHTQRMCVDYRALNDVTIKNKYPLPRIDDLFDQLKGATVFSKIDLRSGYHQLRIKEEDIPKTAFTTRYGLFECTVMSFGLTNAPAFFMNLMNKVFMEYLDKFVVVFIDDILIYSRTKEEHEEHLRLALEKLREHQLYAKFSKCEFWLTEVKFLGHVISAGGVAVDPSNVESVTNWKQPKTVSEIRSFLGLAGYYRRFIENFSKIAKPMTRLLQKDVKYKWSEECERSFQELKSRLISAPILILPDPKKGFQVYCDASKLGLGCVLMQDGKVVAYASRQLRPHEKNYPTHDIELAAVVHALKIWRHYLFGTRTEVYTDHKSLKYIFTQPDLNMRQRRWLELIKDYDMGIHYHPGKANVVADALSSKGYCNATEGRQLPLELCKEFERLNLEIVSRGFVAALEAKPTLIDQVREAQINDPDIQEIKKNMRRGKAIGFLEDEQGTVWLGERICVPDNKDLKDAVLKEAHDTLYSIHPGSTKMYQDLKERFWWASMKREIAEYVAVCDVCQRVKAEHQKPAGLLQPLKIPEWKWEEIGMDFITGLPRTSSGHDSWVIVDRLTKVAHFIPVKTTYSGSRLAELYMARIVCLHGVPKKIVSDRGSXFTSNFWKKLQEEMGSKLNFSTAYHPQTDGQTERVNQILEDMLRACALDFGGSWDKNLPYAEFSYNNSYQASLQMAPYEALYGRKCRTPLLWDQTGERQVFGTDILREAEEKVKIIQERLRVAQSRHKSYADNRRRDLSFEEGDYVYLRVTPLRGVHRFHTKGKLAPRFVGPYKIVSRRGEVAYQLELPQSLAGFHNVFHVSQLKKCLRIPTEEANIEQIEVQEDLTYVEKPIRILETNERRTRNRVIRFCKVQWSNHSEE

SEQ ID NO: 20055 - protein, 766 aa, Oryza sativa
  Clone ID: TF_OSC23131j.C1.p2.fg
MVNTRSNGNGPSNNNNGENPTLAQVLAQQTQLMNMMMQQLQNQQNQGNNHVPPQNKLAEFLRVRPPVFSSTTNPVEAGDWLHAIEKKLDLLQCTDQEKVSFASHQLQGPASEWWDHFRLNRITAEPITWLEFTAAFQKTHIPSGVVSLKKKEFRSLTQGSRSVTEYLHEFNRLARYAPEDVRNGEERQEKFLEGLNDELSYPLMTGDYHDFQKLVDKAIRQEDKYNRMEQKKRRIAQFKTQQGNNQKPRLTLRPQSMPHGGSSFVVRPQRQFFNNNAGNNIRNQAPRPVAAPTQQQPAKREQGSKPVVCFNCGDPGHYADKCPKPRRVKVVPTQSNSTVPASKARVNHVAAAEAQDAPDVILGTFLVNSVPATVLFDSGATHSFLSMSFAGNHGMEVEDLRRPLMVSTPSNQALSLHRSPSVRIEIQGVPFLANLILLESKDLDVILGMDWLARHKGVIDCANRKVTLTSNDGRVVTVYALSSESLRSRLNQITLEEIPIVREYPDVFPDDLPGMPPKRDIEFRIDLVPGTTPIHKRPYRMAANELAEVKRHVDDLLQKGYIRPSSSPWGAPVIFVEKKDHTQRMCVDYRALNDVTIKNKYPLPRIDDLFDQLKGATVFSKIDLRSGYHQLRIKEEDIPKTAFTTRYGLFECTVMSFGLTNAPAFFMNLMNKVFMEYLDKFVVVFIDDILIYSRTKEEHEEHLRLALEKLREHQLYAKFSKCEFWLSEVKFLGHVISAGGVAVDPSNVESVTNWKQPKTVSEIPVF

SEQ ID NO: 20056 - protein, 771 aa, Oryza sativa
  unsure (1)..(771): unsure at all Xaa locations
  Clone ID: TF_OSC24830j.C1.p1.np
MPRYKPEYLFGVEGFVQELRSMSFVIGFGTAPFYAQIPHDRHEEKCRVKVTLNSNSEDIPLVMFEAGGRNYIHACQEVARIAIGELRDRYSDQLADTEYRYHPRQPQGSDRGSYLETEGIENDATTKHLVEMLWAMDESRAETVLAAQDREDRNRGKICKLEDKVDRLEKELAALKGEAPPQKARIRLTARKRALFVPRYQLAPKVRVVEKEVAPAQADPPVIIISSDEEEESKRNNSKIEWVATQDDKDEPSIDLRCLEELEXLFPVSLLVPCPCQVNTRSNGNGPNNPNNNNGENPILAQVLAQQTQLMNMMMQQFQNQENQGNNHAPPQNKLAEFLRVRPPVFSSTTNPVEASDWLHAIEKKLDLLQCTDQEKVSFASHQLHGPASEWWDHFRLNRTTAEPIIWLEFTAAFRKTHIPSGVVSLKKKEFRSLTQGSRSVTEYLHEFNRLARYPEDVRNDEERQEFLGGLNDELSYPLMVGDYPDFQKLVDKAIRQEDKYNRMEQKKRRIAQFKTRQGNNQKPHLTLGPQPMPQGGSSSVVRPQRQFFNNNAGNNIRNQGPRPVAAPAQQQPVKREQGSKPVVCFNCGDPGHYADKCPKPRRVKVVPAQNNSAVPASKARVNHVAAAEAQDAPDVILGTFLVNSVPATVLFDSGATHSFLSMSFVGNHGMEVEDLRRPLMVSTPSNQALSLQRSPSVRIEIQGVPFLANLILLESKDLDVILGMDWLARHKGVIDCANKKVTLTSYDGRVVTVHALSSESLRSRLNQITL

SEQ ID NO: 20057 - protein, 1298 aa, Oryza sativa
  Clone ID: TF_OSC25097j.C1.p1.fg
TTNPVEAGDWLHAIEKKLDLLQCTDQEKASFASHQLHGPASEWWDHFRLNRTTAEPITWLEFTAAFRKTHIPSGVVSLKKKEFRSLTQGSRSVTEYLHEFNRLARYAPEDVRNDEERQEKFLEGLNDELSYPLMTGDYSDFQKLVDKAIRQEDKYNRMEQKKRRIAQFKTQQGNNQRPRLTLGPQSMPHGGSSSVVRPQRQFFNNNAGNNIRNQALRPVAAPTQQQPAKREHGSKPVVCFNCGDPGHYADKCPKPRRMKVVPVQSNSTAPASKARVNHVAAAEAQDAPDVILGTFLVNLVPATVLFDSGATHSFLSMSFAGNHGMKVEDLRRPLMVSTPSNQALSLQGSPSVRIEIKGVPFLANLILLESKDLDVILGMDWLARHKGVIDCANRKVTLTSNDGRVVTVHALSSESLRSRLNQITLEEIPIVREYPDVFPDDLPGMPPKRDIEFRIDLVPGTTPIHKRPYRMAANELAEVKRQKDHTQRMCVDYRALNDVTIKNKYPLPRIDDLFDQLKGATVFSKIDLRSGYHQLRIKEEDIPKTAFTTRYGLFECTVMSFGLTNAPAFFMNLMNQVFMEYLDKFVVVFIDDILIYSRTKEEHEEHLRLALEKLREHQLYAKFSKCEFWLSEVKFLGHVISAGGVAVDPSNVESVTNWKQPKTVSEIRSFLGLAGYYRRFIENFSKIAKPLTRLLQKDVKYKWSEECEQSFQELKSSLISAPILILPDPKKGFQVYCDASKLGLGCVLMQDGKVVAYASRQLGPHEKNYPTHDIELAAVVHALKIWRHYLFGTRTEVYTDHKSLKYIFTQPDLNMRQRRWLELIKDYDMGIHYHPGKANVVADALSRKGYCNATEGRHLPLELCKEFERLNLGIVSIGFVAALEAKPTLIDQVREAQINDPDIQDIKKNRRRGKAIGFLEDEHGTVWLGERICVPDNKDLKDAILKEAHDTLYSIHPGSTKMYQDLKERFWWASMRREIAEYVAVCDVCQRVKAEHQKPAGLLQPLKIPEWKWEEIGMDFITGLPRTSSGHDSIWVIVDRLTKVAHFIPVKTTYSGSRLAELYMARITDGQTERVNQILEDMLRACALDFGGSWDKNLPYAEFSYNNSYQASLQMAPYEALYGQKCRTPLLWDQTGERQVFGTDILREAEEKSRHKSYADNRRRDLSFEEGDYVYLHVTPFRGVHRFHTKGKLAPRFVGPYKIVSRRGEVAYQLELPQSLAGIHNVFHVSQLKKCLRVPTEEANLERIEVQEDLTYVEKPIRILEIDERRTRNRVIRFCKVQWSNHSQKSQLGNEKMN

SEQ ID NO: 20058 - protein, 805 aa, Oryza sativa
  Clone ID: TF_OSC26717j.C1.p1.fg
PGLEWYIPGLEIELCSRDGCSEWLGLYNRMPRYKPEYLFGVEGFVQELRTMSFVIGFGTAPFYAQIPHDRHEEKCRVKVTLNSNSEDIPSVMFEAGGRNYIHACQEVARIAIGELRDRYSDQLADTEYRYHPRQPQGSDRGSYLETEGIENDATTRHLVEMLWAMDESRAETVLAAQDREDRNRGKICKLEDKVDRLEKELAALKGEAPPQKARIRLTARKRALFVPRYQLAPKMVNTRSNGNGPNNPNNNNNGENPTLAQVLAQQTQLMNMMMQQFQNQQNQGNNHAPPQNKLAEFLRVRPPVFSSTTNPVEASDWLHAIEKKLDLLQCTDQEKVSFASHQLHGPASEWWDHFRLNRITAEPITWLEFTAAFRKTHIPSGVVSLEKKEFSARRSFLGGLNDELSYPLMVGDYPDFQKLVDKAIRQEDKYNCMEQRKRRIAHFKAQQGSNQKPRLTLGPQPMSQGGSSSVVRPQRQFFNNNAGNNIRNQAPRPVAAPVQQQPAKREQGSKPVVCFNCGDPGHYADKCPKPRRVKVVPAQSNSAVPASKARVNHVAAAEAQDAPDVILGTFLVNSVPATVLFDSGATHSFLSMSFAGNHGMEVEDLRRPLMVSTPSNQALSLQRSPSVRIEIKGVPFLANLILLESKDLDVILGMDWLARHKDDLPGMPPKRDIEFRIDLVPGTTPIHKRPYRMAANELAEVKRQVDDLLQKGYIRPSSSPWGAPVIFVEKKDHTQRMCVDYRALNDVTIKNKYPLPRIDDLFDQLKGATVFSKIDLRSGYHQLRIKEEDIPKTAFTTRYGLFEGL

SEQ ID NO: 20059 - protein, 1306 aa, Oryza sativa
  Clone ID: TF_OSC27739j.C1.p1.fg
MYRGGIEAHAPGLEWYIPGLEIELCSRGGCSEWLGLYNRMPCYKPEYLFGVEGFVQELRTMSFVIGFGNAPFYAQIRHDRHEEKCRVKVTLNSNSEDIPSVMFEAGGRNYIHACQEVARIAIGELRDRYSDQLVDTEYRYHPRQPQGSDRGSYLETEGIENDVTTRHLVEMLWAMDESRAETVLAAQDREDRNRGKICKLEDKVDRLEKELAALKGEAPPQKARIRLTARKRALFVPRYQLAPKVRVVEKEVAPAQADPPVIIISSDEEEESKRINSKIEWVATQDDEDEPSIDLLCSEELEKLESLVVWESSVCNNETQLRSIKVKMVNTRSNGNGPNNPNNNINGENPTLAQVLAQQTQLMNMMMQQFQNQQNQGNNHAPPQNKLAEFLRVRPPVFSSTTNPVEASDWLHAIEKKLDLLQCTDQEKVSFASHQLHGPASEWWDHFRLNRTTAEPITWLEFTAAFRKTHIPSGVVSLKKKEFRSLTQGSRSVTEYLHEFNRLARYAPEDVRNDEERQEKFLGGLNDELSYPLMVGDYPDFQKLVDKAIRQEDKYNRMEQKKRRIAQFKTQQGNNQKPRLTLGPQSMPQGGSSSVVRPQRQFFNNNAGNNIRNQAPRPVAAPAQQQPAKREQGSKPVVCFNCGDPGHYADKCPKPQRVKVVPAQSNSAVPASKARVNHIAAAEAQGAPDVILGTFLVNSVPATVLFDSGATHSFLSMSFAGNHGMEVEDLRRPLMVSTPSNQALSLQRSPSVRIEIQGVPFLANLILLESKDLDVILGMDWLARHKGVIDCANRKVTLNSYDGRVVTVHALSSESLRSRLNQITLEEIHIVREYPDVFPDDLPGMPPKRDIEFRIDLVPGTTPIHKRPYRMAANELAEVKRQVDDLLQKGYIRPSSSPWGAPVIFVEKKDHTQRMCVDYRALNDVTIKNKYPLPRIDDLFDQLKDKFVVVFIDDILIYSRTKEEHEEHLRLALEKLREHQLYAKFSKCEFWLSEVKFLGHVISAGGVAVDPSNVESVTNWKQPKTVSEIRSFLGLAGYYRRFIENFSKIAKPMTRLLQKDVKYKWSEECERSFQELKSRLISAPILILPDPKKGFQVYCDASKLGLGCVLMQDGKVVAYASRQLRPHEKNYPTHDIELAAVVHALKIWRHYLFGTRTEVYTDHKSLKYIFTQPDLNMRQRRWLELIKDYDMGIHYHPGKANVVADALSRKGYCNATEGRQLPLELCKEFERLNLGIVGRGFVAALEAKPTLIDQVREAQINDPDIQEIKKNMRRGKAIGFLEDEHGTVWLGERICVCHVLINSSQN

SEQ ID NO: 20060 - protein, 1693 aa, Oryza sativa
  Clone ID: TF_OSC27749j.C1.p1.fg
MPRFKPEYLFGVEGFVQELRTMSFVIGFGTAPFYAQIRHDRHEEKCRVKVTLNSNSEDIPSVMFEAGGRNYIHACQEVARIAIGELRDRYSDQLADTEYRYHPRQPQGSDRGSYLETEGIENDATTRHLVEMLWAMDESCAETVLAAQDREDWNRGKICKLEDKVDRLEKELAALKGEAPPQKARIRLTARKRALFVPRYQLAPKIRVVEKEVAPAQADPPVIIISSDEEEESKRNNSKIEWAAIKDEEDEPNEPSIDLLCSEELEFACVCVGLACDLHQWWDMVNTRSNGNGPNLNNLNNNNNGENPTLAQVLTQQTQLMNMMMQQLQNQQNQGNNHAPPQNKLAEFLRVRPPIFSSTTNPVEAGDWLHAIEKKLDLLQCTDQEKVSFASHQLHGPASEWWDHFRLNRTTAEPITWLEFTAAFRKTHIPSGVVSLKKKEFRSLTQGSRSVTEYLHEFNRLARYAPEDVRNDEERQEKFLEGLNDELSYPLMTGDYSDFQKLVDKAIRQEDKYNRMEQKKHRIAHFKAQQGNNQRPRLTLGPQSMPHGGSSSVVRPQRQIFNNNVGNNIRNQVPRPVAAPTQQQPAKREQGSKPVVCFNCGDPGHYADKCPKPRRVKVVPAQSNSTVPASKARVNHVAAAEAQDAPDVILGTFPVNSVPATVLFDSGATHSFLSMSFAGNHGMEVEDLRRPLMVSTPSNQALSLHRSPSVRIEIQGVPFLANLILLESKDLDVILGMDWLARHNGVIDCANRKVTLTSHDGQVVTVHALSTESLRSRLNQITLGEIPIVREYPDVFPDDLPGMPPKRDIEFRIDLVPGTTPIHKRPYRMAANELAEVKRQVDDLLQKGYIRPSSSPWGAPVIFVEKKDHTQRMCVDYRALNDVTIKNKYPLPRIDDLFDQLKGATVFSKIDLRSGYHQLRIKEEDIPKTAFTTRYGLFECTVMSFGLTNAPAFFMNLMNKVFMEYLDKFVVVFIDDILIYSRTKEEHEEHLRLALEKLREHQLYAKFSKCEFWLSEVKFLGHVISAGGVAVDPSNVESVTNWKQPKTVSEIRSFLGLAGYYRSFIENFSKIVKPMTRLLQKDVKYKWSEDCEQSFQELKNRLVSAPILILPDPKKGFQVYCDASKLGLGCVLMQDGKVVAYASRQLRPHEKNYPTHDLELAAVVHALKIWRHYLFGTRTEMYTDHKSLKYIFTQPDLNMRQRRWLELIKDYDMGIHYHPGKANVVADALSRKGYCNVTEGRQLPLELCKEFERLNLGIVSRGFVAALEVKPTLIDQVRKAQINDSDIQEIKKNMRRGKAIGFLEDEQGTRVKAEHQKPAGLLQPLKIPEWKWEEIDMDFITGLPRTSSSHDSIWVIVDRLTKVAHFIPVKTTYSGSRLAELYMARIVCLHGVPKKIVSDRGSQFTSNFWKKLQEEMGSKLNFSTAYHPQTDGQTERVNQILEDMLRACALDFGGSWDKNLPYAEFSYNNSYQASLQMAPYEALYGRKCRTPLLWDQTGERQVFGTDILREAEEKVKIIQERLRVAQSRHKSYADNRRRDLSFEEGDYVYLRVTPLRGVHRFQTKGKLAPRFVGPYKIVSRRGEVAYQLELPQSLAGVHNVFHVSQLKKCLRVPTEEANLEQIEVQEDLTYVEKPIRILETSERRTRNRVIRFCKVQWSNHSEEESTWEREDELKSAHPYLFASSSESRGRDSV

SEQ ID NO: 20061 - protein, 1426 aa, Oryza sativa
  unsure (1)..(1426): unsure at all Xaa locations
  Clone ID: TF_OSC27749j.C1.p2.np
MVNTRSNGNGPNLNNLNNNNNGENPTLAQVLTQQTQLMNMMMQQLQNQQNQGNNHAPPQNKLAEFLRVRPPIFSSTTNPVEAGDWLHAIEKKLDLLQCTDQEKVSFASHQLHGPASEWWDHFRLNRTTAEPITWLEFTAAFRKTHIPSGVVSLKKKEFRASGKFLEGLNDELSYPLMTGDYSDFQKLVDKAIRQEDKYNRMEQKKHRIAHFKAQQGNNQRPRLTLGPQSMPHGGSSSVVRPQRQIFNNNVGNNIRNQVPRPVAAPTQQQPAKREQGSKPVVCFNCGDPGHYADKCPKPRRVKVVPAQSNSTVPASKARVNHVAAAEAQDAPDVILGTFPVNSVPATVLFDSGATHSFLSMSFAGNHGMEVEDLRRPLMVSTPSNQALSLHRSPSVRIEIQGVPFLANLILLESKDLDVILGMDWLARHNGVIDCANRKVTLTSHDGQVVTVHALSTESLRSRLNQITLGEIPIVREYPDVFPDDLPGMPPKRDIEFRIDLVPGTTPIHKRPYRMAANELAEVKRQVDDLLQKGYIRPSSSPWGAPVIFVEKKDHTQRMCVDYRALNDVTIKNKYPLPRIDDLFDQLKGATVFSKIDLRSGYHQLRIKEEDIPKTAFTTRYGLFECTVMSFGLTNAPAFFMNLMNKVFMEYLDKFVVVFIDDILIYSRTKEEHEEHLRLALEKLREHQLYAKFSKCEFWLSEVKFLGHVISAGGVAVDPSNVESVTNWKQPKTVSEIRSFLGLAGYYKWSEDCYKWSEDCEQSFQELKNRLVSAPILILPDPKKGFQVYCDASKLGLGCVLMQDGKVVAYASRQLRPHEKNYPTHDLELAAVVHALKIWRHYLFGTRTEMYTDHKSLKYIFTQPDLNMRQRRWLELIKDYDMGIHYHPGKANVVADALSRKGYCNVTEGRQLPLELCKEFERLNLGIVSRGFVAALEVKPTLIDQVRKAQINDSDIQEIKKNMRRGKAIGFLEDEQGTVXLGERICVPDNKDLKDAILKEAHDTLYSIHPGSTKMYQDLKERFWWASMKREIAEYVAVCDVCQRVKAEHQKPAGLLQPLKIPEWKWEEIDMDFITGLPRTSSSHDSIWVIVDRLTKVAHFIPVKTTYSGSRLAELYMARIVCLHGVPKKIVSDRGSQFTSNFWKKLQEEMGSKLNFSTAYHPQTDGQTERVNQILEDMLRACALDFGGSWDKNLPYAEFSYNNSYQASLQMAPYEALYGRKCRTPLLWDQTGERQVFGTDILREAEEKVKIIQERLRVAQSRHKSYADNRRRDLSFEEGDYVYLRVTPLRGVHRFQTKGKLAPRFVGPYKIVSRRGEVAYQLELPQSLAGVHNVFHVSQLKKCLRVPTEEANLEQIEVQEDLTYVEKPIRILETSERRTRNRVIRFCKVQWSNHSEEESTWEREDELKSAHPYLFASSSESRGRDSV

SEQ ID NO: 20062 - protein, 1619 aa, Oryza sativa
  Clone ID: TF_OSC29666j.C1.p1.gm
PKQPGNDIDVYLRPLVEDLKQLWKKEGVPVWDEDKQEEFNLRALLFVTINDWPALSNLSGQSNKGYKACTHCMDETESTYLKHCRKVVYMGHRRFLAANHPVRKKGKHFEHKADHRTKPKHRSGKTMFAMVKDLKVVFGKGPGSQHIESEDGHAAMWKKNSIFWELPYWEFLDVRHAIDVMHLTKNLCVNLLGFLGVYGKSKDTLEARNDLKHMEQRGDLHPEPKEKGSHYLSPASYTLSKAEKESMFECLESIKVPSGYSTNIKRIISTKEKKFTNLKSHDCHVLMTQLLPVIIRGILPDNVRATITKLCAFMNAISQKVIDPDRLEALQNEVVQCLVSFELIFPPSFFNIMTHLLCHLVKEIRILGPMYLHNMFPFKRYMGVLKKYVRNRARPEASIAKGYGTEEVIEFCVEFIEDLRPIGVLESRHEGRLRGKGTLGRKAIMTVDNNLFCKAHFTVLQHSSLVAPYIEEHLALVRARNIGKSDAWITRHHIDTFPAWLRQHLMGNESINQQLAFLARGPSGSIATFQGYDINGYTFYTRAQDMKSTNQNSFVRVDAMGHDGTTATYYGAIEDIWELDYGPLKVPLFRCQWVRLTGGGVMIDDSGMTTVDLNKVGYSDEPFVLANDVTQVFFVKDMSSKGKKGRGPDEPKRQVVLPGKRKIVGVEDKTDEDYDQLDGDHKEGTIVRRKYVRSTVTADPCAAVVSAVAVAREDHRRARQVVAVLVHHFAVAGDHQSSIAVIDPKVSAASSSSPSPPVGLPPPFWSPVSSPRCPLRLGALRLRPSAAVRRRACAVRAVSSAEPPPLSVTSPLTSSGSSAMPRFKPEYLFGVEGFVQELRTMSFAIGFGTAPFYAQILHDRHEEKCRVKVTLNSNSEEVPSVMFEAGGRNYIHACQEVARIAIGELRDRYSNQLADTEYRYHPRQPQGSDRGSYLETEGIENNATTRHLVEMLWAMDESRAETVLAAQDREDRNRGKICKLEDKMDRLEKELAALKGEAPPQKARIRLTARKRALFVPRYQLAPKVRVVEKEVAPTLADPPVIIISDDEEEESKRNHSKIEWVATQDDEDEPNEPSIDLRCSEELDTTNPVEAGDWLHAIEKKLDLLQCTDQEKVSFASHQLHGPASEWWDHFRLNRITAEPITWLEFTAAFRKTHIPSGVVSLKKKEFRSLTQGSRSVTEYLHEFNRLARYAPEDVRNDEERQEKFLEGLNDELSYPLMTGDYSDFQKLVDKAIRQEDKYNRMEQKKRRMAHFKAQQGSNQKPRLTLGPQSVPQGGSSSVVRPQRQFFNNNAGNNIRNQVPRPVAASTQQQPAKREQGSKPVVCFNCGDPGHYADKCPKPRRVKVVPAQSNSTVPVPKARVNHVAAAEAQDAPDVILVREYPDVFPDDLPANELAEVKRTVDDLLLKGYIRPSSSPWGAPVIFVEKKDHTQRMCVDYRALNDVTIKNKYPLPRIDDLFDQLKGATVFSKIDLRSGYHQLRIKEEDIPKTAFTTRYGIHNVFHVSQLKKCLRVPEEQASPDHIEIQEDLTYVEKPTRILETSERRTRNKVIRFCKVQWSHHSEEEATWEREDELKATHPHLFASSSESRVAAVALTEPARTSATIRLPPIVAEAPFPSHA

SEQ ID NO: 20063 - protein, 1290 aa, Oryza sativa
  Clone ID: TF_OSC29996j.C1.p1.fg
VRNDEERQEKFLEGLNDELSYPLMTGDYYDFQKLVDKAIRQEDKYNRMEQKKRRIAQFKTQQGNNQKPRLTLGPQSMPQGGSSSVVRPQRQFFNNNAGNNIRNQALRPVAVSTQQQPAKKEQGSKPVVCFNCGDPGHYADKCPKPRRVKVVPAQSNSTAPASKARVNHVAAAEAQDAPDVILGTFLVNSVPATVLFDSGATHSLLSMSFAGNHGMEVEDLRRPLMVSTPSNQALSLQRSPSVRIEIQGVSFLANLILLESKDLDVILGMDWLARHKGVIDCANRKVTLTSNDGRVVTVHALSSESLRSRLNQITLEEIPIVREYPDVFPDDLPGMPPKRDIEFRIDLVPGTTLIHKRPYRMAANELAEVKRQVDDLLQKGYIRPSSSPWGAPVIFVEKKDHTQRMCVDYRALNDVTIKNKYPLPRIDDLFDQLKGATIFSKIDLRSGYHQLRIKEEDIPKTTFTTRYGLFECTVMSFGLTNAPAFFMNLMNKVFMEYLDKFVVVFIDDILIYSRTKEEHEEHLRLALEKLREHQLYAKFSKCEFWLSEVKFLGHVISAGGVAVDPSNVESVTNWKQPKTVSEIRSFLGLAGYYRRFIENFSKIAKPMTRLLQKDVKYKWSEECEQSFQELKNRLISAPILILPYPKKGFQVYCDASKLGLGCVLMQDGKVVAYASRQLRPHEKNYPTHDLELAAVVHALKIWRHYLFGTRTEVYTDHKSLKYIFTQSDLNMRQRRWLELIKDYDMGIHYHPGKANVVADALSRKGYCNATEGRQLPLELCKEFERLNLGIVSRGFIAALEAKPTLIDQVREAQINDPDIQEIKKNMRRGKAISFLEDEQGTVWLGERICVPDNKDLKDAILKEAHDTLYSIHPGSTKMYQDLKERFWWASMKREIAEYVAVCDVCQRVKAEHQKPAGLLQPLKIPEWKWEEIGMDFITGLPRTSSGHDSIWIIVDRLTKVAHFIPVKTTYSGSRLAELYMARIVCLHGVPKKIVSDRGSQFTSNFWKKLQEEMGSKLNFSTAYHPQTDGQTERVNQILEDMLRACALDFGGSWDKNLPYAEFLYNNSYQASLQMAPYEALYGRKCRTPLLWDQTGERQVFGTDILREAEEKVKIIQERLRVAQSRHKSYADNRRRDLSFEEGDYVYLRVTPLRGVHRFHTKGKLAPRFVGPYKIISRRGEVAYQLELPQSLAGVHNVFHVSQLKKCLRVPTEEANLEQIEVQEHLTYVEKPIRILEIDERRTRNRVIHFCKVQWSNHSEEESTWEREDELKSAHPHLFASSSESRGRDSV

SEQ ID NO: 20064 - protein, 1299 aa, Oryza sativa
  unsure (1)..(1299): unsure at all Xaa locations
  Clone ID: TF_OSC29996j.C1.p2.np
SLCYGVSARVQSSYSLCSGRCAQXXRAPGKFLEGLNDELSYPLMTGDYYDFQKLVDKAIRQEDKYNRMEQKKRRIAQFKTQQGNNQKPRLTLGPQSMPQGGSSSVVRPQRQFFNNNAGNNIRNQALRPVAVSTQQQPAKKEQGSKPVVCFNCGDPGHYADKCPKPRRVKVVPAQSNSTAPASKARVNHVAAAEAQDAPDVILGTFLVNSVPATVLFDSGATHSLLSMSFAGNHGMEVEDLRRPLMVSTPSNQALSLQRSPSVRIEIQGVSFLANLILLESKDLDVILGMDWLARHKGVIDCANRKVTLTSNDGRVVTVHALSSESLRSRLNQITLEEIPIVREYPDVFPDDLPGMPPKRDIEFRIDLVPGTTLIHKRPYRMAANELAEVKRQVDDLLQKGYIRPSSSPWGAPVIFVEKKDHTQRMCVDYRALNDVTIKNKYPLPRIDDLFDQLKGATIFSKIDLRSGYHQLRIKEEDIPKTTFTTRYGLFECTVMSFGLTNAPAFFMNLMNKVFMEYLDKFVVVFIDDILIYSRTKEEHEEHLRLALEKLREHQLYAKFSKCEFWLSEVKFLGHVISAGGVAVDPSNVESVTNWKQPKTVSEIRSFLGLAGYYKWSEECEQSFQEYKWSEECEQSFQELKNRLISAPILILPYPKKGFQVYCDASKLGLGCVLMQDGKVVAYASRQLRPHEKNYPTHDLELAAVVHALKIWRHYLFGTRTEVYTDHKSLKYIFTQSDLNMRQRRWLELIKDYDMGIHYHPGKANVVADALSRKGYCNATEGRQLPLELCKEFERLNLGIVSRGFIAALEAKPTLIDQVREAQINDPDIQEIKKNMRRGKAISFLEDEQGTVWLGERICVPDNKDLKDAILKEAHDTLYSIHPGSTKMYQDLKERFWWASMKREIAEYVAVCDVCQRVKAEHQKPAGLLQPLKIPEWKWEEIGMDFITGLPRTSSGHDSIWIIVDRLTKVAHFIPVKTTYSGSRLAELYMARIVCLHGVPKKIVSDRGSQFTSNFWKKLQEEMGSKLNFSTAYHPQTDGQTERVNQILEDMLRACALDFGGSWDKNLPYAEFLYNNSYQASLQMAPYEALYGRKCRTPLLWDQTGERQVFGTDILREAEEKVKIIQERLRVAQSRHKSYADNRRRDLSFEEGDYVYLRVTPLRGVHRFHTKGKLAPRFVGPYKIISRRGEVAYQLELPQSLAGVHNVFHVSQLKKCLRVPTEEANLEQIEVQEHLTYVEKPIRILEIDERRTRNRVIHFCKVQWSNHSEEESTWEREDELKSAHPHLFASSSESRGRDSV

SEQ ID NO: 20065 - protein, 402 aa, Oryza sativa
  Clone ID: TF_OSC30786j.C1.p1.fg
NKLAEFLRVRPPIFSSTTNPVEAADWLHAIEKKLDLLQCTDQEKVSFASHQLHGPASEWWDHFRLNRTTAEPITWLEFTAAFRKTHIPSGVVSLKKKEFRSLTQGSRTVTEYLHEFNRLARYAPENVRNDEERQEKFLEGLNDELSYPLMTGDYSDFQKLVDKAIRQEDKYNRMEQKKRQIAQFKTQQGNNQRPRLTLGPQSMPHGGSSSVVRPQRQFFNNNVGNNIRNQVPRPVAAPTQQQPAKREQGSKPVVCFNCGDPGHYADKCPKPRRVKVVPVQSNSTAPASEARVNHVAAAEAQDAPDVILGTFLVNSVPATVLFDSGATHSFLSMSFAGNHGMEVEDLRRPLMVSTPSNQALSLQRSPSVRIEIKGVPFLANLILLESKDLDVILGMDWLARHK

SEQ ID NO: 20066 - protein, 629 aa, Oryza sativa
  Clone ID: TF_OSC31037j.C1.p5.gm
MVNTRSNGNGPNNPNNNNNGENPTLAQVLAQQTQLMNMMMQQFQNQQNQGNNHAPPQNKLAEFLRVRPPVFSSTTNPVEASDWLHAIEKKLDLLQCTDQEKVSFASHQLHGPASEWWDHFRLNRTTAEPITWLEFTAAFRKTHIPSGVVSLKKKEFRSLSQGSRSVTEYLHEFNRLARYAPEDVRNDEERQEKFLGGLNDELSYPLMVGDYPDFQKLVDKAIRQEDKYNCMEQRKRRIAHFKAQQGSNQKPRLTLGPQSMPQGGSSSVVRPQRQFFNNNVGNNIRNQAPRPVAAPAQQQPAKREQGNKPVVCFNCGDPGHYADKCPKPRRVKVVPAQNNSAVSASKARVNHVAAAEAQDAPDVILVREYPDVFPDDLPERIHQTEFITMGSSGYYRRFIENFSKIAKPMTRLLQKDVKYKWSEESLEAKPTLIDQVREAQINDPDIQEIKKNMRRGKAIGFLEDEHGTPCSAVAPAVAVAREDRRHARQVAAVLVRPFAAVGTRRSFVAVDNPKRRRSPVSVRRPSRLLRRAAAVVGDVIVDVIGILSREPHGSLPGTRLRSGGDKPTGVAGESIPCFIRGNSGRDIDSQSDVVILEIGADELGAVIRYDADVQKGAGFEWLSSGRTPC

SEQ ID NO: 20067 - protein, 2316 aa, Oryza sativa
  Clone ID: TF_OSC31039j.C1.p1.fg
KFVVVFIDDILIYSRTKEEHEEHLRLALEKLREHQLYAKFSKCEFWLSEVKFLGHVISAGGVAVDPSNVESVTNWKQPKTVSEIRSFLGLAGYYRRFIENFSKIAKPMTRLLQKDVKYKWSEECEQSFQELKSRLISAPILILPDPKKGFQVYCDASKLGLGCVLMQDGKVVAYASRQLRPHEKNYPTHDIELAAVVHALKIWRHYLFGTRTEVYTDHKSLKYIFTQPDLNMRQRRWLELIKDYDMGIHYHPGKANVVADALSRKGYCNATEGRQLPLELCKEFERLNLGIVGRGFVAALEAKPTLIDQVREAQINDPDIQEIKKNMRRGKAIGFLEDEHGTRVKAEHQKPAGLLQPLKIPEWKWEEIGMDFITGLPRTSSGHDSIWVIVDRLTKVAHFIPVKTTYSGSRLAELYMARIVCLHGVPKKIVSDRGSQFTSNFWKKLQEEMGSKLNFSTAYHPQTDGQTERVNQILEDMLRACALDFGGSWDKNLPYAEFSYNNSYQASLQMAPYEALYGRKCRTPLLWDQTGERQVFRTDILREAEEKVKIIQERLRVAQSRHKSYADNRRRDLSFEEGDYVYLRVTPLRGVHRFHTKGKLAPRFVGPYKIVSRRGEVAYQLELPQSLAGVHNVFHVSQLKKCLRVPTEQANLDQIEVQEDLTYVEKPIRILETTPGLEWYIPGLEIELCSRGGCSEWLGLYNRMPRYKPEYLFGVEGFVQELRTMSFVIGFGTAPFYAQIPHDSHEEKCRVKVTLNSNSEDIPSVMFEAGGRNYIHACQEVARIAIGELRDRYSDQLADTEYRYHPRQPQGSDRGSYLETEGIENDVTTKHLVEMLWAMDESRAETVLAAQDREDRNRGKICKLEDKVDRLEKELAALKGEAPPQKARIRLTARKRALFVPRYQLAPKMVNTRSNGNGPNNPNNNNNGENPTLAQVLAQQTQLMNMMMQQFQNQQNQGNNHAPPQNKLAEFLRVRPPVFSSTTNPVEASDWLHAIEKKLDLLQCTDQEKVSFASHQLHGPASEWWDHFRLNRTTAEPITWLEFTAAFRKTHIPSGVVSLKKKEFRSLSQGSRSVTEYLHEFNRLARYAPEDVRNDEERQEKFLGGLNDELSYPLMVGDYPDFQKLVDKAIRQEDKYNCMEQRKRRIAHFKAQQGSNQKPRLTLGPQSMPQGGSSSVVRPQRQFFNNNVGNNIRNQAPRPVAAPAQQQPAKREQGNKPVVCFNCGDPGHYADKCPKPRRVKVVPAQNNSAVSASKARVNHVAAAEAQDAPDVILGTFLVNSVPATVLFDSGATHSFLSMSFAGNHGMEVEDLRRPLMVSTPSNQALSLQRSPSVRIEIQGVPFLANLILLESKDLDVILGMDWLARHKGVIDCANRKVTLNSYDGRVVTVHALSSESLRSRLNQITLEEIPIVREYPDVFPDDLPGMPPKRDIEFRIDLVPGTTPIHKRPYRMAANELAEVKRQVDDLLQKGYIRPSSSPWGAPVIFVEKKDHTQRMCVDYRALNDVTIKNKYPLPRIDDLFDQLKGATVFSKIDLRSGYHQLRIKEEDIPKTAFTTRYGLFECTVMSFGLTNAPAFFMNLMNKVFMEYLDKFVVVFIDDILIYSRTKEEHEEHLRLALEKLREHQLYAKFSKCEFWLSEVKFLGHVISAGGVAVDPSNVESVTNWKQPKTVSEIRSFLGLAGYYRRFIENFSKIAKPMTRLLQKDVKYKWSEECEQSFQELKSRLISAPILILPDPKKGFQVYCDASKLGLGCVLMQDGKVVAYASRQLRPHEKNYPTHDIELAAVVHALKIWRHYLFGTRTEVYTDHKSLKYIFTQPDLNMRQRRWLELIKDYDMGIHYHPGKANVVADALSRKGYCNATEGRQLPLELCKEFERLNLGIVGRGFVAALEAKPTLIDQVREAQINDPDIQEIKKNMRRGKAIGFLEDEHGTRVKAEHQKPAGLLQPLKIPEWKWEEIGMDFITGLPRTSSGHDSIWVIVDRLTKVAHFIPVKTTYSGSRLAELYMARIVCLHGVPKKIVSDRGSQFTSNFWKKLQEEMGSKLNFSTAYHPQTDGQTERVNQILEDMLRACALDFGGSWDKNLPYAEFSYNNSYQASLQMAPYEALYGRKCRTPLLWDQTGERQVFRTDILREAEEKVKIIQERLRVAQSRHKSYADNRRRDLSFEEGDYVYLRVTPLRGVHRFHTKGKLAPRFVGPYKIVSRRGEVAYQLELPQSLAGVHNVFHVSQLKKCLRVPTEQANLDQIEVQEDLTYVEKPIRILETSERRTRNRVIRFCKVQWSNHSEEESTWEREDELKSAHPHLFASSSESRGRDSV

SEQ ID NO: 20068 - protein, 106 aa, Oryza sativa
  Clone ID: TF_OSC31560j.C1.p1.hg
PQPMPQGGSSSVVRPQRQFFNNNAGNNIRNQAPRPVAAPAQQQPAKREQGSKPVVCFNCGDPGHYADKCPKPRRVKVVPAQNNSAVPASKARVNHVAAAEAQMLQM

SEQ ID NO: 20069 - protein, 1546 aa, Oryza sativa
  Clone ID: TF_OSC31871j.C1.p1.fg
MGSYESTVWSEVQHSPFVGSYGRRQVFEPHIVREAEVKVKLIQERLRVAQSRHKSYANNRRRDLSFEKGDYVYLRVTPLRGVHRFHTKAKLAPRFVGPYKIVSRTGEVAYQLELPQSLAGVHNVFHVSQLKKCLRVPTEEANIEQIEVQEDLTYVEKPIRILETTPGLEWYIPGLEIELCSRGGCSEWLGLYNRMPRYKPEYLFGVEGFVQELRTMSFVIGFGTAPFYTQIPHDRHEEKCRVKVTLNSNSEDIPSVMFEAGGRNYIHACQEVARIAIGELRDRYSDQLADTEYRYHPRQPQGSDRGSYLETEGIENYVTTRHLVEMLWAMDESRAETVLAAQDREDRNHGKICKLEDKVDRLEKELAALKGEAPPQKARIRLTARKRALFVPRYQLAPKMVNTRSNGNGPNNPNNNNGENPTLAQVLAQQTQLMNMMMQQFQNQQNQGNNHAPPQNKLAEFLRVRPPVFSSTTNPVEASDWLHAIEKKLDLLQCTDQEKVSFASHQLHGPASEWWDHFRLNRTTAEPITWLEFTAAFRKTHIPSGVVSLKKKEFRSLTQGSRSVTEYLHEFNRLARYAPEDVRNDEERQEKFLGGLNDELSYPLMVGDYPDFQKLVDKAIRQEDKYNRMEQKKRRIGQFKTHQGNIQKPRLTLGPQSMPQVGSSSVVRPQRQFFINNAANNIRNKAPRPVAAPVQQQPAKREQGSKPVVCFNCGDPGHYADKCPKPRRVKVVPAQSNSAVPVSKARVNHVAAAEAQDAPDVILGTFLVNSVPATVLFDSGATHSFLSMSFAGNHGMEVEDLRRPLMVSTPSNQALSLQRSPSVRIEIKGVPFLANLILLESKDLDVILGMDWLARHKGVIDCANRKVTLNSYDGRVVTVHALSSESLRSRLNQITLEEIPIVREYSDVFPDDLPGMPPKRDIEFRIDLVPGTTPIHKRPYRMAANELAEVKRQVDDLLQKGYIRPSSSPWGAPVIFVEKKDHTQRMCVDYRALNDVTIKNKYPLPRIDDLFDQLKGATVFSKIDLRSGYHQLRIKEEDIPKTAFTTRYGLFECTVMSFGLTNAPAFFMNLMNKVFMEYLDKFVVVFIDDILIYSRTKEEHEEHLRLALEKLREHQLYAKFSKCEFWLSEVKFLGHVISAGGVAVDPSNVESVTNWKQPKTVSEIRSFLGLAGYYRRFIENFSKIAKPMTRLLQKDVKYKWSEECEQSFQELKSRLISAPILILPDPKKGFQVYCDASKLGLGCVLMQDGKVVAYASRQLRPHEKNYPTHDIELAAVVHALKIWRHYLFGTRTEVYTDHKSLKYIFTQPDLNMRQRRWLELIKDYDMGIHYHPGKANVVADALSRKGYCNATEGRQLPLELCKEFERLNLGIVGRGFVAALEAKPTLIDQVREAQNNDPDIQEIKKNMRRGKAIGFLEDEHGTVWLGERICVPDNKDLKDAILKEAHDTLYSIHPGSTKMYQDLKERFWWASMKREIAEYVAVCDVCQRVKAEHQKPAGLLQPLKIPEWKWEEIGMDFITGLPRTSSGHDSIWVIVDRLTKVAHFIP

SEQ ID NO: 20070 - protein, 1720 aa, Oryza sativa
  Clone ID: TF_OSC400036j.C1.p50.np
LSSLSSAQIPSFPESPFSQKKSLKSSKASKATPGLEWYIPGLEIELCSRGGCSEWGLYNRMPRYKPEYLFGVEGFVQELRTMSFVIGFGTAPFYAQIPHDRHEEKCRVKVTLNSNSEDIPSVMFEAGGRNYIHACQEVARIAIGELRDRYSDQLADTEYRSHPRQPQGSDRGSYLETEGIENDATTKHLVEMLWAMDESRAEIVLAAQDREDRNRGKICKLEDKVDRLEKELAALKGEAPPQKARIRLTARKRALFVPRYQLAPKMVNTRSNGIGPNNPNNNNNGENPTLAQVLAQQTQLMNMMMQQLQNQQNQGNNHAPPQNKLAEFLRVRPPVFSSTTNPVEASDWLHAIEKKLDLLQCTDQEKVSFASHQLHGPASEWWDHFRLNRTTAEPITWLEFTAAFRKTHIPSGVVSLKKKEFRSLTQGSRSVTEYLHEFNRLARYAPEDVRNDEERQEKFLGGLNDELSYPLMVGDYPDFQKLVDKAIRQEDKYNCMEQRKRRIAHFKAQQGNNQKPRLTLGPQSMPHGGSSSVVRPQRQFFNNNAGNNIRNQAPRPVAAPAQQQPAKREQGNKPVVCFNCGDPGHYADKCPKPRRVKVVPAQNNSAVPASKARVNHVAAAEAQDAPDVILGMFPVNSVPATVLFDSGATHSFLSMSFAGNHGMEVEDLRRPLMVSTLSDQALSLQRSPSVRIEIQGVPFLANLILLESKDLDVILGMDWLTRHKGVIDCANKKVTLTSNVGRVVTVHALSSESLRSRLNQITLEEIPIVREYPDVFPDDLPGMPPKRDIEFRIDLVPGTTPIHKRPYRMAANELAEVKRKVDDLLQKGYIRPSSSPWGAPVIFVEKKDHTQRMCVDYRALNDVTIKNKYPLPRIDDLFDQLKGATVFSKIDLRSGYHQLRIKEEDIPKTAFTTRYGLFECTVMSFGLTNAPAFFMNLMNKVFMEYLDKFVVVFIDDILIYSRTKEEHEEHLRLALEKLREHQLYAKFSKCEFWLSEVKFLGHVISAGGVAVDPSNVESVTNWKQPKTVSEIRSFLGLAGYYRRFIENFSKIAKPMTQLLQKDVKYKWSKECERSFQELKSRLISAPILILPDPKKGFQVYCDASKLGLGCVLMQDGKVVAYASRQLRPHEKNYPTHDIELAAVVHALKIWRHYLFGTRTEVYTDHKSLKYIFTQPDLNMRQRRWLELIKDYDMGIHYHPGKTNVVADALSRKGYCNATEGRQLPLDLCKEFERLNLGIVGRGFVAALEAKPTLIDQVREAQINDPDIQEIKKNMRRGKAIGFLEDEQGTVWLGERICVPDNKDLKDAILKEAHDTLYSIHPGSTKIYQDLKERFWWASMKREIAEYVAVCDVCQRVKAEHQKPAGLLQPLKIPGWKWEEIGMDFITGLPRTSSGHDSIWVIVDRLTKVAHFIPVKTTYSGSRLAELYMARIVCLHGVPKKIVSDRGSQFTSNFWKKLQEEMGSKLNFSTAYHPQTDGQTERVNQILEDMLRACALDFGGSWDKNLPYAEFSYNNSYQASLQMAPYEALYGRKCRTPLLWDQTGERQVFGTDILREAEEKVKIIQERLRVAQSRHKSYADNRRRDLSFEEGDYVYLRVTPLRGVHRFHTKGKLAPRFVGPYKIVSRRGEVAYQLELPQSLAGVHNVFHVSQLKKCLRVPTEEANLDQISERRTRNRVIRFCKVQWSNHSEEESTWEREDELKSAHPHLFASSSESRGRDSV

SEQ ID NO: 20071 - protein, 1636 aa, Oryza sativa
  Clone ID: TF_OSC400074j.C1.p16.fg
MSFMISLTLLTTVNDAITGNSLISSWFGMMPRYKPEYLFGVEGFVQELRTISFVIGFGTAPFYAQIPHDRHEEKCRVKVTLNSNSEDIPSVMFEAGGRNYIHACQEVARIAIGELRDRYSDQLADTEYRYHPRQPQGSDRGSYLETEGIENDATTRHLVEMLWAMDESRAETVLAAQDREDRNRGKICKLEDKVDRLEKELAALKGEAPPQKARIRLTARKRALFVPRYQLAPKFPPVSLLVPCPCQMVNTRSNGNGPSNNNNEGNPTLAQVLAQQTQLMNMMMQQLQNQQNQGNNHAPPHNKLAEFLRVRPPIFSSTTNPVEAGDWLHAIEKKLDLLQCTDQEKASFASHQLHGPASEWWDHFRLNRTTAEPITWLEFTAAFRKTHIPSGVVSLKKKEFRSLTQGSRSVTEYLHEFNRLARYAPEDVRNDEERQEKFLEGLNDELSYPLMTGDYSDFQKLVDKAIRQEDKYNRMEQKKRRIAQFKTQQGNNQRPRLTLGPQSMPHGGSSSVVRPQRQFFNNNAGNNIRNQALRPVAAPTQQQPAKREHGSKPVVCFNCGDPGHYADKCPKPRRMKVVPVQSNSTAPASKARVNHVAAAEAQDAPDVILGTFLVNLVPATVLFDSGATHSFLSMSFAGNHGMKVEDLRRPLMVSTPSNQALSLQRSPSVRIEIKGVPFLANLILLESKDLDVILGMDWLARHKGVIDCANRKVTLTSNDGRVVTVHALSSESLRSRLNQITLEEIPIVREYPDVFPDDLPGMPPKRDIEFRIDLVPGTTPIHKRPYRMAANELAEVKRQKDHTQRMCVDYRALNDVTIKNKYPLPRIDDLFDQLKGATVFSKIDLRSGYHQLRIKEEDIPKTAFTTRYGLFECTVMSFGLTNAPAFFMNLMNQVFMEYLDKFVVVFIDDILIYSRTKEEHEEHLRLALEKLREHQLYAKFSKCEFWLSEVKFLGHVISAGGVAVDPSNVESVTNWKQPKTVSEIRSFLGLAGYYRRFIENFSKIAKPLTRLLQKDVKYKWSEECEQSFQELKSSLISAPILILPDPKKGFQVYCDASKLGLGCVLMQDGKVVAYASRQLGPHEKNYPTHDIELAAVVHALKIWRHYLFGTRTEVYTDHKSLKYIFTQPDLNMRQRRWLELIKDYDMGIHYHPGKANVVADALSRKGYCNATEGRHLPLELCKEFERLNLGIVSIGFVAALEAKPTLIDQVREAQINDPDIQDIKKNRRRGKAIGFLEDEHGTVWLGERICVPDNKDLKDAILKEAHDTLYSIHPGSTKMYQDLKERFWWASMRREIAEYVAVCDVCQRVKAEHQKPAGLLQPLKIPEWKWEEIGMDFITGLPRTSSGHDSIWVIVDRLTKVAHFIPVKTTYSGSRLAELYMARITDGQTERVNQILEDMLRACALDFGGSWDKNLPYAEFSYNNSYQASLQMAPYEALYGQKCRTPLLWDQTGERQVFGTDILREAEEKSRHKSYADNRRRDLSFEEGDYVYLHVTPFRGVHRFHTKGKLAPRFVGPYKIVSRRGEVAYQLELPQSLAGVHNVFHVSQLKKCLRVPTEEANLEQIEVQEDLTYVEKPIRILEIDERRTRNRVIRFCKVQWSNHSEEESTWEREDELKSAHPHLFASSSESRGRDSV

SEQ ID NO: 20072 - protein, 1567 aa, Oryza sativa
  Clone ID: TF_OSC400179j.C1.p21.fg
MAMRRRRAVAGDDNQRQAMPRYKPEYLFGVEGFVQELRTMSFVIGFGTVLFYAQIPHDRHEEKCRVKVTLNSNSEDIPSVMFEAGGRNYIHACQEVARIAIGELRDRYSDQLADTEYRYHPRQPQGSDRGSYLETEGIENDATTRHLVEMLWAMDETRAETVLAAQDREDRNRGKICKLEDKVDRLEKELAALKGEAPPQKARIRLTARKRALFVPRYQLALKMVNTRASGSGNNNNEGNPTLAQVLAQQAQLMNMMMQQLQNQQNQGNNHAPPQNKLAEFLRVRPPTFSSTTNPVEAGDWLHAIEKKLDLLQCTDQEKVSFASHQLHGPASEWWDHFRLNRTTAEPITWLEFTAAFRKTHIPSGVVSLKKKEFRSLTQGSRSVTEYLHEFNRLTRYAPEDVRTDEERQEKFLEGLNDELSYPLMTGDYPDFQKLVDKAIRQEDKYNRMEQKKRRIAQFKTQQGNNQKPRLTLGPQSMPQGGSSSVVRPQRQFFNNNAGNNIRNQAPRPVAVSTQQQPAKREQGSMPVVCFNCGDPGHYADKCPKPRRVKVVPAQSNSTAPASKARVNHVAAAEAQGAPDVILGTFLVNSVSATVLFDSGATHSFLSMSFAGNHGMEVEDLRRPLMVSTPSNQALSLQRSPSVRIEIKGVPFLANLILLESKDLDVILWMDWLARHKGVIDCANRKVTLTSNDGRVVTVHALSSESLRPSLNQITLEEIPIVREYPDVFPDDLPGMPPKRDIEFRIDLVPGTTPIHKRPYRMAANELAEVKRQVDDLLQKGYIRPSSSPWGAPIIFVEKKDHTQRMCVDYRALNDVTIKNKYPLPRIDDLFDQLKGATVFSKIDLRSGYHQLRIKEEDIPKTAFTTRYGLFECTVMSFGLTNAPAFFMNLMNKVFMEYLDKFVVVFIDDILIYSRTKEEHEEHLRLALEKLREHQLYAKFSKFEFWLSEVKFLGHVISAGGVAVDPSNVESVTNWKQPKTVSEIRSFLGLAGYYRRFIENFSKIAKPMTRLLQKDVKYKWSEECEQSFQELKNRLISAPILILPDPKKGFQVYCDASKLGVGCVLMQDGKVVAYASRQLRPHEKNYPTHDLELAAVVHALKIWHHYLFGTRTEVYTDHKSLKYIFTQPDLNMRQRRWLELIKDYDMGIHYHPGKANVVADALSRKGYCNATEGRQLPLELCKEFERLNLGIVSRGFVAALEAKPTLIDQVREAQINDPDIQEIKKNMRRGKAIGFLEDEQGTVWLGERICVPDNKDLKDAILKEAHDTLYSIHPGSTKMYQDLKERFWWASMKHEIAEYVAVCDVCQRVKAEHQKPAVDRLTKVAHFIPVKTTYSGSRLAELYMARIVCLHGVPKKIVSDRGSQFTSNFWKKLQEETDEQTERVNQILEDMLRACALDFGGSWDKNLPYAEFSYNNSYQASLQMAPYEALYGRKCRTPLLWDQTGERQVFGTDILREAEEKPCAAAVPVVAVAREGRHRGRQVVAVLVRPFAVAVDRRSTVAAVDPIFSAASTSTPSPSVDLPPLLWSPIPTFPESPFSQEKNLKSSKASKASHTDPKQPFEHVDPI

SEQ ID NO: 20073 - protein, 608 aa, Oryza sativa
  Clone ID: TF_OSC400398j.C1.p3.gm
MPRYKPEYLFGVEGFVQELRTMSFVIGFGTAPFYAQIAHDRHEEKCRVKVTLNSNSEDIPSVMFEAGGRNYIHACQEVARIAIGELRDRYSDQLADTEYRYHPRQPQGSDRGSYLETEGIENDVTTKHLVEMLWAMDESRAETVLAAQDREDWNRGKICKLEDKVDRLEKELAALKGEAPPQKARIRLTARKRALFVPRYQLAPKVRVVEKEVAPAQADPPVIIISSDEEEESKRNNSKIEWVATQVDKDEPSIDLRCLEELETTAEPITWLEFTAAFRKTHIPSGVVSLKKKEFRSLTQGSRSVTEYLHEFNRLARYAPEDVRNDEERQEKFLGGLNDELSYPLMVGDYPDFQKLVDKAIRQEDKYNHMEQKKRRIAHFKAQQGNNQKPRLTLGPQSMPQGGSSSVVRPQRQFFNNNAGNNIRNQAPRPVAAPAQQQPAKREQGSKPVVCFNCGDPGHYADKCPKPRRVKVVPAQNNSAVPASKARVNHVAAAEAQDAPDVIFLVNSVPATVLFDSANELAEVKRQVDDLLQKGYIRPSSSPWGAPPSPSLGKTTVVLAKSSPSSFAPSPSPEITGAASPSSTRRFPPLPPCRRRRPLVFRRRLGHR

SEQ ID NO: 20074 - protein, 999 aa, Oryza sativa
  Clone ID: TF_OSC400446j.C1.p26.fg
MDISRTNEGYTSCGPVIEMSWHRAGVLLLGAQSCLPVPEVPAVGGVGSVLLSMARMGWKLCHVSRPNAVVPAKREQGSKPVVCFNCGDPGHYADKCPKPRRVKVVPAQSNSTAPASKARVNHVAAAEAQDAPDVILGTFLVNSVPATVLFDSGATHSFLSMSFAGNHGMEVEDLRRPLMVSTPNNQALSLQRSPSVRIEIKGVPFLANLILLESKDLDVILGMDWLARHKGVIDCANRKVTLTSNDGRVVTVHALSSESLRSRLNQITLEEIPIVREYSDVFPDDLPGMPPKRDIEFRIDLVPGTTPIHKRPYRMAANELAEVKRQVDDLLQKGYIRPSSSPWGAPVIFVEKKDHTQRMCVDYRALNDVTIKNKYPLPRIDDLFDQLKGATVFSKIDLRSGYHQLRIKEEDIPNTTFTTRYGLFECTVMSFGLTNAPAFFMNLMNKVFMEYLDKFVVVFIDDILIYSRTKEEHEEHLRLALEKLREHQLYAKFSKCEFWLSEVKFLGHVISAGGVAVDPSNVESVTNWKQPKTVSEIHRFLGLAGYYRRFIENFSKIAKPMTRLLQKDSFQELKSRLISAPILILPDPKKGFQVYCDASKLGLGCVLMQDGKVVAYASRQLRPHEKNYPTHDLELAAVVHALKIWRHYLFGTRTEVYTDHKSLKYIFTQPDLNMRQRRWLELIKDYDMGIHYHPGKANVVADALSRKGYCNATEGRQLPLELCKEFERLNLGIVSRGFVAALEAKPTLIDQVREAQINDPDIQEIKKNMRRGKAIGFLEDEHGTVWLGERICVPDNKDLKDAILKEAHDTLYSIHPGSTKMYQDLKERFWWASMKREIAEYVAVCDVCQRVKAEHQKPAGLLQPLKIPEWKWEEIGMDFITGLPRTSSGHDSIWVIVDRLTKVAHFIPVKTTYSGSRLAELYMARIVCLHGVPKKIVSDRGSQFTSNFWKKLQEEMGSKLNFSTAYHPQTDGQKDRIRTGLRASVAKHYRTSTCLVGKA

SEQ ID NO: 20075 - protein, 1409 aa, Oryza sativa
  Clone ID: TF_OSC400591j.C1.p10.fg
MPRYKPEYLFGVEGFVQELRTMSFAIGFGTAPFYAQIPHDRHEEKCRVKVTLNSNSEDIPSVMFEAGGRNYIHACQEVARIAIGELRDRYSDQLADMEYRYHPRQPQGSDRGSYLETEGIENDATTRHLVEMLWAMDESRAETVLAAQDREDRNRGKICKLEDKVDRLEKELAALKGEAPPQKARIRLTARKRALFVPRYQLAPKVRVVEKEVTPALADPPVVNMVNTRSNGNGPNNNNNNNNGENPTLAQVLAQQTQLMNMMMQQLQNQQNQGNNHAPPQNKLAEFLRVRPPTFSSTTNPVEAGDWLHAIEKKLDLLQCTDQEKVSFASHQLHGPASEWWDHFRLNRTTAEPITWLEFTAAIRKTHIPSGVVSLKKKEFRSLTQGSRSVTEYLHEFNRLARYAPEDRQFFNNNAGNNIRNQAPHPVAASTQQQPAKREQGSKPVVCFNCGDPGHYADKCPKPRRVKVVPTQSNSTVPASKARVNHVAAAEAQDAPDVILGTFLVNLVPATVLFDSGATHSFLSMSFAGNHGMEVEDLRRPLMVSTPSNQALSLQRSPSVKIEIKGVPFLANLILLESKDLDVILGMDWLARHKGVIDCANRKVTLTSNDGRVVTVHAMSSESLRSRLKQITLEEIPIVREYPDVFPDDLPGMPPKRDIEFRIDLVPGTTPIHKRPYRMAANELAEVKRQVDDLLQKGYIRPSSSPWGAPVIFVEKKDHTQRMCVDYRALNDVTIKNKYPLPRIDDLFDQLKGATVFSKIDLRSGYHQLRIKEEDIPKTAFTTRYGLFECTVMSFGLTNAPAFFMNLMNKVFMEYLDKFVVVFIDDILIYSRTKEEHEEHLRLALEKLREHQLYAKFSKCEFWLSEVKFLGHVISAEGVAVDPSNVESVTNWKQPKTVPEIRSFLGLAGYYRRFIENFSKIAKPMTRLLQKDVKYKWSEECEQSFQELKNRLISAPILILPDQKKGFQVYCDASKLGLGCVLMQDGKVVAYASRQLRPHEKNYPTHDLELAAVVHALKIWRHYLFGTRTEVYTDHKSLKYIFTQPDLNMRQRRWLELIKDYDMGIHYHPRKANVVADALSRKGYCNATEGRQLPLELCKEFERLNLGIVSRGFVAALEAKPTLIDQVREAQINDPDIQEIKKNMRRGKAIGFLEDEHGAVWLGERICVPDNKDLKDAILKEAHDTLYSIHPGSTKMYQDLKERFWWASMKREIAEYVAVCDVCQRVKAEHQKPAGLLQPLKIPEWKWEEIGMDFITGLPRTSSGHDSIWVIVDRLTKVAHFIPVKTTYSGSRLAELYMARIVCLHGVPKKIVSDRGSQFTSNFWKKLQEEMGSKLNFSTAYHPQTDGQTERVNQVLEDMLRACALDFGGSWDKNLPYAEFSYNNSYQASLQMEIVGFEFESDSSLSSEP

SEQ ID NO: 20076 - protein, 1822 aa, Oryza sativa
  Clone ID: TF_OSC400610j.C1.p8.fg
MTSVMTVGAGGGGELRRDGSGGGTVDPAQAWQIRQRRDGSDAVASGSGELGRWRIPSFPESPFSQKKSLKSSKASKATPGLEWYIPGLEIELCSRGGCSEWLGLYNRMPRYKPEYLFGVEGFVQELRTMSFVIGFGTAPFYAQIPHDRHEEKCRVKVTLNSNSEDIPSVMFEAGGRNYIHACQEAARIAIGELRDRYSDQLADTEYRYHPRQPQGSDRDSYLETEGIENDATTKHLVEMLWAMDESRAETVLAAQDREDRNRGKICKLEDKVDRLEKELAALKGEAPPQKARIRLTARKRALFVPRYQLAPKVHVMEKEVAPAQADPPVIIISSDEEEESKRNNSKIEWMVNTRSNGNGPNNPNNNNNGENPTLAQVLAQQTQLMNMMMQQFQNQQNQGNNHAPPQNKLAEFLRVRPPVFSSTTNPVEASDWLHAIEKKLDLLQCTDQDKVSFASHQLHGPASEWWDHFRLNRTTAEPITWLEFTAAFRKTHIPSGVVSLKKKEFRSLTQGSRSVTEYLHEFNRLARYAPEDVRNDEERQEKFLGGLNDELSYPLMVGDYPDFQKLVDKAVRQEDKYNRMEQKKRRIAQFKTQQGNNQKPRLTLGPQSVPQGGSSSVVRPQRQFFNNNAGNNIRNQAPRPVAVPAQQQPAKREQGNKPVVCFNCGDPGHYADKCPKPRRVKVVPAQNNSAVPASKARVNHVAAAEAQGAPDVILGTFLVNSVPATVLFDSGATHSFLSMSFAGNHGMEVEDLRRPLMVSTPSNQALSLQRSPSVRIEIQGVPFLANLILLESKDLDVILGMDWLARHKGVIDCANKKVTLTSYDGRVVTVHALSSESLRSRLNQITLEEIPIVREYPDVFPDDLPGMPPKRDIEFRIDLVPGTTPIHKRPYRMAANELAEVKRQVDDLLQKGYIRPSSSPWGAPVIFVEKKDHTQRMCVDYRALNDVTIKNKYPLPRIDDLFDQLKGATVFSKIDLRSGYHQLRIKEEDIPKTSFTTRYGLFECTVMSFGLTNAPAFFMNLMNKVFMEYLDKFVVVFIDDILIYSRTKEEHEEHLRLALEKLREHQLYAKFSKCEFWLSEVKFLGHVISAGGVAVDPSNVESVTNWKQPKTVSEIRSFLGLAGYYRRFIENFSKIAKPMTRLLQKDVKYKWSEECEQSFQELKSRLISAPILILPDPKKGFQVYCDASKLGLGCVLMQDGKVVAYASRQLRPHEKNYPTHDIELAAVVHALKIWRHYLFGTRTEVYTDHKSLKYIFTQPDLNMRQRRWLELIKDYDMGIHYHPGKANVVVDALSGKGYCNATEGRQLPLELCKEFERLNLGIVGRGFVAALEAKPTLIDQVREAQINDPDIQEIKKNMRRGKAIGFLEDEQGTVWLGERICVPDNKDLKDAVLKEAHDTLYSIHPGSTKMYQDLKERFWWASMKREIVEYVAVCDVCQRVKAEHQKPAGLLQPLKIPEWKWEEIGMDFITGLPRTSSGHDSIWVIVDRLTKVAHFIPVKTTYSGSRLAELYMARIVCLHGVPKKIVSDRGSQFTSNFWKKLQEEMGSKLNFSTAYHPQTDGQTERVNQILEDMLRACALDFGGSWDKNLPYAEFSYNNSYQASLQMAPYEALYGRKCRTPLLWDQTGERQVFGTDILREAEEKVKVIQERLRVAQSRHKSYADNRRRDLSFEEGDYVYLRVTPLRGVHRFHTKGKLAPRFVGPYKIVSRRGEVAYQLELPQSLAGVHNVFHVSQLKKCLRVPTEEANIEQIEVQEDLTSVEKPIRILETNERRTRNRVIRFCKVQWSNHSEEESTWEREDELKSAHPHLFASSSKSRGRDSV

SEQ ID NO: 20077 - protein, 1725 aa, Oryza sativa
  unsure (1)..(1725): unsure at all Xaa locations
  Clone ID: TF_OSC400652j.C1.p1.np
MSFVISLTLLTIINDLYSRDGLYSRDGCSEWLGLYNRMPRYKPEYLFGVEGFVQELRTMSFAIGFGTAPFYAQIPHDRHEEKCRVKVTLNSNSEDVPSVMFEARGRNYHACQEVARIAIGELRDRYSDQLADTEYRYHPRQPQGSDRGSYLETEGIENDATTRHLVEMLWAVDETRAETVLAAQDREDRNRGKICKLEDKVDRLEKELAALKGEAPPQKARIRLTARKRALFVPRYQLAPKFSPVSLLVSCPCQMVLTHSNGNGPQNNNNNNNNGENPTLAQVLAQQTQLMNMMMQQLQNQQNQGNNHAPPQNKLAEFLRVRPPIFSSTTNPVEAGDWLHAIEKKLDLLQCTDQEKVSFASHQLHGPASEWWDHFRLNRTIAEPITWLEFTAAFRKTHIASGVVSLKKKEFRSLTQGSRSVTEYLHEFNRLARYAPEDVRNDEERXEKFLEGLNDELSYSLMTGDYLDFQKLVDKAIRQEDKYNRMEQKKRRIAQFKTQQGNNQRPGFTLGPPSMPQGGFLSVVCPQGQFFNNNAGNNIRNQAPRPVAASTQQQPAKKEQGSKPVVCFNCGDPGHYADKCPKPRRVKVVPAQSNSTAPAPKARVNHVAAAEAQGAPDVILGTFLVNLVPATVLFDSGATHSFLSMSFAGNHGMEVEDLRRPLMVSPSNQALSLQRSPSVRIEIKGVPFLANLILLESKDLDVILRMDWLARHKGVIDCANRKVTLTSNDGRVVTVHALSSEFLRSRLNQILEEIPIVREYPDVFPDDLPGMPPKRDIEFRIDLVPGTTPIHKRPYRMAANELAEVKRQVDDLLQKGYIRPSSSPWGAPVIFVEKKDHTQRMCVDYRALNDVTIKNKYPLPRIDDLFDQLKGATVFSKIDLRSGYHQLRIKEEDIPKTAFTTRYGLFECTVMSFGLTNAPAFFMNLMNKVFMEYLDKFVVVFIDDILIYSRTKEEHEEHLRLALEKLRGHQLYAKFSKCEFWLSEVKFLGHVISAGGVAVDPSNVESVTNWKQPKTVSEIRSFLGLTGYYRRFIENFSKIAKPMTRLLQKDVKYKWSEECEQSFQELKNRLISAPILILPDPKKGFXVYCDASKLGLGCVLMQDGKVVAYASRQLRPHEKNYPTHDLELAAVVHALKIWRHYLFGTRTEVYTDHKSLKYIFTQPDLNMRQRRWLELIKDYDMGIHYHPGKANVVADALSRKGYCKATEGXQLPLELCQEVERLNLGIVRRGFVAALEAKPTLIDQVREAQINDPDIQEIKKNMRGGKAIGFLEDEQGTVWLGERICVPDNKDLKDAILKEAHDTLYSIHPGSTKMYQDLKERFWWASMKREIAEYVAVCDVCQRVKAEHQKPAGLLQPLKIPEWKWEEIGMDFITGLPRTSTGHDSIWVIVDRFIKVAHFIPVKTTYSGSQLAELYMARIVCLHGVPKKIVSDRGSQFTSNFWKKLQEEMGSKLNFSTAYHPETDGQTERVNQILEDMLRACALDFGGSWDKNLPYAEFLYNNSYQASLQMAPYEALYGRKCRTPLLWDQTGERQVFGMDILREAEEKVKIIQEGLRVAQSRHKSYADNRRRDLSFEEGDYVYLRVTPLRGVHRFHTKKLAPRFVGPYKIVSRSGEVAYQLELPQSLAGVHNVFHVSQLKKCLRVPTEEANLEQIEVQEDLTYVEKPIRILEIDERRTRNRVIRFCKVQWSNHSEEESTWEREDELKSAHPHLFASSSESRGRDSV

SEQ ID NO: 20078 - protein, 1734 aa, Oryza sativa
  unsure (1)..(1734): unsure at all Xaa locations
  Clone ID: TF_OSC400655j.C1.p23.np
PFSLSSAQIPSFPESPFSPEKSLKSSKASKATPGLEWYIPGLEIELCSRDGCLEWLGLYNRMPRYKPEYLFGVEGFVQELRTMSFVIGFGTAPFYAQIPHDRHEEKCRVKVTLNSNSEDIPSVMFEAVGRNYIHACQEVARIAIGEYSDQLADTEYRYHPRQPQGSDRGYLETEGIENDATTRHLVEMLWAMDESRAETVLAAQDREDRNRGKICKLEDKVDCLEKELAALKGEAPPQKARIRLTARKRALFVPRYQLAPKMVNTRSNGNGPNNPNNNNNGENPTLAQVLAQQTQLMNMMMQQLQNQQNQGNNHAPPQNKLAEFLRVRPPIFSSTTNLVEAGDWLHAIEKKLDLLQCTDQEKVSFASHQLHGPASEWWDHFRLNRTTAEPITWLEFTAAFRKTHIPSGVVSLKKKEFRSLTQGSRSVTEYLHEFNRLARYAPEDVRNDEERQEKFLEGLNDELSYPLMTGDYSDFQKLVDKAIRQEDKYNRMEQKKRRIAQFKTQQGNNQKPRLTLGPQSVPQGGSSSVVRPQRQFFNNNAGNNIRNQAPRPVAAPTQQQPAKREQGSKPVVCFNCGDPGHYADKCPKPRRVKVVPAQSNSTVPASKARVNHVAAAEAQDAPDVILGTFLVNSVPATVLFDSGATHSFLSMSFVGNHGMEVEDLRRPLMVSTPSNQALSLQRSPSVRIEIQGIPFLANLILLESKDLDVILGMDWLARHKGVIDCANRKVTLTSNDGQVVTVHALSSEFLRSRLNQITLEEIPIVREYPDVFPDDLPGMPPKRDIEFRIDLVPGTTLIHKRPYRMAANELAEVKRQVDDLLQKGYIRPSSSPWGAPVIFVEKKDHTQRMCVDYRALNDVTIKNKYPLPRIDDLFDQLKGATIFSKIDLRSGYHQLRIKEEDIPKTAFTTRYGLFECTVMSFGLTNAPAFFMNLMNKVFMEYLDKFVVVFIDDILIYSRTKEEHEEHLRLALEKLREHQLYAKFSKCEFWLSEVKFLGHVISAGGVAVDPSNVESITNWKQPKTVSEIRSFLGLAGYYRRFIENFSKIAKPMTRLLQKDVKYKWSEECEQSFQELKNRLISAPILILPDPKKGFQVYCDASKLGLGCVLMQDGKVVAYASRQLRPHEKNYPTHDLELAAVVHALKIWRHYLFGTRTEVYTDHKSLKYIFTQPDLNMRQRRWLELIKDYDMRIHYHPGKANVVADALSRKGNCNATEGRQLPLELCKEFERLNLGIVSRGFVTALEAKPTLIDQVRKAQINDPDIQEIKKNMRRGKAIGFLEDEHGTVWLGEKICVPDNKDLKDAILKEAHDTLYSIHPGSTKMYQDLKERFWWASMKREIAEYVAVCDVCQRVKAEHQKPAGLLQPLKIPEWKWEEIGMDFITGLPRTSSGHDSIWVIVDRLTKVAHFIPVKTTYSGSRLAELYMARIVCLHGVPKKIVSDRGSQFTSNFWKKLQEEMGSKLNFSTAYHPQTDGQTERVNQILKDMLRACALDFGGSWDKNLPYAEFSYNNSYQASLQMAPYEALYGRKCRTPLLWDQTGECQVFGTDILREAEEKVKIIQERLRVAQSRHKSYADNRRRDLSFEEGDYVYLRVTPLRGVHRFHTKGKLAPRFVGPYKIVSRRGEVAYQLELPQSLAGVHNVFHVSQLKKCLRVPTEEANLEQIEVQEDLTYVEKPIRILEIDERRTRNRVIRFCKVQWSNHSEEESTWEREDELKSAHPHLFASSSESRGXDSV

SEQ ID NO: 20079 - protein, 1735 aa, Oryza sativa
  Clone ID: TF_OSC400676j.C1.p13.fg
MRRPSRPLRRAAAAVGDVIADVIGVVRPPGLEWYIPGLEIELCSRDGCSEWLGLYNRMPRYKPEYLFGVEGFVQELRTMSFAIGFGTAPFYAQIPHDRHEEKCRVKVTLNSNSEEVPSVMFEAGGRNYVHACQEVARIAIGELRDSYSDQLADTEYRYHPRQPQGSDRGSYLETEGIENDATTRHLVEMLWAMDESRAETVLAAQDREDRNRGKICKLEDKVDRLEKELAALKGEAPPQKARIRLTARKRALFVPRYQLAPKMVNTRSNGNGPNNPNNNNNGENPTLAQVLAQQTQLMNMMMQQLQNQQNQGNNHAPPQNKLAEFLRVRPPIFSSTTNPVEAGDWLHAIEKKLDLLQCTDQEKVSFASHQLHGSASEWWDHFRLNRTTAEPITWLEFTAAFRKTHIPSRVVSLKKKEFRSLTQGSRSVTEYLHEFNRLARYAPEDVRNDEERQEKFLGGLNDELSYPLMVGDYPDFQKLVDKAIRQEDKYNCMEQRKRRIAHFKAQQGSNQKPRFTLGPQSMPQGGSSSVVRPQRQFFNNNAGNNIRNQAPRPVAAPTQQQPAKREQGSKPVVCFNCGDPGHYADKCPKPRRVKVVPAQSNSAVPASKARVNHVAAAEAQDAPDVILGTFPVNSVPATVLFDSGATHSFLSMSFAGNHGMEVEDLRHPLMVSTPSNQALSLQRSPSVRIEIKGVPFVANLILLESKDLDVILGMDWLARHRGVIDCANRKVTLTSNDGRVVTVHALSSESLRSRLNQITLEEIPIVREYPDVFPDDLPGMPPKRDIEFRIDLVPGTTPIHKRPYRMAANELAEVKRQVDDLLQKGYIRPSSSPWGAPVIFVEKKDHTQRMCVDYRALNDVTIKNKYPLPRIDDLFDQLKGATVFSKIDLRSGYHQLRIKEEDIPKTAFTTRYGLFECTVMSFGLTNAPAFFMNLMNKVFMEYLDKFVVVFIDDILIYSRTKEEHEEHLRLALEKLREHQLYAKFSKCEFWLSEVKFLGHVISAGGVAVDPSNVESVTNWKQPKTVSEIRSFLGLAGYYRRFIENFSKIAKPMTRLLQKDVKYKWSEECEQSFQELKSRLISAPILILPDPKKGFQVYCDASKLGLGCVLMQDGKVVAYASRQLRPHEKNYPTHDLELAAVVHALKIWCHYLFGTRTEVYTDHKSLKYIFTQPDLNMRQRRWLELIKDYDMGIHYHPGKANVVADALSRKGYCNATEGRQLPLELCKEFERLNLGIVSRGFVAALEAKPTLIDQVREAQINDPDIQEIKKNMRRGKAIGFLEDEQGTVWLGERICVPDNKDLKDAILKEAHDTLYSIHPGSTKVYQDLKERFWWASMKREIAEYVAVCDVCQRVKAEHQKPAGLLQPLKIPEWKWEEIGMDFITGLPRTSSGHDSIWVIVDRLTKVAHFIPVKTTYSGSRLAELYMARIVCLHGVPKKIVSDRGSQFTSNFWKKLQEEMVSKLNFSTAYHPQTDGQTERVNQILEDMLRACALDFGGSWDKNLPYAEFSYNNSYQASLQMAPYEALYGRKCRTPLLWDQTGERQVFGTDILREAEEKVKIIQERLRVAQSRHKSYADNRRRDLSFEEGDYVYLRVTPFRGVHRFHTKGKLAPRFVGPYKIVSRRGEVAYQLELPQSLAGVHNVFHVSQLKKCLRVPTEEANLEQIEVQEDLTYVEKPIRILATSERRTRNRVIRFCKVQWSNHSEEESTWEREDELKSAHPHLFASSSESRGRDSV

SEQ ID NO: 20080 - protein, 1575 aa, Oryza sativa
  Clone ID: TF_OSC400686j.C1.p2.fg
MRVHTHMPRYKPEYLFGVEGFVQELRTMSFAIGFGTAPFYAQIPHDHHEKKCRVKVTLNSNSEDIPSVMFEAGGRNCIHACQEVARIAIGELHDRYSDQLADTEYRYHPRQPQGSDRGSYLETEGIENDATTRHLVEMLWAMDETRAETVLAAQDREDRNRGKICKLEDKVDRLEKELAALKGEAPPQKSRIRLTARKRALFVPRYQLAPKVRVVEKEVTPALADPPVVNMVLTRSNGNGPNNNNNNNNNNGENPTLAQVLSQQAQLMNMMMQQLQNQTTAEPITWLEFTTAFRKTHIPSGVVSLKKKEFRSLTQGSRSVAEYLHEFNRLAHYAPEDVRTDEERQERFLEGLNDELSYPLMTGDYSDFQKLVDKAIRQEDKYNRMEQKKRRIAKFKAQQGNSQRPRLTLGPQSMPQGGSSSVARPQRQFFNNNAVNNIRNQAPRPVAASTQQQPAKREQGSKPVVCFNCGDPGHYADKCPKPRRVKVVPVQSNSTVPASKARVNHVAAAEAQDAPDVILGTFLVNLVPTTVLFDSGATHSFLSMSFAGNHGMEVEDLRRPMMVSTPSNQALSLQRSPSVKIEIQGVPFLANLILLESKDLDVILGMDWLARYKGVIDCANRKVTITSNDGRVVTVHALSSESLRSRLNQITLEEIPIVREYPDVFPDDLPGMPPKRDIEFRIDLVPGTTPIHKRPYRMAANELAEVKRQVDDLLQKGYIRPSSSPWGAPVIFVEKKDHTQRMCVDYRALNDVTIKNKYPLPRIDDLFDQLKGATVFSKIDLRSGYHQLRIKEEDIPKTALIEEHEEHLRLALEKLREHQLYAKFSKCEFWLSEVKFLGHVISAGGVAVDPSNVESVTNWKQPKTVLEIRSFLGLAGYYRRFIENFSKIAKPMTRLLQKHVKYKWSEECEQSFQELKNRLITAPILILPDLKKGFQVYCDASKLGLGCVLMQDGKVVAYASRQLRPHEKNYPTHDLELAAVVHALKIWRHYLFGTRTEVYTDHKSLKYIFTQPDLNMRQRRWLELIKDYDMGIHYHPGKANVVADALSRKGYCNATEGRQLPLELCKEFERLNLEIVSRGFVAALEAKPTLIDQVREAQINDLDIQEIKKNMRRGKAIGFLEDEQGTVWLGERICVPNNKDLKDAILKEAHDTLYSIHPGSTKMYQDLKERFWWASMKREIAEYVAVCDVCQRVKAEHQKPAGLLQPLKIPEWKWEEIGMDFITGLPRTSSGHDSIWVIVDRLTKVAHFIPVKTTYSGSRLAELYMARIVCLHGVPKKIVSDRGSQFTSNFWKKLQEEMGSKLNFSTAYHPQTDGQTERVNQILEDMLRACALDFGGSWDKNLPYAEFSYNNSYQASLQMAPYEALYGRKCRTPLLWDQTGERQVFGTDILREAEEKVKIIQERLRVAQSHHKSYADNRRRDLSFDEGDYVYLRVTPLRGVHRFHTKGKLAPRFVGPYKVVSRRGEVAYQLELPQSLAGVHNVFHVSQLKKCLRVPTEEANLEQIEVQEDLTYVEKPIRILETNERRTRNRVIRFCKVQWSNHSEEESTWEREDELKSAHPYLFASSSESRGRDSV

SEQ ID NO: 20081 - protein, 809 aa, Oryza sativa
  Clone ID: TF_OSC400718j.C1.p122.gm
MKIGMLGVGQDSAVLSIKDDGAPNKLPSTPQALASQSPPPFQPCSAAVPDAAVAREDRRRHRRCVAVLVRPFAAAEDRRSTLVTVDPKSFAASSSSPSPSVDLPPPFWSPMPRYKPEYLFGVEGFVQELRTMSFAIGFGTAPFYAQIPHDRHEEKCRVKVTLNSNSEEVPSVMFEAGGRNYIHACQEVARIAIGELRDRYSDQLADTEYRYHPRQPQGSDRGSYLETEGIENDATTRHLVEMLWAMDESRAETVLAAQDREDRNRGKICKLEDKVDRLEKELAALKGEAPPQKARIRLTARKRALFVPRYQLAPKVRVVEKEVAPAQADPPVIIISDEEEEESKRNHSKIEWVATQDDEDEPNEPSIDLRCSEELDTTNPVEAGDWLHAIEKKLDLLQCTDQEKVSFASHQLHGPASEWWDHFRLNRITAEPITWLEFTAAFRKTHIPSGVVSLKKKEFRSLTQGSRSVTEYLHEFNRLARYAPEDVRNDEERQEKFLGGLNDELSYPLMVGDYPDFQKLVDKAIRQEDKYNCMEQRKRRIAHFKAQQGSNQKPRLTLGPQSMPQGGSSSVVRPQRQFFNNNAGNNIRNQAPRPVAAPTQQQPAKREQGSKSVVCFNCGDPGHYADKCPKPRRVKVVPAQNNSTVPASKARVNHVAAAEAQDAPDVILVREYPDVFPDDLPGYYRRFIENFSKIAKPMTRLLQKDVKYKWSEESPQALASQSPPPLQPCSAAVPDAAVAREDRRRDRRCVAVLVRPFAAAEDRRSTLVTVDPKSFAASSSSPSPSVDLPPPFWSPVSSPRRPLRAGALR

SEQ ID NO: 20082 - protein, 1884 aa, Oryza sativa
  Clone ID: TF_OSC400719j.C1.p1.np
MPRYKPEYLFGVEGFVQELRTMSFVIGFGTVPFYAQIRHDRHEEKCRVKVTLNSNSEDIPSVMFEAGGRNYIHACQEVARIAIGELRDRYSDQLADTEYRYHPRQPQGSDRTEGIENDATTRHLVEMLWAMDESRAETVLAAQDREDRNRGKICKLEDKVDRLEKELAALKGEAPPQKARIRLTARKRALFVPRYQLAPKVRVVEKEVAPADPPVIIISSDEEEESKRNCSKIEWVATQDDEDEPNEPSIDLRCSEELDNGNGPNLNNPNNNNNGENPTLAQVLAQQTQLMNMMMQQLQNQQNQGNNHAPPQNKLAEFLRVRPPVFSSTTNPVEAGDWLHAIEKKLDLLQCTDQEKVSFASHQLHGPASEWWDHFRLNRTTAEPITWLEFTAAFRKTHIPSGVVSLKKKEFRSLTQGSRSVTEYLHEFNRLARYAPEDVRNDEERQEKFLEGLNDELSYPLMTEDYSDFQKLVDKAIHQEDKYNRMEQKKRRIAHFKAQQGNNQKPRLTLGPQSMPHGGSSSVVRPQHQFFNNNAGNNIRNQAPRPVAASTQQQPAKREQGSKPVVCFNCGDPGHYADKCPKPRHVKVVPAQSNSAVPASKARVNHVAAAEAQDAPDVILGTFLVNSVPATVLFDSGATHSFLSMSFAGNHGMEVEDLRCPLMVSTPSNQALSLQRSPSVRIEIQGVPFLANLILLESKDLDVILGMDWLARHKGVIDCANRKVTLTSNDGRVVTVHALSSEFLRSRLNQITLEEIPIVRGYPDVFPDDLPGMPPKRDIEFRKDLVPGTTPIHKRPYRMAANELAEVKRQVDDLLQKGYIRPSSSPWGAPVIFVEKKDHTQRMCVDYRALNDVTIKNKYPLPRIDDLFDQLKGATVFSKIDLRSGYHQLRIKEYGLFECTVMSYGLFECTVMSFGLTNAPAFFMNLMNKVFMEYLDKFVVVFIDDILIYSKTKEEHEEHLRLALEKLREHQLYAKFSKCEFWLSEVKFLGHVISAGGVAVDPSNVESVTNWKQPKTVSEIRSFLGLAGYYRKFIENFSKIAKPMTRLFQKDVKYKWSEECEQSFQELKNRLISAPILILPDPKKGFQVYCDASKLGLGCVLMQDGKVVAYASRQLRPHEKNYPTHDLELAAVVHALKIWRHYLFGTRTEEFERLNLGIVSIGFVAALEAKPTLIDQVREAQTNDPDIQEIKKNMRRGKAIGFLEDEHGTVWLGERICVPDNKDLKDAILKEAHDTLYSIHPGSTKMYQDLKERFWWASMKREIAEYVAVCDVCQRVKAEHQKPAGLLQPLKIPEWKWEEIGMDFITGLPKTSLGHDSIWVIVDRLTKVAHFIPVKTTYSGSRLAELYMARIVCLHGVPKKIVSDRGSQFTSNFWKKLQEEMGSKLNFSTAYHPQTDGQTERVNQILEDMLRACALDFGGSWDKNLPYAEFSYNNSYQASLQMAPYEALYGRKCRTPLLWDQTGERQVFGTDILREAEEKVKIIQERLRVAQSRHKSYADNRRRDLSFEEGDYVYLRVTPLRGVHRFHTKGKLVPRFVGPYKIVSRRGEVAYQLELPQSLAEVHNVFHVSQLKKCLRVPTEEANLEQIEVQEDLTYVEKPIRILETNERRTRNRVIRFCKVQWSNHSEEESTWEREDELNEGFEFVSDSSFPNLPSSSPVAVGLRLRLRAPLKGSPWSPLPAATLAFASRRRSRPSAPCAAVVPAVAIAREGRRRVRRRVSRPSAPCAAVVPAVAIAREGRRRVRRRVAVLVRPFAVAEDRRSVIAAVDPKSFAASSSSPSPSVDLPPPFASSRRRSPASMRRPSRPSCPPFASSRRRSPASMRRPSRPSCPSRRRRGDVIADAIKFVLHSVVSGESVFTGEEFEEFQGQQGKGRGCRWTDGVQQ

SEQ ID NO: 20083 - protein, 1630 aa, Oryza sativa
  Clone ID: TF_OSC400724j.C1.p22.fg
MVGCEHMVLMVVLMTIKDRFASYCCETFIVPTTSQRGQRLYLLYSVIHYSAPDCETARSPWGSLGSPCLVYKGVIMIQERCAVMGYVVQGVLSRLLSEMPPHSPRNLIEVLGFVRELRLMAFEVGYEVAPEYRQISHDPDEEKCRVRVTLASDSEDLPSFKFEAGGRSYCHACQEAALVAIGELRQRFEEELDSSAFQYHPHKPHGQDYGTYICPDGEESATLMHAVHMLSAMDAVSVERDKAAHDRENWNQGKICKLKSKVYRLQKELAELKGETPPPTPKLRLTARKRTCPPPRLQLASKIRVMGEAVPDHAEPVIDIISDEEEEEDPEEREPATPEEEDPSLRSDARRKAEGEPITWQEFTAAFKKTHIPSGVVALKKREFRALNQGSRSVTEYLHDFNRLARYAPEDVRTDEERQEKFLEGLNDELSYALMSTDFRDFQQLVDKAIRQEDKYNRMEQKKRRAAQFKAQQGSNQRPRLVTGPQAPSYPQGGSSSVVRPQRQFYNNNTGNRGNDNRNVVARPAATPAQNQPVRKEQGSKPVVCFNCGDPGHYADKCPKPRRVKNAPAPNNSNVPAPKARVNHVAAAEAQNAPDVVLGTFPVNSIPATVLFDSGATHSFLSKSFASNHGMEVVSLGRPLLVNTPGNQVFSTQYCPSVTIEIEEVPFPSSLILLESKDLDVILGMDWLSRHRGVIDCANRKVTLTSSNGETVSFFVSSPKSHGVILNQVALQEIPIVQDYPDVFPEDLPGMPPKRDIEFRIDLVPGTNPIHKRPYRMAANELAEVKKQVDDLLQKGYIRPSTSPWGAPVIFVEKKDHTQRMCVDYRALIEVTIKNKYPLPRIDDLFDQLEGATVFSKIDLRSGYHQLRIREEDIPKTAFTIRYGLFECTVMSFGLTNAPAFFMNLMNKVFMEYLDKFVVVFIDDILIYSKTKEEHEEHLRLALEKLREHQLYAKFSKCEFWLSEVKFLGHVISSGGVAVDPSNVELVLSWKQPKTVSEIRSFLGLAGYYRRFIENFSKIARPMTRLLQKEVKQLRPHENNYPTHDLELAAVVHALKIWRHYLFGNRTEIYTDHKSLKYIFTQPDLNMRQRRWLELIKDYDMEIHYHPGKANVVADALSRKSYCNMSEGRRLPWELCQEFEKLNLGIVSKGFVAALEAKPTLFDQVREAQVNDPDIQEIKKNMRRGKAIGFVEDEQGTVWLGERICVPENKELKDTIMKEAHETLYSIHPGSTKMYQDLKQQFWWASMRHEIAEYVALCDVCQRVKAEHQKPAGLLQPLKIPEWKWEEIGMDFITGLPRTSAGHDSIWVVVDRLTKVAHFIPVKTTYTGNKLAELYMARVVCLHGVPKKIVSDRGSQFTSKFWQKLQLELGTRLNFSTAYHPQIDGQTERVNQILEDMLRACVLDFGGSWDNNLPYAEFSYNNSYQASLQMSPNEALYDRKCRTPLLWDQTGERQVFGTDILREAEEKVKIVQERLRIAQSRQKSYADNRCRDLAFEEGDCVYLRVTPLRGVHRFQTKGKLAPRFVGPFKIVSRRGEVAYQLELPPSMAGIHDVFHVSQLKKCLRVPTEETDPDRIELQEDLTYVEKPVRILEFPTFRRRAFPLRKVPKRLRKPKASHTDPKQPFEHVEPV

SEQ ID NO: 20084 - protein, 1680 aa, Oryza sativa
  Clone ID: TF_OSC400724j.C1.p24.fg
MVGSPGLEWYIPGLEIELYSRDGCPEWLGLYNRMPRYKPEYLFGVEGFVQELRTMSFVIGFGTVPFYAQIRHDRHEEKCRVKVTLNSNSEDIPSVMFEAGGRNYIHACQEVARIAIGELRDRYSDQLADTEYRYHPRQPQGKTVLAAQDREDRNRGKICKLEDKVDRLEKELAALKGEAPPQKARIRLTARKRALFVPRYQLAPKMVNTRSNRNGPNLNNPNNNNNGENPTLAQVLAQQTQLMNMMMQQLQNQQNQGNNHAPPQNKLAEFLRVRPPVFSSTTNPVEAGDWLHAIEKKLDLLQCTDQEKVSFASHQLHGPASEWWDHFRLNRTTAEPITWLEFTAAFRKTHIPSGVVSLKKKEFRSLTQGSRSVTEYLHEFNRLARYAPEDVRNDEERQEKFLEGLNDELSYPLMTEDYSDFQKLVDKAIHQEDKYNRMEQKKRRIAHFKAQQGNNQKPRLTLGPQSMPHGGSSSVVRPQHQFFNNNAGNNIRNQAPRPVAASTQQQPAKREQGSKPVVCFNCGDPGHYADKCPKPRHVKVVPAQSNSAVPASKARVNHVAAAEAQDAPDVILGTFLVNSVPATVLFDSGATHSFLSMSFAGNHGMEVEDLRCPLMVSTPSNQALSLQRSPSVRIEIQGVPFLANLILLESKDLDVILGMDWLARHKGVIDCANRKVTLTSNDGRVVTVHALSSEFLRSRLNQITLEEIPIVRGYPDVFPDDLPGMPPKRDIEFRKDLVPGTTPIHKRPYRMAANELAEVKRQVDDLLQKGYIRPSSSPWGAPVIFVEKKDHTQRMCVDYRALNDVTIKNKYPLPRIDDLFDQLKGATVFSKIDLRSGYHQLRIKEEDIPKTAFTTRYGLFECTVMSFGLTNAPAFFMNLMNKVFMEYLDKFVVVFIDDILIYSKTKEEHEEHLRLALEKLREHQLYAKFSKCEFWLSEVKFLGHVISAGGVAVDPSNVESVTNWKQPKTVSEIRSFLGLAGYYRKFIENFSKIAKPMTRLFQKDVKYKWSEECEQSFQELKNRLISAPILILPDPKKGFQVYCDASKLGLGCVLMQDGKVVAYASRQLRPHEKNYPTHDLELAAVVHALKIWRHYLFGTRTEVYTDHKSLKYIFTQPDLNMRQRRWLELIKDYDMGIHYHPGKANVVADALSRKGYCNATEGRQLPLELCKEFERLNLGIVSIGFVAALEAKPTLIDQVREAQTNDPDIQEIKKNMRRGKAIGFLEDEHGTVWLGERICVPDNKDLKDAILKEAHDTLYSIHPGSTKMYQDLKERFWWASMKREIAEYVAVCDVCQRVKAEHQKPAGLLQPLKIPEWKWEEIGMDFITGLPKTSLGHDSIWVIVDRLTKVAHFIPVKTTYSGSRLAELYMARIVCLHGVPKKIVSDRGSQFTSNFWKKLQEEMGSKLNFSTAYHPQTDGQTERVNQILEDMLRACALDFGGSWDKNLPYAEFSYNNSYQASLQMAPYEALYGRKCRTPLLWDQTGERQVFGTDILREAEEKVKIIQERLRVAQSRHKSYADNRRRDLSFEEGDYVYLRVTPLRGVHRFHTKGKLVPRFVGPYKIVSRRGEVAYQLELPQSLAEVHNVFHVSQLKKCLRVPTEEANLEQIEVQEDLTYVEKPIRILETNERRTRNRVIRFCKVQWSNHSEEESTWEREDELKSAHPYLFASSSESRGRDSV

SEQ ID NO: 20085 - protein, 1634 aa, Oryza sativa
  Clone ID: TF_OSC400726j.C1.p7.fg
MVGSPGLEWNIPGVEIELCSRGGCSEWLGLYNRMPRYKPEYLFGVEGFVQELRSMSFVIGFGTAPFYAQIPHDRHEEKCRVKVTLNSNSEDIPLVMFEAGGRNYIHACQEVARIAIGELRDRYSDQLADTEYRYHPRQPQGSDRGSYLETEGIENDATTKHLVEMLWAMDESRAETVLAAQDREDRNRGKICKLEDKVDRLEKELAALKGEAPPQKARIRLTARKRALFVPRYQLAPKMVNTRSNGNGPNNPNNNNGENPILAQVLAQQTQLMNMMMQQFQNQENQGNNHAPPQNKLAEFLRVRPPVFSSTTNPVEASDWLHAIEKKLDLLQCTDQEKVSFASHQLHGPASEWWDHFRLNRTTAEPIIWLEFTAAFRKTHIPSGVVSLKKKEFRSLTQGSRSVTEYLHEFNRLARYAPEDVRNDEERQEKFLGGLNDELSYPLMVGDYPDFQKLVDKAIRQEDKYNRMEQKKRRIAQFKTQQGNNQKPHLTLGPQPMPQGGSSSVVRPQRQFFNNNAGNNIRNQGPRPVAAPAQQQPVKREQGSKPVVCFNCGDPGHYADKCPKPRRVKVVPAQNNSAVPASKARVNHVAAAEAQDAPDVILGTFLVNSVPATVLFDSGATHSFLSMSFVGNHGMEVEDLRRPLMVSTPSNQALSLQRSPSVRIEIQGVPFLANLILLESKDLDVILGMDWLARHKGVIDCANKKVTLTSYDGRVVTVHALSSESLRSRLNQITLEEISIVREYPDVFPDDLPGMPPKRDIEFRIDLVPGTTPIHKRPYRMAANELAEVKRQVDDLLQKGYIRPSSSPWGAPVIFVEKKDHTQRMCVDYRALNDVTIKNKYPLPRIDDLFDQLKGATVFSKIDLRSGYHQLRIKEEDIPKTAFTTRYGLFECTVMSFGFTNAPAFFMNLMNKVFMEYLDKFVVVFIDDILIYSRTKEEHEEHLRLALEKLREHQLYAKFSKCEFWLSEVKFLGHVISAGGVTVDPSNVESVTNWKQPKTVSEIRSFLGLAGYYRRFIENFSKIAKPMTRLLQKDVKYKWSEECEQSFQELKSRLISAPILILPDPKKGFQVYCDASKLGLGCVLMQDGNVVAYASRQLRPHEKNYPTHDIELAAVVHALKIWRHYLFGTRTEVYTDHKSLKYIFTQPDLNMRQRRWLELIKDYDMGIHDHPGKANVVADALSRKGYCNATEGRQLPLELCKEFERLNLGIVGRGFIAALEAKPTLIDQVREAQINDPDIQEIKKNMRRGKAIGFLEDEQGTVWLGERICVPDNKDLKDAVLKEAHDTLYSIHPGSTKMYQDLKERFWWASMKREIAEYVAVCDVCQRVKAEHQKPAGLLQPLKIPEWKWEEIGMDFITGLPRTSSGHDSIWVIVDRLTKVAHFIPVKTTYSGSRLAELYMARIVCLHGVPKKIVSDRGSQFTSNFWKKLQEEMGSKLNFSTAYHPQTDGQTERVNQILEDMLRACALDFGGSWDKNLPYAEFSYNNSYQASLQMASYEALYGRKCRTPLLWDQTGERQVFGTDILREAEEKVKIIQERLRVAQSRHKSYADNRRRDLSFEEGDYVYLRVTPLRGVHRFHTKGKLAPRFVGPYKIVSRRGEVAYQLELPQSLAGVHNVFHVSQLKKMFKCTYRRS

SEQ ID NO: 20086 - protein, 1734 aa, Oryza sativa
  Clone ID: TF_OSC400760j.C1.p1.fg
MGLRHRLLAPIKGSPSPPLPVATLAFVSRRRKRPSAPCFAVVPVVAVARGDRHRGRHRVAVLVRPFAVAVDRRSIAVVVKPKDPAAFSSTPPPSVHLPPSFWSSIPTFPESPFSQEKNLKSSKATPGLEWYIPGLEIELYSRDGCSEWLGLYNRMPCYKPEYLFGVEGFVQELRTMSFAIGFGTTPFYAQIPHDRHEEKCRVKVTLNSNSEDIPSVMFEAGGRNYIHACQEGSDRGSYLETEGIENDATTKHLVEMLWAMDETRAETVLAAQDREDRNHEKELAALKGEAPPQKARIRLTARKRALFVPRYQLAPKVRVVEKEVTPALANPPVVNMVLTRSNGNGPNNNNNNNNGENPTLAQVLAQQVQLMNIMMQQLQNQQNQGNNHAPPQNKLAEFLHVRPPTFSSTTNPVEAGDWLHAIEKKLDLLQCTDQEKVSFASHQLHGLASEWWDHFRLNRTTTEPITWLEFTAAFRKTHIPSGVVSLKKKEFRSLTQGSRSVTEYLHEFNRLARYAPEDVRTDEERHERFLEGLNDELSYPLMTGDYHDFQKLVDKAIRQEGKYNRMEQKKRRIAQFKAQQGNSQRPRLTLGPQSMRQGGSSSVVRPQRQFFNNNAGNNIRNQAPRPVAASTQQQPAKKEQGSKPVVCFNCGDPGHYADKCPKPRRVKVVPAQSNSTVPASKARVNHVAAAEAQGAPDVILGTFLVNLVPATVLFDSGATHSFLSMSFAGNHGMEVEDLRRPLMVSTPSNQALSLQRSPSVRIEIQGVPFLANLILLESKDLDVILGMDWLARYKGVIDCANRKVTITSNDGRVVTVHALSSEPLRSRLNQITLEEIPIVREYPDVFPDDLPGMPPKRDIEFRIDLVPGTTPIHKRPYRMAANELAEVKRQVDDLLQKGYIRPSSSPWGAPVIFVEKKDHTQRMCVDYRALNDVTIKNKYPLPRIDDLFDQLKGAIVFSKIDLRSGYHQLRIKEEDIPKTAFTTRYGLFECTVMSFGLTNAPAFFINLMNKVFMEYLDKFVVVFIDDILIYSRTKEEHEEHLRLALEKLREHQLYAKFSKCEFWLSEVKFLGHVISAGGVAVDPSNVESITNWKQPKTVSEIRSFLGLAGYYRRFIENFSKIAKPMTRLLQKDVKYKWSEECKQSFQELKNRLISAPILILPDPKKGFQVYCDASQLGLGCVLMQDGKVVAYASRQLRPHEKNYPTHDLELAAVIHALKIWRHYLFGTCIEVYTDHKSLKYIFTQPDLNMRQRRWLELIKDYDMGIQYHPGKANVVADALSRKGYCNATEGRQLPLELCKEFERLNLGIVRRGFVAALEAKPTLIDQVREAQINDPDIQEIKKNMRRGKAIGFLEDEQGTVWLGERICVPDNKDLKDAILKEAHDTLYSIHPGSTKMYQDLEERFWWASMKREIAEYVAVCDVCQRVKAEHQKPAGLLQPLKIPEWKWEEIGMDFITGLPRTSSGHDSIWVTDGQTERVNQILEDMLRACALDFGGSWDRNLPYAEFSYNNSYQASLQMAPYEALYGRKCRTPLLWDQTGERQVFGTDILREAEEKVKIIQERLRVAQSRHKSYADNRRRDLSFDEGDYVYLRVTPLRGVHRFHTKGKLVPHFVGPYKIVNRRGEVAYQLELPQSLAGVHNVFHVSQLKKCLRVPTEEANLEQIEVQEDLTYVQKPIRILEIEERRTRNRVIRFYKVQWSNHSEEESTWEREDELKSAHPHLFASSSESRGRDSV

SEQ ID NO: 20087 - protein, 676 aa, Oryza sativa
  Clone ID: TF_OSC400772j.C1.p46.gm
MVNTRASGSGNNNNGENPTLAQVLAQQTQLMNMMMQQLQNQQNQGNNHAPPQNKLAEFLRVRPPIFSSTTNPVEAGDWLHAIEKKLDLLQCTDQEKVSFASHQLHGPASEWWDHFRLNRTTAEPITWLEFTAAFRKTHIPSGVVSLKKKEFRSLTQGSRSVTEYLHEFNRLARYAPEDVRNDEERQEKFLEGLNDELSYPLMTGDYPDFQKLVIKAIRQEDKYNSMEQKKRRIAQFKTQQGNNQKPRLTLGPQSMPQGGSSSVVRPQRQFFNNNAGNNIRNQAPRPVAASTQQQPAKREQGSKPVVCFNCGDPGHYADKCPKPRRVKVVPAQSNSTVPASKARVNHVAAAEAQDAPDDPRCRRYPSPLSPSLLVAGSALAPCRFAPPSSPPLQPCAAVAPVIVVAREGRHRGRRHVAVLVRSFAVAVDRRSTVAAVDPIFSAASISPPVPSVDLPPLLWSPVSSPRHALRPGALRSRRRAVVRRRACAARAAAGGDVTADVIVAVCREPHGSLRSTRLRSGGDKPTGVAPVIVVAQEGRHHGRRHVAVLVRSSAVAVDRRSTVAAVDPIFSAASISPPVPSVDLPPLLWSPVSSPRHALRPGALRSRRRAVVRRRACAARAAAGGDVTADVIVAVCQNDDDDVSDDVSTGGDSGGSDGASSPANDGARTRTEDTNG

SEQ ID NO: 20088 - protein, 799 aa, Oryza sativa
  Clone ID: TF_OSC400806j.C1.p3.gm
MVNTRSNGNGPNNPNNNNNGENPTLAQVLAQQTQLMNMMMQQLQNQQNQGNNHVPPQNKLAEFLHVRPPVFSSTTNPVEAGDWLHAIEKKLDLLQCTDQEKVSFASHQLHGPASEWWDHFRLNRTTAEPITWLEFTAAFRKTHIPSGVVSLKKKEFRSLTQGSRSVTEYLHEFNRLARYAPEDVRNDEERQEKFLEGLNDELSYPLMTGDYSDFQKLVDKAIRQEDKYNRMEQKKCRIAHFKAQQGNNQKPRLTLGSQSMPQGGSSSVVRPQRQFFNNNAGNNIRNQAPRPVAAPAQQQPVKREQGSKPVVCFNCGDPGHYADKCPKPRRVKVVPAQSNSTAPASKARVNHVAAAEAQDAPDVILVREYSDVFPDDLPANELAEVKRQVDDLLQKGYIRPSSSPWGAPVIFVEKKDHTQRMCVDYRALNDVTIKNKYPLPRIDDLFDQLKGATVFSKIDLRSGYHQLRIKEEDIPKTAFTTRYGLFECTVMSFGLTNAPAFFMNLMNKVFMEYLDKFVVVFIDDILIYSRTKEEHEEHLRLALEKLREHQLYAKFSKCEFWLSEVKFLGHVISAGGVAVDPSNVESVTNWKQPKTVSEIRSFLGLAGYYRRFIENFSKIAKPMTRLLQKDVKYKWSEEYVAVAREGRHRGRRRVAVLVRPFAVAGDHRSSVAVDNPKVSAASFSSPSSSVVRPPPFWSPVCSPRRPLRAGALRLRPSAAVRRRACAARAVRSAEPPPLSVTSPLTSSGSSARGSLRGTRLRSGGDKPTGVAGSPCLVYKGVIMIQEEEEFFNEADGVEE

SEQ ID NO: 20089 - protein, 1491 aa, Oryza sativa
  Clone ID: TF_OSC400809j.C1.p1.fg
MQARAARAAAAGDDVTADVIVALSPPGLEWYIPGLEIELCSRDGCSEWLGLYNRMPRYKPEYLFGVEGFVQELRTIFLMIVMKRSAESKVTLNSNSEDIPSVMFEAGGRNCIHACQEVARIAIGELRDRYSDQLADTEYRYHPRQPQGSDRGNYLETEGIENDATTRHLVEMLWAMDESRAETVLAAQDHEDRNRGKICKLEDKVDRLEKELAALKGEAPLQKARIRLTARKRALFVPRYQLAPKVRVVEKEVAPTLADPPVIIISEDEEEESKRNHSKFPPVSLLVPCPCQMVNTRSNGNGPSNHNNEGNPTLAQVLAQQTQLMNMMMQQLQNQQNQGNNHAPPQNKLAEFLHVRPPIFSSTTNPVEAGDWLHAIEKKLDLLQCTDQEKVSFASHQLHGPASEWWDHFRLNRTTAEPITWLEFTAAFRKTHISSGVVSLKKKEFRSLTQGSRSVTEYLHEFNRLARYAPEDVRNVEERQEKFLEGLNEELSYPLMTGDYSDFQKLVDKAIRQEDKYNRMEQKKRRIAQFKTQQGNNQKPRLTLGPQSMPHGGSSSVVRPQRQFFNNNAGNNIRNQAPRPVAAPAQQQPAKREQGSKPVVCFNCGDPGHYADKCPKPRRVKVVPAQSNSAVPASKARVNHVAAAEAQDAPDVILGTFLVNLVPATVLFDSGATHSFLSMSFAGNHGMEVEDLRRPLMVSTPSNQALSLQRSPSVRIEIQGVPFLANLILLESKDLDVILGMDWLARHKGVIDCANRKVTLTSNDGRVVTVHALSSASLRSRLNQITLEEIPIVREYPDVFPDDLPGMPPKRDIEFRIDLAPGTTPIHKRPYRMAANELAEVKRQVDDLLQKGYIRPSSSPWGAPVIFVEKKDHTQRMCVDYRALNDVTIKNKYPLPRIDDLFDQLKGATVFSKIDLRSGYHQLRIKEEDIPKTVFTTRYGLFECTVMSFGLTNAPAFFMNLMNKVFMEYLDKFVVVFIDDILIYSRTKEEHEEHLRLALEKLREHQLYAKFSKCEFWLSEVKFLGHVISAGGVAVDPSNVESVTNWKQPKTVLEIRSFLGLAGYYRRFIENFSKIAKPMTRLLQKDVKYKWSEECEQSFQELKNRLISAPILILPEPKKGFQVYCDASKLGLGCVLMQDGKMVAYASRQLRPHEKNYPTHDLELAAVVHALKIWRHYLFGTRTEVYTDHKSLKYIFTQPDLNMRQRRWLELIKDYDMGIHYHPGKANVVADALSRKGYCNATEGRQLPLELCKEFERLNLGIVSRGFVAALEAKPTLIDQVREAQINDPDIQEIKKNMRRGKAIGFLEDEHGTVWLGERICVPDNKDLKDAILKEAHDTLYSIHPGSTKMYQDLKERFWWASMKREIAEYVAVCDVCQRVKTDGQTERVNKILEDMLRACALDFGGSWDKNLPYAEFSYNNSCQASLQMAPYEALYGRKCRTPLLWDQTGEHQVFGTDILREAEEKVKIIQERLRVAQSRHKSYADNRLEI

SEQ ID NO: 20090 - protein, 1696 aa, Oryza sativa
  Clone ID: TF_OSC400903j.C1.p48.fg
MPRYKPEYLFGVEGFVQELRTMSFVIGFGTAPFYAQIRHDRHEEKCRVKVTLNSNSEEVPSVMFEAGGRNYIHACQEVARIATGELRDSYSDQLADTEYRYHPRQPQGSDRGSYLETEGIENDVTTRHLVEMLWAMDESRAETVLAAQDREDRNRGKICKLEDKVDRLEKELAALKGEAPPQKARIRLTARKRALFVPRYQLAPKIRVVEKEVAPANPPVIIISSDEEEEPKRNNSKFEWMVNTRSNGNGPNNPNSNNNGENPTLAQVLAQQTQLMNMMMQQFQNQQNQGNNHAPPQNKLAEFLRVRPPVFSSTTNPVEASDWLHAIEKKLDLLQCTDQEKVSFASHQLHGPASEWWDHFRLNRTTAEPITWLEFTAAFRKTHIPSGVVSLKKKEFRSLSQGSRSVTEYLHEFNRLARYAPEDVRNDEERQEKFLGGLNDELSYLLMVGDYPDFQKLVDKAIRQEDKYNRMEQKKRRIAQFKTQQGNNQKPRLTLGPQPMPQGGSSSVVRPQRQFFNNNAGNNIRNQAPRPVAVPAQQQPAKREQGNKPVVCFNCGDPGHYADKCPKPRRVKVVPAQNNSAVPASKARVNHVAAAEAQDAPDVILGTFLVNSVPATVLFDSGATHSFLSMSFAGNHGMEVEDLRRPLMVSTPSNQALSLQRSPSVRIEIQGVPFLANLILLESKDLDVILGMDWLARHKGVIDCANRKVTLNSYDGRVVTVHALSSESLRSRLNQITLEEIPIVREYPDVFPDDLPGMPPKRDIEFRIDLVPGTTPIHKRPYRMAANELAEVKRQVDELLQKGYIRPSSSPWGAPVIFVEKKDHTQRMCVDYRALNDVTIKNKYPLPRIDDLFDQLKGATVFSKIDLRSGYHQLRIKEEDIPKTAFTTRYGLFECTVMSFGLTNAPAFFMNLMNKVFMEYLDKFVVVFIDDIPIYSRIKEEHEEHLRLALEKLREHQLYAKFSKCEFWLSEVKFLGHVISAGGVAVDPSNVESVTNWKQPKTVSEIRSFLGLAGYYRRFIENFSKIAKPMTRLLQKDVKYKWSEECEQSFQELKSRLISAPILILPDPKKGFQVYCDASKLGLGCVLMQDGKVVAYASRQLRPHEKNYPTHDIELAAVVHALKIWRHYLFGTRTEVYTDHKSLKYIFTQPDLNMRQRRWLELIKDYDMGIHYHPGKANVVADALSRKGYCNATEGRQLPLELCKEFERLNLGIVGRGFVAALEAKPTLIDQVREAQINDPDIQEIKKNMRRGKAIGFLEDEHGTVWLGERICVPDNKDLKDAILKEAHDTLYSIHPGSTKMYQDLKERFWWQRVKAEHQKPAGLLQPLKIPEWKWEEIGMDFITGLPRTSSGHDSIWVIVDRLTKVAHFIPVKTTYSGSRLAELYMARIVCLHGVPKKIVSDRGSQFTSNFWKKLQEEMGSKLNFSTAYHPQTDGQTERVNQILEDMLRACALDFGGSWDKNLPYAEFSYNNSYQASLQMAPYEALYGRKCRTPLLWDQTGERQVFGTDILREAEEKVKIIQERLRVAQSRHKSYADNRRRDLSFEEGDYVYLRVTPLRGVHRFHTKGKLAPRFVGPYKIVSRRGEVAYQLELPQSLAGVHNVFHVSQLKKCLRVPTEEANIEQIEVQEDLTYVEKPIRILETSERRTRNRVIRFCKVQWSNHSEEESTWEREDELKSAHPHLFASSSESRGRDSV

SEQ ID NO: 20091 - protein, 819 aa, Oryza sativa
  Clone ID: TF_OSC400935j.C1.p41.gm
MVNTRSNGNGPNLNNPNNNNNGENPTLAQVLAQQTQLMHMMMQQFQNQQNQGNNHAPPQNKLAEFLRVRPPVFSSTTNPVEASDWLHAIEKKLDLLQCTDQEKVSFASHQLHGPASEWWDHFRLNRTTAEPITWLEFTAAFRKTHIPSGVVSLKKKEFRSLTQGSRSVTEYLHEFNRLARYAPEDVRNDEERQEKFLGGLNDELSYPLMVGDYPDFQKLVDKAIRQEDKYNRMEQKKRRIAQFKTQQGNNQKPRLTLGPQSMPQGCSSSVVRPQRQFFNNNAGNNIRNQAPRPVAVPAQQQPAKREQGNKPVVCFNCGDPGHYADKCPKPRRVKVVPAQNNSAVPASKARVNHVAAAEAQDAPDVILVREYPDVFPDDLPANELAEVKRQVDDLLQKGYIRPSSSPWGAPVIFVEKKDHTQRMCVDYRALNDVTIKNKYPLPRIDDLFDQLKGATVFSKIDLRSGYHQLRIKEEDIPKTAFTTRYGLFECTVMSFGLTNAPAFFMNLMNKVFMEYLDKFVVVFIDDILIYSRTKEEHEEHLRLALEKLREHQLYAKFSKCEFWLSEVKLLGHVISAGGVAVDPSNVESVTNWKQPKTVSEIRSFLGLAGYYRRFIENFSKIAKPMTRLLQKDVKYKWSEESLEAKPTLIDQVREAQINDPDIQEIKKNMRRGKAIGFLEDEHGTVWLGERICVPDNKDLKDAILKEAHDTLYSIHPGSTKMYQDLKERFWWPSPSLGKVAVVVAKSSPSSSALSLPSETAGASSPSSSRRPPPFQPRRRRRPLVVRRRFGRRPSAVNRRGPDQSRPSDLDRINLGRPFA

SEQ ID NO: 20092 - protein, 1267 aa, Oryza sativa
  Clone ID: TF_OSC400948j.C1.p1.fg
MPCYKPEYLFGVEGFVQELRTMSFVIGFGNAPFYAQIRHDRHEEKCRVKVTLNSNSEDIPSVMFEAGGRNYIHACQEVARIAIGELRDRYSDQLVDTEYRYHPRQPQGSDRGSYLETEGIENDVTTRHLVEMLWAMDESRAETVLAAQDREDRNRGKICKLEDKVDRLEKELAALKGEAPPQKARIRLTARKRALFVPRYQLAPKVRVVEKEVAPAQADPPVIIISSDEEEESKRINSKIEWVATQDDEDEPSIDLLCSEELEKLESLVVWESSVCNNETQLRSIKVKMVNTRSNGNGPNNPNNNINGENPTLAQVLAQQTQLMNMMMQQFQNQQNQGNNHAPPQNKLAEFLRVRPPVFSSTTNPVEASDWLHAIEKKLDLLQCTDQEKVSFASHQLHGPASEWWDHFRLNRTTAEPITWLEFTAAFRKTHIPSGVVSLKKKEFRSLTQGSRSVTEYLHEFNRLARYAPEDVRNDEERQEKFLGGLNDELSYPLMVGDYPDFQKLVDKAIRQEDKYNRMEQKKRRIAQFKTQQGNNQKPRLTLGPQSMPQGGSSSVVRPQRQFFNNNAGNNIRNQAPRPVAAPAQQQPAKREQGSKPVVCFNCGDPGHYADKCPKPQRVKVVPAQSNSAVPASKARVNHIAAAEAQGAPDVILGTFLVNSVPATVLFDSGATHSFLSMSFAGNHGMEVEDLRRPLMVSTPSNQALSLQRSPSVRIEIQGVPFLANLILLESKDLDVILGMDWLARHKGVIDCANRKVTLNSYDGRVVTVHALSSESLRSRLNQITLEEIPIVREYPDVFPDDLPGMPPKRDIEFRIDLVPGTTPIHKRPYRMAANELAEVKRQVDDLLQKGYIRPSSSPWGAPVIFVEKKDHTQRMCVDYRALNDVTIKNKYPLPRIDDLFDQLKDKFVVVFIDDILIYSRTKEEHEEHLRLALEKLREHQLYAKFSKCEFWLSEVKFLGHVISAGGVAVDPSNVESVTNWKQPKTVSEIRSFLGLAGYYRRFIENFSKIAKPMTRLLQKDVKYKWSEECERSFQELKSRLISAPILILPDPKKGFQVYCDASKLGLGCVLMQDGKVVAYASRQLRPHEKNYPTHDIELAAVVHALKIWRHYLFGTRTEVYTDHKSLKYIFTQPDLNMRQRRWLELIKDYDMGIHYHPGKANVVADALSRKGYCNATEGRQLPLELCKEFERLNLGIVGRGFVAALEAKPTLIDQVREAQINDPDIQEIKKNMRRGKAIGFLEDEHGTVWLGERICVCHVLINSSQN

SEQ ID NO: 20093 - protein, 2011 aa, Oryza sativa
  unsure (1)..(2011): unsure at all Xaa locations
  Clone ID: TF_OSC400968j.C1.p4.np
AXTDNNLISSWFGMVHSWFGDRTVQPMPRYKPEYLFGVEGFVQELRTMSFVIGFGTAPFYAQIPHDRHEEKCRVRVTLNSNSEEVPSVMFEAGGRNYIHACQEVARIAIGELRDRYSDQLADTEYRYHPRQPQGSDRGSYLETEGIENDVTTKHLVEMLWAMDESRAETVLAAQDREDRNRGKICKLEDKVDRLEKELAALKGEAPPQKARIRLTARKRALFVPRYQLAPKVRVVEKEVAPAQADPPVIIISSDEEEESKRNNSKIEWVATQDDEDEPSIDLRCLEELDNGNGPNNPNNNNNGENPTLAQVLAQQTQLMNMMMQQFQNQQNQGNNHAPPQNKLAEFLRVRPPVFSSTTNPVEASDWLHAIEKKLDLLQCTDQEKVSFASHQLHGPASEWWDHFRLNRTTAEPITWLEFTAAFRKTHIPSGVVSLKKKEFRSLSQGSRSVTEYLHEFNRLARYAPEDVRNDEERQEKFLGGLNDELSYPLMVGDYPDFQKLVDKAIRQEDKYNRMEQKKRRIAQFKTQQGNNQKPRLTLGPQPMPQGGSSSVVRPQRQFFNNNAGNNIRNQAPRPVAAPAQQQPAKREQGNKPVVCFNCGDPGHYADKCPKPRRVKVVPAQNNSAVPASKARVNHVAAAEAQDAPDVILGTFLVNSVPATVLFDSGATHSFLSTSFAGNHGMEVEDLRRPLMVSTPSNQALSLQRSPSVRIEIQGVPFLANLILLKSKDLDVILGMDWLARHKGVIDCANRKVTLNSYDGRVVTVHALSSESLRSRLNQITLEEIPIVREYPDVFPDDLPGMPPKRDIEFRIDLVPGTTPIHKRPYRMAANELAEVKRQVDDLLQKGYIRPSSSPWGAPVIFVEKKDHTQRMCVDYRALNDVTIKNKYPLPRIDDLFDQLKGATVFSKIDLRSGYHQLRIKEYGLFECTVMSFGLTNAPAFYGLFECTVMSFGLTNAPAFFMNLMNKVFMEYLDKFVVVFIDDILIYSRTKEEHEEHLRLALEKLREHQLYAKFSKCEFWLSEVKFLGHVISAGGVAVDPSNVESVTNWKQPKTVSEIRSFLGLAGYYRRFIENFSKIAKPMTRLLQKDVKYKWSEECEQSFQELKSRLISAPILILPDPKKGFQVHCDASKLGLGCVLMQDGKVVAYASRQLRPHEKNYPTHDIELAAVVHALKIWHHYLFGTRTEEFERLNLGIVDRGFVAALEANPTLIDQVREAQINDPDIQEIKKNMRRGKAIGFLEDEHGTVWLGERICVPDNKDLKDAILKEAHDTLYSIHPGSTKMYQDLKERFWWASMKREIAEYVAVCDVCQRVKAEHQKPAGLLQPLKIPEWKWEEIGMDFITGLPRTSSGHDSIWVIVDRLTKVAHFIPVKTTYSGSRLAELYMARIVCLHGVPKKIVSDRGSQFTSNFWKKLQEEMGSKLNFSTAYHPQTDGQTERVNQILEDMLRACALDFGGSWDKNLPYAEFSYNNSYQASLQMAPYEALYGRKCRTPLLWDQTGERQVFGTDILREAEEKVKIIQERLRVAQSRHKSYADNRRRDLSFEEGDYVYLRVTPLRGVHRFHTKGKLAPRFVGPYKIVSRRGEVAYQLELPQSLAGVHNVFHVSQLKKCLRVPTEEANIEQIEVQEDLTYVEKPIRILETSERRTRNRVIRFCKVQWSNHSEEESTWEREDELNFGIEFDSDRFPLSKPRFPSPLPAVGLRRRLRAPLKGPPVSPLPVATFAFASRRRKSPSAPCAAVVSAVAPCAAVVSAVAVAREDRRRARQVVAVLVRPFAVAGDHRSSFAAVDPKSFAASSSSPSPSVGLPPPFRSPCRRSPCRRSPASVRRSSRLLRRAAAAVGDVTADVIGVVRHSVVSGESVFAEEEFEEFQGQQGKSPYVALCDVCQRVKAEHQKPAGLLQPLKIPEWKWEEIGMDFITGLPRTSAGHDSIWVVVDRLTKVAHFIPVKTTYTGHKLAELYMARVTDGQTERVNQILEDMLRACVLDFGGSWDKNLPYAEFSYNNSYQASLQ

SEQ ID NO: 20094 - protein, 2155 aa, Oryza sativa
  Clone ID: TF_OSC400983j.C1.p2.fg
MAEERESFERFFRGTLNFYGISLHHLNPNSIVHIANFIHACEAFLGIRPHFALFRRIFFLKPQPNKSKPCVVGGAGFQLRGTLSQKYFSMPFKTSNKGWHANWFYVQNPEPALPEYSCLPPVCQDTWNSLPMGDEAAQAVELMERMLKLKEQGLQGKQITRHFIKSRLAPIKERSRTAFEFDGKHDPNREDPDSLDFKVMKERMYKIFSNAIVVSYSHLLPVVPYNAFNPPPPEFTLMKSDPPITQHRTPCGKTSQTSGGPKIRSDSHPTTTQSANQSDFRKRKLVLSDDDDAEKAGSKGVTGKHPRQANPKKKTSSRPMPKIRKSSRKPSDIDPSRKDSEPTGMETGFSKETEPTAGDRLSDEQPATDNVGPSNEPPTGNQSAEARVDANQEPPTGNQSGTERNKDILEVEAQVDNPPKKDANVDLGSSSPAKVQGPARPRPEIITAPGLEWYIPGLEIELCSRGGCSEWLGLYNRMPRYKPEYLFGVEGFVQELRTMSFVIGFGTAPFYAQIPHDRHEEKCRVKVTLNSNSEDIPSVMFEAGGRNYIHACQEVARIAIGELRDRYSDQLADTEYRYHPRQPQGSDRGSYLETEGIENDATTKHLVEMLWAMDESHAETVLAAQDREDRNRGKICKLEDKVDRLEKELAALKGEAPPQKARIRLTARKRALFVPRYQLAPKMVNTRSNGNGPNNPNNNNNGENPTLAQVLAQQTQLMNMMMQQFQNQQNQGNNHAPPQNKLAEFLRVRPPVFSSTTNPVEASDWLHAIEKKLDLLQCTDQEKVSFASHQLHGPASEWWDHFRLNRTTAEPITWLEFTAAFRKTHIPSGVVSLKKKEFRSLTQGSRSVTEYLHEFNRLARYAPEEVRNDEERQEKFLGGLNDELSYPLMVGDYPDFQKLVDKAIRQEDKYNRMEQKKRRIAQFKTQQGNNQKPRLTLGPQPMPQGGSSSVVRPQRQFFNNNAGNNIRNQAPRPVAAPAQQQPAKREQGSKPVVCFNCGDPGHYADKCPKPRRVKVVPAQNNSAIPASKARVNHVTAAEAQDAPDVILGTFLVNSVPATVLFDSGATHSFLSMSFAGNHGMEVEDLRRPLMVSTPSNQALSLQRSPSVRIEIQGVPFLANLILLESKDLDVILGMDWLARHKGVIDCANKKVTLTSYDGRVVTVHALSSESLRSRLNQITLEEIPIVREYPDVFPDDLPGMPPKRDIEFRIDLVPGTTPIHKRPYRMAANELAEVKRQVDDLLQKGYIRPSSSPWGAPVIFVEKKDHTQRMCVDYRALNDVTIKNKYPLPRIDDLFDQLKGATVFSKIDLRSGYHQLRIKEEDIPKTAFTTRYGLFECTVMSFGLTNAPAFFMNLMNKVFMEYLDKFVVVFIDDILIYLRTKEEHEEHLRLALEKLREHQLYAKFSKCEFWLSEVKFLGHVISAGGVAVDPSNVESVTNWKQPKTVSEIRSFLGLAGYYRRFIENFSKIAKPMTRLLQKDVKYKWSEECEQSFQELKSRLISAPILILPDPKKGFQVYCDASKLGLGCVLMQDGKVVAYASRQLRPHEKNYPTHDIELAAVVHALKIWRHYLFGTRTEVYTDHKSLKYIFTQPDLNMRQRRWLELIKDYDMGIHYHPGKANVLADALSRKGYCNATEGRQLPLELCKEFERLNLGIVGRGFVAALEAKPTLIDQVREAQINDPDIQEIKKNMRRGKAIGFLEDEQGTVWLGERICVPDNKDLKDAVMKEAHDTLYSIHPGSTKMYQDLKERFWWASMKREIAEYVAVCDVCQRVKAEHQKPAGLLQPLKIPEWKWEEICMDFITGLPRTSSGHDSIWVIVDRLTKVAHFIPVKTTYSGSRLAELYMARIVCLHGVPKKIVSDRGSQFTSNFWKKLQEEMGSKLNFSTAYHPQTDGQTERVNQILEDMLRACALDFGGSWDKNLPYAEFSYNTSYQASLQMAPYEALYGRKCRTPLLWDQTGERQVFGTDILRKAEEKVKVIQERLRVAQSRHKSYADNRRRDLSFEEGDYVYLRVTPLRGVHRFHTKGKLAPRFVGPYKIVSRRGEVAYQLELPQSLAGVHNVFHVSQLKKCLRVPTEEANIEKIEVQEDLTYVEKPIRILETNERRTRNRVIRFCKVQWSNHSEEESTWEREDELKSAHSHLFASSSESQGRDSV

SEQ ID NO: 20095 - protein, 1541 aa, Oryza sativa
  Clone ID: TF_OSC400991j.C1.p11.fg
MVVQNGWAYATGCRATSLSTCLVLRDLSRSCIPHDRHEEKCRVKVTLNSNSEDIPSVMFEAGGRNYIHACQEVARIAIGELRDRYSDQLADTEYRYHSRQPQGSDRGSYLETEGIENDATTRHLVEMLWAMDETRAETVLAAQDREDRNRGKICKLEDKVDRLEKELAALKGEAPPQKARICLTARKRALFVPRYQLAPKVRVVEKEVTPALADPPVVNMVVTRSNGNGPNNNNNNNNNGENPTLAQVLAQQAQLMNMMMQQLQNQQNQGNNHAPPQNKLAEFLRVRPPTFSSTTNPVEAGDWLHAIEKKLDLLQCTDQEKVSFASHQLHGPASEWWDHFRLNRTTAEPITWLEFTAAFRKMHIPSGVVSLKKKEFRSLTQGSRSVTEYLHEFNRLARYAPEDVRTDEEHQEKFLEGLNDELSYPLMTGDYHDFQKLVDKAIRQEDKYNRMEQKKRRIAQFKTQQGNNQRPHLTLGPQSMPQGGYSSVVRPQRQFFNNNAGNNIRNQVPRPVAASTQQQPAKREQGSKPVVCFNCGDPGHYADKCPKPRCVKVVPAQSNSTVSASKARVNHVAAAEAQGAPDVILGTFLVNSVPATVLFDSGATHSFLSMSFAGNHGMEVEDLRCPLMVSTPSNQALSLQRSPSVRIEIQGVPFLANLILLESKDLDVILGMDWLARHKGVIDCANRKVTLTSNDGRVVTVHALSSESLRSILNQITLEEIPIVREYPDVFSDDLPGMPPKRDIEFRIDLVPGTTPIHKRPYRMAANELAEVKRQVDDLLQKGIDDLFDQLKGATVFSKIDLRSGYHQLRIKEEDIPKTAFTTRYGLFECTVMSFGLTNAPAFFMNLMNKVFMEYLDKFVVVFIDDILIYSRTKEEHEEHLRLALEKLREHQLYAKFSKCEFWLSEVKFLGHVISAGGVAVDPSNVESVTNWKQPKTVSEIRSFLGLAGYYRRFIENFSKIAKPMTRLLQKDVKYKWSEECEQSFQELKNRLISAPILILPDPKKGFQVYCDASKLGLGCVLMQDGKVVAYASRQLRPHEKNYPTHDLELAAVVRALKIWRHYLFGTRTEVYTDHKSLKYIFTQPDLNMRQRRWLELIKDYDMGIHYHPGKVNVVADALRRKGYCNATEGRQLPLELCKEFERLNLGIVSRGFVAALEAKPTLIDQIREAQINDPDIQEIKKNMRRGRAIGFLEDEQGTVWLGERICVPDNKDLKDAILKEAHDTLYSIHPGSTKMYQDLKERFWWASMKREIAEYVAVCDVCQRVKAEHQKPAGLLQPLKIPEWKWEEIGMDFITGLPRTSSGHDSIWVIVDRLTKVAHFIPVKTTYSGSRLAELYMARIVCLHGVPKKIVSNRGSQFTSNFWKKLQEEMGSKLNFSTAYHPQTDGQTERVNQILEDMLRACALDFGGSWDKNLPYAEFSYNNSYQASLQMAPYEALYGRKCRTPLLWDQTGERQVFGTDILREAEEKVKIIQERLRVAQSRHKSYADNRRRDLSFDERDYVYLRVTPLRGVHRFHTKGKLAPRFVGPYKIVSRRGEVAY

SEQ ID NO: 20096 - protein, 786 aa, Oryza sativa
  Clone ID: TF_OSC401051j.C1.p104.gm
MPCYKPEYLFGVEGFVEELRTMSFVIGFGNAPFYAQIRHDRHEEKCRVKVTLNSNSEDIPSVMFEAGGRNYIHACQEVARIAIGELRDRYSDQLADTEYRYHPRQPQGSDRGSYLETEGIENDVTTRHLVEMLWAMDESRAETVLAAQDREDRNRGKICKLEDKVDRLEKELAALKGEAPPQKARIRLTARKRALFVPRYQLAPKVRVVEKEVAPANPPVIIISSDEEEEPKRNNSKFEWVAIKDEEDEPNEPSIDLLCSEELDTTNPVEAGDWLHAIEKKLDLLQCTNQEKVSFASHQLHGPASEWWDHFRLNRITAEPITWLEFTAAFRKTHIPSGVVSLKKKEFRSLTQGSRSVTEYLHEFNRLARYAPEDVRNDEERQEKFLGGLNDELSYPLMVGDYPDFQKLVDKAIRQEDKYNRMEQKKRRIAQFKTQQGNNQKPRLTLGPQPMPQGGSSSVVRPQRQFFNNNAGNNIRNQAPRPVAAPAQQQPAKREQGSKPVVCFNCGDPGHYADKCPKPRRVKVVPVQNNSAVPASKARVNHVAAAEAQDAPDVILVREYPDVFPDDLPERIHQTEFITMGSSGYYRRFIENFSKIAKPMTRLLQKDVKYKWSEESLEAKPTLIDQVREAQINDPDIQEIKKNRRRGKAIGFLEDEHGTPCSAVAPAVAAAREDRRRHRQVAAVLVRPFAAVGTRRSIVAVVNPKVAAASFSSPSPSVPFPPPFWSPVCSPRCPLRAGALRWCRGAAVRRRVSAARAVFFAEPPPSSVTSSLTSSGSYPVSRSWTD

SEQ ID NO: 20097 - protein, 1865 aa, Oryza sativa
  Clone ID: TF_OSC401057j.C1.p1.fg
MAEIDSIYHVAVADRMLTSAMTTPPAAARDLMVAGDLGHGGAIRGHYRDEGNSPVHDTTTDGDSGEEDRRRGRQVAAVLIRPFAVAEDHRSTVAAVDPISAAASSSSSSPSVPLPPSLWSPIPSFPESPFSPKKSLKSSKAGKETPGLEWYIPGLEIELCSRDGCSEWLGLYNRMPRYKPEYLFGVEGFVQELRTMSFVIGIGTAPFYAQIPHDRHEEKCRVKVTLNSNSEDIPSVMFEAGGRNYIHACQEVARIAIGELRDRYSDQLADTEYRYHPRQPQGSDRGSYLETEGIENDATTRHLVEMLWAMDESRAETVLAAQDREDRNRGKICKLEDKVDRLEKELAALKGEAPPQKARIRLTARKRALFVPRYQLAPKFPPVSLLVPCPCQMVNTRSNGNGPNNPNNNNNGENPTLAQVLAQQTQLMNMMMQQLQNQQNQGNNHAPPQNKLAEFLRVRPPTFSSTTNPVEAGDWLHAIEKKLDLLQCTDQEKVSFASHQLHGPASEWWDHFRLNRTTAEPITWLEFTAAFRKTHIPSGVVSLKKKEFRSLTQGSRSVTEYLHEFNRLACYAPEDVRNDEERQEKFLEGLNDELSYPLMTGDYSDFQKLVDKAIRQEDKYNRMEQKKRRMAQFKTQQGNNQRPRLTLGPQSMPHGGSSSVVRPQRQFFNNNAGNNIRNQAPRPVAVPTQQQPAKREQGSKPVVCFNCGDPGHYADKCPKPRRVKVVPAQSNSAVPASKARVNHVAAAEAQDAPDVILGTFLVNSVPTTVLFDSGVTHSFLSMSFAGNHGMEVEDLRRPLMVSTPSNQALSLQRSPSVRIEIKGVPFLANLILLESKDLDVILGMDWLARHKGVIDCANRKVTLTSNDGRVVTVHALSSESLRSRLNQITLEEIPIVQEYPDVFPDDLPGMPPKRDIEFRIDLVPGTTPIHKRPYRMAANELAEVKRQVDDLLQKGYIRPSSSPWGAPVIFVEKKDHTQRMCVDYRALNDVTIKNKYPLPRIDDLFDQLKGATVFSKIDLRSGYHQLRIKEEDIPKTAFTTRYGLFECTVMSFGLTNAPAFFMNLMNKVFMEYLDKFVVVFIDDILIYSRTKEEHEEHLRLALEKLREHQLYAKFSKCEFWLSEVKFLGHVISAGGVAVDPSNVESVTNWKQPKTVSEIRSFLGLAGYYRRFIENFSKIARPRTRLLQKDVKYKWSEECEQSFQELKNRLISAPILILPDPKKGFQVYCDASKLGLGCVLMQDGKVVAYASRQLRPHEKNYPTHDLELAAVVHALKIWRHYLFGTRTEVYTDHKSLKYIFTQPDLNMRQRRWLELIKEYDMGIHYHPGKANVVADALSRKGYCNATEGRQLPLELCKEFERLNLGIVSRGFVATLEAKPTLIDQVREAQINDPDIQEIKKNMRRGKAIGFLEDEHGTVWLGERICVPDNKDLKDAILKEAHDTLYSIHPGSTKMYQDLKERFWWASMKREIAEYVAVCDVCQRVKAEHQKPAGLLQPLKIPEWKWEEIGMDFITGLPRTSSGHDSIWVIVDRLTKVAHFIPVKTTYSGSRLAELYMARIVCLHGVPKKIVSDRGSQFTSNFWKKLQEEMGSKLNFSTAYHPQTDGQTERVNQILEDMLRACALDFGGSWDKNLPYAEFSYNNSYQASLQMAPYEALYGRKCRTPLLWDQTGERQVFGTDILREAKEKVKIIQERLRVAQSRHKSYADNRRRDLSFEEGDYVYLRVTPLRGVHRFHTKGKLAPRFVGPYKIVSRRGEVAYQLELPQSLAGVHNVFHVSQLKKCLRVPIEEANLEQIEVQEDLTYVEKPIRIMEIDERKTRNRVIRFCKVQWGNHSEEESTWEREDELKSAHPHLFASSSESRGRDSV

SEQ ID NO: 20098 - protein, 1406 aa, Oryza sativa
  Clone ID: TF_OSC401068j.C1.p1.fg
MNFRVDLGRDIEASDWLHAIEKKLDLLPCTDQEKVSFASHQLHGPASEWWDHFRLNRTTAEPITWLEFTAAFRKTHIPSGVVSLKKKEFRSLTQGSRSVTEYLHEFNRLARYAPEDVRNDEERQEKFLGGLNDELSYPLMVGDYPDFQKLVDKAIRQEDKYNRMEQKKRRIAQFKTQQGNNQKSRLTLGPQSMPQGGSSSVVRPQRQFFNNNAGNNIRNQAPRPVAAPAQQQPAKREQGSKPVVCFNCGDPGHYADKCPKPRRVKVVPAQSNSAVPASKARVNHVAAAEAQDAPDVILGTFLVNSVPATVLFDSGATHSFLSMSFAGNHGMEVEDLRRPLMVSTPSNQALSLQRSPSVRIEIQGVPFLANLILLESKDLDVILGMDWLARHKGVIDCANRKVTLNSYDGRVVTVHALSSESLRSRLNQITLEEIPIVREYPDVFPDDLPGMPPKRDIEFRIDLVPGTTPIHKRPYRMAANELAEVKRQVDDLLQKGYIRPSSSPWGAPVIFVEKKDHTQRMCVDYRALNDVTIKNKYPLPRIDDLFDQLKGATVFSKIDLRSGYHQLRIKEEDIPKTAFTTRYGLFECTVMSFGLTNAPAFFMNLMNKVFMEYLDKFVVVFIDDILIYSQTKEEHEEHLRLALEKLREHQLYAKFSKCEFWLSEVKFLGHVISAGGVAVDPSNVESVTNWKQPKTVSEIRSFLGLAGYYRRFIENFSKIAKPMTRLLQKDVKYKWSEECERSFQELKSRLISAPILILPDPKKGFQVYCDASKLGLGCVLMQDGKVVAYASRQLRPHEKNYPTHDIELAAVVHALKIWRHYLFGTRTEVYTDHKSLKYIFTQPDLNMRQRRWLELIKDYDMGIHYHPGKANVVADALSRKGYCNATEGRQLPLELCKEFERLNLGIVGRGFVAALEAKPTLIDQVREAQINDPDIQEIKKNMRRGKAIGFLEDEHGTVWLGERICVPDNKDLKDAILKEAHDTLYSIHPGSTKMYQDLKERFWWASMKREIAEYVAVCDVCQRVKAEHQKPAGLLQPLKIPEWKWEEIGMDFITGLPRTSSGHDSIWVIVDRLTKVAHFIPVKTTYSGSRLAELYMARIVCLHGVPKKIVSDRGSQFTSNFWEKLQEEMGSKLNFSTAYHPQTDGQTERVNQILEDMLRACALDFGGSWDKNLPYAEFSYNNSYQASLQMAPYEALYGRKCRTPLLWDQTGERQVFGTDILREAEEKVKIIQERLRVAQSRYKSYADNRRRDLSFEEGDYVYLRVTPLRGVHRFQTKGKLAPRFVGPYKIVSRRGEVAYQLELPQSLAGVHNVFHVSQLKKCLRVPTEEANIDQIEVQEDLTYVEKPIRILETNERRTRNRVIRFCKVQWSNHSEEESTWEREDELKSAHPLLFASSSESRGRDSV

SEQ ID NO: 20099 - protein, 1253 aa, Oryza sativa
  Clone ID: TF_OSC401143j.C1.p24.gm
MAATGNHRGTGALPPAGRADVAAFGRDEWPPRGARPSAAHALGVKAFFLSVGRVDAVASEDPLYVEVEADLRRILTDLVHPSVSHADRRSTVDPVHPSRAAAFLRSDVSWPGLGEAGRYTRRLPSAVPAWPPSGAPRGCRVGPGCQPPTPLGAADAWDPRRRPVRARVRPVHRGPWGCRVGPTPVDPANEGYTSCGPVVDMSWHRAGVLLLGAQSCLPVPEVPAVASCALASPSPPPLQPCSAAVPDVAVAREDRRRGRQVVAVLVRPFAVAGDRRSFVAVDNPKVSAVSSSSPSSFVVFPPPFWSPVCSPRRPLRAGALRLRPRAAVRRRACAARAVRSAEPPPLSVTSLPTSSGSSAVSRPEYLFGVEGFVQELRTMSFAIGFGTAPFYAQIPHDRHEEKCRVKVTLNSNSEEVPSVMFEAGGRNYVHACQEVARIAIGELRDSYSDQLADTEYRYHPRQPQGSDRGSYLETEGIENDATTRHLVEMLWAMDESRAETVLAAQDREDRNRGKICKLEDKVDRLEKELAALKGEAPPQKARIRLTARKRALFVPRYQLAPKVRVVEKEVAPSQADPPVIIISDEEEESKRNNSKIEWVATQDDEDEPNEPSIDLRCLEELDFPPVSLLVPCSCQMVNTRSNGNGPNNPNNNNNGENPTLAQVLAQQTQLMNMMMQQLQNQQNQGNNHAPPQNKLAEFLRVRPPVFSSTTNPVEAGDWLHAIEKKLDLLQCTDQEKVSFASHQLHGSAFEWWDHFRLNRTTAEPITWLEFTAAFRKTHIPSGVVSLKKKEFRSLTQGSRSVTEYLHEFNRLARYAPEDVRNDEEHQEKFLGGLNDELSYPLMVGDYPDFQKLVDKAIRQEDKYNCMEQRKRRIAHFKAQQGSNQKPRFTLGPQSMPQGGSSSVVRPQRQFFNNNAGNNIRNQAPRPVAAPTQQQPAKREQGSKPVVCFNCGDPGHYADKCPKPRRVKVVPAQSNSAVPASKARVNHVAAAEAQDAPDVILDDILIYSRTKEEHEEHLRLALEKLREHQLYAKFSKCEFWLSEVKFLGHVISAGGVAVDPRYYRRFIENFSKIAKPMTRLLQKDVKYKWSEESPCALASPSPPPLQPCSAAVPDVAVAREDRRRGRQVVAVLVRPFAVAGDRRSFVAVDNPKVSAVSSSSPSSFVVFPPPFWSPVCSPRRPLRAGALRLRPRAAVRRRACAARAVRSAEPPPLSVTSLPTSSGSSAVSRYLSADRFGAEMANLSANGLALSFGT

SEQ ID NO: 20100 - protein, 417 aa, Oryza sativa
  Clone ID: TF_OSC401143j.C1.p4.fg
MSWQRVGALLLGAQSRLPVPGVPAVGGIRSVLLSMARMGWKLCHVFRLYTVVMFNREKGKNVSRHASSNSSFQLHPPLASRELTRVHPWSIPSMLLGSQLPLVGSQDQNQYVFDRAFATQVNELPMPEEDVPFCQDCREQGHYALNCPWVYTKEAPSFGLAGQASLNQPPRTKSSLQPSVQSREPNEENPLNPGNCFPPSLSYHVGSRTKHAKGKKSKNQKRKAPMRTEEEVRKMTITSTEWPPAGITIPRRQRGNTFRGARQLTQHLLSHGGRVSDSEGSDQVSSDYEYESPRRLGEEEMELKACTRCGEIGHIASMCLTLCPHCEEDHPPGECPTRKVTCFLCEGTNHVPKDCQLSVLLTKTAEIQRTTLRLSHQLVSSNSNLDDIIHSTNAPPAAPDSAINHSNNTFSTNHSLH

SEQ ID NO: 20101 - protein, 1779 aa, Oryza sativa
  Clone ID: TF_OSC401275j.C1.p46.fg
MIDYDDEIAHQTVVEWAMLKRLDTNSSVATNDNDKDAHQHLHSRSTMKIPSFPESPFSQKKSLKSSKASKATPGLECYIPGLEIELCSRGGCSEWLGLYNRMPRYKPEYLFGVEGFVQELRTMSFVIGFGTAPFYAQIPHDRHEEKCRVKVTLNSNSEDIPSVMFEAGGRNYIHACQEVARIAIGELRDRYSDQLADTEYRYHPRQPQGSDRGSYLETEGIENDATTKHLVEMLWAMDESRAETVLAAQDREDRNRGKICKLEDKVDRLEKELAALKGEAPPQKARIRLTARKRALFVPRYQLAPKMVNTRSNGNGPNNPNNNNNGENPTLAQVLAQQTQLMNMMMQQFQNQQNQGNNHAPPQNKLAEFLRVRPPVFSSTTNPVEASDWLHAIEKKLDLLQCTDQDKVSFASHQLHGPASEWWDHFRLNRTTAEPITWLEFTAAFRKTHIPSGVVSLKKKEFRSLTQGSRSVTEYLHEFNRLARYAPEDVRNDEECQEKFLGGLNDELSYPLMVGDYPDFQKLVDKAIRQEDKYNRMEQKKRRIAQFKTQQGNNQKPRLTLGPQSVPQGGSSSVVRPQRQFFNNNAGNNIRNQAPRPVAVPAQQQPAKREQGNKPVVCFNCGDPGHYADKCPKPRRVKVVPAQNNSAVPASKARVNHVAAAEAQGAPDVILGTFLVNSVPATVLFDSGATHSFLSMSFAGNHGMEVEDLRRPLMVSTPSNQALSLQRSPSVRIEIQGVPFLANLILLKSKDLDVILGMDWLARHKGVIDCANRKVTLNSYDGRVVTVHALSSESLRSRLNQITLEEIPIVREYPDVFPDDLPGMPPKRDIEFRIDLVPGTTPIHKRPYRMAANELAEVKRQVDDLLQKGYIRPSSSPWGAPVIFVEKKDHTQRMCVDYRALNDVTIKNKYPLPRIDDLFDQLKGATVFSKIDLRSGYHQLRIKEEDIPKTAFTTRYGLFECTVMSFGLTNAPAFFMNLMNKVFMEYLDKFVVVFIDDILIYSRTKEEHEEHLRLALEKLREHQLYAKFSKCEFWLSEVKFLGHVISAGGVAVDPSNVESVTNWKQPKTVSEIRSFLGLAGYYRRFIENFSKIAKPMTRLLQKDVKYKWSEECEQSFQELKSRLISAPILILPDPKKGFQVYCDASKLGLGCVLMQDGKVVAYASRQLRPHEKNYPTHDIELAAVVHALKIWRHYLFGTRTEVYTDHKSLKYIFTQPDLNMRQRRWLELIKDYDMGIHYHPGKANVVVDALSRKGYCNATEGRQLPLELCKEFERLNLGIVGRGFVAALEAKPTLIDQVREAQINDPDIQEIKKNMRRGKAIGFLEDEQGTVWLGERICVPDNKDLKDAVLKEAHDTLYSIHPGSTKMYQDLKERFWWASMKREIAEYVAVCDVCQRVKAEHQKPAGLLQPLKIPEWKWEEIGMDFITGLPRTSSGHDSIWVIVDRLTKVAHFIPVKTTYSGSRLAELYMARIVCLHGVPKKIVSDRGSQFTSNFWKKLQEEMGSKLNFSTAYHPQTDGQTERVNQILEDMLRACALDFGGSWDKNLPYAEFSYNNSYQASLQMAPYEALYGRKCRTPLLWDQTGERQVFGTDILREAEEKVKVIQERLRVAQSRHKSYADNRRRDLSFEEGDYVYLRVTPLRGVHRFHTKGKLAPRFVGPYKIVSRRGEVAYQLELPQSLAGVHNVFHVSQLKKCLRVPTEEANIEQIEVQEDLTYVEKPIRILETNERRTRNRVIRFCKVQWSNHSEEESTWEREDELKSAHPHLFASSSESRGRDSV

SEQ ID NO: 20102 - protein, 1166 aa, Oryza sativa
  Clone ID: TF_OSC401329j.C1.p57.gm
MAAAHGEVPVEADPRALLFSPPPSPSPLVAGVVLAPCALASLSPPPLQPCAAVVPAVAVTREGRRRHRQVAAVLVRPFAAVGDRRSIVAVVKPKVAAASSSSPSPSVGRPPSPWSSVSSPCRPLPVGVLRLRPSAAVRRRVSAARAVFFAEPPPPSVTSSLASSSPSPMPCYKPEYLFGVEGFVQELRTMSFVIGFGTAPFYAQIRHDRHEEKCRVKVTMNSNSEDIPSAMFEAGGRNYIHACQEVARIAIGELRDSYSDQLADTEYRYHPRQPQGSDRGSYLETEGIENDATTRHLVEMLWAMDESRAETVLAAQDREDRNRGKICKLEDKVDRLEKELAALKGEAPPQKARIRLTARKRALFVPRYQLAPKIRVVEKEVAPANPPVIIISSDEEEEPKRNNSKFEWEKVSFASHQLHGPASEWWDHFRLNRTTAEPITWLEFTAAFRKTHIPSGVVSLKKKEFRSLTQGSRSVTEYLHEFNRLARYAPEDVRNDEERQEKFLGGLNDELSYPLMVGDYPDFQKLVDKAIRQEDKYNRMEQKKRRIAQFKTQQGNNQKPRLTLGPQSMPQGGSSSVVRPQRQFFNNNAGNNIRNQAPRPVAAPAQQQPAKREQGNKPVVCFNCGDPGHYADKCPKPRRVKVVPAQNNSAVPASKARVNHVATAEAQDAPDVILVREYPDVFPDDLPANELAEVKRQVDDLLQKGYIRPSSSPWGAPVIFVEKKDHTQRMCVDYRALNDVTIKNKYPLPRIDDLFDQLKGATVFSKIDLRSGYHQLRIKEEDIPKTAFTTRYGLFECTVMSFGLTNAPAFFMNLMNKVFMEYLDKFVVVFIDDILIYSRTKEEHEEHLRLALEKLREHQLYAKFSKCEFWLSEVKFLGHVISAGGVAVDPSNVESVTNWKQPKTVSEIRSFLGLAGYYRRFIENFSKIAKPMTRLLQKDVKYKWSEESLEAKPTLIDQVREAQINDPDIQEIKKNMRRGKAIGFLEDEHGTDPRALLFSPPPSPSLLVAGVVLAPCALASLSPPPLQPCAVAVTREGRRRHRQVAAVLVRPFAAVGDRRSIVAVVKPKVAAASSSSPSPSVGRPPSPWSSVSSPCRPLPVGVLRLRPSAAVRRRVSAARAVFFAEPPPPSVTSSLASSSPSPVSRRGLVRSRPSDLDRINLGRPFA

SEQ ID NO: 20103 - protein, 1480 aa, Oryza sativa
  Clone ID: TF_OSC401340j.C1.p13.fg
MPRYKPEYLFGVEGFVQELRTMSFAIGFGTAPFYAQIPHDRHEEKCGVKVTLNSNSEDIPSVMFEAGGRNYIHTCQEVARIAIGELRDRYSDQLADTEYRYHPRQPQGSDRGSYLKTEGIENDATTRHLVEMLWAMDESRVETVLAAQDREDRNRGKICKLEDKVDRLEKELAALKGEAPPQKARVRLTARKRALFVHRYQLAPKMVLTRSNGNGLNNNNNNNNNNGENPTLAQVLAQQAHLMNMMMQQLQNQQNQGNNHAPPQNKLAEFLRVRPPTFSSTTNPVEAGLLLNLSLGLTAAFRKTHIPSGVVSLKKKEFRSLTQGSRSVTEYLHEFNRLARYAPEDVRTDEERQEKFLEGLNDELSYPLMTGDYPDFQKLVDKAIRQEDKYNRMEQKKRRIAHFKTQQGNNQRPRLTLGPQSMPQGGSSSVVRPQRQFFNNNAGNNIRNQAPRPVAASTQQQPAKKEQGSNPVVCFNCGDPGHYADKCPKPRRVKVVPAQSNSTAPASKARVNHVAAAEAQDAPDVILGTFLVNLVPATVLFDSGATHSFLSMSFAGNHGMEVEDIRRPLLVSTPSNQALSLQRSPSVRIEIQGVPFLANLILLESKDLDVILGMDWLARYKDDLPGMPPKRDIEFRIDLVPGTTPIHKRPYRMAANELAEVKRQVDNLLQKGYIRPSSSPWGAPVIFVEKKDHTQRMCVDYRALNDVTIKNKYPLPRIDDLFDQLKGATVFSKIDLRSGYHQLRIKEEDIPKTAFTTRYGLFECTVMSFGLTNAPAFFMNLMNKVFMEYLDKFVVVFIDDILIYSRTREEHEEHLRLALEKLREHQLYAKFISEIRSFLGLAGYYRRFIENFSKIAKPMTRLLQKDVKYKWSEECEQSFQELKNRLISAPILILPDPKKGFQVYCDASKLGLGCVLMQDGKVVAYASHQLRPHEKNYPTHDLELAAVVHALKIWRHYLFGTRTELPLELCKEFERLNLGIVSRGFVAALEAKPTLIDQVREAQINDSDIQEIKKNMRRGKAIGFLEDEQGTVWLGERICVPDNKDLKDAILKEAHDTLYSIHPGSTKMYQDLKERFWWASMKREIAEYVAVCDVCQRVKAEHQKPAGLLQPLKIPEWKWEEIGMDFITGLPRMSSGHDSIWVIVDRLTKVAHFIPVKTTYSGSRLAELYMARIVCLHGVPKKIVSDRGSQFTSNFWKKLQEEMGSKLNFSTAYHPQADGQTERVNQILEDMLRACALDFGGSWDKNLPYAELSYNNSYQASLQMAPYEALYGRKCRTPLLWDQKGERQVFGTDILREAEEKVKIIQERLRVAQSRHKSYADNRRRDLSFEEGDYVYLRVTPLRGVHRVHTKGKLAPRFVGPYKIVSRRGEVAYQLELPQSLAGVHNVFHVSQLKKCLRVPTEEANLEQIEVQEDLTYVEKPIRILEIDERRTRNRVIRFCKVQWSNHSEEESTWEREDELKSAHPHLFASSSESRGRDSV

SEQ ID NO: 20104 - protein, 1779 aa, Oryza sativa
  unsure (1)..(1779): unsure at all Xaa locations
  Clone ID: TF_OSC401449j.C1.p1.np
AAAREDRRRHRQVAAVLVLAAVGTRRSFVAVDNPKVAAASFSSPSSSVIPSFPESPFSQKKSLKSSKASKATPGLEWYIPGLEIELCSRGGCSEWLGLYNRMPRYKPEYLFGVEGFVQELRTMSFVIGFGTAPFYAQIPHDRHEEKCRVKVTLNSNSEEVPSVMFEAGGRNYIHACQEVARIAIGELRDRYSDQLADTEYRYHPRQPQGSDRGSYLETEGIENDVTTKHLVEMLWAMDESRAETVLAAQDREDRNRGKICKLEDKVDRLEKELAALKGEAPPQKARIRLTARKRALFVPRYQLAPKMVNTRSNGNGPNNPNNNNNGENPTLAQVLAQQTQLINMMMQQFQNQQNQGNNHAPPQNKLAEFLRVRPPVFSSTTNPVEASDWLHAIEKKLDLLQCTDQEKVSFASHQLHGPASEWWDHFRLNRTTAEPITWLEFTAAFRKTHIPSGVVSLKKKEFRSLTQGSRSVTEYLHEFNRLARYAPEDVRNDEERQEKFLGGLNDELSYPLMVGDYPDFQKLVDKAIRQEDKYNRMEQKKRRIAQFKTQQGNNQKPRLTLGPQSMPQGGSSSVVRPQRQFFNNNAGNNIRNQAPRPVAAPAQQQPAKREQGNKPVVCFNCGDPGHYADKCPKPRRVKVVPAQNNSAVPASKARVNHVAAAEAQDAPDVILGTFLVNSVPATVLFDSGATHSFLSMSFAGNHGMEVEDLRRPLMVSTPSNQALSLQRSPSVRIEIQGVPFLANLILLESKDLDVILGMDWLARHKGVIDCANRKVTLNSYDGRVVTVHALSSESFRSRLNQITLEEIPIVREYPDVFPDDLPGMPPKRDIEFRIDLVPGTTPIHKRPYRMAANELAEVKRQVDDLLQKGYIRPSSSPWGAPVIFVEKKDHTQRMCVDYRALNDVTIKNKYPLPRIDDLFDQLKGATVFSKIDLRSGYHQLRIKEEDIPKTAFTTRYGLFECTVMSFGLTNAPAFFMNLMNKVFMEYLDKFVVVFIDDILIYSXTKEEHEEHLRLALEKLREHQLYAKFSKCEFWLSEVKFLGHVISAGGVAVDPSNVESVTNWKQPKTVSEIRSFLGLAGYYRRFIENFSKIAKPMTRLLQKDVKYKWSEECEQSFQELKSRLISAPILILPDPKKGFQVYCDASKLGLGCVLMQDGKVVAYASRQLRPHEKNYPTHDIELAAVVHALKIWRHYLFGTRTEVYTDHKSLKYIFTQPDLNMRQRRWLELIKDYDMGIHYHPGKANVVADALSRKGYCNATEGRQLPLELCKEFERLNLGIVGKGFVAALEAKPTLIDQVREAQINYPDIQEIKKNMRRGKAIGFLEDEHGTVWLGERICVPDNKDLKDAILKEAHDTLYSIHPGSTKMYQDLKERFWWASMKREIAEYVAVCDVCQRVKAEHQKPAGLLQPLKIPEWKWEEIGMDFITGLPRTSSGHDSIWVIVDRLTKVAHFIPVKTTYSGSRLAELYMARIVCLHGVPKKIVSDRGSQFTSNFWKKLQEEMGSKLNFSTAYHPQTDGQTERVNQILEDMLRACALDFGGSWDKNLPYAEFSYNNSYQASLQMAPYEALYGRKCRTPLLWDQTGERQVFGTDILREAEEKVKIIQERLRVAQSRHKSYADNRRRDLSFEEGDYVYLRVTPLRGVHRFHTKGKLAPRFVGPYKIVSRRGEVAYQLELPQSLAGVHNVFHVSQLKKCLRVPTEEANIEQIEVQEDLTYVEKPIRILETNERRTRNRVIRFCKVQWSNHSEEESTWEREDELKSAHPHLFASSSESRGRDSV

SEQ ID NO: 20105 - protein, 1578 aa, Oryza sativa
  Clone ID: TF_OSC401523j.C1.p2.fg
MMMDRGGVWMEGKRCRGRPCRCDAGGDGGGVADRCTARRDGRPNNSGEADGEVRGDVPAKPRAGRGGGRCGVAEGGDGDVGRRSGAATGAAGGDVDEEEGEAGAGDGVPAMFGRGGGDTGDEGGVVEPRKVVNTRSNGNGPNNPNNNNNEENPTLAQVLAQQTQLMNMMMQQLQNQQNQGNNHAPPQNKLAEFLRVRPPIFSSTTNPVEAGDWLHAIEKKLDLLQCTDQEKVSFASHQLHGPAFEWWDHFRLNRTTTEPITWLEFTAAFRKTHIPSGVVSLKKKEFRSLTQGSRSVTEYLHEFNRLARYAPEDVRNDEERQEKFLEGLNDELSYPLMTGDYSDFQKLVDKAIRQEDKYNRMEQKKRRIAQLKTQQGNIQKPRLTLGPQSMPQGGSSSIVRPQRQFFNNNAGNNIRNQAPRPVAAPAQQQPVKREQGSKPVVCFNCGDPGHYADKCPKPRRVKVVPAQSNSAVPASKARVNHVAAAEAQDAPDVILGTFLVNSVPATVLFDSGATHSFLSMSFAGNHGMEVEDLRRPLMVSTPSNQALSLQRSPSVRIEIQGVPFRANLILLESKDLDVILGMDWLARYKGVIDCANRKVTLTSNDGRVVTVHALSSESLRSRLNQITLEEIPIVREYPDVFPDDLPGMPPKRDIEFRIDLVLGTTPIHKRPYRMAANELAEVKRQVDDLLQKGYIRPSSSLWGAPVIFVEKKDHTQRMCVDYRALNDVTIKNKYPLPRIDDLFDQLKGATVFSKIDLRSGYHQLRIKEEDIPKTAFTTRYGLFECTVMSFGLTNAPVFFMNLMNKVFMEYLDKFVVVFIDDILIYSRTKEEHEEHFRLALEKLREHQLYAKFSKCEFWLSEVKFLGHVISAGGVAVDPSNVESVTNWKQPKTVSEIRSFLGLAGYYRRFIENFSKITKPMTRLLQKDVKYKWSEECEQSFQELKNRLISAPILILPDPKKGFQVYCDASKLGLGCVLMQDGKVVAYASRQLRPHEKNYPTHDLELAAVVHALKIWRHYLFGTRTEVYTDHKSLKYIFTQPDLNMRQRRWLELIKDYDMGIHYHPGKANVVADALSRKGYCNATEGRQLPLELCKEFERLNLGIVSRGFVAALEAKPTLIDQVRETQINDPDIQEIKKNMRRGKSIGFLEDEQGTVWLGERICFPDNKDLKNAILKEAHDTLYSIHPGSTKMYQDLKERFWWASMKREIAEYVAVCDICQRVKAEHQKPAGLLQPLKIPEWKWEEIGMDFITGLPRTSSGHDSIWVIVDRLTKVAHFIPVKTTYFGSRLAELYMARIVCLHGVPKKIVSDRGSQFTSNFWKKLQEEMGSKLNFSTAYHPQTDGQTERVNQILEDMLRACALDFGGSWDKNLPYAEFSYNNSYQASLQMAPYEALYGRKCRTPLLWDQTGERQVFGTDILREAEEKVKIIQERLRVAQSRHKSYADNRRRDLSFEEGDYVYLRVTPLRGVHRFHTKGKLAPRFVGPYKIVSRRGEVAYQLELPQSLAGVHNVFHVSQLKKCLRVPTEEANLEQIEVQEDLTYVEKPIRILEIDERRTRNRVIRFCKVQWSNHSEEESTWE

SEQ ID NO: 20106 - protein, 1330 aa, Oryza sativa
  Clone ID: TF_OSC401566j.C1.p14.fg
MVRCGGLCYARGIVTAPFRAPGLEWYIPGLEIELCSRDGCSEWLGLYNRMPRYKPEYLFGVEGFVQELRTMSFAIGFGTAPFYAQIPHDRHEEKCRVKVTLNSNSEDIPSVMFEAGGRNYIHACQEVARIAIGELRDRYSDQLADTEYRYHPRQPQGSDRGSYLETEGIENDATTRHLVEMLWAMDETRAETVLAGQDREDRNRGKICKLEDKVDRLEKELAALKGEAPPQKARIHLTARKRALFVPRYQLAPKVRVVEKEVTPAPADPPVVNNKLAEFLRVRPPIFSSTTNPVEAGDWLHAIEKKLDLLQCTDQEKVSFASHQLHGPASEWWDHFRLNRTTAEPITWLEFTAAFRKTHIPSGVVSLKKKEFRSLTQGSRSVTEYLHEFNRLARYAPEDVRTDEERQEKFLEGLNNELSYPLMTGDYPDFQKLVDKAIRQEDKYNRMEQKKRRIAQFKTQQGNNQRPRLTLGPQSMPQGGSSSVVRPQCQFLNNNAVNNIRNQAPRPVVASTQQQPAKREQGSKPVVCFNCGDPGHYADKCPKPRRVKVVPAQSNSTAPASKARVNHVAAAEAQDAPDVILGTFLVNLVPATVLFDSGATHSFLSMSFAGNHGMEVENFRRPMMVSTPSNQALYLQRSPSVRIEIQGIPFLANLILLESKDLDVILGMDWLARYKGVIDCANRKVTLTSDDGRVVTVHALSSESLRSRLNQITLEEIPIVREYPDVFPDDLPGMPPKRDIEFRIDLVPGTTPIHKRPYRMAANELAEVKRQVDDLLQRGYIRPSSSPWGAPVIFVEKKDHTQRMCVDYRALNDVTIKNKYPLPRIDDLFDQLKGATVFSKMDLRSGYHQLRIKEEDIPKTAFTTRYGLFECTVMSFGLTNAPAFFMNLMNKVLMEYLDKFVVVFIDDILIYSRTREEHEEHLRFALEKLREHQLYAKFSCVLMQDGKVVAYASRQLRPHEKNYPTHDLELATVVHALKIWRHYLFGTRTEVYTDHKSLKYIFTQPDLNMRQRRWLELIKDYDMGIHYHPGKANVVADALSRKGYCNATEGRQLPLELCKEFERLNLEIVSRAFVAALEAKPTLIDQVREAQINDPDIQEIKKNMRRGKAIGFLEDEQGTVWLGERICVPDNKDLKDAILKEAHDTLYSIHPGSTKMYQDLKERFWWASMKREIAEYVAVCDVCQRVKAEHQKPAGLLQPLKIPEWKWEEIGMDFITGLPRTSSGHDSIWVIVDRLTKVAHFIPVKTTYSGSRLAELYMARIVCLHGVPKKIVSDRGSQFTSNFWKKLQEEMGSKLNFSTAYHPQTDGQTERVNQILEDMLRACALDFGGS

SEQ ID NO: 20107 - protein, 751 aa, Oryza sativa
  Clone ID: TF_OSC401688j.C1.p7.gm
MVNTRSNGNGLNNLNNNNPNNNNGENPTLAQEKVSFASHQLHGPASEWWDHFRLNRTTAEPITWLEFTAAFRKTHIPSGVVSLKKKKFRSLTQGSRSVTEYLHEFNRLARYAPEDVRNDEERQEKFLGGLNDELSYPLMVGDYPDFQKLVDKAIRQEDKYNRMEQKKRRIAQFKTQQGNNQKPRLTLGPQPMPQGGSSSVVRPQRQFFNNNAGNNIRNQAPRPVAAPAQQQPAKREQGSKPVVCFNCGDPGHYADKCPKPRRVKVVPAQNNSAVPASKARVNHVAAAEAQDAPDVILVREYPDVFPEDLPERIHQTEFITMGSSGYYRRFIENFSKIAKPMTRLLQKDVKYKWSEESLEAKPTLIDQVREAQINDPDIQEIKKNMRRGKAIGFLEDEHGTVWLGERICVPDNKDLKDAILKEAHDTLYSIHPGSTKMYQDLKERFWWATVAVAREGRRRHRQVAAVLVRPFAAVGTRRSFVAVDNPKMPRYKPEYLFGVEGFVQELRTMSFVIGFGTALFYAQIRHDRHEEKCRVKVTLNSNSEEVPSVMFEAGGRNYIHACQEVARIAIGELRDRYSDRLADTEYRYHPRQPQGSDRGSYLETEGIENDATTRHLVEMLWAMDESRAETVLAAQDREDRNRGKICKLEDKVDRLEKELAALKGEAPPQKARIRLTARKRALFVPRYQLAPKIRVVEKEVAPANPPVIIISSDEEEEPKRNNSKFEWVAIKDEEDEPNEPSIDLLCSEELE

SEQ ID NO: 20108 - protein, 994 aa, Oryza sativa
  Clone ID: TF_OSC401832j.C1.p3.gm
MVNTRSNGNGPNLNNPNNNNNGENPTLAQVLAQQTQLMNMMMQQLQNQQNQGNNHAPPQNKLAEFLRVRPPIFSSTTNPVEASDWLHALEKKLDLLQCTDQEKVSFASHQLHGPASEWWDHFRLNRTTAEPITWLEFTAAFRKTHIPSGVVSLKKKEFRSLTQGSRSVTEYLHEFNRLARYAPEDVRNDEERQEKFLEGLNDELSYPLMTGDYSDFQKLVDKAIRQEDKYNRMEQKKRRIAQFKIQQGNNQKPRLILGHQSMPHGGSSSVVRPQRQFFNNNAGNNNRNQAPRLIAASTQQQPAKREQGSKLVVCFNCGDPGHYADKCPKPRRVKVVPAQSNSTAPVSKARVNHVAAAEAQDALDVILDDLPANELAEVKRQVDDLLQKGYIRPSSSPWGAPVIFVEKKDHTQRMCVDYRALNDVTIKNKYPLPRIDDLFDQLKGATIFSKIDLRSGYHQLRIKEEDIPKTAFTTKYGLFECTVMSFGLTNAPAFFMNLMNKVFMEYLDKFVVVFIDDILIYSRTKEEHEEHLRLALEKLREHQLYAKFSKCEFWLFEVKFLGHVISAGGVAVDSSNVESVTNWKQPKTVSEIRSFLGLAGYYRRFIENFSKIAKPMTRLLQKDVKYKWSEEWRDIDQVREAQINDPDIQEIKKNMRRGKAIGFLEDEHGTPCAAVAPAVAVAREGRRRVRRRVAVLVLPFATAEDRRSVIAVVDPKSFAASSSSPSPSVDLPPSFWSPRRLETIPFFVADITVPAAGRHPARSGRGGTDLAVAAAATGATPLATGAGWREAPPPPSLRSLLATAQAAARWRRKKEREGVAGLVASGAVPGVGRRKSVTVDAVRSLQRWELHGCGSMEAVAMTTDPEAGPPFATPYGGSGWWRRANGVARRPVAGAGATREGGDNGQPKKENRWGPTAAGMEMMAGMEGGGEDGDSGPDPVAPESGRSGVRQARSGGGAAEFAGSWRWWWQRLDSGDNRWLANGSIGCRLLWQRR

SEQ ID NO: 20109 - protein, 1504 aa, Oryza sativa
  Clone ID: TF_OSC401836j.C1.p9.fg
MVVQNGWAYATGVYTHMPRYKPEYLFGVEGFVQELRTMSFVVGFGTAPFYAQIPHDRHEEKCRVKVTLNSNSEDIPSVMFEAGGRNYIHSCQEVARIAIGELRDRYSDQLADTEYRYHPRQPQGSDRGSYLETEGIENDATTTHLVEMLWAMDESRAETVLAAQDREDWNRGKICKLEDKVDRLEKELAALKGEAPPQKVRIRLTARKRALFVPRYQLAPKVRVVEKEVAPADPPVVNMVNTRSNGNGPNPNNPNNNNNGENPTLAQVLAQQTQLMHMMMQQLQNQQNQGNNHAPPQNKLAEFLRVRPPIFSSTTNPVEAADWLHAIEKKLDLLQCTDQEKVSFASHQLHGPASEWWDHFRLNRTTAEPITWLEFTAAFRKTHIPSGVVSLKKKEFRSLTQGSRTVTEYLHEFNRLARYAPENVRNDEERQEKFLEGLNDELSYPLMTGDYSDFQKLVDKAIRQEDKYNRMEQKKRQIAQFKTQQGNNQRPRLTLGPQSMPHGGSSSVVRPQRQFFNNNVGNNIRNQVPRPVAAPTQQQPAKREQGSKPVVCFNCGDPGHYADKCPKPRRVKVVPVQSNSTAPASEARVNHVAAAEAQDAPDVILGTFLVNSVPATVLFDSGATHSFLSMSFAGNHGMEVEDLRRPLMVSTPSNQALSLQRSPSVRIEIKGVPFLANLILLESKDLDVILGMDWLARHKGMIDCANRKVTLSSNDGRVVTVHALSSESLRSRLTQVTLEEIPIVREYPDVFPDDLPGMPPKRDIEFRIDLVPGTTPIHNRPYRMAANELAEVKRQVDDLLQKGYIRPSSSLWGAPVIFVEKKDHTQRMCVDYRALNDVTIKNKYPLPRIDDLFDQLKDKFVVVFIDDILIYSRTKEEHEEHLRLALEKLREHQLHAKFSKYEFWLSEVKFLGHKDVKYKWSVECEQSFQELKSRLISAPILILPDPKKGFQVYCDASKLGLGCVLMQDGKVVAYASRQLRLHEKNYPTHDLELAAVVHALKIWHHYLFGTRTEVYTDHKSLKYIFTQPDLNMRQRRWLELIKDFDMGIHYHPGKANVVADALSRKSYCNATEGRQLPLELCKEFERLNLGIVRRGFVAALEAKSTLIDQVREAQINDPDIQEIKKNMRRGKAIGFLEDEQGTVWLGERICVPDNKDLKDAILKEAHDTLYSIHPGSTKMYQDRKERFWWASMKREIAEYVALCDVCQRVKAEHQKPAGLLQPLKIPEWKWEEIGMDFITGLPRTSSGHDSIWVIVDRLTKVAHFIPVKTTYSGSRLAELYMARIVCLHGVPKKIVSDRGSQFTSNFWKKLQEEMGSKLNFSTAYHPQTDGQTERVNQILEDMLRACALDFGGSWDKNLPYAEFSYNNSYQASLQMAPYEALYGRKCRTPLLWDQTGERQVFGTDILREAEEKVKIIQERLRVAQSRHKSYADNHRRDLSCILREIMCIFVSRLFEEFIVFTPKENWHRVLWDLIRLSVEEEKLLISWSYLNLWQESIMCSMCRN

SEQ ID NO: 20110 - protein, 456 aa, Oryza sativa
  Clone ID: TF_OSC401920j.C1.p4.np
EGAAGERRKRAEEAKRAPFVPKHRRSPVSLRRPSCRAAEPPPPVVTSSLTSSSPSPVSRGSGNNNNEDNPTLAQVLAQQTQLMNMMIQQMQNQLNQGNNNAPPPQNKLANFLRVRPPTFSSTTNPVEAGDWLHTIEKKLDLLQCTDQEKVSFASHQLHGPASEWWDHFRLNRTTAEPITWLEFTAAFRKTHIPSGVVSLKRKEFRSLTQGSRSVTEYLHEFNRLARYAPEDVRTDEERQEKFLEGLNDELSYPLMTGDYHDFQKLVDKAIRQEDKYNRMEQKKRRIAQFKTQQGNNQKPRLTLGPQSMPQGGSSSVVRPQRQFFNNNAGNNIRNQAPRPVAASTQQQPAKREQGSKPVVCFNCGDPGHYADKCPKPRRVKVVPAQSNSTAPAPKARVNHVAAAEAQDAPDVILGTFLVNLVPATVLFDSGATHSFLSMSFAGNHGIEVEFMKFPLW

SEQ ID NO: 20111 - protein, 1012 aa, Oryza sativa
  Clone ID: TF_OSC401925j.C1.p12.gm
MDDRECGAHLSGPSPTSSRRQRIPQPPHRSLPHLLGHVAHPKVSFAVAVAVGLRRRLRAPLKGSPPCSAVAPAVAAAREDRRRHRQVAAVLVRPFAAVGTRRSFVAVDNPKRRRSPVSVRRPSRPLRRAAAAVGDVIAGVIKAVRRGSGDRPPFVVASHSFLAAVRRRPSVPAESSGSDRGSYLETEGIENDATTKHLVEMLWAMDESRAETVLAAQDREDRNRGKICKLEDKVDRLEKELAALKGEAPPQKARIRLTARKRALFVPRYQLAPKVRVVEKEVAPAQADPPVIIISSDEEEESKRNNSKIEWEKVSFASHQLHGPASEWWDHFRLNRTTAEPITWLEFTAAFRKTHIPSGVVSLKKKEFRSLSQGSRSVTEYLHEFNRLARYAPEDVRNDEERQEKFLGGLNDELSYPLMVGDYPDFQKLVDKAIRQEDKYNRMEQKKRRIAQFKTQQGNNQKPRLTLGPQPMPQGGSSSVVRPQRQFFNNNAGNNIRNQAPRPVAAPAQQQPAKREQGNKPVVCFNCGDPGHYADKCPKPRRVKVVPAQNNSAVPASKARVNHVAAAEAQDAPDVILVREYPDVFPDDLPANELAEVKRQVDDLLQKGYIRPSSSPWGAPVIFVEKKDHTQRMCVDYRALNDVTIKNKYPLPRIDDLFDQLKGATVFSKIDLRSGYHQLRIKEEDIPKTAFTTRYGLFECTVMSFGLTNAPTFFMNLMNKVFMEYLDKFVVVFIDDILIYSRTKEEHEEHLRLALEKLREHQLYAKFSKCEFWLSEVKFLGHVISAGGVAVDPSNVESVTNWKQPKTVSEIRSFLGLAGYYRRFIENFSKIAKPMTRLLQKDVKYKWSEESLEAKPTLIDQVREAQINDPDIQEIKKNMRRGKAIGFLEDEHGTPKVSFAVAVAVGLRRRLRAPLKGSPPCSAVAPAVAAAREDRRRHRQVAAVLVRPFAAVGTRRSFVAVDNPKRRRSPVSVRRPSRPLRRAAAAVGDVIAGVIKAVRQEEFYNEADGVED

SEQ ID NO: 20112 - protein, 1402 aa, Oryza sativa
  Clone ID: TF_OSC404471j.C1.p39.gm
MASKRILKELKDLQKDPPTSCSAGPAGEDMFHWQATIMGPPDSPYAGGVFLVNIHFPPDYPFKPPKVSFKTKVFHPNINSNGSICLDILKEQWSPALTISKVLLSICSLLTDPNPDDPLVPEIAHMYKTDRPKRERAAAARRRRRSKSSARRRRDPPGRLSAGCHAVVEGCLSVPPLDRPLPLRPASWPLVPPAKSPRDLPHRPGCPAGRRHCSTTPPAATAHDAEAGSERRRAGRLSAWPAVLRRQPPPLDPAIAAQRAHYRGPLPPPPSPFKRLPASPSPPSLQPCAAVAPAVAVAREDRRRGRQVAAVLVRLFAAVGDRRSFIAVDNPKVSAVSSSSPSSFVVPPPSLWSPMPRYKPEYLFGVEGFVQELRTMSFVIGFGNAPFYTQIPHYRHEEKCRVKVTLNSNSEEVPSVMFEAGGRNYIHACQEVARIAIGELRDRYSDQLADTEYRYHPRQPQGSDRGSYLETEGIENDATTRHLVEMLWAMDESRAETVLAAQDREDRNRGKICKLEDKVDRLEKELAALKGEAPPQKARVRLTARKRALFVPRYQLAPKVRVVEKEVAPTLADPPVIIISDDEEEGSKRTRSKIEWVATQDDEDEPNEPSIDLRCSEELDNGNGPNNPNNNNGENPTLAQVLAQQTQLMNMMMQQLQNQQNQGNNHVPPQNKLAEFLRVRPPVFSSTTNPVEAGDWLHAIEKKLDLLQCTDQEKVSFASHQLHGPASEWWDHFRLNRITAEPITWLEFAAAFRKTHIPSGVVSLKKKEFRSLTQGSRSVTEYLHEFNRLARYAPEDVRNDEERQEKFLEGLNDELSYPLMTGDYPDFQKLVDKAIRQEDKYNRMEQKKRRIAHFKAQQGSNQKPRLTLGPQPMPQGGSSSVVHPQRQFFNNNAGNNIRNQAPRPVAASTQQQPAKREQGSKLVVCFNCGDPGHYADKCPKPRRVKVVPAQNNSTVPASKARVNHVAAAEAQDAPDVILVREYPDVFPDDLPERIHQTKFVTMGSSSYFCGKERPYPENLKGATVFSKIDLRSGYHQLRIKEEDISKTAFTTRALAPCALASPSPPSLQPCAAVAPAVAVAREDRRRGRQVAAVLVRLFAAVGDRRSFVAVDNPKVSAVSFSSPSSFVVPPPSLWSPMPRYKPEYLFGVEGFVQELRTMSFVIGFGNAPFYTQIPHYRHEEKCRVKVTLNSNSEEVPSVMFEAGGRNYIHACQEVARIAIGELRDRYSDQLADTEYRYHPRQPQGSDRGSYLETEGIENDATTRHLVEMLWAMDESRAETVLAAQDREDRNRGKICKLEDKVDRLEKELAALKGEAPPQKARVRLTARKRALFVPRYQLAPKVRVVEKEVAPTLADPPVIIISDDEEEGSKRTRSKIEWVATQDDEDEPNEPSIDLRCSEELE

SEQ ID NO: 20113 - protein, 835 aa, Oryza sativa
  Clone ID: TF_OSC405035j.C1.p5.gm
MGESGLKQEMVNAASPTTMQTQAAPCAAAVPDVAVAREDRRRGRQVVAVLVRLFVAAEDRRSTVAAVNPKSAAASSSSPSPSVPLPPSLWSPMPRYKPEYLFGVEGFVQELRTMSFVIGFGTAPFYAQIPHDRHEEKCRVKVTLNSNSEDIPSVMFEAGGRNYIHACQEVARIAIGELRDRYSDQLADTEYRYHPRQPQGSDRGSYLETEGIENDATTRHLVEMLWAMDETRAETVLAAQDHEDRNRGKICKLEDKVDRLEKELAALKGEAPPQKARVRLTARKRVLFVPRYQLAPKVRVVEKEVAPTLADPPVIIISDDEEEESKRNHSKIEWVATQDDEDEPNEPSIDLRCSEGLDTTNPVEAGDWLHAIEKKLDLLQCTDQEKVSFASHQLHGTASEWWDHFRLNRTTVEPITWLEFTAAFRKTHIPSGVVSLKKREFRSLTQGSRSVTEYLHEFNRLARYAPEDVRNDEERQEKFLEGLNDELSYPLMTGDYPDFQKLVDKAIRQEDKYNRMEQKKRRIAQFKAQQGNSQKPRLTLEPQSMPQGGSSSVVRPQRQFFNNNAGNNIRNQAPRPVVAPTQQQPAKREQGSKPVVCFNCGDPGHYADKCPKPRRVKVVPAQSNFTAPAPKARVNHVAAAEAQDAPDVILVKFLGHVISAGGVAVDPSNVESVTNWKQPKTVSEIRSFLGLAGYYRRFIENFSKIAKPMTRLLQKDVKYKWSEEYVAVAREDRRRGRQVVAVLVRLFVAAEDRRSTVAAVNPKSAAASSSSPSPSVPLPPSLWSPMVGALCQSLAWSLTNANDVDALYEPFSLKEDCFVLSILHGNHQFREVETC

SEQ ID NO: 20114 - protein, 563 aa, Oryza sativa
  Clone ID: TF_OSC406028j.C1.p24.gm
MVNTRSNGNGPNNNNNNNNGENPTLAQVLAQQTQLMNMMMQQLQNQQNQGNNHAPPQNKLAEFRRVRPPIFSSTTNPVEAGDWLHAIEKKLDLLQCTDQEKVSFASHQLHGTASEWWDHFRLNRTTVEPITWLEFTAAFRKTHIPSGVVSLKKREFRSLTQGSRSVTEYLHEFNRLARYAPEDVRNDEERQEKFLEGLNDELSYPLMTGDYPDFQKLVDKAIRQEDKYNRMEQKKRRIAQFKAQQGNSQKPRLTLEPQSMPQGGSSSVVRPQRQFFNNNAGNNIRNQAPRPVVAPTQQQPAKREQGSKPVVCFNCGDPGHYADKCPKPRRVKVVPAQSNFTAPAPKARVNHVAAAEAQDAPDVILVREYPDVFPDDLPVKFLGHVISAGGVAVDPSNVESVTNWKQPKTVSEIRSFLGLAGYYRRFIENFSKIAKPMTRLLQKDVKYKWSEEYVAVAREDRRRGRQVVAVLVRLFVAAEDRRSTVAAVNPKSAAASSSSPSPSVPLPPSLWSPMVGALCQSLAWSLTNANDVDALYEPFSLKEDCFVLSILHGNHQFREVETC

SEQ ID NO: 20115 - protein, 1334 aa, Oryza sativa
  Clone ID: TF_OSC409249j.C1.p3.gm
VPHGLLYPPPPSPSPLVVGIALASCALALPPPPPLQPCAAVVPAVAVAREGHRRDRQVVTVVVRPFAAAEDRRSVIAVVDPKSFAVSSSSPSPSVDLPSPFWSPVSSPCRPLCLGAFRLCPRAAVRRRACAARAVRPAEPPPPSVTSPLTSSKPSAMPRYKPEYLFGVEGFVQELRTMSFVIGFGTAPFYAQIRHDRHEERCRVKVTLNSNSEDIPSVMFEAGGRNYIHACQEVARIAIGELRDRYSDQLADTEYRYHPRQPQGSDRSSYLETEGIENDVTTRHLVEMLWAMDESRAETVLAAQDREDWNRGKICKLEDKVDRLEKELAALKGEAPPQKARIRLTARKRALFVPRYQLAPKVRVVEKEVAPADPPVVNVSDDEEEPKHTHSKIEWVATQDDEEEPNEPSIDLRCSEELDNGNGPNNPNNNNGENPTLAQVLAQQTQLMHMMMQQLQNQQNQGNNHATPQNKLAEFLRVRPPVFSSTTNPVETGDWLHAIEKKLDLLQCTDQEKVSFASHQLHGPASEWWDHFRLNRTTAEPITWLEFTTAFRKTHIPSGVVSLKKKEFRSLTQGSRSVTEYLHEFNRLARYAPEDVHNDEERQEKFLEGLNDELSYPLMTGDYSDFQKLVDKAIHQEDKYNRMEQKKRRIAQFKTQQGNNQKPRLTLGPQSMPPGGSSSVVRPQRQFFNNNAGNNIRNQVPRPVVAPTQQQPAKREQGSKPVVCFNCGDPGHYADKCPKPRRVKVVPAQSNSTAPVSKARVNHVAAAEAQDAPDVILVREYSDVFPDDLPANELAEVKRQVDDLLQKGYIRPSSSPWGAPVIFVEKKDHTQRMCVDYRALNDVTIKNKYPLPRIDDLFDQLKGATVFSKIDLRSGYHQLRIKEEDIPKTAFTTRYGLFECTVMSFGLTNAPAFYMNLMNKVFMEYLDKFVVVFIDDILIYSRTKEEHEEHLRLALEKLREHQLYAKFSKCEFWLSEVKFLGHVISAGGVAVDPSNVESVTNWKQPKTVSEIRSFLGLAGYYRRFIENFSKIAKPMTRLLQKDVKYKWSEESVAVAREGHRRDRQVVAVLVRPFAAAEDRRSVIAVVDPKSFAVSSSSPSPSVDLPSPFWSPVSSPCRPLCLGAFHLCPRAAVRRRACAARAVRPAEPPLPSVTSPLTSSRPSARGSLRGTRLRSGGDKPTGVAGESMPCYKGVIMIQEGALQWIVLYKGYCHNSFPRYRGGIEAHGDMIHGNAELADDALERALDAVIGFSSSFRPNRTTPSRTLAPPGSPRRPLQDTPRKPIQWRSDLGDRHRVLQLHSIASIIDSILSADVIPGVVPCRHGASPSLWLCRHP

SEQ ID NO: 20116 - protein, 918 aa, Oryza sativa
  Clone ID: TF_OSC410860j.C1.p1.gm
MPRYKPEYLFGVEGFVQELRTMSFVIGFGTAPFYAQIPHDRHEEKCRVKVTLNSNSEEVPSVMFEAGGRNYIHACQEVARIAIGELRDRYSDQLADTEYRYHPRQPQGSDRGSYLETEGIENDVTTKHLVEMLWAMDESRAETVLAAQDREDRNRGKICKLEDKVDRLEKELAALKGEAPPQKARIRLTARKRALFVPRYQLAPKVRVVEKEVAPAQADPPVIIISSDEEEESKRNHSKIEWVATQDDEDEPSIDLRCLEELDTTNPVEASDWLHAIEKKLDLLQCTDQEKVSFASHQLHGPASEWWDHFRLNRTTAEPITWLEFTAAFRKTHIPSGVVSLKKKEFRSLSQGSRSVTEYLHEFNRLARYAPEDVRNDEERQEKFLGGLNDELSYPLMVGDYPDFQKLVDKAIRQEDKYNRMEQKKRRIAQFKTQQGNNQKPRLTLGPQSMPQGGSSSVVRPQRQFFNNNAGNNIRNQAPRPVAAPAQQQPAKREQGNKPVVCFNCGDPGHYADKCPKPRRVKVVPAQNNSAVPASKARVNHVAAAEAQDAPDVILVREYPDVFPDDLPANELAEVKRQVDDLLQKGYIRPSSSPWGAPVIFVEKKDHTQRMCVDYRALNDVTIKNKYPLPRIDDLFDQLKGATVFSKIDLRSGYHQLRIKEEDIPKTAFTTRYGLFECTVMSFGLTNAPAFFMNLMNKVFMEYLDKFVVVFIDDILIYSRTKEEHEEHLRLALEKLREHQLYAKFSKCEFWLSEVKFLGHVISAGGVAVDPSNVESVTNWKQPKTVSEIRSFLGLAGYYRRFIENFSKIAKPMTRLLQKDVKYKWSEESLEAKPTLIDQVREAQINDPDIQEIKKNMRRGKAIGFLEDEQGTPCSAVAPAVAAAREDRRRHRQVAAVLVRPFAAVGTRRSFVAVDNPK

SEQ ID NO: 20117 - protein, 1550 aa, Oryza sativa
  Clone ID: TF_OSC412750j.C1.p1.fg
PGLEWYIPGLEIELCSRDGCSDWLGLYNRMPRYKPEYLFGVEGFVQELRTMSFAIGFGTAPFYAQIPHDHHEKKCRVKVTLNSNSEDIPSVMFEAGGRNCIHACQEAARIAIGELRDRYSDQLADTEYRYHPRQPQGSDRGSYLETEGIENDATTRHLVEMLWAMDESRAETVLAAQDREDRNRGKICKLEDKVDRLEKELAILKGEAPPQKARIRLTARKRALFVPRYQLAPKVRVVEKEVAPALADPPVIIISDDEEEESKHNHSKIEWVATQDDEDEPNEPSIDLRCSEELDGITTNPVEAGDWLHAIEKKLDLLQCTDQEKVSFASHQLHGPASEWWDHFRLNRTTAEPITWLEFTAAFRKTHIPSGVVSLKKKEFRSLTQGSRSVTEYLHEFNRLARYAPEDVRNDEERQEKFLEGLNDELSYPLMTGDYHDFQKLVDKAIRQEDKYNRMEQKKRRIAQFKTQQGNNQKSRLTLGPQSMPQGGSSSVVRPQRQFFNNNAGNNIRNQAPRPVTAPTQQQPAKREQGSKPVVCFNCGDPGHYADKCPKPRRMKVVPAQNNSTVPASKARVNHVAAAEAQDAPDVILDDLPGMPPKRDIEFRIDWVPGTTPIHKRPYRMAANELAEVKRQVDDLLQKGYIRPSSSPWGAPVIFVEKKDHTQRMCVDYRALNDVTIKNKYPLPRIDDLFDQLKGATVFSKIDLRSGYHQLRIKEEDIPKTAFTTRYGLFECTVMSFGLTNAPTFFMNLMNKVFMEYLDKFVVVFIDDILIYSRTREEHEEHLRLALEKLREHQLYTKFSKCEFWLSEVKFLGHVISAGGVAVDPSNVESVTNWKQPKTVSEIHSFLGLAGYYRRFIENFSKIAKPMTRLLQKDVKYKWSEECEQSFQELKNRLISAPILILPDPKKGFQVYCDASKLGLGCVLMQDGKVVAYASRQLRPHEKNYPTHDLELAAVVHALKIWRHYLFGTRTEVYTDHKSLKYIFTQPDLNMRQRRWSELIKDYDMGIHYHPGKANVVADALSRKGYCNATEGRQLPLELCKEFERLNLGIVSRGFVAALEAKPTLIDQVREAQINDPDIQEIKKNMRRGKAIGFLEDEHGTVWLGERICVPDNKDLKDAILKEAHDTLYSIHPGSTKMYQDLKERFWWASMKREIAEYVAVCDICQRVKAEHQKPAGLLQPLKIPEWKWEEIGMDFITGLPRTSSGHDSIWVIVDRLTKVAHFIPVKTTYSGSRLAELYMARIVCLHGVPKKIVSDRGSQFTSNFWKKLQEEMGSKLNFSTAYHPQTDGQTERVNQILEDMLRACALDFGGSWDKNLPYAEFSYNNSYQASLQMAPYEALYGRKCRTPLLWDQTGERQVFGTDILREAEEKVKIIQERLRVAQSRHKSYADNRRRDLSFEEGDYAYLRVTPLRGVHRFHTKGKLAPRFVGPYKIVSRRGEVAYQLELPQSLAGVHNVFHVSQLKKCLRVPTEEANLEQIEVQEDLTYVEKPIRILEIDERRTRNRVIRFCKVQWSNHSEEESTWEREDELKSAHPYLFASSSESRGRDSV

SEQ ID NO: 20118 - protein, 3395 aa, Oryza sativa
  Clone ID: TF_OSC412948j.C1.p13.fg
MVNTRSNGNGPNNPNNNNNGENPTLAQVLAQQTQLMNMMMQQFQNQQNQGNNHAPPQNKLAEFLRVRPPVFSSTTNPVEASDWLHAIEKKLDLLQCTDQEKVSFASHQLHGPASEWWDHFRLNRTTAEPITWLEFTAAFRKTHIPSGVVSLKKKEFRSLSQGSRSVTEYLHEFNRLARYAPEDVRNDEERQEKFLGGLNDELSYPLMVGDYPDFQKLVDKAIRQEDKYNRMEQKKRRIAQFKTQQGNNQKPRLTLGPQPMPQGGSSSVVRPQRQFFNNNAGNNIRNQAPRPVAAPAQQQPAKREQGNKPVVCFNCGDPGHYADKCPKPRRVKVVSAQSNSAVPASKARVNHVAAAEAQDAPDVILGTFLVNSVPATVLFDSGATHSFLSMSFAGNHGMEVEDLRRPLMVSTPSNQALSLQRSPSVRIEIQGVPFLANLILLESKDLDVILGMDWLARHKGVIDCANRKVTLNSYDGRVVTVHALSSESLRSRLNQITLEEIPIVREYPDVFPDDLPGMPPKRDIEFRIDLVPGTTPIHKRPYRMAANELAEVKRQVDDLLQKGYIRPSSSPWGAPVIFVEKKDHTQRMCVDYRALNDVTIKNKYPLPRIDDLFDQLKGATVFSKIDLRSGYHQLRIKEEDIPKTAFTTRYGLFECTVMSFGLTNAPAFFMNLMNKVFMEYLDKFVVVFIDDILIYSRTKEEHEELLRLALEKLREHQLFIENFSKIAKPMTRLLQKDVKYKWSEECEQSFQELKSRLISAPILILPDPKKGFQVYCDASKLGLGCVLMQDGKVVAYASRQLRPHEKNYPTHDIELAAVVHALKIWRHYLFGTHTEVYTDHKSLKYIFTQPDLNMRQRRWLELIKDYDMGIHYHPGKANVVADALSRKGHCNATEGRQLPLELCKEFERLNLGIVGRGFVAALEAKPTLIDQVREAQINDPDIQEIKKNMRRGKAIGFLEDEQGTVWLGERICVPDNKDLKDAILKEAHDTLYSIHPGSTKMYQDLKERFWWASMKREIAEYVAVCDVCQRVKAEHQKPAGLLQPLKIPEWKWEEIGMDFITGLPRTSSGHDSIWVIVDRLTKVAHFIPVKTTYSGSRLAELYMARIVCLHGVPKKIVSDRGSQFTSNFWKKLQEEMGSKLNFSTAYHPQTDGQTERVNQILEDMLRACALDFSGSWDKNLPYAEFSYNNSYQASLQMAPYEALYGRKCRTPLLWDQTGERQVFGTDILREAEEKVKIIQERLRVAQSRHKSYADNRRRDLSFEEGDYVYLRVTPFRGVHRFHTKEKLAPRFVGPYKIVSRRGEVAYQLELPQSLAGIHNVFHVSQLKKCLRVPTEEANIEQIEVQEDLTYVEKPIRILETTPGLEWYIPSLEIELCSRGGCSEWLGLYNRGSHTCKRLEFWIEIPGVTGKISLLDSVSDQSGENRISAPFGLPNAAESYFKTISIELASNHSGEIASSPTSPDQDDGAYPPILMKLPDDLAAVSITTASPSRRPRRKSASTPTSPSFREVGVILQPLGTVSTDQLDGYYSSPTVDSRPTDIVEYDEFSSRYNDPDLDDFDGSLDDNYTPLYFGVFMADNETEEQCQARETEARRETERRRLEEEHQAQEQERLRREQQERERTAKEAEDRRQRALEAGRRARDLIGQQDVEGTPVFRTPQQNAVAAITLLDTLLKENELNQSDHVVNILNQTKTMIAASVPVNSESVHTPTGSRVPHSRSHDYRHLSLSITGAGSNRRSRGHDERSVHSPPDHHRERRVERPRSPPRRRPVDLRDTIIQRRAARGHHHAPDRHDDDLDGVAAFTDDLRRVDWPAGFKPTGIEKYDGTTNPESWLTVYGLAIRAAGGDSKAMANYLPVALADSARSWLHGLPRGTIGSWAELRDHFIANFQGTFERPGTQYDLYNVIQKSGESLRDYIRRFSEQRNKISDITDDVIIAAFTKGIRHEELVGKFGRKPPKTVKLMFEKANEYAKAEDAVTASKQSGPSWKPNKGTPAKGGGGSNNHKDRKRKPEELVATATHSSRQRSRVNTFDKIMNSQCPHHPNSNHVAKDCFVYKQFAEQYTKTTRKNSDEEQSTSRKKDDGDTPAGFQDHRKELNHIFSGPLAYESKRKQKLTEREINAVQPDTPQYLRWSEIAIKFDRSDHPDRVVHPGRYPLVLDPVVRNVKLRRTLIDGGSALNILFAKTLDDMQIPRSELKPSNAPFHGVIPGLSATPLGQITLPVTFGTRENFRTENISFEVADFETTYHAILGRPALAKFMAVPHYTYMMTKMPGPRGVLSLRSDIKQAVTCDKESCDMAQTREMASAREDIRLAAATASEGEVPATKISKSGESEAKTKKIPLDPSDSTKTANNKDIFAWKPSDMPGIPREVIEHSLYVKEDAKPIKQRLRRFAQDRKDAIKEELTKLLAAGFIKEVLHPDWLANPVLVRKKTGQWRMCVDYTDLNKSCPKDPFGLPRIDQVVDSTAGCELLSFLDCYSGYHQIRLKESDCLKTSFITPFGAYCYVTMPFGLKNAGATYQRMIQRCFSTQIGRNVEAYVDDVVVKTKQKDDLISDLEETFASIRAFRMKLNPEKCTFGVLSGKLLGFMVSHRGIQANPEKITAILNMKPPSTQKDVQKLTGCMAALSRFVSRLGERGMPFFKLLKKTDDFQWGPDAQKAFEDFKKLLTEPPVLASPHPQEPLLLYIAAASQVVSTVLVVEREEEGHVQKVQRSIYFVSEVLADSKTRYPQVQKLLYGILITTRKLSHYFQSHSVTVVTSFPLGDILHNHEANGRIAKWALELMSLDISFKPRISIKSQALADFVAEWTECQEDTPAEKMEHWTMHFDGSKRLSGTGAGVVLISPTGERLSYVLWIHFSASHNVAEYEALLHGLRIAISLGIKRLIVRGDSQLVVNQVMKEWSCLDDNMMAYRQEVRKLEDKFDGLELSHVLRHNNEAADRLANFGSKREVAPSDVFVEHLYTPTVPHKDTTQIAGTHDVALVEADWREPLIRFLTSQELPQDKDEAERISRRSKLYVMHEAELYKKSPSGILQRCVSLEEGRQLLKDIHSGICGNHAAARTIVGKAYRQGFFWPTAVSDADKIVRTCEGCQFFARQIHLPAQELQTIPLSWPFAVWGLDMVGPFKKAVGGYTHLFVAIDKFSKWIEAKPVVTITADNARDFFINIVHRFGVPNRIITDNGRQFTGGVFKDFCEDFGIKICYASVAHPMSNGQVERANGMILQGIKARVFDRLKPYAGKWVKQLPSVLWSLRTTPSRATGQSPFFLVYGAEAMLPSEVEFESLRFRNFREERYEEDRVDDLHRLEEVREAALIQSARYLQGLRRYHNRNVRSRAFLVGDLVLRKIQTTRDRHKLSPLWEGPFIISEVTRPGSYRLKREDGTLVDNSWNIEHLRRFYA

SEQ ID NO: 20119 - protein, 1770 aa, Oryza sativa
  Clone ID: TF_OSC413683j.C1.p8.fg
MVRCGGLCYARGIVTAPFRAPGLEWYIPGLEIDLYSRMPHYKPEYLFGVEGFVQELRTMSFAIGFGTAPFYAQIPHDRHEEKCRVKVTLNSNSEDIPSVMFEAGGRNYIHACQEVARIAIGELRDRYSDQLADTEYRYHPRQPQGSDRGSYLETEGIENDATTRHLVEMLWAMDETRAETVLAAQDREDRNRGKICKLEDKVDRLEKELAALKGEAPPQKARVRLTARKRALFVPRYQLAPKVRVVEKEVTPALADPPVVNWWDVSACVCLLLSVRKLMVLTRSNGNGPNNNNNNNNNNNGENPTLAQVLAQQAQLMNMMMQQLQNQQNQGNNHAPPQNKLAEFLRVRPPIFSSTTNPVEAGDWLHAIEKKLDLLQCTDQEKVSFASHQLHGPASEWWDHFRLNRTTAEPITWLEFTAAFRKTHIPSGVVSLKKKEFRSLNQGSRSVTEYLHEFNRLARYALEDVRTDEERQERFLEGLNDELSYPLMTGDYPDFQKLVDKAIRQEDKYNRMEQKKRRIAQFKTQQGNNQRLRLTLGPQSMPQGGSSSVVRPQRQFFNNHAGNNIRNQAPRPVAASTQQQPAKREQGSKPVVCFNCGDPGHYADKCPKPRRVKIVPVQSNSTAPASKARVNRVAVAEAQGAPDVILGTFLVNLVPATVLFDSGATHSFLSMSFAGNHGMEVEDLRRPLMVSTPCNQALSLQRSPSVRIEIQGVPFLANLILLESKDLDVILGMDWLARYKGVIDCANRKVTLTSNEGQVVTVYALSSESLRSRLNQITLEEIPIVREYPDVFPDDLPGMPPKRGIEFRIDLVPGTTPIHKRPYRMAANELAEVKRQVDDLLQKGYIRPSSSPWGAPVIFVEKKDHTQRMCVDYRALNDVTIKNKYPLPRIDDLFDQLKGATVFSKIDLRSGYHQLRIKEEDIPKTAFTTRYGLFECTVMSFGLTNAPAFFMNLMNKVFMEYLDKFVVVFIDDILIYSRTKEEHEEHLRLALEKLREHQLYAKFSKCEFWLSEVKFLGHVISAGGVAVDPSNVESVTNWKQPKTVSEIRSFLGLAGYYRRFIENFSKIAKPMTRLLQKDVKYKWSEECEQSFQELKDRLISAPILILPDPKKGFQVYCDASKFGLGCVLMQDGKVVAYASRQLRPHEKNYPTHDLELDAVVHALKIWRHYLFGTRTEVYTDHKSLKYIFTQPDLNMRQRRWLELIKDYDMGIHYHPGKANVVADTLSRKGYCNATEGRQLPLELCKEFERLNLGIVSRGFVAALEAKPTLIDQVREAQINDPDIQEIKKNMRRGKAIGFLEDEQGTVWLGERICVPDNKDLKDAILKEAHDTLYSIHPGSTKMYQDLTEGFSWASMKREIAEYVAVCDVCQRVKAEHQKPAGLLQPLKIPEWKWEEIGMDFITGLPRTSSGHDSIWVIVDRLTKVAHFIPVKTTYSGSRLAELYMARIVCLHGVPKKIVSDRGSQFTSNFWKKLQEEMGSKLNFSTAYHPQTDGQTERVNQVLEDMLRACALDFGGSWDKNLPYAEFSYNNSYQASLQMAPYEALYGRKCRTPLLWDQTGERQVFGTDILREAEEKVKIIQERLRVAQSRHKSYADNRRRDLSFGKGDYVYLRVTPFRGVHRFHTKGKLAPRFVGPYKIVSRRGEVAYQLELPQSLAGVHNVFHVSQLKVFKAVAVARGGRHRGRQVVAVLVRPFVVAEDRRSTVAAVDPIFSAASTSSPSPSVDLPPPFWSPIPMFPESPFSQEKNLKSSKASKASHTDPKQPFEHVDPD

SEQ ID NO: 20120 - protein, 1008 aa, Oryza sativa
  Clone ID: TF_OSC414224j.C1.p3.gm
MPRYKPEYLFGVEGFVQELRTMSFVIGFGTAPFYAQIPHDRHEEKCRVKVTFNSNSEDIPSVMFEAGGRNYIHVCQEVARIAIGELRDRYSDQLADTEYRYHPRQPQGSDRGSYLETEGIENDATTKHLVEMLWAMDESRAETVLAAQDREDRNRGKICKLEDKVDRLEKELAALKGEAPPQKARIRLTARKRALFVPRYQLAPKVRVVEKEVAPAQADPPVIIISSDEEEESKRINSKIEWVATQDDKDKPSIDLRCLEELDTTNPVEASDWLHAIEKKLDLLQCTDQEKVSFASHQLHGPASEWWDHFRLNRTTAEPITWLEFTAAFRKTHIPSGVVSLKKKEFRSLTQGSRSVTEYLHEFNRLARYAPEDVRNDEERQEKFLGGLNDELSYPLMVGDYPDFQKLVDKAIRQEDKYNRMEQKKRRIAQFKTQQGNNQKPRLTLGPQPMPQGGSSSVVRPQCQFFNNNAGNNIRNQAPRPVAALAQQQPAKREQGSKPVVCFNCGDPGHYADKCPKPRRVKVVPAQNNSAVPASKARVNHVAAAEAQDAPDVILVREYPDVFPDDLPALEAKPTLIDQVREAQINDPDIQEIKKNMRRGKAIGFLEDEQGTVWLGERICVPDNKDLKDALLKEAHDTLYSIHPGSTKMYQDLKERFWWATVAVAREDHRRARQVVAVLVRPFAVAGDRRSFVAVDNPKVSAVSSSSSSSSVVFPPPFWSPVCSPRRPLRAGALRLRPGAAVRRQACAARAVRSAEPPPLSVTSPLTSSGSSAGIPAPTPPPYLAVVSRSSSSPPSPPPPPPPHLWGEQGQAMMERNKENAAKKKYHHYLGSGGYSVAMPKWEEMEASLLERGIEPATANWPERSKFWYYAQGGTLNPADGSLVFGDQIREAAHRLTDAMEASSQGTFRPDRERVELSLALQTPEHQGRTRGKGVIPWKIGFKEDIHTYRSRMRSKRDTLAKIADLEFRVSSYERIIQVEVARKVDERMAAHQSHDPQPTIPPAMVSP

SEQ ID NO: 20121 - protein, 1652 aa, Oryza sativa
  Clone ID: TF_OSC415905j.C1.p6.fg
MSFVISPTLLTIVNDAIFGNNLISSWFGMMPRYKPEYLFGVEGFVQELRTMSFAIGFGTAPFYAQIPHDRHEEKCRVKVTLNSNSEDIPSVMFEAGGRNYIHACQEVARIAIGELRDRYSDQLADTEYRYHPRQPQGSDRGSYLETEGIENDATTRHLVEMLWAMDESRAETVLAAQDREDRNRGKICKLEDKVDRLEKELATLKGEAPPQKARIRLTARKRALFVPRYQLAPKMVNTRSNGNGPNNPNNNNNGENPTLAQVLAQQTQLMNMMMQQLQNQQNQGNNHAPPQNKLAEFLRVRPPTFSSTTNPVEAGDWLHAIEKKLDLLQCTDQEKVSFASPQLHGPASEWWDHFRLNRTTAEPITWLEFTAAFRKTHIPSGVVSLKKKEFRSLTQGSRSVTEYLHEFNRLARYAPEDVRNDEERQEKFLEGLNDELSYPLMTGDYHDFQKLVDKAIRQEDKYNRMEQKKRRIAQFKTQQGNNQKPRLTLGPQSMPQGGSSSVVRPQRQFFNNNAGNNIRNQAPRPVAAPAQQQPAKREQGSKPVVCFNCGDPGHYADKCPKPRRVKVVPAQSNSTAPAPKARVNHVAAAEAQDAPDVILEDLRRPLMVSTPSNQALSLQRSPSVRIEIKGVPFLANLILLESKDLDVILGMDWLARHKGVIDCANRKVTLTRNDGRVVTVHALSSEFLRSRLNQIILEKIPIVREYPDVFPDDLPSMPPKRDIEFRIDLVPGTTPIHKRPYRMAANELAEVKRQVDNLLQKGYIRPSSSPWGAPVIFVEKKDHTQRMCVDYRALNDVTIKNKYPLPRIDDLFDQLKGATVFSKIDLRSGYHQLRIKEEDIPKTAFTTRYGLFECTVMSFGLTNAPAFFMNLMNKVFMEYLDKFVVVFIDDILIYSRTKEEHEEHLRLALEKLREHQLYAKFSKCEFWLSEVKFLGHVISAGGVAVDPSNVESVTNWKQPKTVSEIRSFLGLAGYYRRFIENFSKIAKPMTRLLQKDVKYKWSEECEQSFQELKNRLISAPILILPDPKKGFQVYCDASKLGLGCVLMQDGKVVAYASRQLRPHEKNYPTHDLELAAVVHALKIWRHYLFGTRTEVYTDHKSLKYIFTQPDLNMRQRRWLKLIKDYDMGIHYHPGKANVVADALSRKGYCNATEGRQLPLELCKEFERLNLGIVSRGFVAALEAKPTLIDQVREAQINDPDIQEIKKNMRRGKAIGFLEDEHGTVWLGERICVPDNKDLKDAILKEAHNTLYSIHPGSTKMYQDLKERFWWASMKREIAEYVAPLKIPEWKWEEIGMDFITGLPRTSSGHDSIWVIVDRLTKVAYFIPVKTTYSGSRLAELYMARIVCLHGVPKKIVSDRGSQFTSNFWKKLQEEMGSKLNFSTAYHPQTDGQTERVNQILEDMLRACALDFGGSWDKNLPYAEFSYNNSYQASLQMAPYEALYGRKCRTPLLWDQTGERQVFGTDILREAEEKVKVIQERLRVAQSRHKSYADNRRRDLSFEEGDYVYLRVTPLRGVRRFHTKGKLAPRFVGPYKIVSRRGEVAYQLELPQSLAGVHNVFHVSQLKKCLRVPTEEANLEQIEVQEDLTYVERPIRILEIDERRTRNRVIRFCKVQWSNHSEEESTWEREDELKSAHPHLFASSSESRGRDSV

SEQ ID NO: 20122 - protein, 1880 aa, Oryza sativa
  Clone ID: TF_OSC416072j.C1.p1.fg
MGSKLNFRTAYHPQTDGQTERVNQILEDMLRACALDFGGSWDKNLPYAEFSYNNSYQASLQMAPYEALYGRKCRTPLLWDQTGERQVFGMDILREAEEKVKIIQERLRVAQSRHKSYADNRRRDLSFEEGDYVYLRVTPLRGVHRFHTMGKLAPRFVGPYKIVSRRGEVAYQLELPQSLAGVHNVFHVSQLKKCLRVPTEEANIEQIEVQEDLTYIEKPIRILETTPGLEWYIPGLEIELCSRGGCSEWLGLYNRMPRYKPEYLFGVEGFVQELRTMSFVIGFGTAPFYAQIRHDHHEEKCRVKVTLNSNSEEVPSVMFEAGGRNYIHACQEVARIAIGELRDRYSDQLADTEYRYHPRQPQGSDRGSYLETEGIENDVTTKHLVEMLWAMDESRAETVLAAQDREDRNRGKICKLEYKVDRLEKELAALKGEAPPQKARIRLTARKRALFVPRYQLAPKMVNTRSNGNGPNNPNNNNNGENPTLAQVLAQQTQLMNMMMQQLQNQQNQGNNHAPPQNKLAEFLRVRPPVFSSTTNPVEASDWLHAIEKKLDLLQCTDQEKVSFASHQLHGPASEWWDHFRLNRTTAEPITWLEFTAAFRKTHIPSGVVSLKKKEFRSLSQGSRSVTEYLHEFNRLARYAPEDVRNDEERQEKFLGGLNDELSYPLMVGDYPDFQKLVDKAIRQEDKYNRMEQKKRRIAQFKTQQGNNQKPRLTLGPQPMPQGGSSSVVRPQRQFFNNNAGNNIRNQAPRLVAAPVQQQPAKREQGNKPVVCFNCGDPGHYADKCPKPRRVKVVPAQNNSAVPASKARVNHVAAAEAQDAPDVILGMFLVNSVPATVLFDSGATHSFLSMSFAGNHGMEVEDLRRPLMVSTPSNQALSLQRSPSVRIEIQGVPFLANLILLESKDLDVILGMDWLARHKGVIDCANRKVTLNSYDGRVVTVHALSSESLRSRLNQITLEEIPIVREYPDVFPDDLPGMPPKRDIEFRIDLVPGTTPIHKRPYRMAANELAEVKRQVDDLLQKGYIRPSSSPWGAPVIFVEKKDHTQRMCVDYRALNDVTIKNKYPLPRIDDLFDQLKGATVFSKIDLRPGYHQLRIKEEDIPKTAFTTRYGLFECTVMSFGLTNAPAFFMNLMNKVFMEYLDKFVVVFIDDILIYSRTKEEHEEHLRLALEKLREHQLYAKFSKCEFWLSEVKFLGHVISAGGVAVDPSNVESVTNWKQPKTVSEIRSFLGLAGYYRRFIENFSKIAKPMTRLLQKDVKYKWSEECERSFQELKSRLISAPILILPDPKKGFQVYCDASKLGLGCVLMQDGKVVAYASRQLRPHEKNYPTHDIELAAVVHALKIWRHYLFGTRTEVYTDHKSLKYIFTQPDLNMRQRRWLELIKDYDMGIHYHPGKANVVADALSRKGYCNATEGRQLPLELCKEFERLNLGIVDRGFVAALEAKPTLIDQVREAQINDPDIQEIKKNMKRGKAIGFLEDEHGTVWLGERICVPDNKDLKDAILKEAHDTLYSIHPGSTKMYQDLKERFWWASMKREIAEYVAVCDVCQRVKAEHQKPAGLLQPLKIPEWKWEEIGMDFITGLPRTSSGHDSIWVIVDRLTKVAHFIPVKTTYSGSRLAELYMARIVCLHGVPKKIVSDRGSQFTSNFWKKLQEEMGSKLNFRTAYHPQTDGQTERVNQILEDMLRACALDFGGSWDKNLPYAEFSYNNSYQASLQMAPYEALYGRKCRTPLLWDQTGERQVFGMDILREAEEKVKIIQERLRVAQSRHKSYADNRRRDLSFEEGDYVYLRVTPLRGVHRFHTMGKLAPRFVGPYKIVSRRGEFAYQLELPQSLAGVHNVFHVSQLKKCLRVPTEEANIEQIEVQEDLTYIEKPIRILET

SEQ ID NO: 20123 - protein, 1656 aa, Oryza sativa
  unsure (1)..(1656): unsure at all Xaa locations
  Clone ID: TF_OSC416688j.C1.p1.np
RKSAQNLSSLSSAQIPSFPESPFSQKKSLKSSKASKATPGLEWYIPGLEIELCSWDGCSEWLGLYNRMPRYKPEYLFGVEGFVQELRTMSFVIGFGTAPFYAQIPHDRHEEKCRVKVTLNSNSEDIPSVMFEAGGRNYIHACQEVARIAIGELRDRYSDQLADTEYRYHPRQPQGSDRGSYLETEGIENDATTKHLVELLWAMDESRAETVLAAQDREDRNRGKICKLEDKVDRLEKELAALKGEAPPQKARIRLTARKRALFVPRYQLAPKMVNTRSNGNGPNNPNNNNNGENPTLAQVLAQQTQLMNMMMQQFQNQQNQGNNHAPPQNNLAEFLRVRPPVFSSTTNPVEASDWLHAIEKKLDLLQCTDQEKVSFASHQLHGPASEWWDHFRLNRTTAEPVTWLEFTAAFRKTHIPSGVVSLKKKEFRSLTQGSRSVTEYLHEFNCLARYAPEDVRNDEERQEKFLGGLNDELSYPLMVGDYPDFQKLVDKAIRQEDKYNRMEQKKRRIAQFKTQQGNNQKPRLTLGPQPMPQGGSSSIVRPQRQFFNNNAGNNIRNQAPRPVAAPAQQQPAKREQGSKPVVCFNCGDPGHYADKCPKPRRVKVVPAQNNSAVPASKARVNHVAAAEAQDAPDVILGTFLVNSVPATVLFDSGATHSFLSMSFAGNHGMEVEDLRRPLMVSTPSNQALSLQRSPSVRIEIQGVPFLANLILLESKDLDVILGMDXLARHKGVIDCANKKVTLTSYDGRVVTVHALSSESLRSRLNQITLEEIPIVREYPDVFPDDLPGMPPKRDIEFRIDLVPGTTPIHKRPYRMAANELAEVKRQVDDLLQKGYIRPSSSPWGAPVIFVEKKDHTQRMCVDYRALNDVTIKNKYPLPRIDDLFDQLKGATVFSKIDLRSGYHQLRIKEEDIPKTAFTTRYGLFECTVMSFGLTNAPAFFMNLMNKVFMEYLDKFVVVFIDDILIYSRTKEEHEEHLRLALEKLREHQLYAKFSKCEFWLSEVKFLGHVISSGGVAVDPSNVESVTNWKQPKTVSEIRSFLGLAGYYRRFIENFSKIAKPMTRLLQKDVKYKWSEECERSFQELKSRLISAPILILPDPKKGFQVYCDASKLGLGCVLMQDGKVVAYASRQLRPHEKNYPTHDIELAAVVHALKIWRHYLFGTRTEVYTDHKSLKDIFTQPDLNMRQRRWLELIKDYDMRIHYHPGKANVVADALSRKGYCNATEGRQLPLELCKEFERLNLGIVSRGFVAALEAKPTLIDQVREAQINDPDIQEIKKNMRRGKAIGFLEDEQGTVWLGERICVPDNKDLKDAVLKEAHDTLYSIHPGSTKMYQDLKERFWWASMKREIAEYVAVCDVCQRVKAEHQKPVGLLQPLKIPEWKWEEIGMDFITGLPRTSSGHDSIWVIVDRLTKVAHFIPVKTTYSGSRLAELYMARIVCLHGVPKKIVSDRGSQFTSKFWKKLQEEMGSKLNFSTAYHPQTDGQTERVNQILEDMLRACALDFGGSWDKNLPYAEFSYNNSYQASLQMAPYEALYGRKCRTPLLWDQTGERQVFGTDILREAEEKVKIIQERLRVAQSRHKSYADNRRRDLSFEEGDYVYLRVTPLRGVHRFHTKGKLAPRFVGPYKIVSRRGEVAYQLELPQSLAGVHNVFHVS

SEQ ID NO: 20124 - protein, 1744 aa, Oryza sativa
  Clone ID: TF_OSC417326j.C1.p1.np
PPSLSSRPSPAIPSFPESPFLQKKSLKSSKASKATPGLEWYIPGLEIELCSRGGCSEWLGLYNRMPCYKPEYLFGVEGFVQELRTMSFVIGFGTAPFYAQIRHDRHEEKCRVKVTMNSNSEDIPSAMFEAGGRNYIHACQEVARIAIGELRDSYSDQLADTEYRYHPRQPQGSDRGSYLETEGIENDATTRHLVEMLWAMDESRAETVLAAQDREDRNRGKICKLEDKVDRLEKELAALKGEAPPQKARIRLTARKRALFVPRYQLAPKMVNTRSNGNGPNLNNPNNNNNGENPTLAQVLAQQTQLMHMMMQQFQNQQNQGNNHAPPQNKLAEFLRVRPPVFSSTTNPVEASDWLHAIEKKLDLLQCTDQEKVSFASHQLHGPASEWWDHFRLNRTTAEPITWLEFTAAFRKTHIPSGVVSLKKKEFRSLTQGSRSVTEYLHEFNRLARYAPEDVRNDEERQEKFLGGLNDELSYPLMVGDYPDFQKLVDKAIRQEDKYNRMEQKKRRIAQFKTQQGNNQKPRLTLGPQSMPQGGSSSVVRPQRQFFNNNAGNNIRNQAPRPVAAPAQQQPAKREQGNKPVVCFNCGDPGHYADKCPKPRRVKVVPAQNNSAVPASKARVNHVATAEAQDAPDVILGTFLVNSVPATVLFDSGATHSFLSMSFAGNHGMEVEDLRRPLMVSTPSNQALSLQRSPSVRIEIQGVPFLANLILLESKDLDVILGMDWLARHKGVIDCANRKVTLNSYDGRVVTVHALSSESLRSRLNQITLEKIPIVREYPDVFPDDLPGMPPKRDIEFRIDLVPGTTPIHKRPYRMAANELAEVKRQVDDLLQKGYIRPSSSPWGAPVIFVEKKDHTQRMCVDYRALNDVTIKNKYPLPRIDDLFDQLKGATVFSKIDLRSGYHQLRIKEEDIPKTAFTTRYGLFECTVMSFGLTNAPAFFMNLMNKVFMEYLDKFVVVFIDDILIYSRTKEEHEEHLRLALEKLREHQLYAKFSKCEFWLSEVKFLGHVISAGGVAVDPSNVESVTNWKQPKTVSEIRSFLGLAGYYRRFIENFSKIAKPMTRLLQKDVKYKWSEECEQSFQELKSRLISAPILILPDPKKGFQVYCDASKLGLGCVLMQDGKVVAYASRQLRPHEKNYPTHDIELAAVVHALKIWRHYLFGTRTEVYTDHKSLKYIFTQPDLNMRQRRWLELIKDYDMGIHYHPGKANVVADALSRKGYCNVTEGRQLPLELCKEFERLNLGIVGRGFVAALEAKPTLIDQVREAQINDPDIQEIKKNMRRGKAIGFLEDEHGTVWLGERICVPDNKDLKDAILKEAHDTLYSIHPGSTKMYQDLKERFWWASMKREIAEYVAVCDVCQRVKAEHQKPAGLLQPLKIPEWKWEEIGMDFITGLPRTSSGHDSIWVIVDRLTKVAHFIPVKTTYSGSRLAELYMARIVCLHGVPKKIVSDRGSQFTSNFWKKLQEEMGSKLNFSTAYHPQTDGQTERVNQILEDMLRACALDFGGSWDKNLPYAEFSYNNSYQASLQMAPYEALYGRKCRTPLLWDQTGERQVFGTDILREAEEKVKIIQERLRVAQSRHKSYADNRRRDLSFEEGDYVYLRVTPLRGVHRFHTKGKLAPRFVGPYKIVSRRGEVAYQLELPQSLAGVHNVFHVSQLKKCLRVPTEEANIEQIEVQEDLTYVEKPIRILETSERRTRNRVIRFCKVQWSNHSEEESTWEREDELKSAHPYLFVSSSESRGRDSV

SEQ ID NO: 20125 - protein, 1673 aa, Oryza sativa
  Clone ID: TF_OSC419125j.C1.p3.fg
MVWYTSDQSKTIRIAVPAVMGGSNNVFPPGLEWYIPGLEIELCSRDGCSEWLGLYNRMPRYKPEYLFGVEGFVQELRTMSFVIGFGTAPFYAQIPHDRHEEKCRVKVTLNSNSEEVPSVMFEAGGRNYIHACQEVARIAIGELRDRYSDQLADTEYRYHPRQPQGSDRGSYLETEGIENDATTRHLVEMLWAMDESRVETVLAAQDREDRNRGKICKLEDKVDRLEKELAALKGEAPPQKARIRLTARKRALFVPRYQLAPKGWDVSACVCLLLSVRKLFPPVSLLVPCPCQMVNTRSNGNGPNNNNNNNNGENPTLAQVLAQQTQLMNMMMQQLQNQQNQGNNHAPPQNKLAEFLRVRPPVFSSTTNHVEAGDWLHAIEKKLDLLQCTDQEKVSFASHQLHGPASEWWDHFRLNRITAEPITWLEFTAAFRKTHIPSGVVSLKKKEFRSLTQGSRSVTEYLHEFNRLARYAPEDVRNDEERQEKFLEGLNDELSYPLMTGEYSDFQKLVDKAIRQEDKYNRMEQKKRRIAHFKAQQGNNQKPRLTLGPQSMPHGGSSSVIRPQRQFFNNNAGNNIRNQVPRPVAAPTQQQPAKREQGSKPVVCFNCGDPGHYADKCPKPRRVKVVSTQSNSTVPASKARVNHVAAAEAQDAPDVILGTFPVNSVPATVLFDSGATHSFLSMSFAGNHGMEVEDLRRPLMVSTPSNQALSLQRSPSVRIEIKGVPFLANLILLESKDLDVILGMDWLARHKGVIDCANRKVTLTSNDGRVVTVHALSSESLRSRLNQITLEEIPIVREYPDVFPDDLPGMPPKRDIEFRIDLVPGTTPIHKRPYRMAANELAEVKRQVDDLLQKGYIRPSSSPWGAPVIFCGKERSYPEDLKSATVFSKIDLRSGYHQLRIKEEDIPKTAFTTRYGLFECTVMSFGLTNAPAFFMNLMNKVFMEYLDKFVVVFIDDILIYSRTKEEHEEHLRLALEKLREHQLYAKFSKCEFWLSEVKFLGHVISAGGVAVDPSNVESVTNWKQPKTVSEIHSFLGLAGYYRRFIENFSKIAKPMTRLLQKDVKYKWSEECEQSFQELKSRLISAPILILPDPKKGFQVYCDASKLGLGCVLMQDGKVVAYASRQLRPHEKNYPTHDLELAAVVHALKIWRHYLFGTRTEVYTDHKSLKYIFTQPDLNMRQRRWLELIKDYDMGIHYHPGKANVVADALSRKGYCNATEGQQLPLELFKEFERLNLGIVSRGFVAALEAKPTLIDQVREAQINDPDIQEIKKNMRRGKAIGFLEDEQGTRVKAEHQKPAGLLQPLKIPEWKWEEIGMDFITGLPRTSSGHDSIWVIVDRLTKVAHFIPVKTTYSGSRLAELYMARIVCLHGVPKKIVSDRGNQFTSNFWKKIQEEMGSKLNFSTAYHPQTDEQTERVNQILEDMLRACALDFGGSWDKNLPYAEFSYNNSYQASLQMAPYEALYDRKCRTPLLWDQMGERQVFGTDILREAEEKVKIIQERLRVAQSRHKSYADNRRRDLSFEEGDYVYLRVTPLRGVHRFHTKGKLAPRFVGPYKIVSRRGEVAYQLELPQSLAGVHNVFHVSQLKKCLRVPTEEANLEQIEVQEDLTYVEKPIRILEIDERRTRNRVIRFCKVQWSNHSEEESTWEREDELKSAHPHLFASSSESRGRDSV

SEQ ID NO: 20126 - protein, 1283 aa, Oryza sativa
  Clone ID: TF_OSC5437j.C1.p1.fg
PGLEWYIPGLEIELCSRDGCSERLGLCNRMPRYKPEYLFGVEGFVQELCTMSFAIGFGTAPFYAQIPHDRHEEKCRVKVTLNSNSDEIPSVMFEAGGRNYIHACQEVARIAIGELRDRYCDQLADTEYRYHPRQPQGSDRGSYLETEGIENDATTRHLVEMLWAMDETRAETVLAAQDREDRNRGKICKLEDKVDRLEKELAALKGEAPPQKARVRLTARKRALFVPRYQLAPKMVLTRSNGNGPNNNNNNNNNNGENPTLAQVLAQQTQLMNIMMQQLQNQQNQGNNHAPPQNKLAEFLRVRPPTFSSTTNPVEAGDWLHAIEKKLDLLQCTDQEKVSFASHQLHGPASEWWDHFRLNRTTTEPITWLEFTAAFRKTHIPSGVVSLKKKEFRSLTQGSRSVTEYLHEFNRLARYAPEDVRTDEERQEKFLEGLNDELSYPLMTGDYPDFQKLVDKAIRQEDKYNRMEQKKRQIAQFMAQQGNSQRPRLTLGPQSMPQGGSSSVVRPQRQFFNNNAGNNLRNQAPRPVAAPTQQQPAKREQGSKPVVCFNCGDPGHYADKCPKPRRVKVVPAQSNSTAPASKARVNHVAAAEAQDAPDVILGTFLVNLVPATVLFDSGATHSFLSMSFAGNHGMEVEDLRRPLMVSTPSNQALSLQRSPSVRIEIQGVPFLANLILLESKDLDVILGMDWLARYKGVIDCANRKVTLTSNDGRVVTVHALSSESLRSRLNQITLEEILVVREYPDVFPDDLRGMPPKRDIEFRIDLVPGTIPIHKRPYRMAANELAKVKRQVDERTTVAIGVIRGFVAALEAKLTLIDQVREAQINDPDILEIKKNMRRGKAIGFLEDEQGTVWLGERICVPDNKDLKDAILKEAHDTLYSIHPGSTKMYQDLKERFWWRVKEEHQKPAGLLQSLKIPEWKWEEIGMDFITGLPRTSSGHDSIWVIVDRLTNVAHFIPVKTTYSGSRLAELYMARIVCLHGVPKKIVSDRGSQFTSNFWKKLQEEMGSKLNFSTAYHPQTDGQTERVNQILEDMLRACTLDFGGSWDKNLPYAEFSYNNSYQASLQMAPYEALYIRKCRTPLLWDQTGERQVFGTDILREVEEKVKIIQERLRVAQSRHKSYADNRRRDLSFEEGDYVYLRVTPLRGVHRFHTKGKLAPRFVGPYKIVSRRGEVAYQLELPQSLAGVHNVFHVSQLKKCLRVPIEEANLEQIEVQEDLTYVERPIRILEIDERRTRNRVIRFCKVQWSNHSEEESTWEREDELKSAHPHLFASSSESRGRDSV

SEQ ID NO: 20127 - protein, 787 aa, Oryza sativa
  Clone ID: TF_OSC5659j.C1.p1.gm
MTSAVTSPPAAVARRLGLACSPANDGTAARTEGTNGRAAPPLQPPSSVAVATIGIARSSPSPSTASPPPKTAGAPPSPSTRRPPPLLPHGRRRPLLFRRGFGHRALAPSSLEPPSPPSLQPCAAAVPVIAVAREDHRRGRQVAAVLVRPFAVAEDRRSTVAVVKPKSSAVSTSSPSPSVGLPPLLWSSASMRVRAAEPPPPVVRQGEEKPGRTSSFVAGRRSSPLPVKPSRRRRSSRRRPSSFVVWLKGEYRWVRLVVLHVYMSSKFAADHPISGEVANPGRPLMIRAEQPSPPSPPLAATAISTTNPVEAGDWLHAIEKKLDLLQCTDQEKVSFASHQLHGPASEWWDHFRLNRTTAEPITWLEFTAAFRKTHIPSGVVSLKKKEFRSLTQGSRSVTEYLHEFNRLARYAPEDKLVDKAIRQEDKYNRIEQKKRRIAQFKTQQGNSQRPRLTLGPQSMPQGGSSSVVRPQRQFFNNNAGNNIRNQALRPVAASTQQQPAKREQGRKPVVCFNCGDPGHYADKCPKPRRVKVVPAQSNSTAPAPKARVNHVAAAEAQDAPDVILERIHQTEFISMGSSGYFCGKERPYPEDLKGATVFSKIDLRSGYHQLRIKEEDIPKTAFTTRYGLFECTVMSFGLTNAPAFFMNLMNKVFMEYLDKFVVVFIDDILMIGARIRDTDFLQGDDILWINFRGIYELYQLDALDVSIMSCWILMEIQRARRRRVFDTGFIDPRRVNVTMLDQYPQETEDNLVHLLKAQHYKTFILLPYNIEFHWVLLLFDLSACTVN

SEQ ID NO: 20128 - protein, 1730 aa, Oryza sativa
  unsure (1)..(1730): unsure at all Xaa locations
  Clone ID: TF_OSC5663j.C1.p2.np
MSFVISLTPLIIIKELCSRDGLCSRDGCSERLGLCNRMPRYKPEYLFGVEGFVQELCTMSFAIGFGTAPFYAQIPHDRHEEKCRVKVTLNSNSDEIPSVMFEAGGRNYIHACQEVARIAIGELRDRYCDQLADTEYRYHPRQPQGSDRGSYLETEGIENDATTRHLVEMLWAMDETRAETVLAAQDREDRNRGKICKLEDKVDRLEKELAALKGEAPPQKARVRLTARKRALFVPRYQLAPKFSPVSLLVPCPCQMVLTRSNGNGPNNNNNNNNNNGENPTLAQVLAQQTQLMNIMMQQLQNQQNQGNNHAPPQNKLAEFLRVRPPTFSSTTNPVEAGDWLHAIEKKLDLLQCTDQEKVSFASHQLHGPASEWWDHFRLNRTTTEPITWLEFTAAFRKTHIPSGVVSLKKKEFRSLTQGSRSVTEYLHEFNRLARYAPEDVRTDEERQEKFLEGLNDELSYPLMTGDYPDFQKLVDKAIRQEDKYNRMEQKKRQIAQFMAQQGNSQRPRLTLGPQSMPQGGSSSVVRPQRQFFNNNAGNNLRNQAPRPVAAPTQQQPAKREQGSKPVVCFNCGDPGHYADKCPKPRRVKVVPAQSNSTAPASKARVNHVAAAEAQDAPDVILGTFLVNLVPATVLFDSGATHSFLSMSFAGNHGMEVEDLRRPLMVSTPSNQALSLQRSPSVRIEIQGVPFLANLILLESKDLDVILGMDWLARYKGVIDCANRKVTLTSNDGRVVTVHALSSESLRSRLNQITLEEIPIVREYPDVFPDDLPGMPPKRDIEFRIDLVPGTTPIHKRPYRMATNEFAEVKRQVDDLLQKGYIRPSSSPWGAPVIFVEKKDHTQRMCVDYRALNDVTIKNKYPLPRIDDLFDQLKGATIFSKIDLRSGYHQLRIKEEDIPKTAFTTRYGLFECTVMSFGLTNAPTFFMNLMNKVFMEYLDKFVVVFIDDILIYSRTKEEHEEHLRLALEKLREHQLYAKFSKCEFWLSEVKFLGHVISAGGVAVDPSNVESVTNWKQPKTVSEIRSFLGLAGYYRRFIENFSKIAKPMTRLLQKDVKYKWSEECEQSFQELKDRLISAPILILPDPKKGFQVYCDASKLGLGCVLMQDGKVVAYASRQLRPHEENYPTHDLKLAAVVHALKIXRHYLFGTRTEVYTDHKSLKYIFTQPDLNMRQRRWLELIKDYDMGIHYHPGKANVVADALSRKGYCNATKGRQLPLELCKEFERFNLGIASRGFVAALEAKPILIDQVREAQINDPDILEIKKNMRRGKAIGFLRDEQGTVWLGEKICVPDNKDLKDAILKEAHDTLYSIHLGSTKMYQDLKERFWWASMKREIAEYVAVCDVCQRVKAEHQKPAGLLQPLKIPEWKWEEIGMDFITGLPRTSSGHDSIWVIVDRLTKVAHFIPVNTTYSGSRLAELYMARIVCLHGVPKKIVSDRGSQFTSNFWKKLQEEMGSKLNFSTAYHPQTDGQTERVNQILEDMLRACTLDFGGSWDKNLPYAEFSYNNSYQASLQMAPYEALYIRKCRTPLLWDQTGERQVFGTDILREVEEKVKIIQERLRVAQSRHKSYADNRRRDLSFEEGDYVYLRVTPLRGVHRFHTKGKLAPRFVGPYKIVSRRGEVAYQLELPQSLAGVHNVFHVSQLKKCLRVPIEEANLEQIEVQEDLTYVERPIRILEIDERRTRNPVIRFCKVQWSNHSEEESTWEREDELKSAHPHLFASSSESRGRDSV

SEQ ID NO: 20129 - protein, 729 aa, Oryza sativa
  unsure (1)..(729): unsure at all Xaa locations
  Clone ID: TF_OSC5862j.C1.p5.np
RRSSRRRPNGNGPNNNNNNNNGENPTLAQVLAQQTQLMNMMMQQLQNQQNQGNNYAPPQNKLAEFLRVRPPIFSSTTNPVEAGDWLHAIEKKLDLLQCTDQEKVSFASHQLHGPASEWWDHFRLNRTTAEPITWLEFTAAFRKTHIPSGVVSLKKKEFRSLTQGSRSVTEYLHEFNRLARYAPEDVRTDEERQEKFLAGLNDELSYPLMTGDYPDFXKLVDKAIRQEDKYNRIEQKKRRIAQFKTQQGNSQRPRLTLGPQSMPQGGSSSVVRPQRQFFNNNAGNNIRNQALRPVAASTQQQPAKREQGRKPVVCFNCGDPGHYADKCPKPRRVKVVPAQSNSTAPAPKARVNHVAAAEAQDAPDVILGTFLVNLVPATVLFDSGATHSFLSMSFAGNHGMEVEDLRRPLMVSTPSNQALSLQRSLSVRIEIQGVPFLANLILLESKDLDVILGMDWLARYKGVIDCANRKVTLTSNDGRVVTVHALSSESLRSRLNQITLEEIPIVREYPDVFPDDLPGMPPKRDIEFRIDLVPGTTPIHKRPYRMAANELAEVKRQVDDLLQKGYIRPSSSPWGAPVIFVEKKDHTQRMCVDYRALNDVTIKNKYPLPRIDDLFDQLKGATVFSKIDLRSGYHQLRIKEYGLFECTVMSFGLTNAPAFFMNLMLRIKEYGLFECTVMSFGLTNAPAFFMNLMNKVFMEYLDKFVVVFIDDILMIGASNEKKTRKIWLA

SEQ ID NO: 20130 - protein, 640 aa, Oryza sativa
  Clone ID: TF_OSC5862j.C1.p6.gm
RAAPPLQPPSSVAVATIGIARSSPSPSTASPPPKTAGAPPSPSTRRPPPLLPHGRRRPLLFRRGFGHRALAPSSLEPPSPPSLQPCAAAVPVIAVAREDHRRGRQVAAVLVRPFAVAEDRRSTVAVVKPKSSAVSTSSPSPSVGLPPLLWSSASMRVRAAEPPPPVVRQGEEKPGRTSSFVAGRRSSPLPVKPSRRRRSSRRRPSSFVVWLKGEYRWVRLVVLHVYMSSKFAADHPISGEIRFEWFKLLNFSKIKIYCRPGCSRAEQPSPPSPPLAATAISTTNPVEAGDWLHAIEKKLDLLQCTDQEKVSFASHQLHGPASEWWDHFRLNRTTAEPITWLEFTAAFRKTHIPSGVVSLKKKEFRSLTQGSRSVTEYLHEFNRLARYAPEDEDKYNRIEQKKRRIAQFKTQQGNSQRPRLTLGPQSMPQGGSSSVVRPQRQFFNNNAGNNIRNQALRPVAASTQQQPAKREQGRKPVVCFNCGDPGHYADKCPKPRRVKVVPAQSNSTAPAPKARVNHVAAAEAQDAPDVILGYHQLRIKEEDIPKTAFTTRYGLFECTVMSFGLTNAPAFFMNLMNKVFMEYLDKFVVVFIDDILMIGARIRDTDFLQGDDILWINFRGIYELYQLDALDVSIMSCWIL

SEQ ID NO: 20131 - protein, 1757 aa, Oryza sativa
  Clone ID: TF_OSC6233j.C1.p1.np
ACQSSSSSGRNPSFAPPSCRRRRFPNIPSFPESPFSQKKSLKSSKASKATPGLEWYIPGLEIELCSRDGCSEWLGLYNRMPRYKPEYLFGVEGFVQELRTMSFVIGFGTAPFYAQIPHDRHEEKCRVKVTLNSNSEEVPSVMFEAGGRNYIHACQEVARIAIGELRDRYSDQLADTEYRYHPRQPQGSDRGSYLETEGIENDVTTKHLVEMLWAMDESRAETVLAAQDREDRNRGKICKLEDKVDRLEKELAALKGEAPPQKAWIRLTARKRALFVPRYQLAPKMVNTRSNGNGPNNPNNNNNGENPTLAQVLAQQTQLMNMMMQQFQNQQNQGNNHAPPQNKLAEFLRVRPPVFSSTTNPVEASDWLHAIEKKLDLLQCTDQEKVSFASHQLHGPASEWWDHFRLNRTTDEPITWLEFTAAFRKTHIPSGVVSLKKKEFRSLTQGSRSVTEYLHEFNRLARYAPEDVRNDEERQEKFLGGLNDELSYPLMVGDYPDFQKLVDKAIRQEDKYNRMEQKKRRIAQFKTQQGNNQKPRLTLGPQPMSQGGSSSVVRPQRQFFNNNAGNNIRNQAPRPVAAPAQQQPAKREQGNKPVVCFNCGDPGHYADKCPKPRRVKVVPTQNNSAVPASKARVNHVAAAEAQDAPDVILGTFLVNSVPATVLFDSGATHSFLSMSFAGNHGMEVEDLRRPLMVSTPSNQALSLQRSPSVRIEIQGVPFLANLILLKSKDLDVILGMDWLARHKGVIDCANKKVTLNSYDGRVVTVHALSSESLRSRLNQITLEEIPIVREYPDVFPDDLPGMPPKRDIEFRIDLVPGTTPIHKRPYRMAANELAEVKRQVDDLLQKGYIRPSSSPWGAPVIFVEKKDHTQRMCVDYRALNDVTIKNKYPLPRIDDLFDQLKGATVFSKIDLRSGYHQLRIKEEDIPKTAFTTRYGLFECTVMSFGLTNAPAFFMNLMNKVFMEYLDKFVVVFIDDILIYSRTKEEHEEHLRLALEKLREHQLYAKFSKCEFWLSEVKFLGHVISAGGVAVDPSNVESVTNWKQPKTVSEIRSFLGLAGYYRRFIENFSKIAKPMTRLLQKDVKYKWSEECERSFQELKSRLISAPILILPDPKKGFQVYCDASKLGLGCVLMQDGKVVAYASRQLRPHEKNYPTHDIELAAVVHALKIWRHYLFGTRTEVYTDHKSLKYIFTQPDLNMRQRRWLELIKDYDMGIHYHPGKANVVADALSRKGYCNATEGRQLPLELCKEFERLNLGIVGRGFVATLKAKPTLIDQVREAQINDPDIQKIKKNMRRGKAIGFLDDEHGTVWLGERICVPDNKDLKDAILKEAHDTLYSIHPGSTKMYQDLKERFWWASMKREIAEYVAVCDVCQRVKAEHQKPAGLLQPLKIPEWKWEEIGMDFITGLPRTSSGHDSIWVIVDRLTKVAHFIPVKTTYSGSRLAELYMARIVCLHGVPKKIVSDRGSQFTSNFWKKLQEEMGSKLNFSTAYHPQTDGQTERVNQILEDMLRACALDFGGSWDKNLPYAEFSYNNSYQASLQMAPYEALYGRKCRTPLLWDQTGERQVFGTDILREAEEKVKIIQERLRVAQSRHKSYADNRRRDLSFEEGDYVYLRVTPFRGVHRFRTKGKLAPRFVGPYKIVSRRGEVAYQLELPQSLAGVHNVFHVSQLKKCLRVPTEEANIEQIEVQEDLTYVEKPIRILETSERRTRNRVIRFCKVQWSNHSEEESTWEREDELESAHPQLFASSSESRGRDSV

SEQ ID NO: 20132 - protein, 607 aa, Oryza sativa
  Clone ID: TF_OSC6318j.C1.p1.fg
MPRYKPEYLFGVEGFVQELRTMSFAIGFGTAPFYAQIPHDRHEEKCRVKVTLNSNSEDIPSEMFEAGGRNYIHACQEVARIAIGELRDSYSDQLADTEYRYHPRQPQGSDRGSYLETEGIENDATTRHLVEMLWAMDETRAETMLAVQDREDRNRGKICKLEDKVDRLEKELAALKGEAPPQKARIRLTARKRALFVPRYQLAPKVRVVEKEVTPALADPPVVNMVLTRSNGNGPNNNNNNNNGENPTLAQVLAQQAQLMNMMMQQLQNQQNQLNQGNNNAPPPQNKLAEFLRLHAIEKKLDLLQCTDQEKVSFASHQLHGPASEWWDHFRLNRTTAEPITWLEFTAAFRKTHIPSGVVFLKKKEFRSLTQGSRSVTEYLHEFNRLARYAPEDVRNDEERQEKFLEGLNDELSYPLMTGDYPDFQKLVDKAIRQEDKYNRMEQKKRRIAHFKAQQGNTSTQQQPAKKEQGSKPVVCFNCGDPGHYADKCPKPRRVKVVPAQSNSTAPASKARVNHVAAAEAKDAPDVILGTFFVNSVPATVLFDSGATHSLLSMSFAGNHGMEVEDLRRPLMVSTPSNQALSLQRSPSVRIEIQEVPFLANLILLES

SEQ ID NO: 20133 - protein, 1966 aa, Oryza sativa
  unsure (1)..(1966): unsure at all Xaa locations
  Clone ID: TF_OSC6410j.C1.p3.np
ANSNLASNQQARRXAASXQQQRTFSVFTVRRRRFSRRRRSGRPPSCSPSRRRPRPPLRRRQRSSELRRRRQAEDAXTGNNLFSSWFGMVYSWFGDRTVQPMPRYKPEYLFGVEGFVQELRTMSFVIGFGTAPFYAQIPHDRHEEKCRVKVTLNSNSEDIPSVMFEAGGRNYIHACQEVARIAIGELRDRYSDQLADTEYRYHPRQPQGSDRGSYLETEGIENDATTKHLVEMLWAMDESRAETVLAAQDREDRNRGKICKLEDKVDRLEKELAALKGEAPPQKARIRLTARKRALFVPRYQLAPKVRVVEKEVAPAQADPPVIIISSDEEEESKRNNSKIEWVATQDDKDEPSIDLRCLEELDNGNGPNNPNNNNNGENPTLAQVLAQQTQLMNMMMQQFQNQQNQGNNHAPPQNKLAEFLRVRPPVFSSTTNPVEASDWLHAIEKKLDLLQCTDQEKVSFASHQLHGPASEWWDHFRLNRTTAEPITWLEFTAAFRKTHIPSGVVSLKKKEFRSLTQGSRSVTEYLHEFNRLARYAPEDVRNDEERQEKFLGGLNDELSYPLMVGDYPDFQKLVDKAIRQEDKYNRMEQKKRRIAQFKTQQGNNQKPRLTLGPQPMPQGGSSSVVRPQRHFFNNNAGNNIRNQAPRPVAAPAQQQPAKREQGSKPVVCFNCGDPGHYADKCPKPRRVKVVPAQNNSAVPASKARVNHVAAAEAQDAPDVILGTFLVNSVPATVLFDSGATHSFLSMSFAGNHGMEVEDLRRPLMVSTPSNQALSLQRSPSVRIEIQGVPFLANLILLESKDLDVILGMDWLARHKGVIDCANKKVTLTSYDGRVVTVHALSSESLRSRLNQITLEEIPIVREYPDVFPDDLPGMPPKRDIEFTIDLVPGTTPIHKRPYRMAANELAEVKRQVDDLLQKGYIRPSSSPWGAPVIFVEKKDHTQRMCVDYRALNDVTIKNKYPLPRIDDLFDQLKGATVFSMIDLRSGYHQLRIKEYGLFECTVMSFGLTYGLFECTVMSFGLTNAPAFFMNLMNKVFMEYLDKFVVVFIDDILIYSRTKEEHEEHLRLALEKLREHQLYAKFSKCEFWLSEVKFLGHVISAGGVAVDPSNVESVTNWKQPKTVSEIRSFLGLAGYYRRFIENFSKIAKPMTRLLQKDVKYKWSEECEQSFQELKSRLISAPILILPDPKKGFQVYCDASKLGLGCVLMQDGKVVAYASRQLRPHEKNYPTHDIELAAVVHALKIWRHYLFGTRTEEFERLNLGIVGRGFVAALEAKPTLIDQVREAQINDPDIQEIKKNMRRGKAIGFLEDEQGTVWLGERICVPDNKDLKDAVLKEAHDTLYSIHPGSTKMYQDLKERFWWASMKREIAEYVAVCDVCQRVKAEHQKPAGLLQPLKIPEWKWEEIGMDFITGLPRTSSGHDSIWVIVDRLTKVAHFIPVKTTYSGSRLAELYMARIVCLHGVPKKIVSDRGSQFTSNFWKKLQEEMGSKLNFSTAYHPQTDGQTERVNQILEDMLRACALDFGGSWDKNLPYAEFSYNNSYQASLQMAPYEALYGRKCRTPLLWDQTGERQVFGTDILREAEEKVKVIQERLRVAQSRHKSYADNRRRDLSFEEGDYVYLRVTPLRGVHRFHTKGKLAPRYVGPYKIVSRRGEVAYQLELPQSLAGVHNVFHVSQLKKCLRVPTEEANLEQIEVQEDLTYVEKPIRILETNERRTRNRVIRFCKLQWSNHSEEESTWEREDELNRGIEFVSDRFPSLKPSFPSPLAAMGLRRRLXAPLKGPPVSPLPVATFAFASRRRKSPSAPCAAVVSAVAVAREDHRRARQVVAVPSAPCAAVVSAVAVAREDHRRARQVVAVLVRPFAVARDRRSFVAVVKPKSFAASSSSPSPSVDLPPPFASPFASSRRRSPASVRRSSRLLHRAAAAVGDVTADVIGVVRHSVVSGESVFAEEEFEEFQGQQGKSHRS

SEQ ID NO: 20134 - protein, 1316 aa, Oryza sativa
  Clone ID: TF_OSC7927j.C1.p1.fg
MVNTRSNGNGPNNPNNNNGENPTLAQVLAQQTQLMNMMMQQFQNQQNQGIIMHLPKTKKKLDLLQCTDQEKVSFASHQLHGPASEWWDHFRLNRTTAEPITWLEFTAAFRKTHIPSGVVSLKKKEFRSLTQGSRSVTEYLHEFNRLARYAPEDVRNDEERQEKFLGGLNDELSYPLMVGDYPDFQKLVDKAIRQEDKYNRMEQKKRRIAQFKTQQGNNQKPRLTLGPQSMPQGGSSSVVRPQRQFFNNNAGNNIRNQAPRPVAAPAQQQPAKREQGSKPVVCFNCGDPGHYADKCPKPRRVKVVPTQNNSAVPASKARVNHVAAAEAQDAPDVILGMDWLARHKGVIDCANRKVTLNSYDGRVVTVHALSSESLRSRLNQITLEEIPIVREYPDVFPDDLPGMPPKRDIEFRIDLVPGTTPIHKRPYRMAANELAEVKRQVDDLLQKGYIRPSSSPWGAPVPLFFSKIDLRSGYHQLRIKEEDIPKTAFTTRYGLFECTVMSFGLTNAPAFFMNLMNKVFMEYLDKFVVVFIDDILIYSRTKEEHEEHLRLALEKLREHQLYAKFSKCEFWLSEVKFLGHVISAGGVAVDPSNVESVTNWKQPKTVSEIRSFLGLAGYYRRFIENFSKIAKPMTRLLQKDVKYKWSEECEQSFQELKNRLVSAPILTLPDPKKGFQVYCDASKLGLGCVLMQDGKVVAYASRQLRPHEKNYPTHDIELAAVVHALKIWRHYLFGTRTEVYTDHKSLKYIFTQPDLNMRQRRWLELIKDYDMGIHYHPGKANVVADALSRKGYCNATEGRQLPLELCKEFERLNLGIVGRGFVAALEAKPTLIDQVREAQINDPDIQEIKKNMRRGKAIGFLEDEHGTVWLGERICVPDNKDLKDAILKEAHDTLYSIHPGSTKMYQDLKERFWWASMKREIAEYVAVCDVCQRVKAEHQKPAGLLQPLKIPEWKWEEIGMDFITGLPRTSSGHDSIWVIVDRLTKVAHFIPVKTTYSGSRLAELYMARIVCLHGVPKKIVSDRGSQFTSNFWKKLQEEMGSKLNFSTAYHPQTDGQTERVNQILEDMLRACALDFGGSWDKNLPYAEFSYNNSYQASLQMAPYEALYGRKCRTPLLWDQTGERQVFGTDILREAEEKVKIIQERLRVAQSRHKSYADNRRRDLSFEEGDYVYLRVTPLRGVHRFHTKGKLAPRFVGPYKIVSRRGEVAYQLELPQSLAGVHNVFHVSQLKKCLRVPTEGANIDQIEVQEDLTYVEKPIRILETSERRTRNRVIRFCKVQWSNHSEEESTWEREDELKSAHPLLFASSSESRGRDSV

SEQ ID NO: 20135 - protein, 1079 aa, Oryza sativa
  Clone ID: TF_OSC900039j.C1.p20.fg
MEQKKRRIAQFKTQQGNNQKPRLTLGPQTMPHGGSSSVVRPQRQFFNNNAGNNNRNQAPRPVAAPTQQQPAKREQGSKPVVCFNCGDPGHYADKCPKPRRVKVVPAQSNSTVPASKARVNHVAAAEAQDAPDVILGTFLVNLVPAAVLFDSGATHSFLSMSFAGNHGMEVEDLRRPLMVSTPSNQALSLQRSPSVRIEIKGVLFLANLILLESKDLDVILGMDWLARHKGVIDCANRKVTLTSHDGRVVIVHALSSESLRSRLNQITLEEIPIVREYPDVFPDDLPGMPPKRDIEFGIDLVPGTTPIHKRPYRMAANELAEVKRQVDDLLQKGNIRPSSSPWGAPVIFGGKERSYPEDLKGATVFSKIDLRSGYHQLRIKEEDIPKTAFTTRYGLFECTVMSFGLTNAPAFFMNLMNKVFMEYLDKFVVVFIDDILIYSRTKEEHEEHLRLALEKLREHQLYAKFSKCEFWLSEVKFLGHKQPKTVSEICSFLGLAGYYRRFIENFSKIAKPMTRLLQKDVKYKWSEECEQSFQELKNRLISAPILILPDPKKGFQDGKVVAYASRQLRPHEKNYPTHDLELAAVVHALKIWRHYLFGTRTEVYTDHKSLKYIFTQPDLNMRQRRWLELIKDYDMGICVPDNKDLKDAILKEAHDTLYSIHPGSTKMYQDLKERFWWASMKREIAEYVAVCDVCQRVKAEHQKPAGLLQPLKIPEWKWEEIGMDFITGLPRTSSGHDSIWVIVDRLTKVAHFIPVKTTYSGSRLAELYMARIVCLHGVPKKIVSDRGSQFTSNFWKKLQEEMGSKLNFSTAYHPQTDGQTERVNQILEDMLRACALDFGGSWDKNLPYAEFSYNNSYQASLQMAPYEALYGRKCRTPLLWDRTGERQVFGTDILREAEEKVKIIQERLRVAQSHYKSYADNRRRDLSFEEGDYVYLRVTPLRGVHRFHTKGKLAPRFVGPYMIVSRRGEVAYQLELPQSLAGVHNVFHVSQLKKCLRVPTEEANLEQIEVQEDLTYVEKPIRILETNERRTRNRVIRFCKVQWSNHSEEESTWEREDELKSAHPHLFASSSESRGRDSV

SEQ ID NO: 20136 - protein, 813 aa, Oryza sativa
  Clone ID: TF_OSC900061j.C1.p6.gm
MVNTRSNGNGPSNNNNNNGENPTLAQVLAQQTQLMNMMMQQLQNQQNQGNNHALPQNTLAEFLRVRPPIFSSTTNPVEAGDWLHTIEKKLDLLQCTDQEKVSFASHKLHGPASEWWDHFRLNRTTAEPITWLEFTAAFRKTHIPSGVVSLKKKEFRLLTQGSRSVTEYLHEFNRLTRYAPEDVRNDEERQEKFLEGLNDELSYPLMTGDYYDFQKLVDKAIRQEDKYNRMEQKKRRIAQFKTQQGNNQKPRLTLGPQSMPQGGSSSVVRPQRQFFNNNAGNNIRNQALRPVAVSTQQQPAKKEQGSKPVVCFNCGDPGHYADKCPKPRRVKVVPAQSNSTAPASKARVNHVAAAEAQDAPDVILVKFLGHVISAGGVAVDPSNVESVTNWKQPKTVSEIRSFLGLAGYYRRFIENFSKIAKPMTRLLQKDVKYKWSEESLEAKPTLIDQVREAQINDPDIQEIKKNMRRGKAISFLEDEQGTVWLGERICVPDNKDLKDAILKEAHDTLYSIHPGSTKMYQDLKERFWWAIIVVAREDRHRARQVVAVLVCRFATVGDRRSIVAVIKPKSAAISTSSPSPSVGLPPSLWSPEGALRWIVLCKGYCHNSFPRYRGGIEAHGDMIGKRVVRQLASVTRGVQRGQCSSHGGRRVPDERIELATTMRGSEHYYRRPKWCRLRNPLRKTTHQEHIHQEYNKKNTFIKNRMERRRAPLPSPPPQTSPLPPPSSDGEEEGAAVFSTTTTTTVAGSRCRHLPGYRTTAASPPIAKPPQPPPLPPDLAEGRAPPLGHRTTAASAPAVEPPQSHRRHLLSRQI

SEQ ID NO: 20137 - protein, 1708 aa, Oryza sativa
  Clone ID: TF_OSC900076j.C1.p12.fg
MPRYKPEYLFGVDGFVQELRTMSFVIGFETAPFYAQIRHDRHEEKCRVKVTLNSNSEDIPSVMFEAGGRNYIHACQEVARIAIGELRDRYSDQLADTEYRYHPRQPQGSDRGSYLETEGIENDATTRHLVEMLWAMDESRAETVLAAQDREDRNRGKICKLEDKVDRLEKELAELKGEAPPQKARIRLTARKRALFVPRYQLAPKIRVVEKEVAPTLADPPVIIISDDEEEESKRNNSKIEWFSPVSLLVPCPCLMVNTRSNGNGPSNNNNGENPTLAQVLAQQTQLMNMMMQQLQNQGNNHASPQNKLAEFLRVRPPIFSSTTNPVEAGDWLHAIDKKLDLLQCTDQEKVSFASHQLHGPASEWWDHFRLNRTTAEPITWLEFTAAFRKTHIPSGVVSLKKKEFRSLTQGSRSVTEYLHEFNRLARYAPEDVRNDEERQEKFLEGLNDELSYPLMTGDYADFQKLVDKAIRQEDKYNRMEQKKRRIAQFKTQQGNNQRPRLTLGPQSMPQGGSSSVVRPQRQFFNNNAGNNIRNQAPRPVAAPTQQQPAKREQGSKSVVCFNCGDPGHYADKCPKPRRVKARVNHVAAAEAQDAPDVILGTFLVNSVHATVLFDSGATHSFLSMSFAGNHGMEVEDLRRPLMVSTPSNQALSLQRSPSVRIEIQGIPFLANLILLESKDLDVILGMDWLARYKGVIDCANRKVTLTSNDGRVVTVHALSSETLRSRLNQITLEEIPVVREYSDVFPDDLPGMPPKRDIEFRIDLVPGTTPIHKRPYRMAANELAEVKRQVDDLLQKGYIRPSSSPWGAPVIFVEKKDHTQRMCVDYRALNDVTIKNKYPLPRIDDLFDQLKGATVFSKIDLRSGYHQLRIKEEDIPKTAFTTRYGLFECTVMSFGLTNAPAFFVNLMNKVFMEYLDKFVVVFIDDILIYSRTKEEHEEHLCLALEKLREHQLYAKFSKCEFWLSEVKFLGHVISAGGVAIDPSNVESVTNWKQPKTVSEIRSFLGLAGYYRRFIENFSKIAKPMTRLLRKDVKYKWSEECERSFQELKNRLISAPILILPDPKKGFQVYCDASKLGLGCVLMQNGKVVAYASRQLRPHEKNYPTHDIELAVVVHALKIWRHYLFGTRTEVYTDHKSLKYIFTQPDLNMRQRRWLELIKDYDMGIHYHPGKANVVADALSRKGYCNATEGRQLPLELCKEFERLNLGIVSRGFVAALEAKPTLIDQVREAQINDPDIQEIKKNMRRGKAIGFLEDEQGTVWLGERICVPDNKDLKDAILQEAHDTLYSIHPGSTKMYQDLKERFWWASMKREIAEYVVVCDVCQRVKAEHQKPAGLLQPLKIPEWKWEEIGMDFITGLPRTSSGHDSIWVIVDRLTKVAHFIPVKTTYSRSRLAELYMARIVCLHGVPKKIVSDRGSQFTSNFWKKLQEEMGSKLNFSTAYHPQTDGQTERVNQILEDMLRACALDFGGSWDKNLPYAEFSYNNSYQASLQMAPYEALYGRKCRTPLLWDQTGERQVFGTDILREAEEKVKIIQERLRVAQSRHKSYADNRCRDLSFEEGDYVYLRVTPLRGVHRFHTKGKLAPRFVGPYKIVSRRGEVAYQLELPQSLAGVHNVFHVSQLKKCLRVPTEEANLEQIEVQEDLTYVEKPIRILETNERRTRNRVIRFCKVQWSNHSEEESTWEREDELKSAHPHLFASSSESRGRDSV

SEQ ID NO: 20138 - protein, 1825 aa, Oryza sativa
  Clone ID: TF_OSC900077j.C1.p11.gm
MADRDEEQILYDTIAEGSSQYWNEEEGNEDPNQYLNEEGNMEWDAEGNQQGHVERDVEGNQEEEASGSQPSVGQKRARGQRGAAKKLEGRHIITEVEEDGRPSAPAEAAKNYVRHSGWVVRDNMPVSTVYWRRTRARGDHESFVPDSEKEMLWTTMLETFTLPAGTEDKVKRWILKKMAEQFQSFKGDLYQKYILKGQTPNFDTFPKLRDHWDEFVAYKTSEQGQAMMERNKENAAKKKYHHHLGSGGYSVAMPKWEQMEATLIERGIEPATANWPERSKFWYYAHGGTLNPADGSLVFGDQIREVARRLTDAVEASSQSTFRPDRDRDELTLALQTPEHPGRTRGKGVIPWKIGFKEDIHTYRSRMRSKRDTEAKIADLEFRVSSYELNMQDEVARKVDERMAAHRSHDPQPTIPPAMPCAAAVSVVVIAREGHRRDRQVTAVLVRSFAAAEDRRNTVAAVDPKFAAASSSSPSPSVDLPPLFWSPMPRYKPEYLFGVEGFVQELRTMSFVIGFGTAPFYAQIPHDRHEEKCRVKVTLNSNSEDIPSVMFEAGGRNYIHACQEVARIAIGELRDRYSDQLADTEYRYHPRQPQGSDRGSYLETEGIENDATTRHLVEMLWAVDETRAETVLAAQDREDQNRGKICKLKDKVDRLEKELAALKGEASPQKARIRLTARKRALFVPRYQLAPNVRVVEKEVAPADPPVIIISDDEEEESKRNHSKIEWVATQDDENEPNEPSIDLRCSEELDNGNGPNNNNNEGNPTLAQVLSQQTQLMNMMMQQLQNQQNQGNNHAPPHNKLAEFLRVRPPIFSSTTNTVEAGDWLHAIEKKLDLLHCTDQEKVSFASHQLHGPASEWWDHFRLNRTTAEPITWLEFTAAFRKTHIPSGVVSLKKKEFRSLTQGSHSVTEYLHEFNRLARYAPEDVRNDEERQEKFLEGLNDELSYPLMTGDYSDLQKLVDKAIRQEDKYNRMEQKKRRIAQFKTQQGNNQKPRLTLEPQSMPQGGSSSVVRPQRQFFNNNAGNNIRNQAPRPVAAPAQQQPAKREQGSKPVVCFNCGDPGHYADKCPKPRRVKVVPAQSNSTVPASKARVNHVAAAEAQDAPDVILVRKYPDVFPDDLPANELAEVKRQVDDLLQKGYIRPSSSPWGAPVIFVEKKDHTQRIALAPCNLAPLSPPSLQPCAAAVSVVVIAREGHRRDRQVAAILVCSFAATEDRRNAVAAVDPKFAAASSSSPSPSVDLPPLFWSPVASGMAIPTDPSGTYHCRPIPAGYSKVEVELVEGAYEDLELDYPGGDGGTSSSLGDKRRLVHHLLRLRHLLLRILHRLLLMLHQHRLHLRLQHRLLLRILHRLLLVLLHLLPRKLLFRHLQKVKRQFKPRSPEKKIPIDPSVRNFFRGMSASAKEAIKLSDYERTLKKASSGKSKPVPQLGEQPNQEIEPLVTGKEMTIEQFITDTGLTTYQLLGVAPIEKAEVKYMYELGKPLVKPELLQSLPTQMYKFRQLYMEMSATGREMIGARIRDTDFLQGDDILWINFRGIYELYQLDALDVSIMSCWILMEIQRARRRRVFDTGFIDPRKVNVAMLDQYPQETEDNLVHLLKAQHYKTFILLPYNTEFHWVLLLFDLEACTVNDDITMDFVKGLPSVRGKSVILTIVNLLSKYVHFIPLGYPYTMISVAQAFFIEVVRLHYIPNSIVVAHDPVTRSMFWPELFHLARVKLNLSSAFHPQSGGQLEAANHVIGERLLQARDYSKLYCNDSHRDMVFSVGDSPAGARIHSVFIVVVSKSFHGAPLASTMALLAITDGLVLLVPAKAYPWSCGPRCSGTADLV

SEQ ID NO: 20139 - protein, 1454 aa, Oryza sativa
  Clone ID: TF_OSC900086j.C1.p14.fg
MSVWGGRETDLGGGQGERAGAPGLEWYIPGLEIELCSRDGCSEWLGLYNRMPRYKPEYLFGVEGFVQELRTMSFVIGFGTAPFYAQIPHDRHEEKCRVKVTLNSNSEDIPSVMFEAGGRNYIHACQEVARIAIGELRDRYSDQLADTEYRYHPRQPQGSDRGSYLETEGIENDATTRHLVEMLWAMDESRAETVLAAQDREDRNRGKICKLEDKVDRLEKELAALKGEAPPQKARIRLTARKRALFVPRYQLAPKMVNTRSNGNGPNNPNNNNNGENPTLAQVLAQQTQLMNMMMQQFQNQQNQGNNHAPPQNKLAEFLRVRPPVFSSTTNPVEASDWLHAIEKKLDLLQCTDQEKVSFASHQLHGPASEWWDHFRLNRITAEPITWLEFTAAFRKTHIPSGVVSLEKKEFSARRSFLGGLNDELSYPLMVGDYPDFQKLVDKAIRQEDKYNCMEQRKRRIAHFKAQQGSNQKPRLTLGPQPMSQGGSSSVVRPQRQFFNNNAGNNIRNQAPRPVAAPVQQQPAKREQGSKPVVCFNCGDPGHYADKCPKPRRVKVVPAQSNSAVPASKARVNHVAAAEAQDAPDVILGTFLVNSVPATVLFDSGATHSFLSMSFAGNHGMEVEDLRRPLMVSTPSNQALSLQRSPSVRIEIKGVPFLANLILLESKDLDVILGMDWLARHKDDLPGMPPKRDIEFRIDLVPGTTPIHKRPYRMAANELAEVKRQVDDLLQKGYIRPSSSPWGAPVIFVEKKDHTQRMCVDYRALNDVTIKNKYPLPRIDDLFDQLKGATVFSKIDLRSGYHQLRIKEEDIPKTAFTTRYGLFEGCVLMQDGKVVAYASRQLRPHEKNYPTHDLELAAVVHALKIWRHYLFGTRTEVYTDHKSLKYIFTQPDLNMRQRRWLELIKDYDMGIHYHPGKANVVADALSRKGYCNATKGRQLPLELCKEFERLNLGIVGRGFVAALEAKPTLIDQVREAQINDPDIQEIKKNMRRGKAIGFLEDEQGTVWLGERICVPDNKDLKDAILKEAHDTLYSIHPGSTKMYQDLKERFWWASMKREIAEYVAVCDVCQRVKAEHQKPAGLLQPLKIPEWKWEEIGMDFITGLPRTSSGHDSIWVIVDRLTKVAHFIPVKTTYSGSRLAELYMARIVCLHGVPKKIVSDRGSQFTSNFWKKLQEEMGSKLNFSTAYHPQTDGQTERVNQILEDMLRACALDFGGSWDKNLPYAEFSYNNSYQASLQMAPYEALYGRKCRTPLLWDQTGERQVFGMDILREAEEKVKIIQERLRVAQSRHKSYADNRRRDLSFEEGDYVYLRVTPFRGVHRFHTKGKLAPRFVGPYKIVSRRGEVAYQLELPQSLAGVHNVFHVSQLKKCLRVPTEEANLDQIEVQEDLTYVEKPIRILETSERRTRNRVIRFCKVQWSNHSEEESTWEREDELKSAHPHLFASSSESRGRDSV

SEQ ID NO: 20140 - protein, 1046 aa, Oryza sativa
  Clone ID: TF_OSC900094j.C1.p9.gm
MPRYKPEYLFGVEGFVQELRTMSFVIGFGTAPFYAQIPHDRHEEKCRVKVTLNSNSEDIPSVMFEAGGRNYIHACQEVARIAIGELRDRYSDQLADTEYRYHPRQPQGSDRGSYLETEGIENDATTKHLVEMLWAMDESRAEIVLAAQDREDRNRGKICKLEDKVDRLEKELAALKGEAPPQKARIRLTARKRALFVPRYQLAPKVRVVEKEVAPAQADPPVIIISDEEEESKRNHSKIEWVATQDDEDEPNEPSIDLRCLEELDTTNPVEASDWLHAIEKKLDLLQCTDQEKVSFASHQLHGLASEWWDHFRLNRITAEPITWLEFTAAFRKTHIPSGVVSLKKKEFRSLTQGSRSVTEYLHEFNRLARYAPEDVRNDEERQEKFLGGLNDELSYPLMVGDYPDFQKLVDKAIRQEDKYNRMEQKKRRIAQFKTQQGNNQKPRLTLGPQPMPHGGSSSVVRPQRQFFNNNAGNNIRNQAPRPVAAPAQQQPAKREQGSKPVVCFNCGDPGHYADKCPKPRRVKVVPVQNNSAVPASKARVNHVAAAEAQDAPDVILVREYPDVFPDDLPANELAEVKRQVDDLLQKGYIRPSSSPWGAPVIFVEKKDHTQRMCVDYRALNDVTIKNKYLLPRIDDLFDQLKGATVFSKIDLRSGYHQLRIKEEDIPKTAFTTRYGLFECTVMSFGLTNAPAFFMNLMNKVFMEYLDKFVVVFIDDILIYSRTKEEHEEHLRLALEKLREHQLYAKFSKCEFWLSEVKFHGHVISAGGVAVDPSNVESVTNWKQPKTVSEIRSFLGLAGYYRRFIENFSKIAKPMTRLLQKDVKYKWSEESLEAKPTLIDQVREAQINDPDIQEIKKNMRRGKAIGFLEDEQGTVWLGERICVPDNKDLKDAVLKEAHDTLYSIHPAPCALASPSPPPLQPCAAVVSAVAIAREDHRRARQVVAVLVRPFAVAGDHRSSFAVVDPKVPAASSSSPSPSVGLPPPFRSPCRRSPASVRRPSRLLRRAAAAVGDVTADVIGVVRREPVVDRSISAVRFGWIDLGRPFA

SEQ ID NO: 20141 - protein, 1534 aa, Oryza sativa
  Clone ID: TF_OSC900137j.C1.p1.fg
MSFVIGFGTAPFYAQIPHDRHEEKCRVKVTLNSNSEDIPSVMFEAGGRNYIHACQEGSDRGSYLETEGIENDATTRHLVEMLWAMDETRAETVLAAQDREDRNRGKICKLEDKVDRLEKELAALKGEAPPQKARIRLTARKRALFVPRYQLAPKVRVVEKEVTPALADPPVVNMVNTRSNGNGPNNNNGENPTLAQVLAQQTQLMNMMMQQLQNQQNQGNNYAPPQNKLAEFLRVRPPTFSSTTNPVEAGDWLHAIEKKLDLLQCTDQEKVSFASHQLHGPATEWWDHFRLNRTTAEPITWLEFTAAFRKTHIPSGVVSLKKKEFRSLTQGSRSITEYLHEFNRLTRYAPEDVRNDEERQEKFLEGLNDELSYPLMTGDYPDFQKLVDKAIRQEDKYNRMEQKKRRIAQFKTQQGNNQRPRLTLGPQSMPQGGSSSIVRPQRQFFNNNAGNNIRNQAPRPVAASTQQQPAKREQGSKPVVCFNCGDPGHYADKCPKPRRMKVVPTRSNSTVPASKARVNHVAAAEAQDAPDVILGTFLVNLVPATMLFDSGATHSFLSMSFAGNHGMEVKDLRRPLMVSTPSNQALSLQRSPSVRIEIQGVPFLANLILLESKDLDVIPGMDWLARHKGVIDCANRKVTLTSNDGRVVTVHALSPESLRSRLNQITLEEIPVVREYSDVFPDDLPGMPPKRDIEFRIDLVRGTTPIHKRPYRMAANELAEVKRQVDDLLQRGYIRPSSSPWGAPVIFVEKKDHTQRMCVDYRALNDVTIKNKYPLPRIDDLFDQLKGATVFSKIDLRSGYHQLRIKEEDIPKTAFTTRYGLFECTVMSFGLTNAPAFFMNLMNKVFMEYLDKFVVVFIDDILIYSRTKEEHEEHLRLALEKLREHQLYAKFSKCEFWLSEVKFLGHVISAGGVAIDPSNVESVTNWKQPKTVSEIHSFLGLAGYYRRFIENFSKIAKPMTRLLQKDVKYKWSEECEQSFQELKNHLISAPILILPDPKKGFQVYCDASKLGLGCVLMQDGKVVAYASRQLRPHEKNYPTHDLELAAVVHALKIWRHYLFGTRTEVYTDHKSLKYIFTQPDLNMRQRRWLELIKDYDMGIHYHPGKANVVADALSRKGYCNATEGRQLPLELCKEFERLNLGIVSRGFVAALEVKSTLIDHVREAQINDPDIQEIKKNMRRGKAIGFLEDEQGTRVKAEHQKPAGLLQPLKIPEWKWEEIGMDFITGLPRTSSGHDSIWVIVDRLTKVAHFIPVKTTYSGSRLAELYMARITDGQTERVNQILEDMLRACALDFGGSWDKNLPYAEFSYNNSYQASLQMAPYEALYGRKCRTPLLWDQTGERQVFGTDILREAEEKVKIIQERLRVAQYRHKSYADNRRRDLSFEEGDYVYLRVTPFRGVHRFHTKGKLAPRFVGPYKIVSRRGEVAYQLELPQSLAGVHNVFHVSQLKKCLRVPTEEANLEQIEVQEDLTYVEKPIRILEIDERRTRNRVIRFCKVQWSNHSEEESTWEREDELKSAHPHLFASSSESRGRDSV

SEQ ID NO: 20142 - protein, 571 aa, Oryza sativa
  Clone ID: TF_OSC900177j.C1.p14.gm
MMMQQLQNQQNQGNNHAPPQNKLAEFLRVRPPIFSSTTNPVEAGDWLHAIEKKLDLLQCTDQEKVSFASHQLHGPASEWWDHSRLNRITAEPITWLEFTAAFRKTHIPSGVVSLKKKEFRSLTQGSRSVTEYLHEFNRLARYALEDVRTDEERQEKFLEGLNDELSYPLMTGDYPDFQKLVDKAIRQEDKYNRMEQKKRRIAQFKTQQGNNQRPRLTLGPQSMPQGGSSSVVRPQRQFFNNNAGNNIRNQAPRPVAAPTQQQPAKREQGSKPVVCFNCGDPGHYADKCPKPRRVKAVPAQSNSTAPAPKARVNHVAATEAQVREYPDVFPDDLPERIHQTEFISMGSSSNFCGKERPYPEDLKGATVFSKIDLRSGYHQLRIKEEDIPKTAFTTSLAPPLSPPLQPCSAVAPVVAVARGGRHRGRRRVAVLVRPFAVAEDRRSIVAVVKPKVDAASSSTPSPSVDLPPPFWSLVSSPRRPLRPGALRSRRRAIVRRRACAPEPPQVVTSPLTSSSSSLVVRPWIGEEFEEFQGGDYDPGKVRCSGLCCARGIVTAPFREEEFYSEADGVED

SEQ ID NO: 20143 - protein, 1245 aa, Oryza sativa
  Clone ID: TF_OSC900195j.C1.p4.gm
MAQTCQPCTSSLASAHAVRAGALTPPSKTEREILVKDKFAHGPTCQSLFLSLFLCSSSSRVPGVWRCDEAWKLYEAEDENDPFDVIHSESVPCSTAGTSPGPRRRRAHVAGVQPQPGPVGELVLSEVRFFRSYAHHVAISDVAREMLRDMYQIPNRVHVILNSVDEAQFEPDGAGPRVPGGPHAAQGRQPGARALASCALAPPSPPSLQPCAAAVPDVAVAREDRRRGRQVVAVLVRPFAVAVDRRSTVAVVKPKSAAASSSSPSPFVPLPPSLWSPMRRYKPEYLFGVEGFIQELRTMSFVIGFGTAPFYAQIPHDRHEEKCRVKVTLNSNSEDIPSVMFEAGGRNYIHACQEVARIAIRELRDRYSDQLADTEYRYHPRQSQGSDRGSYLETEGIENDATTRHLVEMLWAMDESRAETVLAAQDREDRNRGKICKLEDKVDRLEKELATLKGEAPPQKARIRLTARKRALFVPRYQLAPKVRVVEKEVAPTLADPPVIIISDDEEEESKRNHSKIEWVATQDDEDEPNEPSIDLRCSEELETTAEPITWLEFTVAFRKTHIPSGVVSLKKKEFRSLTQGSRSVTEYLHEFNRLARYAPEDKLVDKAIRQEDKYNRMEQKKRRIAQFKTQQGNNQKPRLTLGPQSMPQGGSLSVVRPQRQFFNNNAGNNIRNQAPRPVAASTQQQPAKREHGSKPVVCFNCGDPGHYADKCPKPRRVKVVPTQSNSTVPASKARVNHVAAAEAQDAPDVILVREYPDVFPDDLPANELAEVKRQVDDLLQKGYIRPSSSPWGAPVIFVEKKDHTQRMCVDYRALNDVTIKNKYLLPRIDDLFDQLKGATVFSKIDLRSGYHQLRIKEEDIPKTAFTTRYGLFKCTVMSFGLTNAPAFFMNLMNKVFMEYLDKFVVVFIDDILIYSRTKEEHEEHLRLALEKLREHQLYAKFSKCEFWLSEVKFLGHVISAGGVAVDPSNVESVTNWKQPKTVSEIRSFLGLAALEAKPTLIDQVREAQINDPDIQEIKKNMRRGKAIGFLEDEQGTVWLGERSCVPDNKDLKDAILKEAHDTLYSIHPGSTKMYQDLKERFWWATVAVAREGRHRGRQVVAVLVRPFAVAGDRRSIVAVVNPKVSAVSSSSPSSSVVLPPPFWSPVCSPRRPLRAGVLRLRPCAAVRRRACAARAVRSAEPPPLSVTSPLKSSGSSAGAITIQEGALQWIVLCEGYCHNSFPRYRGGIEAHEEEFYNEADGVED

SEQ ID NO: 20144 - protein, 1858 aa, Oryza sativa
  Clone ID: TF_OSC900231j.C1.p16.fg
MPHPSLHHASLNHRRNPALTASLSHHCLLPLQPRIAACPVDPVVLCRPPRYRGHCPQPVHPSIFANRRRKSLPSAQAPFHTFPMSYQSSAALRSSPGIAGAPSHRHPEAPAVTLLAAGRLLPPFGLSIPSFLESPFSRKKSLKSSKASKAAPGLEWYIPGLEIELCSRGGCSEWLGLYNRMPRYKPEYLFGVEGFVQELRTMSFVIGFGTAPFYAQIPHDRHEEKCRVKVTLNSNSEDVPSVMFEAGGRNYIHACQEVARIAIGELRDRYSDQLADTEYRYHPRQPQGSDRGSYLETEGIENDVTTKHLVEMLWAMDESRAGTVLAAQDREDRNRGKICKLEDKVDRLEKELAALKGEAPPQKARIRLTARKRALFVPRYQLAPKMVNTRSNGNGPNNPNNNNNGENPTLAQVLAQQTQLMNMMMQQFQNQQNQGNNHAPPQNKLAEFLRVRPPVFSSTTNPVEASDWLHAIEKKLDLLQCTDQEKVSFASHQLHGPASEWWDHFRLNRTTAEPITWLEFTAAFRKTHIPSGVVSLKKKEFRSLSQGSRSVTEYLHEFNRLARYAPEDVRNDEERQEKFLGGLNDELSYPLMVGDYPDFQKLVDKAIRQEDKYNRMEQKKRRIAQFKTQQGNNQKPRLTLGPQPMPQGGSSSVVRPQRQFFNNNAGNNIRNQAPRPVAAPTQQQPAKREQGNKPVVCFNCGDPGHYADKCPKPRRVKVVPAQSNSTVSASKARVNHVAAAEAQDAPDVILGTFLVNSVPATVLFDSGATHSFLSMSFAGNHGMEVEDLRRPLMVSTPSNQALSLQRSPSVRIEIQGVPFLANLILLESKDLDVILGMDWLARHKGVIDCANRKVTLNSYDGRVVTVHALSSEFLRSRLNQITLEEIPIVREYPDVFPDDLPGMPPKRDIEFRIDLVPGTTPIHTRPYRMAANELAEVKRQVDDLLQKGYIRPSSSPWGAPVIFVEKKDHTQRMCVDYRALNDVTIKNEYPLPRIDDLFDQLKGATVFSKIDLRSGYHQLRIKEEDIPKTAFTTRYGLFECTVMSFGLTNAPAFFMNLMNKVFMEYLDKFVVVFIDDILIYSRTKEEHEEHLRLALEKLREHQLYAKFSKCEFWLSEVKFLGHVISAGGVAVDPSNVESVTNWKQPKTVSEIRSFLGLAGYYRRFIENFSKIAKPMTRLLQKDVKYKWSEECEQSFQELKSRLISAPILILPDPKKGFQVYCDASKFGLGCVLMQEGKVVAYASRQLRPHEKNYPTHDIELAAVVHALKIWRHYLFGTRTEVYTDHKSLKYIFTQPDLNMRQRRWLELIKDYDMGIHYHPGKANVVADALSRKGYCNATEGRQLPLELCKEFERLNLGIVGRGFVAALEAKPTLIDQVREAQINDPDIQEIKKKMRRGKAIGFLEDEHGTVWLGERICVPDNKDLKDAILKEAHDTLYSIHPGSTKMYQDLKERFWWASMKREIAEYVAVCDVCQRVKAEHQKPAGLLQPLKIPEWKWEEIGMDFITGLPRTSSGHDSIWVIVDRLTKVAHFIPVKTTYSGSRLAELYMARIVCLHGVPKKIVSDRGSQFTSNFWKKLQEEMGSKLNFSTAYHPQTDGQTERVNQILEDMLRACALDFGGSWDKNLPYAEFLYNNSYQASLQMAPYEALYGRKCRTPLLWDQTGERQVFGTDILREAEEKVKIIQERLRVAQSRHKSYADNRRRDLSFEEGDYVYLRVTPLRGVHRFHTKGKLAPRFVGPYKIVSRRGEVAYQLELPQSLAGVHNVFHVSQLKKCLRVPTEEANIEQIEVQEDLTYVEKPIRILETSERRTRNRVIRFCKVQWSNHSEEESTWEREDELKSAHPYLFASSSESRGRDSV

SEQ ID NO: 20145 - protein, 632 aa, Oryza sativa
  Clone ID: TF_OSC900259j.C1.p5.gm
MVNTRSNGNGPNNNNNNNNNNEGNPTLAQVLAQQTQLMNMMMQQLQNQQNQGNNHAPPQNKLAEFLRVRPPIFSSTTNPVEAGDWLHAIEKKLDLLQCTDQEKVSFASHQLHGPASEWWDHFRLNRTTAEPITWLEFTAAFRKTHIPSGVVSLKKKEFRSLTQGSRSVTEYLHEFNRLARYAPEDVRNDEERQEKFLEGLNDELSYPLMTGDYSDFQKLVDKAIRQEDKYNRMEQKKRRIAQFKTQQGNNQKPRLTLGPQSVPQGGSSSVVRPQRQFFNNNAGNNIRNQAPRPVAAPTQQQPAKREQGNKPVVCFNCGDPGHYADKCPKPRRVKVVPVQSSSTALALKARVNHVAAAEAQDAPDVILVREYPDVFPDDLPANELAEVKRQVDDLLQKGYIRPSSSPWGAPVIFVEKKDHTQRMCVDYRALNDVTIKNKYPLPRIDDLFDQLKGATVFSKIDLRSGHEVSSSSPAAVGLRRRLRAPLKGPRALLYPPPPLPSPLVVGNALAPCALAPSSPPSLQPCAAAVPDVAVAREGRHRGRQVVAVLVCRFATVGDRRSIVAAVDPKSFAASSSSPSPSVDLPPSLWSPEGALQWIVLCKGYCHNSFPRYRGGIEAHEEEFYSEADGVED

SEQ ID NO: 20146 - protein, 1123 aa, Oryza sativa
  Clone ID: TF_OSC900307j.C1.p3.gm
MEVLVQVGSVSNLATTCSMSSSFVVSARIIMVDAGPVSRARAPSLSLTVAVAREGRQRGRQVVAVLVRPFAAVGDHRSVIAAVDPKSFAASSSSPSPVLAPPFAGERAPPEPSQPPSRRRRGDVIADAIKSVRREPLWTRSISAVHLGSMPRYKPEYLFGVEGFVQELRTMSFAIGFGTAPFYAQIPHDRHEEKCRVKVTLNSNSEDIPSVMFEAGGRNYIHACQEVARIAIGELRDRYSDQLADTEYRYHPRQPQGSDRGSYLETEGIENDATTKHLVEMLWAMDESRAETVLAAQDREDRNRGKICKLEDKVDRLEKELAALKGEAPPQKARIRLTARKRALFVPRYQLAPKVRVVEKEVAPAQADPPEKVSFASHQLHGPASEWWDHFRLNRITAEPITWLEFTAAFRKTHIPSGVVSLKKKEFRSLTQGSRSVTEYLHEFNRLARYAPEDVRNDEERQEKFLGGLNDELSYPLMVGDYPDFQKLVDKAIRQEDKYNRMEQKKRRIAQFKTQQGNNQKPRLTLGPQSMPHGGSSSVVRPQRQFFNNNAGNNIRNQAPRPVAAPVQQQPAKREQGSKPVVCFNCGDPGHYADKCPKPRRVKVVPAQSNSAVPASKARVNHVAAAEAQDAPDVILVREYPDVFPDDLPANELAEVKRQVDDLLQKGYIRPSSSPWGAPVIFVEKKDHTQRMCVDYRALNDVTIKNKYPLPRIDDLFDQLKGATVFSKIDLRSGYHQLRIKEEDIPKTAFTTRYGLFECTVMSFGLTNAPAFFMNLMNKVFMEYLDKFVAVFIDDILIYSRTKEEHEEHLRLALEKLREHQLYAKFSKCEFWLSEVKFLGHVISAGGVAVDPSNVESVTNWKQPKTVSEIRSFLGLAGYYRRFIENFSKIAKPMTRLLQKDVKYKWSEELAQGEAREAPAGLGSASKPTGGHGDRRRHARSPAVTGSAGDGGGRARHGDASGGGGATRRWLGQRGATAGARRKAAAPGLAVRARFVARESSGKLGKREKGARGCFLWAREGGIEAGRGGIGRRSGEVKWSSWGGQTGAVSCGVSGGNGGGRGGGRVHVVGCELGCGRAPDFAATWGGSGGHGGGWSRRKGMTGISSRDSGMARKKAGADGRSD

SEQ ID NO: 20147 - protein, 1446 aa, Oryza sativa
  Clone ID: TF_OSC900312j.C1.p15.fg
MSASFWCPPFASSRRRSPASMRARAAEPPPVVTSSLTSSSSSLVIPTFPESPFSQEKNLKSSKASKATPGLEWYIPGLKIELCSRDGCSEWLGLCNRIPHDRHEEKCRVKVTLNSNSEDIPSVMFEAGGRNYIHACQEVARIAIGELRDRYSDQLADTEYRYHSRQPQGSDRGSYLETEGIENDATTRHLVEMLWAMDETRAETVLAAQDREDRNRGKICKLEDKVDRLEKELAALKGEAPPQKARICLTARKRALFVPRYQLAPKMHIPSGVVSLKKKEFRSLTQGSRSVTEYLHEFNRLARYAPEDVRTDEEHQEKFLEGLNDELSYPLMTGDYHDFQKLVDKAIRQEDKYNRMEQKKRRIAQFKTQQGNNQRPHLTLGPQSMPQGGYSSVVRPQRQFFNNNAGNNIRNQVPRPVAASTQQQPAKREQGSKPVVCFNCGDPGHYADKCPKPRCVKVVPAQSNSTVSASKARVNHVAAAEAQGAPDVILGTFLVNSVPATVLFDSGATHSFLSMSFAGNHGMEVEDLRCPLMVSTPSNQALSLQRSPSVRIEIQGVPFLANLILLESKDLDVILGMDWLARHKGVIDCANRKVTLTSNDGRVVTVHALSSESLRSILNQITLEEIPIVREYPDVFSDDLPGMPPKRDIEFRIDLVPGTTPIHKRPYRMAANELAEVKRQVDDLLQKGIDDLFDQLKGATVFSKIDLRSGYHQLRIKEEDIPKTAFTTRYGLFECTVMSFGLTNAPAFFMNLMNKVFMEYLDKFVVVFIDDILIYSRTKEEHEEHLRLALEKLREHQLYAKFSKCEFWLSEVKFLGHVISAGGVAVDPSNVESVTNWKQPKTVSEIRSFLGLAGYYRRFIENFSKIAKPMTRLLQKDVKYKWSEECEQSFQELKNRLISAPILILPDPKKGFQVYCDASKLGLGCVLMQDGKVVAYASRQLRPHEKNYPTHDLELAAVVRALKIWRHYLFGTRTEVYTDHKSLKYIFTQPDLNMRQRRWLELIKDYDMGIHYHPGKVNVVADALRRKGYCNATEGRQLPLELCKEFERLNLGIVSRGFVAALEAKPTLIDQIREAQINDPDIQEIKKNMRRGRAIGFLEDEQGTVWLGERICVPDNKDLKDAILKEAHDTLYSIHPGSTKMYQDLKERFWWASMKREIAEYVAVCDVCQRVKAEHQKPAGLLQPLKIPEWKWEEIGMDFITGLPRTSSGHDSIWVIVDRLTKVAHFIPVKTTYSGSRLAELYMARIVCLHGVPKKIVSNRGSQFTSNFWKKLQEEMGSKLNFSTAYHPQTDGQTERVNQILEDMLRACALDFGGSWDKNLPYAEFSYNNSYQASLQMAPYEALYGRKCRTPLLWDQTGERQVFGTDILREAEEKVKIIQERLRVAQSRHKSYADNRRRDLSFDERDYVYLRVTPLRGVHRFHTKGKLAPRFVGPYKIVSRRGEVAY

SEQ ID NO: 20148 - protein, 566 aa, Oryza sativa
  Clone ID: TF_OSC900321j.C1.p1.gm
SLTQGSRSVTEYLHEFNCLARYAPEDVRNDEECQEKFLEGLNDELSYPLMAGDYPDFQKLVDKAIRQEDKYNRMEQKKRRIAQFKTQPGNNQRPRLTLGPQSMPHGGSSSVVRPRRQFFNNNAGNNIRNLAPRPVAVSTQQQPAKREQGSKPVVCFNCGDPGHYADKCPKPRRVKVVPAQSNSTAPASKARINHVAAAEAQDAPDVILVREYPDVFPDDLPERIHQTEFITMGSSGYYRRFIENFSKIAKPMTRLLQKDVKYKWSEESLETKPTLIDQVREAQINDPDIQEIKKNMRRGKAIGFLEDEQGTAPRCLLYPPPPSPSPLVARRALAPCALAPPSPPSLQQCAAAVPDVAVTREGRRRGRQVVAVLVRRFVTVGNRRSIVAVVKPQSAAVPSSSPSPSVVPPFAGELAPSELSSRRAAAAGGDVIADVIVPVSHDDAGRNGRRTTAASGGANHGDTGKSEHTGWLHEKRGDEPMAPIRRRELDGGESRRRQPAAGEGGNDDEVTRGRFPAARASTRLRESDASVGLGGATPSEAGDERVLRSTGGEHMASGGNGRGGAG

SEQ ID NO: 20149 - protein, 417 aa, Oryza sativa
  Clone ID: TF_OSC900373j.C1.p13.fg
MSWQRVGALLLGAQSRLPVPGVPAVGGIGSVLLSMARMGWKLCHVFRLYTVVMFNREKGKNVSRHASSNSSFQLHPPLASRELTRVHPWSIPSMLLGSQLPLVGSQDQNQYVFDRAFATQVNELPMPEEDVPFCQDCREQGHYALNCPWVYTKEAPSFGLAGQASLNQPPRTKSSLQPSVQSREPNEENPLNPGNCFPPSLSYHVGSRTKHAKGKKSKNQKRKAPMRTEEEVRKMTITSTEWPPAGITIPRRQRGNTFRGARQLTQHLLSHGGRVSDSEGSDQVSSDYEYESPRRLGEEEMELKACTRCGEIGHIASMCLTLCPHCEEDHPPGECPTRKVTCFLCEGTNHVPKDCQLSVLLTKTAEIQRTTLRLSHQLVSSNSNLDDIIHSTNAPPAAPDSAINHSNNTFSTNHSLH

SEQ ID NO: 20150 - protein, 2038 aa, Oryza sativa
  Clone ID: TF_OSC900373j.C1.p2.fg
MGLPTLALTQASASLRGFGGESVQVLGQAQLLVAFGTGKNRREEKIMFDVVDIPYNYNAIFGCATFNKFEAISHHNYLKLKMPGPVGVIVVKGLQPSAASKGDLAIINRAVHNVEAEPHDPAKHAPKPAPHGKVIKIQIDDTDPTKLVSLGGDMGEEEVENILEVLKKNIDNFAWGPDEVGSVSTDLIMHHLAVMPDAKPRKQKLRKMSVDLQEAAKAEVQKLLKARVIQEIDHPEWLANPVLVRKSNDKYRMCVDFTNLNKAWPKDDFPLPRIDQLVDSTAGYELMSFLDAYSGYHQIHMNPADIPKTSFITPFGTFCHLRMPFGLRNAGATFARQVYKPCFAVVPVVAVARGDRHRGRHRVAVLVRPFAVAVDRRSIAVVVKPKDPAAFSSTPPPSVHLPPSFWSSIPTFPESPFSQEKNLKSSKATPGLEWYIPGLEIELYSRDGCSEWLGLYNRMPCYKPEYLFGVEGFVQELRTMSFAIGFGTTPFYAQIPHDRHEEKCRVKVTLNSNSEDIPSVMFEAGGRNYIHACQEGSDRGSYLETEGIENDATTKHLVEMLWAMDETRAETVLAAQDREDRNHEKELAALKGEAPPQKARIRLTARKRALFVPRYQLAPKVRVVEKEVTPALANPPVVNMVLTRSNGNGPNNNNNNNNGENPTLAQVLAQQVQLMNIMMQQLQNQQNQGNNHAPPQNKLAEFLHVRPPTFSSTTNPVEAGDWLHAIEKKLDLLQCTDQEKVSFASHQLHGLASEWWDHFRLNRTTTEPITWLEFTAAFRKTHIPSGVVSLKKKEFRSLTQGSRSVTEYLHEFNRLARYAPEDVRTDEERHERFLEGLNDELSYPLMTGDYHDFQKLVDKAIRQEGKYNRMEQKKRRIAQFKAQQGNSQRPRLTLGPQSMRQGGSSSVVRPQRQFFNNNAGNNIRNQAPRPVAASTQQQPAKKEQGSKPVVCFNCGDPGHYADKCPKPRRVKVVPAQSNSTVPASKARVNHVAAAEAQGAPDVILGTFLVNLVPATVLFDSGATHSFLSMSFAGNHGMEVEDLRRPLMVSTPSNQALSLQRSPSVRIEIQGVPFLANLILLESKDLDVILGMDWLARYKGVIDCANRKVTITSNDGRVVTVHALSSEPLRSRLNQITLEEIPIVREYPDVFPDDLPGMPPKRDIEFRIDLVPGTTPIHKRPYRMAANELAEVKRQVDDLLQKGYIRPSSSPWGAPVIFVEKKDHTQRMCVDYRALNDVTIKNKYPLPRIDDLFDQLKGAIVFSKIDLRSGYHQLRIKEEDIPKTAFTTRYGLFECTVMSFGLTNAPAFFINLMNKVFMEYLDKFVVVFIDDILIYSRTKEEHEEHLRLALEKLREHQLYAKFSKCEFWLSEVKFLGHVISAGGVAVDPSNVESITNWKQPKTVSEIRSFLGLAGYYRRFIENFSKIAKPMTRLLQKDVKYKWSEECKQSFQELKNRLISAPILILPDPKKGFQVYCDASQLGLGCVLMQDGKVVAYASRQLRPHEKNYPTHDLELAAVIHALKIWRHYLFGTCIEVYTDHKSLKYIFTQPDLNMRQRRWLELIKDYDMGIQYHPGKANVVADALSRKGYCNATEGRQLPLELCKEFERLNLGIVRRGFVAALEAKPTLIDQVREAQINDPDIQEIKKNMRRGKAIGFLEDEQGTVWLGERICVPDNKDLKDAILKEAHDTLYSIHPGSTKMYQDLEERFWWASMKREIAEYVAVCDVCQRVKAEHQKPAGLLQPLKIPEWKWEEIGMDFITGLPRTSSGHDSIWVTDGQTERVNQILEDMLRACALDFGGSWDRNLPYAEFSYNNSYQASLQMAPYEALYGRKCRTPLLWDQTGERQVFGTDILREAEEKVKIIQERLRVAQSRHKSYADNRRRDLSFDEGDYVYLRVTPLRGVHRFHTKGKLVPHFVGPYKIVNRRGEVAYQLELPQSLAGVHNVFHVSQLKKCLRVPTEEANLEQIEVQEDLTYVQKPIRILEIEERRTRNRVIRFYKVQWSNHSEEESTWEREDELKSAHPHLFASSSESRGRDSV

SEQ ID NO: 20151 - protein, 1687 aa, Oryza sativa
  Clone ID: TF_OSC900382j.C1.p28.gm
MVNTRSNGNGPNNPNNNNNGENPTLAQVLAQQTQLMNMMMQQFQNQQNQGNNHAPPQNKLAEFLRVRPPVFSSTTNPVEASDWLHAIEKKLDLLQCTDQEKVSFASHQLHGPASEWWDHFRLNRTTDEPITWLEFTAAFRKTHIPSGVVSLKKKEFRSLTQGSRSVTEYLHEFNRLARYAPEDVCNDEERQEKFLGGLNDELSYPLMVGDYPDFQKLVDKAIRQEDKYNRMEQKKRRIAQFKTQQGNNQKPRLTLGPQPMSQGGSSSVVRPQRQFFNNNAGNNIRNQAPRPVAAPAQQQPAKREQGSKPVVCFNCGDPGHYADKCPKPRRVKVVPTQNNSAVPASKARVNHVAAAEAQDAPDVILVREYPDVFPDDLPANELAEVKRQVDDLLQKGYIRPSSSPWGAPLKGATVFSKIDLRSGYHQLRIKEEDIPKTAFTTSFLGLAGYYRRFIENFSKIAKPMTRLLQKDVKYKWSEESLEAKPTLIDQVREAQINDPDIQEIKKNMRRGKAIGFLEDEHGTPCAAVVPAVAVAREDRRRHRQVAAVLVRPFAAVGTRRSFVAVDNPKVAAASFSSPSSSVPSPPPFWSPVCSPRCPLRAGALRWCRGAAVRRRVSAARAVFFAEPPPSSVMTNVPSPGASTLAPARDECLETLILTGRGEAVLPPSRIVSERQAGLPRRFMPESATDREIVSLGEGCPAPRYPGRSVFFLPFAMAGLVPPFSSFFMDVLEFYDLQMAHLTPNAVMTLAIFAHLCEMFIGVRPSLRLFRWFFTVQPVSPPSVVGGCYFQPRGPVLNRYIPCVLRKKWDDWKSDWFYTPLADEARLRLPSQPPTQASNWRAPVDLGDGYDAVLDRLAGLRSQGLTGAMVFGDYLRRRIAPLQRRARGAWEYTGSEDCMRTHQGVRWDRAPEDFKIVVQRVLNLSSVEASLIPQGVLPLCSDPDRASILTIMQAVGASEERAPRGHDGAGGSRRGEQSTPGGGRASGPRDGGPGSGRPADARGKRKQEGTPPPSPPRGGGAARASSRRPEGATPTSQPEGERKKKRLRKMGGTEPSRGNLISPPSEIPSRPSRHSKSGQSEAEDPATTEARRRESDRREAADRLREAGEAAQVAVRARQAEEAAREEARLRQAEAATTSEAARDEAAGVSLGPTPSGDAQDKPGPGDIPESGMSIGGPSRAASSPRRLFPTPSVAPLSAEPLLQALAVANTTVLDGLSAQVEALQAERAELDAAWARVEEGRRSVEAMVEVGRKAHRRHVSELEARRKVLGEIAKEVEEERGAALIATTVMNEAQDTLRLQYGSWEAELGKKLDAARGVLDAAAARERRAAETEVASRRREEALEARAMALEERACAVERDLADREAAVAIREVTLAVHEAACAEEESALRLREDALTERERALKEAEAAAQRLADSLSLREAAQEEQARRNLESARAERAALNQRAAELEAQARELDARARSGGAATGDSDLAARLAAAEHTIADLQGALDSSTGEVEALRLAGEIGPSMLRDAVSRLDRAGRQAGLWGGRTVKYAANQGGLAQRLSEMAGTLQRLPEELEGTINSSSRDLARGAVELVLASYQARDPDFSPWTALDEFPPGTEDGARVQVRDAADHIVHSFEGSAPRLAFALNSDEEGDDGGVGDSGDEAGDPGSSPQMARVGASAWGDPHVETGQAGSVVTEGYG

SEQ ID NO: 20152 - protein, 1655 aa, Oryza sativa
  Clone ID: TF_OSC900382j.C1.p32.gm
MVNTRSNWNGPNPPDNNNRGSLVSDRTQQEFLRVRPPVFSSTTNPVEASDWLHAIEKKLDLLQCTDQEKVSFASHQLHGPASEWWDHFRLNRTTDEPITWLEFTAAFRKTHIPSGVVSLKKKEFRSLTQGSRSVTEYLHEFNRLARYAPEDVCNDEERQEKFLGGLNDELSYPLMVGDYPDFQKLVDKAIRQEDKYNRMEQKKRRIAQFKTQQGNNQKPRLTLGPQPMSQGGSSSVVRPQRQFFNNNAGNNIRNQAPRPVAAPAQQQPAKREQGSKPVVCFNCGDPGHYADKCPKPRRVKVVPTQNNSAVPASKARVNHVAAAEAQDAPDVILVREYPDVFPDDLPANELAEVKRQVDDLLQKGYIRPSSSPWGAPLKGATVFSKIDLRSGYHQLRIKEEDIPKTAFTTSFLGLAGYYRRFIENFSKIAKPMTRLLQKDVKYKWSEESLEAKPTLIDQVREAQINDPDIQEIKKNMRRGKAIGFLEDEHGTPCAAVVPAVAVAREDRRRHRQVAAVLVRPFAAVGTRRSFVAVDNPKVAAASFSSPSSSVPSPPPFWSPVCSPRCPLRAGALRWCRGAAVRRRVSAARAVFFAEPPPSSVMTNVPSPGASTLAPARDECLETLILTGRGEAVLPPSRIVSERQAGLPRRFMPESATDREIVSLGEGCPAPRYPGRSVFFLPFAMAGLVPPFSSFFMDVLEFYDLQMAHLTPNAVMTLAIFAHLCEMFIGVRPSLRLFRWFFTVQPVSPPSVVGGCYFQPRGPVLNRYIPCVLRKKWDDWKSDWFYTPLADEARLRLPSQPPTQASNWRAPVDLGDGYDAVLDRLAGLRSQGLTGAMVFGDYLRRRIAPLQRRARGAWEYTGSEDCMRTHQGVRWDRAPEDFKIVVQRVLNLSSVEASLIPQGVLPLCSDPDRASILTIMQAVGASEERAPRGHDGAGGSRRGEQSTPGGGRASGPRDGGPGSGRPADARGKRKQEGTPPPSPPRGGGAARASSRRPEGATPTSQPEGERKKKRLRKMGGTEPSRGNLISPPSEIPSRPSRHSKSGQSEAEDPATTEARRRESDRREAADRLREAGEAAQVAVRARQAEEAAREEARLRQAEAATTSEAARDEAAGVSLGPTPSGDAQDKPGPGDIPESGMSIGGPSRAASSPRRLFPTPSVAPLSAEPLLQALAVANTTVLDGLSAQVEALQAERAELDAAWARVEEGRRSVEAMVEVGRKAHRRHVSELEARRKVLGEIAKEVEEERGAALIATTVMNEAQDTLRLQYGSWEAELGKKLDAARGVLDAAAARERRAAETEVASRRREEALEARAMALEERACAVERDLADREAAVAIREVTLAVHEAACAEEESALRLREDALTERERALKEAEAAAQRLADSLSLREAAQEEQARRNLESARAERAALNQRAAELEAQARELDARARSGGAATGDSDLAARLAAAEHTIADLQGALDSSTGEVEALRLAGEIGPSMLRDAVSRLDRAGRQAGLWGGRTVKYAANQGGLAQRLSEMAGTLQRLPEELEGTINSSSRDLARGAVELVLASYQARDPDFSPWTALDEFPPGTEDGARVQVRDAADHIVHSFEGSAPRLAFALNSDEEGDDGGVGDSGDEAGDPGSSPQMARVGASAWGDPHVETGQAGSVVTEGYG

SEQ ID NO: 20153 - protein, 1742 aa, Oryza sativa
  Clone ID: TF_OSC900394j.C1.p6.fg
MSPLTSSGSSAIPSFPESPFSQKKSLKSSKASKATPGLEWYIPGLEIELCSRGGCSEWLGLYNRMPRYKPEYLFGVEGFVQELRTMSFVIGFGTAPFYAQIPHDRHEEKCRVKVTLNSNSEDIPSVMFEAGGRNYIHACQEVARIAIGELRDRYSDQLADTEYRYHPRQPQGSDRGSYLETEGIENDATTKHLVEMLWAMDESRAETVLAAQDREDRNRGKICKLEDKVDRLEKELAALKGEAPPQKARIRLTARKRALFVPRYQLAPKMVNTRSNGNGPNNPNNNNNGENPTLAQVLAQQTQLMNMMMQQFQNQQNQGNNHAPPQNKLAEFLRVRPPVFSSTTNPVEASDWLHAIEKKLDLLQCTDQEKVSFASHQLHGPASEWWDHFRLNRTTAEPITWLEFTAAFRKTHIPSGVVSLKKKEFRSLTQGSRSVTEYLHEFNRLARYAPEDVRNDEERQEKFLGGLNDELSYPLMVGDYPDFQKLVDKAIRQEDKYNRMEQKKRRIAQFKTQQGNNQKPRLTLGPQPMPQGGSSSVVRPQRHFFNNNAGNNIRNQAPRPVAAPAQQQPAKREQGSKPVVCFNCGDPGHYADKCPKPRRVKVVPAQNNSAVPASKARVNHVAAAEAQDAPDVILGTFLVNSVPATVLFDSGATHSFLSMSFAGNHGMEVEDLRRPLMVSTPSNQALSLQRSPSVRIEIQGVPFLANLILLESKDLDVILGMDWLARHKGVIDCANKKVTLTSYDGRVVTVHALSSESLRSRLNQITLEEIPIVREYPDVFPDDLPGMPPKRDIEFTIDLVPGTTPIHKRPYRMAANELAEVKRQVDDLLQKGYIRPSSSPWGAPVIFVEKKDHTQRMCVDYRALNDVTIKNKYPLPRIDDLFDQLKGATVFSMIDLRSGYHQLRIKEEDIPKTAFTTRYGLFECTVMSFGLTNAPAFFMNLMNKVFMEYLDKFVVVFIDDILIYSRTKEEHEEHLRLALEKLREHQLYAKFSKCEFWLSEVKFLGHVISAGGVAVDPSNVESVTNWKQPKTVSEIRSFLGLAGYYRRFIENFSKIAKPMTRLLQKDVKYKWSEECEQSFQELKSRLISAPILILPDPKKGFQVYCDASKLGLGCVLMQDGKVVAYASRQLRPHEKNYPTHDIELAAVVHALKIWRHYLFGTRTEVYTDHKSLKYIFTQPDLNMRQRRWLELIKDYDMGIHYHPGKANVVADALSRKGYCNATEGRQLPLELCKEFERLNLGIVGRGFVAALEAKPTLIDQVREAQINDPDIQEIKKNMRRGKAIGFLEDEQGTVWLGERICVPDNKDLKDAVLKEAHDTLYSIHPGSTKMYQDLKERFWWASMKREIAEYVAVCDVCQRVKAEHQKPAGLLQPLKIPEWKWEEIGMDFITGLPRTSSGHDSIWVIVDRLTKVAHFIPVKTTYSGSRLAELYMARIVCLHGVPKKIVSDRGSQFTSNFWKKLQEEMGSKLNFSTAYHPQTDGQTERVNQILEDMLRACALDFGGSWDKNLPYAEFSYNNSYQASLQMAPYEALYGRKCRTPLLWDQTGERQVFGTDILREAEEKVKVIQERLRVAQSRHKSYADNRRRDLSFEEGDYVYLRVTPLRGVHRFHTKGKLAPRYVGPYKIVSRRGEVAYQLELPQSLAGVHNVFHVSQLKKCLRVPTEEANLEQIEVQEDLTYVEKPIRILETNERRTRNRVIRFCKLQWSNHSEEESTWEREDELKSAHPHLFASSSESRGRDSV

SEQ ID NO: 20154 - protein, 1600 aa, Oryza sativa
  Clone ID: TF_OSC900403j.C1.p10.fg
MSFVISLTLLTIVNDAIIGNNLISSWFGMMPRYKPEYLFGVEGFVQELRTMSFVIGFETAPFYAQIPHDRHEEKCRVKVTLNSNSEDIPSVMFEAGGRNYNHACQEVARIAIGELRDRYSDQLADTEYRYHPRQPQGSDRGSYLETEGIENDATTRHLVEMLWAMDETRAETVLAAQDREDRNCGKICKLEDKVDRLEKELAALKGEAPPQKARIRLTARKRALFVPRYQLAPKVRVVEKEVTPALADPPVVNMVNTRSNGNGPNNNNNNNNGENPTLAQVLAQQTQLMNMMMQQLQNQQNQGNNHAPPQNKLAEFLRVRPPTFSSTTNPVEAGDWLHAIEKKLDLLQCTDQEKVSFASHQLHGPASEWWDHFRLNRTTAEPITWLEFTAAFRKTHIPSGVVSLKKKEFRSLTQGSRSVTKYLHEFNRLARYAPEDVRNDEERQEKFLEGLNDELSYPLMTGDYPDFQKLVDKAIRQEDKYNRMKQKKRRIAQFKTQQGNNQRPRLTLGPQSMPQGGSSSVVRPQRQFFNNNAGNNIRNQAPRPVAASTQQQPAKREQGSKPVVCFNCGDPGHYADKCPKLRRVKVVPTQRNSTVPASKARVNHVAAAEAQDAPDVILGTFLVNLVPATVLFDSGATHSFLSMSFAGNHGMEVKDLRRPLMVSTPSNQALSLQCSPSVRIEIQGVPFLANLILLESKDLDVILGMDWLARHKGVIDCANRKVTLTSNDGRVVTVHALSPESLRSRLNQITLEEIPVVREYSEVFPDDLPGMPPKRDIEFRIDLVPGTTPIHKRPYRMAANELAEVKRQVDDLLQRGYIRPSSSPWGAPVIFVEKKDHTQRMCVDYRALNDVTIKNKYPLLRIDDLFDQLKGATVFSKIDLRSGYHQLRIKEEDIPKIAFTTRYGLFECTVMSFGLTNAPAFFMNLMNKVFMEYLDKFVVVFIDDILIYSRTKEEHEEHLRLALEKLREHQLYAKFSKCEFWLSEVKFLGHVISAGGVAVDSSNVESVTNWKQPKTVSEIRSFLGLAGYYRRFIENFSKIAKPMTRLLQKDVKYKWSEECEQSFQELKNRLISAPILILPDPKKGFQVYCDASKLGLGCVLMQDGKVVAYASRQLRPHKKNYPTHDLELAAVVHALKIWRHYLFGTRTEVYTDHKSLKYIFTQPDLNMRQRRWLELIKDYDMGIHYHPGKANVVADALSRKGYCNATEGRQLPLELCKEFERLNLGIVSRGFVAALEVKPTLIDQVREAQINDPDIQEIKKNMRRGKAIGFLEDEQGTVWLGERICVPDNKDLKDAILKEAHDTLYSIHPGSTKMYQDLKERFWWASMKREIAEYVATDGQTERVNQILEDMLRACALDFGGSWDKNLPYAEFSYNNSYQASLQMAPYEALYGRKCRTPLLWDQTGERQVFGTNILREAEEKVKIIQERLRVAQSRHKSYADNRHRDLSFEEGDYVYFRVTPFRGVHRFHTKGKLAPRFVGPYKIVSRRGEVAYQLELPQYLAGVHNVFHVSQLKKCLRVPTEEANLEQIEVQEDLTYVEKPIRILEIDERRTRNRVIRFCKVQWSNHSEEESTWEREDELKSAHPHLFASSSESRGRDSV

SEQ ID NO: 20155 - protein, 1634 aa, Oryza sativa
  Clone ID: TF_OSC900406j.C1.p9.fg
MPRYKLEYLFGVEGFVQELRTMSFAIGFGTAPFYAQIPHDRHEEKCRVKVTLNSNSEEIPSVMFEAGGRNYIHACQEVARIAIGELRDRYSDQLADTEYRYHPRQPQGSDRGSYLETEGIENDATTRHLVEMLWAMDEGRAETVLAAQDREDRNRGKICKLEDKVDRLEKELAALKGEAPPQKARIRLTARKRALFVPRYQLAPKMVNTRSNGNGPNNPNNNNNGENPTLAQVLAQQTQLMNMMMQQFQNQQNQGNNYAPPQNKLAEFLRVRPPIFSSTTNPVEAGDWLHAIEKKLDLLQCTDQEKVSFASHQLHGSASEWWDHFRLNRTTAEPITWLEFTAAFRKTHIPSGVVSLKKKEFRSLTQGSRSVTEYLHEFNRLARYAPEDVRNDEERQEKFLGGLNDELSYPLMEDKYNCMEQRKRRIAHFKAQQGSNQKPRLTLGPQSMPQGGSSSVVRPQRQFFNNNAGNNIRNQAPRPVAAPTQQQPAKREQGSKPVVCFNCGDPGHYADKCPKPRRVKVVPAQNNSAVPASKARVNHVAAAEAQDAPDVILGTFPVNSVPATVLFDSGATHSFLSMSFAGNNGMEVEDLRRPLMVSTPSDQALSLQRSPSVRIEIKGVPFLANLILLESKDLDVILGMDWLARHKGVIDCANRKVTLTSNDGRVVTVHALSSESLRSRLNQITLEEIPIVREYSDVFPDDLPGMPPKRDIEFRIDLVPGTTPIHKRPYRMAANELAEVKRQVDDLQQKGYIRPSSSPWGAPVIFVEKKDHTQRMCVDYRALNDVTIKNKYPLPRIDDLFDQLKGATVFSKIDLRSGYHQLRIKEEDIPKTAFTTRYGLFECTVMSFGLTNAPAFFMNLMNKVFMEYLDKFVVVFIDDILIYSRTKEEHEEHLCLALEKLREHQLYAKFSKCEFWLSEVKFLGHVISAGGVAVDPSNVESVTNWKQPKTVSEIRSFLGLAGYYRRFIENFSKIAKPMTRLLQKDVKYKWSEECEQSFQELKSRLISAPILILPDPKKGFQVYCDASKLGLGCVLMQDGKVVAYASRQLRPHEKNYPTHDIELAAVVHALKIWRHYLFGTRTEMYTDHKSLKYIFTQPDLNMRQRRWLELIKDYDMGIHYHPGKANVVADALSRKGYCNATEGRQLPLELCKEFERLNLGIVNRGFVAALEAKPTLIDQVREAQINDPDIQEIKKNMRRGKAIGFLEDEQGTVWLGERICVPDNKDLKDAILKEAHDTLYSMHPGSTKMYQDLKERFWWASMKREIAEYVPVCDVCQRVKAEHQKPAGLLQPLKIPEWKWEEIGMDFITGLPRTSSGHDSIWVIVDRLTKVAHFIPVKTTYSGSRLAELYMARIVCLHGVPKKIVSDRGSQFTSNFWKKLQEEMGSKLNFSTAYHPQTDGQTERVNQILEDMLRACALDFGGSWDKNLPYAEFSYNNSYQASLQMAPYEALYGRKCRTPLLWDQTGERQVFGTDILREAEEKVKIIQERLRVAQSRHKSYADNRRRDLSFEEGDYVYLRVTPFRGVHRFRTKGKLAPRFVGPYKIVSRRGEVAYQLELPQSLAGVHNVFHVSQLKKCLRVPTEEANLEQIGVQEDLTYVEKPIRILETSERRTRNRVIRFYKVQWSNHSEEEST

SEQ ID NO: 20156 - protein, 635 aa, Oryza sativa
  Clone ID: TF_OSC900410j.C1.p5.gm
MPRYKPEYLFGVEGFVQELRTMSFVIGFGTAPFYAQIAHDRHEEKCRVKVTLNSNSEDIPSVMFEAGGRNYIHACQEVARIAIGELRDRYSDQLADTEYRYHPRQPQGSDRGSYLETEGIENDVTTKHLVEMLWAMDESRAETVLAAQDREDWNRGKICKLEDKVDRLEKELAALKGEAPPQKARIRLTARKRALFVPRYQLAPKVRVVEKEVAPAQADPPVIIISSDEEEESKRNNSKIEWVATQVDKDEPSIDLRCLEELETTAEPITWLEFTAAFRKTHIPSGVVSLKKKEFRSLTQGSRSVTEYLHEFNRLARYAPEDVRNDEERQEKFLGGLNDELSYPLMVGDYPDFQKLVDKAIRQEDKYNHMEQKKRRIAHFKAQQGNNQKPRLTLGPQSMPQGGSSSVVRPQRQFFNNNAGNNIRNQAPRPVAAPAQQQPAKREQGSKPVVCFNCGDPGHYADKCPKPRRVKVVPAQNNSAVPASKARVNHVAAAEAQDAPDVIFLVNSVPATVLFDSANELAEVKRQVDDLLQKGYIRPSSSPWGAPPSPSLGKTTVVLAKSSPSSFAPSPSPEITGAASPSSTRRFPPLPPCRRRRPLVFRRPLGHRWYTSDQSKTIRIAVPAVMGGSNNVFRD

SEQ ID NO: 20157 - protein, 953 aa, Oryza sativa
  Clone ID: TF_OSC9341j.C1.p1.fg
FASHQLHGPASEWWDHFRLNRTTAEPITWLEFTAAFRKTHIPSGVVSLKKKEFRSLSQGSRSVTEYLHEFNRLARYAPEDVRNDEERQEKFLGGLNDELSYPLMVGDYPDFQKLVDKAIRQEDKYNRMEQKKRRIAQFKTQQGNNQKPRLTLGPQPMPQGGSSSVVRPQRQFFNNNAGNNIRNLAPRPVAVPAQQQPAKREQGNKPVVCFNCGDPGHYADKCPKPRRVKVVPAQNNSAVPTSKARVNHVAAAEAQDAPDVILGMFLVNSVPATVLFDSGATHSFLSMSFAGNHGMEVEDLRCPLMVSTPSNQALSLQRSPSVRIEIQGVPFLANLILLESKDLDVILGMDWLARHKGVIDCANRKVTLNSYDGRVVTVHALSSESLRSRLNQITLEEIPIVREYPDVFPDDLPGMPPKRDIEFRIDLVPGTTPIHKRPYRMAANELAEVKRQVDDLLQKGYIRPSSSPWGAPVIFVEKKDHTQRMCVDYRALNDVTIKNKYPLPRIDDLFDQLKGATVFSKIDLRSGYHQLRIKEEDIPKTAFTTRYGLFECTVMSFGLTNAPAFFMNLMNKVFMEYLDKFVVVFIDDILIYSRTKEEHEEHLRLALEKLREHQLYAKFSKCEFWLSEVKFLGHIISAGGVAVDPSNVESVTNWKQPKTVSEIRSFLGLAGYYRRFIENFSKIAKPMTRLLQKDVKYKWSEECEQSFQELKSRLISAPILILPDPKKGFQVYCDASKLGLGCVLMQDGKVVAYASRQLRPHEKNYPTHDIELAAVVHALKIWRHYLFGTRTEVYTDHKSLKYIFTQSDLNMRQRRWLELIKDYDMGIHYHPGKANVVADALSRKGYCNATEGRQLPLELCKEFERLNLGIVGRGFVAALEAKPTLIDQVREAQINDPDIQEIKKNMRRGKAIGFLEDEHGTVWLGERICVPDNKDLKDAILKEAHDTLYSIHP

SEQ ID NO: 20158 - protein, 1061 aa, Oryza sativa
  Clone ID: TF_OSC26384j.C1.p3.fg
MGKNQGLEQVMGKLVDMLAKKLSEAPTTSNAVVPHTETMQKIELMQNDIKLEGVKNYLSWSKRALLILKTKGLEEYVTREIKEPESTSNVEWKTWSTTNSSVVAWLLTSLIPAIATTVETISSASEMWKTLTNLYSGEGNVMLMVEAQEKISAMRQGERSVAEYVAELKHLWSDLDHYDPLGRVIEFLKGLNSEFEGRRDAMFHQTTLPTLDEAIAAMAQEELKKKVLPSVTPSSPSATYVVAQSKETRECFNCGEMGHLMRDCRAPRKPSYGRGRFGDRGGARGGRSYAGRGNRGRGYEYRGDHRANVVTLEEGSSGPTNVDVANLVHSTSALIQIGYLTRVHLDMSRISLDRENCLIQERQIGKKLGIGVRRDGLWYLDQKETSEDVCLALMASTSEEEAKFIRTDNGGEYMNNEFSSFLSSEGILHQTSCPDTPPQNGVAERKNRHLLETARSLMYTMNVPKFLWSEAVMTATYLINRTPSRILGMKTPCEMIFGKNKFGVPPKVFGCTCFVRDHRPSIGKLDPRAVKCIFVGYSSCQKGYKCWSPLERRTFVSMDVTFREYVPFYGEKTDLSSLFIDLDDSTSGYDGQQMEGEILGPKGDEQSKKEKLVIGSIPCPIGGPVAQEQEWRKPHEEENLQVYTRRARCPVIQQVEEDNQVEEDVSHEQGSLESGGEDEEVREKGSDMPIAVRKGVRSNAGKKVVNCKWVYTIKQNPDGKVERYKARLVVKGYSQTYGIDYDETFAPVAKMSTLDVKNAFLHGDLQEEGCHTTILAVYVDDMIITWDDSIEIARLKENLSKEFEVKDLGMLSCRPASTPIEQNLKLCAESGDPVNKERYQRLVGRLIYLCHTRPDITYAVSVVSRYMHDPRSGHMDAVYRILRYLKGSPGKGLWFKRSGHLSLEGYCDADWASSLDDRRSTSGYCVFVGGNLVSWRSKKQPVVSRSTAEAEYRAMSVGLSEMLWLRNLLCELKLLKNTCMKLWCDNKSAINIANNPVQHDRTKHIEIDRFFIKEKLDEGMLKLDFVISGEQIADCLTKALGVAECLSMCNKMGMIDIYRPS

SEQ ID NO: 20159 - protein, 1563 aa, Oryza sativa
  Clone ID: TF_OSC400682j.C1.p3.fg
MEKGIIVSILALARGPSTHVYVNNDSNTEGVKLPEKNSQTTWHQSHAPGGRRRRTLAEGASAEVGVLGGGVGRQGEFALLQQLVECCLIKMGENQGLEQVMGKLVDMLAKKFSEVPTTSNAVIPHTETMQKIELMQNDIKLEGVKNYLSWSRRALLILKTKGLEGYVTGEVKEPESASAEWRTWSTTNSLVVAWLLTSLIPAIATTVETISSASEMWKTLTNLYSGEGNVMLMVEAQEKISVLRQGERSIAEYVAELKHLWSDLDHYDPLGLEHPDCIAKMRKWIERRRVIEFLKGLNPEFEGRKDAMFHQTTLPTLDEAIAAMAQDELKRKVLPKATPPSSSPTYAMLQGKETRECFNCGEMGHLMRDCRAPRKPSYGRGRSGDRGGARGGRGYAGRANRGRGYEYRGDHRANVVTLEEGCSGPTNVDVANLVHSISGNSNQAFMSINSSHSNWILDSGASRHVTGMCGEFASYKPYPFTRKETIETADGTSCPVKGEGTVQCTPSITLSSVLYVPSFPVNLISISSLVDHMDCRVSLDRENCLIQERQTGKKLGTGVRRDGLWYLDRKETSEDVCLALMASTSKEEAKVLLLHCRLGHISFETMSKMFPAELSRVNKHKLVCDACEYGKHTRTSYVSRGLRSMLPFMLIHSDVWTSPMVSMSGMKYFVTFIDCYSRMTWLYLMRHKDEVFKCFQNFYAYIKNHFNARVQFIRTDNGGEYINNEFSSFLSSEGILHQTSCPDTPPQNGVAERKNRHLLETARSLMYAMNVPKFLWSEAVMTATYLINRTPSRILGMQTPCEMIFGKNEFVVPPKVFGCTCFVRDHRPSVGKLDPWAVKCIFIGYPSGQKGYKCWSPSERRTFVSMDVTFRESVPFYGEKTDLSSLFVDLDNSTSGHDGQQMEGEILGPKGDEQSKKEKFVVGSIPCPMGGPVAQEQEWRKPHEEENLQVYTRRTRCPVIQQVEEDNQVEKDVSHEQGSLESRGEEEEVREESDLPIAVRKSVRSNAGKPPLRYGFEDQDEGDEENNISNFVSYDSLSSTYKAFVASLDSMEIPKDWREAKQDPRWHQAMLDELEALEKNKTWDLVPFPEGKKVVNCKWVYTVKQNPNGKVERYKARLVAKGYSQTYGIDYDETFAPVAKMSTVRTLISCAANFDWPLHQLDVKNAFLHGDLQEEVYMDIPPGFATSQTEGKVLRLKKSLYGLKQSPRAWFDRFRRAMCAMDYKQCNGDHTVFYHHSGDHITILAVYVDDMIITGNDCLEITRLKQNLSKEFEVKDLGQLKYFLGIEIARSPRGIVLSQRKYALDLLSDTGMLGCRPASTPIDQNHKLCAQSGNPVNKERYQRLVGRLIYLCHTRPDITYAVSMVSRYMHDPRSGHMDAVYRILRYLKGSPGKGLWFKKNGHLEVEGYCDADWASCPDDRRSTSGYCVFVGGNLVSWRSKKQPVVSRSTAEAEYRAMSVSLSELLWLRNLLSELKLSVDTPMKLWCDNKSAINIANNPVQHDRTKHVELDRFFIKEKLDEGVLELEFVTSSGQVADCLTKGLGVKECNRSCDKMGMIDIYHPS

SEQ ID NO: 20160 - protein, 412 aa, Oryza sativa
  Clone ID: TF_OSC400773j.C1.p32.fg
MAHGELKKKVLPSVTPSSPNPTYVVAQSKKIRECFNCGEMGHLMRDCRAPHKPSYGRGRYGDKGGARGGRGHAGRGNRGRGYEYRGDHKANVVTLEEGSSRPTNVDVANLVHSTSHNSNQAFMSINRSLSNWILDSGVSRHVTAALALLEIIDLLLENLILELSNASLYAIHLARRGISVGVHQNDEPFGHDSQQMEGEILGPKGHKLSKKEKFVVGSIPCPMSSPIAQEQEWSKPYEEENLQVYTSITRSPIIQQVEEDNQVVEDVSHDDSILRSYNFSVLSVLPIYSKLIKAGLRIWLYSGDADGRVPVIGSRYCVEALGLHIKRDWQPWYLNRQVAGRFVEYDGMTMVTIRGAGHLVPLNKPEEGLTLIDTFLLGLKLLVTFVGKASQVSSNYIDKIVLNIQRINKGKF

SEQ ID NO: 20161 - protein, 1061 aa, Oryza sativa
  Clone ID: TF_OSC403824j.C1.p5.fg
MGKNQGLEQVMGKLVDMLAKKLSEAPTTSNAVVPHTETMQKIELMQNDIKLEGVKNYLSWSKRALLILKTKGLEEYVTREIKEPESTSNVEWKTWSTTNSSVVAWLLTSLIPAIATTVETISSASEMWKTLTNLYSGEGNVMLMVEAQEKISAMRQGERSVAEYVAELKHLWSDLDHYDPLGRVIEFLKGLNSEFEGRRDAMFHQTTLPTLDEAIAAMAQEELKKKVLPSVTPSSPSATYVVAQSKETRECFNCGEMGHLMRDCRAPRKPSYGRGRFGDRGGARGGRGYAGRGNRGRGYEYRGDHRANVVTLEEGSSGPTNVDVANLVHSTSALIQIGYLTRVHLDMSRISLDRENCLIQERQIGKKLGIGVRRDGLWYLDQKETSEDVCLALMASTSEEEAKFIRTDNGGEYMNNEFSSFLSSEGILHQTSCPDTPPQNGVAERKNRHLLETARSLMYTMNVPKFLWSEAVMTATYLINRTPSRILGMKTPCEMIFGKNKFGVPPKVFGCTCFVRDHRPSIGKLDPRAVKCIFVGYSSCQKGYKCWSPLERRTFVSMDVTFREYVPFYGEKTDLSSLFIDLDDSTSGYDGQQMEGEILGPKGDEQSKKEKLVIGSIPCPIGGPVAQEQEWRKPHEEENLQVYTRRARCPVIQQVEEDNQVEEDVSHEQGSLESGGEDEEVREKGSDMPIAVRKGVRSNAGKKVVNCKWVYTIKQNPDGKVERYKARLVVKGYSQTYGIDYDETFAPVAKMSTLDVKNAFLHGDLQEEGCHTTILAVYVDDMIITWDDSIEIARLKENLSKEFEVKDLGMLSCRPASTPIEQNLKLCAESGDPVNKERYQRLVGRLIYLCHTRPDITYAVSVVSRYMHDPRSGHMDAVYRILRYLKGSPGKGLWFKRSGHLSLEGYCDADWASSLDDRRSTSGYCVFVGGNLVSWRSKKQPVVSRSTAEAEYRAMSVGLSEMLWLRNLLCELKLLKNTCMKLWCDNKSAINIANNPVQHDRTKHIEIDRFFIKEKLDEGMLKLDFVISGEQIADCLTKALGVAECLSMCNKMGMIDIYRPS

SEQ ID NO: 20162 - protein, 1453 aa, Oryza sativa
  Clone ID: TF_OSC422802j.C1.p10.fg
MGENQGLEQVMGKLVDMLAKKFSEAPTTSNAVIPHTETMQKIDLMQNDIKLEGVKNYLSWSRRALLILKTKGLEGYVTGEVKEPESASAEWRTWSTTNSLVVAWLLTSLIPAIATTVETISSASEMWKTLTNLYSGEGNVMLMVEAREKISALRQGERSIAEYVAELKHLWSDLDHYDPLGLEHPDCIAKMRKWIERRRVIEFLKGLNPEFEGRKDAMFHQTTLPTLDEAIAAMAQDELKRKVLPKATPPSSSPTYAMLQGKETRECFNCGEMGHLMRDCRAPRKPSYGRGRSGDRGGARGGRGYAGRANRGRGYEYRGDHRANVVTLEEGCSGPTNVDVANLVHSISGNSNQAFMSINSSHSNWILDSGASRHVTGMCGEFASYKPYPFTRKETIETADGTSCPVKGEGTVQCTPSITLSSVLYIPSFPVNLISISSLVDHMDCRVSLDRENCLIQERQTGKKLGTGIRRDGLWYLDRKETSEDVCLALMASTSKEEAKVLLLHCRLGHISFETMSKMFPAELSRVDKHKLVCDACEYGKHTRTSYVSRGLRSMLPFMLIHSDVWTSPMVSMSGMKYFVTFIDCYSRMTWLYLMRHKDEVFKCFQNFYAYIKNHFNARVQFIKTDNGGEYINNEFSSFLSSEGILHQTSYPDTPPQNGVAERKNRHLLETARSLMYAMNVPKFLWSEAVMTATYLINRTPSRILGMQTPCEMIFGKNEFVVPPKVFGCTCFVRDHRPSVGKLDPRAVKCIFIGYPSGQKGYKCWSPSERRTFVSMDVTFRESVPFYGEKTDLSSLFVDLDNSTSGHDGQQMEGEILGPKGDEQSKKEKFVVGSIPYPMGGPVAQEQEWRKPHEEENLQVYTRRTRCPVIQQVEEDNQVEKDVSHEQGSLESGGEEEEVREESDLPIAVRKSVRSNAGKPPLRYGFEDQDEGDEENNISNFVSYDSLSSTYKAFVASLDSMEIPKDWREAKQDPRWHQAMLDELEALEKNKTWDLVPFPEGKKVVNCKWVYTVKQNPNGKVERYKARLVAKGYSQTYGIDYDETFAPVAKMSTVRTLISCAANFDWPLHQLDVKNAFLHGDLQEEVYMDIPPGFATSQTEGKVLRLKKSLYGLKQSPRAWFDRFRRAMCAMDYKQCNGDHTVFYHHSGDHITILAVYVDDMIITGNDCLEITRLKQNLSKEFEVKDLGQLKYFLGIEIARSPRGIVLSQRKYALDLLSDTESGNPVNKERYQRLVGRLIYLCHTRPDITYAVSMVSRYMHDPRSGHMDAVYRILRYLKGSPGKGLWFKKNGHLEVEGYCDADWASCPDDRRSTSGYCVFVGGNLVSWRSKKQPVVSRSTAEAEYRAMSVSLSELLWLRNLLSELKLSVDTPMKLWCDNKSAINIANNPVQHDRTKHVELDRFFIKEKLDEGVLELEFVTSSGQVADCLTKGLGVKECNRSCDKMGMIDIYHPS

SEQ ID NO: 20163 - protein, 746 aa, Oryza sativa
  Clone ID: TF_OSC401006j.C1.p31.fg
MGPQIERVVDVSVSPPNDKELSSEEEEKCIHLNAQATNVLFSVLSEDVFKTIMPLKDAHLIWTTLKERYDKSKCDDVLFLEEPFEECSTSSPNCEEPQVTTFDDPDNHPTSTLSTHDYIEGNELVSKVDDRPILPLDSNNTDNEIVILHCVVDSCISPSPKYMCEDDMDKCSTSYSTCGTNLLKGEVNEPQWTSEESTSPRCSSSISKDHAFFMGKDGDFEFDHLSKKDITIVIKLMEIIKKQQACLIKKNEEIMSLTKEHKKLKDFRSSLIMRYKKLESEFACATNSIVCVASLEKQNQELKSQLEEITIKYVDLQERHDELLCSHDNLVDSHAMLEVAHEAIITTVKSYEPHVQVDLITCTNTCCSKENLSPSTTCDLDCVGKGEKQMYYGLVCIAQPSQDNREGMVNKLEKGSTVVCTKIHQRDIKSINAHTKGRNQKMIKSSITCFKYKKVGHHVRDCPWKKGNKLSKKDIPRIKCFKCTEAGHFASRSPCTLDEQCKTSSERQTGNKQTEKQYRSKSRLCYNCWAKGHIGKNCPKGNIPKPSLSFDYNLLRNAKNDICATRVICSPHTSPQAIWVPKSLVTNLYGPNVVGDQNVLKFYCGTKGFGKTARFAIKLIYHHAIEPGGSRWIPRRLQEDSLVTRRIKAEGSKLTRTCILKGYPSVQESRVRPQEVHDDQGGLLDQPQSTQVNLPQLTMKNMKNMLPKEDGVNAKPDRVMALQEEHKHYQDVDCDQGVKHVHDEKA

SEQ ID NO: 20164 - protein, 377 aa, Oryza sativa
  Clone ID: TF_OSC27738j.C1.p1.fg
MADNEKGNKVRSQDIGTSSSRVNEAPDTSRVTLVQHLINQNRLLIEILQQHQTPMLNLNQIQPQVQLEAVQALTPQVSMPPASRRTHDDVPPVDPKEASNICFTCDEQVHYARERPQQKRKTPMRTEDEVRKMIITSTEWPPPGMTRRQRRNTFRGAPQLTEHLLANGGRVSDSEDSDQVSSDDEDEMERKACSRCGEIGHVASSCATICVHCEEDHPPDRCPTSRITCFFCEGTDHVPKDCQFSFLLTKKMANQPASSNGEKHQGNTNPRQDYSFSLTPVPGQRNRNEKRKCRVREDICCFNCQGMGHFADKCPKPRNIAAGTSVHATPCNQKLAPQRIVIHASPKQSYSPRCNSSNSNECTTTRCQCSISAPATS

SEQ ID NO: 20165 - protein, 375 aa, Oryza sativa
  Clone ID: TF_OSC15261j.C1.p1.fg
MADNEKGNKVRSQDIGTSSSRVNEAPDTSCVTLVQHLINQNRLLIEILQQHQTPILNLSQIQPQVQLEAVQALTPQVSMPPASRRTHGDVPHVDPKEASNICFMCDEQGHYARERPQQKRKTPMRTEDEVRKMIITSTEWPPPGMTRRQRRNTFRGAPQLTEHLLASGGRVSDSEDSDQVSSDDEDEMERKACSRCGEVGHVASSCATTCVHCEEDHPPDRCPTSRITCFFCEGTDHVPKDCQFSFLLTKKMANQPASSNGEKHQGNTNPRQDYRFSLTPVPGQRNRNEKRKCRVREDICCFNCQGMGHFADKCPKPRNIAAGTSVHATPCNQKLAPQQIVIHASRSSPIARVATALTPASALLSRPGKLPFPER

SEQ ID NO: 20166 - protein, 538 aa, Oryza sativa
  Clone ID: TF_OSC900373j.C1.p11.np
MADNEKGNKVRSQDIGTSSSRVNEAPDTSCVTLVQHLINQNRLLIEILQQHQTPILNLSQIQPQVQLEAVQALTPQVSMPPASRRTHGDVPHVDPKEASNICFMCDEQGHYARERPQQKRKTPMRTEDEVRKMIITSTEWPPPGMTRRQRRNTFRGAPQLTEHLLASGGRVSDSEDSDQVSSDDEEMERKACSRCGEVGHVASSCATTCVHCEEDHPPDRCPTSRITCFFCEGTDHVPKDCQFSFLLTKKMANQPASSNGEKHQGNTNPRQDYRFSLTPVPGQRNRNEKRKCRVREDICCFNCQGMGHFADKCPKPRNIAAGTSVHATPCNQKLAPQQIVIHASRSSPIARVATALTPASALPQGVNAHFQPQPSVDKTEASIGIVPLDVPAQQPRNQVPDGEPEHKKVLSVTTVVPVKEADMPIAKWSLEQMQYQRVKSSTRYQMLHGVKSTSTGYQVDSEDMNHEKFGNGSIIELPQPSLSQPKGAPWSKSGEEKIPSATGGQAKQFRVVKFCWKFVKTQRKKSDKKRRPPNLSSC

SEQ ID NO: 20167 - protein, 394 aa, Oryza sativa
  Clone ID: TF_OSC6672j.C1.p1.fg
MLNLNQIQPQVQLEAVQALTPQVSMPPASRRTHDDVPPVDPKEASNICFTCDEQVHYARERPQQKRKTPMGTEDEVRKMIITSTEWPPPGMTRRQRRNTFRGAPQLTEHLLANGGRVSDSADSDQVSSDDEDEMERKACSRCGEIGHVASSCATICVHCEEGHPPDRLSIQFSADEEDGQPTRQFQRREASRQHQSSPRLQFQPNSSVRTEESNEKRKCRVREDICCFNCQGMGHFADKCPKPRNIAAGMSVHATPCNQKLAPQRIVIHASRSSPIARVATAPIPMNALPQGVNAQFQPQPPADKTEVSICVVPLEVPIQQLRNQVQDEEPECKKVIVCYNCSEEGHYSKNCPQPRQNRPPHFRQFTGSNHANHQVVSGANAVPVKPSASQKQP

SEQ ID NO: 20168 - protein, 1016 aa, Oryza sativa
  Clone ID: TF_OSC415629j.C1.p16.fg
MEPQLTPGAVQAIAEHPDGTGTIQPVLQVVDVRPVTTKNAPPTPKPAERFRMMLSDGVNTQQSMLATALNPLVKDATLRPGTVVQLTDFMCNTIQGKRSNSHSSLYVNMGDSEKVLRKMRFYLCHVSSNEILSLWGSIVSSCPMSTNIQPANMFQLATNLLARIIIVVKLDVLQNDCIVIGNPKHYEPKSLTKEQDPNLQASVAQTNNGTYSGGASMLGPSVAPRAEQAASNSSYGGPYNSAQGMLGSSIGRTVEPGPANVSAVGSYGAISAQNTTNANMMQPTSQLNIMNANTMQPTSQLNTMNANTMQPTSQLSSLNPNQNQRFAAPASGGVFGPPGNAYGQPSRPSYQQPPPVYMNRGPASRNDSATRIIPITALNPYQPKWTIKARVTAKSDIRHWSNARSSGTVFSFDLLDAQGGEIRAQCWKESADKFFGQIEVGRVYLISRGSLKPAQKKYNTLNHDYEITLDIGLSTVEVCSDDDNSIPRLQYNFRQISELENMANETIVDLLGVVTSVSPSATIMRKIGTETRKRSIQLKDLSGRSIEVTLWGNFCDAEGQQLQLQCDSGSNPIIAFKGARVGDFNGKSVSTIGSTQLIINPDFPEVERLRQWYMTEGKTAPCISLSREMLNMGRTDARKTIAQIKDENLGRLEKPDWITVKAAISHVTTESFCYPACPKLLPVGRQCNKKAINNGDGMWHCDRCDESFQNPEYRYMLRFQIQDHTGSTYASAFDEAGEQIFGRKAGELFSIRNVDQDDAQFAEIIEGVRWHLYLFKLKVKEETYNDEQSLKCTAVKVEKLDPSKESNVLLGAIDNLLLDPKGQSDLAPNAGFTDPVGGHGAPTSSNAYAMNTGGVNQFGQQASISAGMSTPLAATRNLQTCSICGANGHSAQICHVGADMDMQETSAGGSSMGNYNSIAGNGSSECYKCKQPGHYARDCPGQSTGGLECFKCKQPGHFSRDCPVQSTGGSECFKCKQPGHFARDCPGQSTGAQHQTYGNNVAASRGYNRQSFVGGY
